United States Patent Application Publication US 2018/0126003 A1 - sequence listing, part 46

SEQ ID NO: 78363 - DNA, 2853 bp, Artificial Sequence
  derived and/or modified sequence
atgagaagacccagaagacccggcggcctgggcggcagcggcggcctgagactgctgctgtgcctgctgctgctgagcagcagacccggcggctgcagcgccgtgagcgcccacggctgcctgttcgacagaagactgtgcagccacctggaggtgtgcatccaggacggcctgttcggccagtgccaggtgggcgtgggccaggccagacccctgctgcaggtgaccagccccgtgctgcagagactgcagggcgtgctgagacagctgatgagccagggcctgagctggcacgacgacctgacccagtacgtgatcagccaggagatggagagaatccccagactgagaccccccgagcccagacccagagacagaagcggcctggcccccaagagacccggccccgccggcgagctgctgctgcaggacatccccaccggcagcgcccccgccgcccagcacagactgccccagccccccgtgggcaagggcggcgccggcgccagcagcagcctgagccccctgcaggccgagctgctgccccccctgctggagcacctgctgctgcccccccagcccccccaccccagcctgagctacgagcccgccctgctgcagccctacctgttccaccagttcggcagcagagacggcagcagagtgagcgagggcagccccggcatggtgagcgtgggccccctgcccaaggccgaggcccccgccctgttcagcagaaccgccagcaagggcatcttcggcgaccaccccggccacagctacggcgacctgcccggccccagccccgcccagctgttccaggacagcggcctgctgtacctggcccaggagctgcccgcccccagcagagccagagtgcccagactgcccgagcagggcagcagcagcagagccgaggacagccccgagggctacgagaaggagggcctgggcgacagaggcgagaagcccgccagccccgccgtgcagcccgacgccgccctgcagagactggccgccgtgctggccggctacggcgtggagctgagacagctgacccccgagcagctgagcaccctgctgaccctgctgcagctgctgcccaagggcgccggcagaaaccccggcggcgtggtgaacgtgggcgccgacatcaagaagaccatggagggccccgtggagggcagagacaccgccgagctgcccgccagaaccagccccatgcccggccaccccaccgccagccccaccagcagcgaggtgcagcaggtgcccagccccgtgagcagcgagccccccaaggccgccagaccccccgtgacccccgtgctgctggagaagaagagccccctgggccagagccagcccaccgtggccggccagcccagcgccagacccgccgccgaggagtacggctacatcgtgaccgaccagaacgtggtgggccccgccctgaccttcagaatcagacacaacgagcagaacctgagcctggccgacgtgacccagcaggccggcctggtgaagagcgagctggaggcccagaccggcctgcagatcctgcagaccggcgtgggccagagagaggaggccgccgccgtgctgccccagaccgcccacagcaccagccccatgagaagcgtgctgctgaccctggtggccctggccggcgtggccggcctgctggtggccctggccgtggccctgtgcgtgagacagcacgccagacagcaggacaaggagagactggccgccctgggccccgagggcgcccacggcgacaccaccttcgagtaccaggacctgtgcagacagcacatggccaccaagagcctgttcaacagagccgagggcccccccgagcccagcagagtgagcagcgtgagcagccagttcagcgacgccgcccaggccagccccagcagccacagcagcacccccagctggtgcgaggagcccgcccaggccaacatggacatcagcaccggccacatgatcctggcctacatggaggaccacctgagaaacagagacagactggccaaggagtggcaggccctgtgcgcctaccaggccgagcccaacacctgcgccaccgcccagggcgagggcaacatcaagaagaacagacaccccgacttcctgccctacgaccacgccagaatcaagctgaaggtggagagcagccccagcagaagcgactacatcaacgccagccccatcatcgagcacgaccccagaatgcccgcctacatcgccacccagggccccctgagccacaccatcgccgacttctggcagatggtgtgggagagcggctgcaccgtgatcgtgatgctgacccccctggtggaggacggcgtgaagcagtgcgacagatactggcccgacgagggcgccagcctgtaccacgtgtacgaggtgaacctggtgagcgagcacatctggtgcgaggacttcctggtgagaagcttctacctgaagaacgtgcagacccaggagaccagaaccctgacccagttccacttcctgagctggcccgccgagggcacccccgccagcaccagacccctgctggacttcagaagaaaggtgaacaagtgctacagaggcagaagctgccccatcatcgtgcactgcagcgacggcgccggcagaaccggcacctacatcctgatcgacatggtgctgaacagaatggccaagggcgtgaaggagatcgacatcgccgccaccctggagcacgtgagagaccagagacccggcctggtgagaagcaaggaccagttcgagttcgccctgaccgccgtggccgaggaggtgaacgccatcctgaaggccctgccccagtag

SEQ ID NO: 78364 - protein, 889 aa, Artificial Sequence
  derived and/or modified sequence
MSQGLSWHDDLTQYVISQEMERIPRLRPPEPRPRDRSGLAPKRPGPAGELLLQDIPTGSAPAAQHRLPQPPVGKGGAGASSSLSPLQAELLPPLLEHLLLPPQPPHPSLSYEPALLQPYLFHQFGSRDGSRVSEGSPGMVSVGPLPKAEAPALFSRTASKGIFGDHPGHSYGDLPGPSPAQLFQDSGLLYLAQELPAPSRARVPRLPEQGSSSRAEDSPEGYEKEGLGDRGEKPASPAVQPDAALQRLAAVLAGYGVELRQLTPEQLSTLLTLLQLLPKGAGRNPGGVVNVGADIKKTMEGPVEGRDTAELPARTSPMPGHPTASPTSSEVQQVPSPVSSEPPKAARPPVTPVLLEKKSPLGQSQPTVAGQPSARPAAEEYGYIVTDQKPLSLAAGVKLLEILAEHVHMSSGSFINISVVGPALTFRIRHNEQNLSLADVTQQAGLVKSELEAQTGLQILQTGVGQREEAAAVLPQTAHSTSPMRSVLLTLVALAGVAGLLVALAVALCVRQHARQQDKERLAALGPEGAHGDTTFEYQDLCRQHMATKSLFNRAEGPPEPSRVSSVSSQFSDAAQASPSSHSSTPSWCEEPAQANMDISTGHMILAYMEDHLRNRDRLAKEWQALCAYQAEPNTCATAQGEGNIKKNRHPDFLPYDHARIKLKVESSPSRSDYINASPIIEHDPRMPAYIATQGPLSHTIADFWQMVWESGCTVIVMLTPLVEDGVKQCDRYWPDEGASLYHVYEVNLVSEHIWCEDFLVRSFYLKNVQTQETRTLTQFHFLSWPAEGTPASTRPLLDFRRKVNKCYRGRSCPIIVHCSDGAGRTGTYILIDMVLNRMAKGVKEIDIAATLEHVRDQRPGLVRSKDQFEFALTAVAEEVNAILKALPQ

SEQ ID NO: 78365 - DNA, 2670 bp, Artificial Sequence
  derived and/or modified sequence
atgtcacaggggctgtcttggcacgatgacctgactcaatacgtcatcagccaggagatggagaggattcccagactgcggccccctgaacccagacctagagacagaagcggccttgcacccaaaagacctggcccggcaggggagctcctattgcaggatattcccactggcagcgcccctgccgcgcagcaccgcctgccccagcctcctgtcggaaaggggggggctggagccagcagcagtctcagtcccctacaggcagagcttctgccgccgctgctcgagcacctcctcctgcccccccaacctccacacccatcattgtcctatgagcccgcgctactacagccctatttgttccatcaattcggcagcagagacggatcgagggttagcgagggatcccccggaatggtctccgttggcccactgcccaaggcagaagctccggcactgttctcacgaactgctagcaaaggcatcttcggcgatcaccccggacacagctatggagacttgccaggcccttcccccgcccagctctttcaggacagcgggttactttaccttgcacaggagcttcctgctccgagtcgcgcccgagtcccaagactgcccgagcagggctcctcctccagggcggaggactctcccgagggctatgagaaggaaggactgggggacagaggggaaaaaccagcttctcctgcagtgcagcccgacgccgccctccaacggctggcagctgtgttagccggttacggcgtagagctgcggcagttgacgccagaacagctgtcaacactattgacattgcttcagctgctgccaaaaggggccgggagaaatccgggtggcgttgtgaacgtgggagccgatattaagaaaacaatggaggggccagttgagggtagagataccgcggaactcccagcacggacatctcctatgccggggcatcccacggcttcccccacatcctccgaggtgcaacaggtcccaagtccagtgtccagcgaacctcctaaggctgccagaccccctgtgactccagtactgttagaaaagaagtctccgctcgggcagagccagcccacagttgctggacagccatccgcccgccctgcagccgaggagtacggatatattgtgactgaccagaagcccttaagtctcgctgctggagtaaaattgctggagatacttgctgagcacgtacacatgagctcagggtcatttattaatatttccgtggtgggacccgccctcaccttcaggattcgccacaacgaacagaatcttagcctggcagatgtaactcagcaggctggcctcgtgaagtcagagttagaagcccagacaggattgcaaatcctgcagactggagttggccagcgtgaggaggctgctgctgttcttccgcagactgcacacagcaccagcccaatgagatccgtgctccttactcttgtcgccctggcgggggtcgctgggttgctcgtggcccttgccgttgccctgtgtgtccgccaacacgcacgacagcaggataaagagaggctggccgccctaggccccgagggggcccatggtgacacgacattcgaataccaggatctgtgcaggcaacacatggccaccaagagcctgttcaaccgcgctgaagggccgccagagccgagcagagtctcatcggtgagctcacagttttctgacgccgcgcaggcctccccgtcatcgcatagctccaccccttcctggtgcgaagaaccggcacaggcaaacatggacatttccacgggacacatgatactggcctacatggaagaccatctgcggaaccgcgaccggctggctaaggaatggcaggctctctgcgcatatcaagcggagcccaatacctgcgcgacagctcagggtgaaggcaatatcaagaaaaacagacaccccgactttctaccctatgaccatgcccggattaagctgaaagttgagagcagtccatccagatcagactacatcaacgcttcaccgattatagaacatgacccccgtatgcccgcatatattgccactcagggcccgctgagccacacaatcgcggacttctggcaaatggtatgggagtccgggtgcactgttatagttatgttaacacccctcgttgaggatggcgtgaaacagtgcgataggtattggccagacgaaggcgccagcttgtatcacgtttatgaggtcaatctcgtgtctgagcacatttggtgtgaagatttcctggtgaggagcttttatcttaagaatgttcagacccaggagactagaacactgacacagttccattttctatcctggcccgcagagggaactcctgcttccacaagaccgttactggacttccgccgcaaagtgaataagtgctacagaggaagaagctgtccgattattgttcattgctctgatggggcgggccggacaggcacatatatactcatcgacatggtattgaataggatggcgaaaggagttaaagagattgatattgctgctacgctggagcatgtacgtgaccaacgacccgggctggtgagatctaaggatcagttcgagttcgctctgactgctgtggctgaggaggttaatgctatcctcaaggcactcccccagtag

SEQ ID NO: 78366 - DNA, 2670 bp, Artificial Sequence
  derived and/or modified sequence
atgagccagggcctgtcctggcatgatgacctgacccagtatgtgatcagccaggagatggagcgcatcccccggctgcggcccccagagccccggccccgggacagaagtggcctggcccccaagaggcctggccctgctggggagctgctgctgcaggacatccccactggaagtgccccagctgcccagcaccggctgccccagccccctgtgggcaagggcggggccggggccagcagcagcctgagccccctgcaggccgagctgctgccccccctgctggagcacctgctgctgcccccccagcccccccaccccagcctgtcctatgagcccgccctgctgcagccctacctgttccaccagtttggcagcagagatggcagccgggtgtctgagggcagccctggcatggtgtctgtgggccccctgcccaaggccgaggccccagccctcttcagcaggacagccagcaagggcatctttggagaccaccctggccacagctatggagacctgcccggccccagccctgcccagctgttccaggacagcggcctgctgtacctggcccaggagctgcctgcccccagccgggcccgggtgccccggctgcctgagcagggcagcagcagcagagctgaggacagccctgagggctatgagaaggagggcctgggggacagaggagagaagccagccagccctgctgtgcagccagatgctgccctgcagaggctggccgctgtgctggccggctatggagtggagctgcggcagctgaccccagagcagctgagcaccctgctgaccctgctgcagctgctgcccaagggagctggaagaaatcctggaggagtggtgaatgtgggcgctgacatcaagaagaccatggagggccctgtggagggccgggacacagctgagctgcctgcccggaccagccccatgcctggccaccccacagccagccccaccagcagcgaggtgcagcaggtgcccagccctgtgagcagcgagccccccaaggccgcccggccccctgtgacccctgtgctgctggagaagaagagccccctgggccagagccagcccaccgtggccggccagcccagcgcccggcctgctgctgaggagtatggctacatcgtgacagaccagaagcccctgagcctggccgccggcgtgaagctgctggagatcctggccgagcacgtgcacatgagcagcggcagcttcatcaacatctctgtggtgggccctgccctgaccttccgcatccgccacaatgagcagaacctgagcctggctgatgtgacccagcaggccggcctggtgaagtctgagctggaggcccagacaggcctgcagatcctgcagacaggagtgggccagcgggaggaggccgctgctgtgctgccccagacagcccacagcaccagccccatgaggtctgtgctgctgaccctggtggccctggccggcgtggccggcctgctggtggccctggccgtggccctgtgtgtgcggcagcacgcccggcagcaggacaaggagcggctggccgccctgggccctgagggcgcccatggagacaccacctttgagtaccaggacctgtgccggcagcacatggccaccaagagcctcttcaacagagctgagggccccccagagcccagccgggtgtcctctgtgagcagccagttcagtgatgctgcccaggccagccccagcagccacagcagcacccccagctggtgtgaggagcccgcccaggccaacatggacatcagcacaggccacatgatcctggcctacatggaggaccacctgaggaacagagaccggctggccaaggagtggcaggccctgtgtgcctaccaggccgagcccaacacctgtgccacagcccagggcgagggcaacatcaagaagaacagacacccagacttcctgccctatgaccacgcccgcatcaagctgaaggtggagagcagccccagcagaagtgactacatcaatgccagccccatcattgaacatgaccccaggatgcctgcctacatcgccacccagggccccctgagccacaccatcgctgacttctggcagatggtgtgggagagcggctgcaccgtcatcgtgatgctgacccccctggtggaggatggagtgaagcagtgtgaccgctactggccagatgagggcgccagcctgtaccacgtgtatgaggtgaacctggtgtctgagcacatctggtgtgaggacttcctggtgcgctccttctacctgaagaatgtgcagacccaggagaccaggaccctgacccagttccacttcctgtcctggccagctgagggcaccccagccagcacccggcccctgctggacttccggaggaaggtgaacaagtgctaccggggccgcagctgccccatcatcgtgcactgcagtgatggagctggccgcacaggcacctacatcctgattgacatggtgctgaacaggatggccaagggcgtgaaggagattgatattgctgccaccctggagcacgtgcgggaccagaggcctggcctggtgcgcagcaaggaccagtttgaatttgccctgacagctgtggccgaggaggtgaatgccatcctgaaggccctgccccagtag

SEQ ID NO: 78367 - DNA, 2670 bp, Artificial Sequence
  derived and/or modified sequence
atgagccagggcctgagctggcacgacgacctgacccagtacgtgatcagtcaagaaatggagaggatacctcgtttacgcccccccgaaccgagacccagggatcgctcgggcttggcccctaagcgaccaggccccgcgggagagttactccttcaagacatcccgaccggatccgctccagccgcccagcaccgccttccccagccccccgtgggaaagggcggagctggagcctccagctctttgtccccgcttcaggccgagcttctgcctcccctcctcgaacacctgctgctgcccccacagcccccacatcctagcctgagctatgaacctgccttgttacagccatacctgtttcaccaatttggtagccgggacggatctagggttagtgagggctcccctggcatggttagtgttgggccgctgcctaaggcagaagcacccgctttattctcccgaacagcaagcaagggaatattcggggatcatcctgggcactcgtatggagacttgcctggcccaagccccgctcaactatttcaggattctggcctgctgtacttagctcaggagctgcctgcaccctcgcgggctcgagtgccgagattgcctgagcagggttcaagctccagggccgaggactcccctgaggggtatgaaaaggaggggctaggagataggggcgaaaagcccgcctcacctgctgtgcagcctgacgctgcgctgcagcgtctggccgccgtgttggctggctacggagtcgagctgcgccagctcacgcccgagcagctgagtacactccttaccctgcttcagcttctccccaagggcgccgggcgcaatccaggtggggttgtgaacgtcggagccgatattaagaaaaccatggaaggccccgtggagggacgggatacagcagaactccctgctagaacctctccaatgcctggtcatccaacagcgagccctacaagctctgaggtgcagcaggttcccagtccagtctcatccgagccacccaaagctgccagacccccagtgactcctgtacttctcgaaaaaaagtcccccttgggacagtctcagccaaccgtggccggtcagccgtccgcaagaccagccgccgaagagtacggctatatcgttactgaccagaagcctctgagccttgctgccggcgtgaaactgctagagatacttgctgaacacgtccacatgtcctcagggagctttatcaacatttccgttgtaggccccgctctgacttttaggatccgccataacgaacagaacttgagcctcgctgacgtaactcagcaggctggactggtcaagtcagaactggaggcacaaaccggattgcaaatcctccagactggcgtcggacagcgtgaggaagccgctgcagttctgccacagaccgctcacagtacttctcctatgcgaagcgttctgctgactctcgtcgccctggcaggtgtcgctgggcttcttgtcgcattggcagtggctctctgtgtgagacaacacgcccggcaacaggataaagaacggctggccgctttgggacccgaaggagctcacggggataccaccttcgagtatcaggatctgtgccgtcagcacatggccacaaaatctttatttaacagggctgaagggccccctgaaccctccagggtgagctccgtgtcctctcaattcagcgatgctgcccaggcttccccgagttcacacagctcaaccccctcttggtgcgaagagccggcccaggccaatatggacatctcaacggggcatatgatcctcgcatatatggaggaccatctaagaaaccgggatcggcttgcgaaggagtggcaggccctctgcgcctaccaggcggagcctaatacatgtgcaacagcccaaggagaaggtaatataaaaaaaaaccggcaccccgatttcctgccttacgatcatgcccgaattaagctgaaggtcgagtcttccccaagccgctctgactacatcaacgcatcaccgatcatcgaacacgatcctcggatgcctgcttacatcgctacacagggacccctttctcataccatagccgatttctggcagatggtttgggaatcaggttgcactgtcatcgtcatgttaacccctctggttgaagacggagtgaaacagtgtgatcgttactggcctgatgaaggcgccagtctctaccatgtatacgaggtgaatctggtcagtgaacacatatggtgcgaggatttcctcgtgcgttccttctacttaaagaacgtacagactcaggagacaaggacactgacgcagttccactttctgtcctggccggccgagggaactcccgcgtctactcgccctctgctggacttcagaaggaaggtgaataagtgttaccgaggacggagttgccccattatagtgcactgctctgacggggctggcaggaccggaacgtacattttgatcgacatggttctaaacaggatggccaaaggcgtgaaagaaatcgacattgctgctaccctggaacacgtcagagatcaaaggcccggactggttcggtctaaagaccaattcgagttcgcgctaaccgccgtggccgaggaggtgaatgcaatactcaaggcccttccccaatag

SEQ ID NO: 78368 - DNA, 2670 bp, Artificial Sequence
  derived and/or modified sequence
atgagccaagggctctcctggcatgacgacctcactcaatatgttatcagccaggagatggagagaatccctaggctgcgcccacctgagccacggccacgcgaccgaagcgggttggccccaaagcggcctggacctgccggagaacttctcctccaggacattcccactggtagcgcacctgcggctcagcatcggctgccgcagccccctgttggcaaagggggtgcaggagcatcctccagtctctctccgctgcaggcagaactgctcccgccactccttgaacatctcctgctgccacctcagccaccccatcccagtctgtcatatgagcccgctctcctgcagccatatctgttccaccagttcggcagccgtgatggctcacgtgtaagcgagggcagtcctggaatggtgtccgtgggacctctgcctaaggccgaggccccagcactgttttccagaactgcatcgaaaggcatatttggcgatcatccaggccatagctacggggatctgccaggcccttccccagcccagttatttcaggacagcgggcttttatatcttgcgcaggagttgccagcaccctcacgagctagagtgccacggctgccagaacagggctctagtagccgggcagaggactccccagaggggtacgagaaagagggattaggagatcgaggggagaaaccggcttctcctgctgtccaaccagacgctgccttgcagcggctcgcagccgttttggctgggtatggggttgaactgaggcagcttacacctgaacagctgtctacgctgctgacactactgcaattgctgccaaaaggggcaggcaggaatcctggcggagtcgtcaacgtgggcgcagatattaaaaagacaatggaagggccagtggaaggaagggacacagcagagctccccgcacgcacgagtcctatgccgggacaccccactgccagtcctaccagcagcgaggtacagcaggtgccttcccctgtgagttctgagcccccaaaagcggcacgccctcctgtgacaccggttcttctggaaaagaaaagtcctctaggtcaaagccaacccacagttgccggtcaacctagcgcacgacccgcagccgaagaatacggctacatcgtaaccgatcagaagccgttaagcttagcggctggcgtcaaattgctggagattttggcagaacacgttcacatgagttccgggtcttttattaacataagcgtggtgggccctgcccttacatttcgaatcaggcacaacgagcagaacctaagcctcgctgacgtgacacagcaggcgggactggtgaaaagtgagctcgaggctcaaacgggattgcagatcctgcaaaccggcgtaggccagcgggaggaggccgctgctgtcctgccccaaacggcacactctacaagtccaatgcgctccgtgcttctcactctggtcgcactggcgggtgtggccggactcctggtggctttggccgtggccttgtgcgtccgtcagcacgctcgacaacaggataaggagaggttggctgccctgggacctgagggcgctcatggagataccacttttgaataccaagatctatgccggcagcatatggccactaagtcactctttaatagggccgaggggcctccagagccttcaagagtgtcaagcgttagctcacaatttagtgatgcagcccaggcatccccatcaagccattcctctactccatcttggtgtgaggagcccgctcaggcaaacatggatattagcactggacatatgatattggcatatatggaagatcatttacgcaatagggacagactagctaaggagtggcaggcgctgtgcgcttaccaggcagaacctaacacctgcgccacagcccagggtgagggcaatattaagaagaacaggcatcctgatttcctgccctatgatcatgcgagaatcaagctcaaggttgaaagtagccctagcagatctgactatatcaatgcttccccaattattgagcatgacccacggatgccagcatatattgccacccagggcccacttagccatactattgccgatttctggcagatggtctgggaatcaggctgcaccgtaatagtgatgttgacacccttggtggaagacggtgtaaagcaatgcgaccggtactggcctgatgagggggcttcactctaccacgtttacgaggtgaacctggttagcgaacatatctggtgtgaagactttctcgtgaggtctttctacctcaagaacgttcagactcaggagacccgaactttgactcagttccacttcctgtcctggccagccgagggtacccccgcatccaccaggccgttacttgatttccggcgaaaggtcaacaagtgttaccggggaaggtcttgtccgattattgtccactgcagtgacggggctggcagaaccgggacctacattctgatcgacatggtgctcaatcggatggctaagggggtcaaagaaatcgatattgccgcaacccttgagcatgtcagagatcaacgcccaggactggtgcgctcgaaagaccagtttgagttcgccttgaccgctgtcgccgaagaggtcaatgctatactgaaggccctccctcaatag

SEQ ID NO: 78369 - DNA, 1076 bp, Artificial Sequence
  derived and/or modified sequence
agcgcccggagctcggaaagatgcggcgcccgcggcggcctgggggtctcgggggatccgggggtctccggctgctcctctgcctcctgctgctgagcagccgcccggggggctgcagcgccgttagtgcccacggctgtctatttgaccgcaggctctgctctcacctggaagtctgtattcaggatggcttgtttgggcagtgccaggtgggagtggggcaggcccggccccttttgcaagtcacctccccagttctccaacgcttacaaggtgtgctccgacaactcatgtcccaaggattgtcctggcacgatgacctcacccagtatgtgatctctcaggagatggagcgcatccccaggcttcgccccccagagccccgtccaagggacaggtctggcttggcacccaagagacctggtcctgctggagagctgcttttacaggacatccccactggctccgcccctgctgcccagctcctctctgtcccctctgcaggctgagctgctcccgcctctcttggagcacctgctgctgcccccacagcctccccacccttcactgagttacgaacctgccttgctgcagccctacctgttccaccagtttggctcccgtgatggctccagggtctcagagggctccccagggatggtcagtgtcggccccctgcccaaggctgaagcccctgccctcttcagcagaactgcctccaagggcatatttggggaccaccctggccactcctacggggaccttccagggccttcacctgcccagctttttcaagactctgggctgctctatctggcccaggagttgccagcacccagcagggccagggtgccaaggctgccagagcaagggagcagcagccgggcagaggactccccagagggctatgagaaggaaggactaggggatcgtggagagaagcctgcttccccagctgtgcagccagatgcggctctgcagaggctggccgctgtgctggcgggctatggggtagagctgcgtcagctgacccctgagcagctctccacactcctgaccctgctgcagctactgcc

SEQ ID NO: 78370 - DNA, 2670 bp, Artificial Sequence
  derived and/or modified sequence
atgagccagggcctgagctggcacgacgacctgacccagtacgtgatcagccaggagatggagagaatccccagactgagaccccccgagcccagacccagagacagaagcggcctggcccccaagagacccggccccgccggcgagctgctgctgcaggacatccccaccggcagcgcccccgccgcccagcacagactgccccagccccccgtgggcaagggcggcgccggcgccagcagcagcctgagccccctgcaggccgagctgctgccccccctgctggagcacctgctgctgcccccccagcccccccaccccagcctgagctacgagcccgccctgctgcagccctacctgttccaccagttcggcagcagagacggcagcagagtgagcgagggcagccccggcatggtgagcgtgggccccctgcccaaggccgaggcccccgccctgttcagcagaaccgccagcaagggcatcttcggcgaccaccccggccacagctacggcgacctgcccggccccagccccgcccagctgttccaggacagcggcctgctgtacctggcccaggagctgcccgcccccagcagagccagagtgcccagactgcccgagcagggcagcagcagcagagccgaggacagccccgagggctacgagaaggagggcctgggcgacagaggcgagaagcccgccagccccgccgtgcagcccgacgccgccctgcagagactggccgccgtgctggccggctacggcgtggagctgagacagctgacccccgagcagctgagcaccctgctgaccctgctgcagctgctgcccaagggcgccggcagaaaccccggcggcgtggtgaacgtgggcgccgacatcaagaagaccatggagggccccgtggagggcagagacaccgccgagctgcccgccagaaccagccccatgcccggccaccccaccgccagccccaccagcagcgaggtgcagcaggtgcccagccccgtgagcagcgagccccccaaggccgccagaccccccgtgacccccgtgctgctggagaagaagagccccctgggccagagccagcccaccgtggccggccagcccagcgccagacccgccgccgaggagtacggctacatcgtgaccgaccagaagcccctgagcctggccgccggcgtgaagctgctggagatcctggccgagcacgtgcacatgagcagcggcagcttcatcaacatcagcgtggtgggccccgccctgaccttcagaatcagacacaacgagcagaacctgagcctggccgacgtgacccagcaggccggcctggtgaagagcgagctggaggcccagaccggcctgcagatcctgcagaccggcgtgggccagagagaggaggccgccgccgtgctgccccagaccgcccacagcaccagccccatgagaagcgtgctgctgaccctggtggccctggccggcgtggccggcctgctggtggccctggccgtggccctgtgcgtgagacagcacgccagacagcaggacaaggagagactggccgccctgggccccgagggcgcccacggcgacaccaccttcgagtaccaggacctgtgcagacagcacatggccaccaagagcctgttcaacagagccgagggcccccccgagcccagcagagtgagcagcgtgagcagccagttcagcgacgccgcccaggccagccccagcagccacagcagcacccccagctggtgcgaggagcccgcccaggccaacatggacatcagcaccggccacatgatcctggcctacatggaggaccacctgagaaacagagacagactggccaaggagtggcaggccctgtgcgcctaccaggccgagcccaacacctgcgccaccgcccagggcgagggcaacatcaagaagaacagacaccccgacttcctgccctacgaccacgccagaatcaagctgaaggtggagagcagccccagcagaagcgactacatcaacgccagccccatcatcgagcacgaccccagaatgcccgcctacatcgccacccagggccccctgagccacaccatcgccgacttctggcagatggtgtgggagagcggctgcaccgtgatcgtgatgctgacccccctggtggaggacggcgtgaagcagtgcgacagatactggcccgacgagggcgccagcctgtaccacgtgtacgaggtgaacctggtgagcgagcacatctggtgcgaggacttcctggtgagaagcttctacctgaagaacgtgcagacccaggagaccagaaccctgacccagttccacttcctgagctggcccgccgagggcacccccgccagcaccagacccctgctggacttcagaagaaaggtgaacaagtgctacagaggcagaagctgccccatcatcgtgcactgcagcgacggcgccggcagaaccggcacctacatcctgatcgacatggtgctgaacagaatggccaagggcgtgaaggagatcgacatcgccgccaccctggagcacgtgagagaccagagacccggcctggtgagaagcaaggaccagttcgagttcgccctgaccgccgtggccgaggaggtgaacgccatcctgaaggccctgccccagtag

SEQ ID NO: 78371 - protein, 1133 aa, Artificial Sequence
  derived and/or modified sequence
MRFVLSGNLHGGSVVASYPFDDSPEHKATGIYSKTSDDEVFKYLAKAYASNHPIMKTGEPHCPGDEDETFKDGITNGAHWYDVEGGMQDYNYVWANCFEITLELSCCKYPPASQLRQEWENNRESLITLIEKVHIGVKGFVKDSITGSGLENATISVAGINHNITTGRFGDFYRLLVPGTYNLTVVLTGYMPLTVTNVVVKEGPATEVDFSLRPTVTSVIPDTTEAVSTASTVAIPNILSGTSSSYQPIQPKDFHHHHFPDMEIFLRRFANEYPNITRLYSLGKSVESRELYVMEISDNPGVHEPGEPEFKYIGNMHGNEVVGRELLLNLIEYLCKNFGTDPEVTDLVHNTRIHLMPSMNPDGYEKSQEGDSISVIGRNNSNNFDLNRNFPDQFVQITDPTQPETIAVMSWMKSYPFVLSANLHGGSLVVNYPFDDDEQGLATYSKSPDDAVFQQIALSYSKENSQMFQGRPCKNMYPNEYFPHGITNGASWYNVPGGMQDWNYLQTNCFEVTIELGCVKYPLEKELPNFWEQNRRSLIQFMKQVHQGVRGFVLDATDGRGILNATISVAEINHPVTTYKTGDYWRLLVPGTYKITASARGYNPVTKNVTVKSEGAIQVNFTLVRSSTDSNNESKKGKGASSSTNDASDPTTKEFETLIKDLSAENGLESLMLRSSSNLALALYRYHSYKDLSEFLRGLVMNYPHITNLTNLGQSTEYRHIWSLEISNKPNVSEPEEPKIRFVAGIHGNAPVGTELLLALAEFLCLNYKKNPAVTQLVDRTRIVIVPSLNPDGRERAQEKDCTSKIGQTNARGKDLDTDFTNNASQPETKAIIENLIQKQDFSLSVALDGGSMLVTYPYDKPVQTVENKETLKHLASLYANNHPSMHMGQPSCPNKSDENIPGGVMRGAEWHSHLGSMKDYSVTYGHCPEITVYTSCCYFPSAARLPSLWADNKRSLLSMLVEVHKGVHGFVKDKTGKPISKAVIVLNEGIKVQTKEGGYFHVLLAPGVHNIIAIADGYQQQHSQVFVHHDAASSVVIVFDTDNRIFGLPRELVVTVSGATMSALILTACIIWCICSIKSNRHKDGFHRLRQHHDEYEDEIRMMSTGSKKSLLSHEFQDETDTEEETLYSSKH

SEQ ID NO: 78372 - DNA, 3402 bp, Artificial Sequence
  derived and/or modified sequence
atgcgctttgtgctttccggtaatctgcatggtggtagcgtcgtagcttcttaccctttcgacgattctccggaacataaggccactggcatctactctaagacaagtgacgatgaggtgtttaagtacctcgctaaggcatatgcgagtaatcatcctatcatgaaaaccggcgaaccccactgtccgggcgacgaagatgagacgtttaaggatggcatcaccaacggcgcgcattggtatgatgtggagggtgggatgcaggattacaactatgtgtgggcgaactgcttcgagatcaccttggagctttcctgctgcaaatacccccctgcctcacagctccgacaggaatgggaaaataatagggagtctctcattactcttattgaaaaagtacatataggcgtgaaagggttcgtcaaggattctataaccggctcgggcctggaaaacgctactatatctgtggcagggatcaatcacaatataacaacaggtcggtttggtgatttctaccggttactcgttccaggaacatacaatttaaccgtggttctgacaggctatatgcctctcacagttaccaacgtcgttgtcaaggagggaccagcgactgaggtggatttctctctccggcctacggtaacaagcgtgattcccgacacaactgaggccgtgtccactgcgagcacagtggccatcccgaacatcttgagcggcacaagtagcagttatcagcctatacaacccaaagacttccatcaccaccattttcccgacatggagatcttcctcagaaggtttgctaatgaataccctaacattacccggctctactctctgggtaagagtgtagaaagtagggaactgtacgtgatggagatcagcgacaatcccggggttcacgaaccaggcgagccagaatttaaatacatcggcaacatgcatggcaacgaagtcgtaggaagagagttactgttgaaccttattgagtacttgtgtaagaattttgggactgatcctgaggtgactgatctggttcacaacactaggattcaccttatgccctccatgaacccagatggttatgagaaaagtcaggaaggtgattccatcagcgtcatcggacgaaacaactccaataatttcgacttgaataggaattttccagatcaattcgtccagataaccgacccaacccagcccgaaacaattgctgtgatgagctggatgaaaagttatccatttgtgctcagcgccaacctgcacggcggctccctggttgtgaactaccccttcgacgacgatgagcagggcttggccacttattctaaatctcctgatgacgccgtttttcagcagatagcacttagttacagtaaagaaaattcccagatgttccagggacgcccttgtaaaaatatgtatcccaatgagtattttcctcatgggatcaccaacggcgcctcttggtataatgtccccggaggcatgcaggattggaactacctccagacaaactgctttgaggttacaattgagttgggatgcgtgaaatatccgctggaaaaggaacttcccaatttctgggagcaaaaccgccgttccttgatccaatttatgaaacaggttcatcagggagtcaggggattcgtactcgatgcaacagacggtcgtggcattctgaacgctactatctcagtcgccgaaataaaccatcccgtgaccacctataagaccggggactattggcggttgctggtgccggggacatataaaattacagcatctgcacggggttacaatcccgttacaaaaaatgtcaccgtgaagtccgaaggcgcaatccaagttaacttcaccctggtgagatcatccaccgattcaaacaacgaaagcaagaaaggaaagggggcttcgagctccacaaatgatgcatcagacccgactacaaaagagttcgagactctgatcaaggatttgtcagccgagaacggtttggaatccctcatgcttagatcaagctccaatctcgcattggctttgtataggtaccactcttacaaagacttaagcgagttcctgaggggccttgttatgaactatcctcatatcacaaacctcacgaacctgggacagagtacagagtatcgccacatttggtctttggagatctcaaacaagcccaatgtttcagaacccgaagaacccaaaatcaggtttgtggccggcatccacggcaacgcccctgtcggtaccgaactgctgttggctctggccgaattcctgtgcctgaattacaagaaaaaccctgcagttacacagcttgtggataggactcgtattgtcatcgtcccatcacttaatcccgacggtcgtgagcgtgcacaggagaaggactgtacttcaaaaatcggccagactaatgcaagaggcaaggacttggacaccgattttacaaataacgcctcccagcccgaaacgaaggccattatcgagaacctgatccagaaacaagattttagtctttccgtcgctcttgacggtggctccatgctggttacttacccgtacgataagcccgtgcagactgtcgagaataaggaaacactgaagcatctggccagcctgtatgccaataaccacccgtccatgcatatgggccagccatcttgtcccaacaagtctgacgagaacatcccaggaggggtgatgcggggtgccgagtggcacagccaccttggttccatgaaggattactccgtgacatacggccattgcccagaaatcaccgtttatacgtcctgctgttacttcccatctgccgccaggctgccatctctgtgggccgacaataagaggagtctgctctcaatgttagttgaagtgcacaagggcgtccatgggttcgtaaaggacaagacggggaaacccatctcaaaagcagtcatagttctgaatgaggggatcaaagtgcaaacaaaagaagggggatacttccacgtgcttctggcgccgggcgttcacaacattatcgccatagctgacggataccagcagcagcattcccaggtgtttgtgcatcatgacgcagcctcttccgtggtgattgtgttcgacaccgacaacagaatattcggcctcccccgagaactggtcgtcaccgtttcaggtgcgactatgtccgctctgatcctgacagcgtgcattatttggtgcatctgctctattaagagcaaccgtcacaaggacgggtttcaccgcttgagacagcaccacgatgagtacgaagatgagataaggatgatgtcaaccgggtctaaaaagtcgctgctgtcccacgagttccaggatgagaccgatactgaggaggagactctttattcctccaaacactag

SEQ ID NO: 78373 - DNA, 3402 bp, Artificial Sequence
  derived and/or modified sequence
atgagatttgtgctgagcggcaacctgcacggcggctctgtggtggccagctacccctttgatgacagccctgagcacaaggccaccggcatctacagcaagaccagtgatgatgaggtgttcaagtacctggccaaggcctatgccagcaaccaccccatcatgaagacaggagagccccactgccctggagatgaagatgagaccttcaaggatggcatcaccaacggggcccactggtatgatgtggagggcggcatgcaggactacaactacgtgtgggccaactgctttgagatcaccctggagctgagctgctgcaagtaccccccagccagccagctgcggcaggagtgggagaacaaccgggagagcctcatcaccctcatcgagaaggtgcacatcggcgtgaagggctttgtgaaggacagcatcaccggcagcggcctggagaatgccaccatctctgtggccggcatcaaccacaacatcaccaccggccgctttggagacttctaccgcctgctggtgcccggcacctacaacctgactgtggtgctgaccggctacatgcccctgactgtgaccaacgtggtggtgaaggagggccctgccacagaggtggacttcagcctgcggcccaccgtgaccagcgtcatcccagacaccacagaggccgtgtccacagccagcacagtggccatccccaacatcctgagcggcaccagcagcagctaccagcccatccagcccaaggacttccaccaccaccacttcccagacatggagatcttcctgcggagatttgccaatgagtaccccaacatcacccggctgtacagcctgggcaagtctgtggagagccgggagctgtatgtgatggagatcagtgacaaccctggggtgcatgagcctggagagcctgagttcaagtacatcggcaacatgcatggaaatgaggtggtgggccgggagctgctgctgaacctgattgagtacctgtgcaagaactttggaacagatcctgaggtgacagacctggtgcacaacacccgcatccacctgatgcccagcatgaacccagatggctatgagaagagccaggagggggacagcatcagcgtcatcggcaggaacaacagcaacaactttgacctgaacagaaacttcccagaccagtttgtgcagatcacagaccccacccagcctgagaccatcgctgtgatgtcctggatgaagagctacccctttgtgctgagcgccaacctgcacggcggcagcctggtggtgaactacccctttgatgatgatgagcagggcctggccacctacagcaagagcccagatgatgctgtgttccagcagatcgccctgagctacagcaaagaaaacagccagatgttccagggccggccctgcaagaacatgtacccaaatgagtacttcccccacggcatcaccaacggggcctcctggtacaacgtgcctgggggcatgcaggactggaactacctgcagaccaactgctttgaggtgaccatcgagctgggctgtgtgaagtaccccctggagaaggagctgcccaacttctgggagcagaacagaagaagcctcatccagttcatgaagcaggtgcaccagggcgtgcggggctttgtgctggatgccacagatggccggggcatcctgaatgccaccatctctgtggccgagatcaaccaccctgtgaccacctacaagacaggagactactggaggctgctggtgcccggcacctacaagatcacagccagcgcccggggctacaaccctgtgaccaagaatgtgacagtgaagtctgagggcgccatccaggtgaacttcaccctggtgcgcagcagcacagacagcaacaatgaaagcaagaagggcaagggggccagcagcagcaccaatgatgccagtgaccccaccaccaaggagtttgagaccctcatcaaggacctgtctgcagaaaatggcctggagagcctgatgctgcggagcagcagcaacctggccctggccctgtaccgctaccacagctacaaggacctgtctgagttcctgcggggcctggtgatgaactacccccacatcaccaacctgaccaacctgggccagagcacagagtaccgccacatctggagcctggagatcagcaacaagcccaacgtgtctgagcctgaggagcccaagatccgctttgtggccggcatccatggaaatgcccctgtgggcacagagctgctgctggccctggccgagttcctgtgcctgaactacaagaagaacccagctgtgacccagctggtggacaggaccagaattgtgattgtgcccagcctgaacccagatggccgggagcgggcccaggagaaggactgcaccagcaagattggccagaccaatgcccggggcaaggacctggacacagacttcaccaacaatgccagccagcctgagaccaaggccatcatcgagaacctgatccagaagcaggacttcagcctgtctgtggccctggatggcggctccatgctggtgacctacccctatgacaagcctgtgcagacagtggagaacaaggagaccctgaagcacctggccagcctgtatgccaacaaccaccccagcatgcacatgggccagcccagctgccccaacaagagtgatgagaacatccctgggggcgtgatgagaggagctgagtggcacagccacctgggctccatgaaggactacagcgtgacctacggccactgcccagagatcaccgtgtacaccagctgctgctacttccccagcgctgcccggctgcccagcctgtgggccgacaacaagaggagcctgctgtccatgctggtggaggtgcacaagggcgtgcacggctttgtgaaggacaagacaggcaagcccatcagcaaggctgtgattgtgctgaatgaaggcatcaaggtgcagaccaaggagggcggctacttccacgtgctgctggcccctggggtgcacaacatcatcgccatcgcagatggctaccagcagcagcacagccaggtgtttgtgcaccatgatgctgccagctctgtggtgattgtgtttgacacagacaaccgcatcttcggcctgccccgggagctggtggtgacagtgtctggggccaccatgtctgccctgatcctgacagcctgcatcatctggtgcatctgcagcatcaagagcaacagacacaaggatggcttccaccggctgcggcagcaccatgatgaatatgaagatgagatccgcatgatgagcacaggcagcaagaagagcctgctgagccatgagttccaggatgaaacagacacagaggaggagaccctgtacagcagcaagcactag

SEQ ID NO: 78374 - DNA, 3402 bp, Artificial Sequence
  derived and/or modified sequence
atgcggttcgtgctgagcggcaacctgcacggcggcagcgtggtggcatcgtatccctttgacgactctcctgagcataaggccacgggaatctatagcaagacaagtgatgacgaagtatttaagtatctggctaaggcttacgcatctaaccatcccattatgaagactggggaaccccactgtcccggtgacgaagacgagacattcaaggatggcatcaccaatggggcccactggtatgatgtagaaggtggaatgcaggactataattacgtgtgggcgaactgtttcgaaattacgctggagctgagctgttgcaaataccccccagcttctcagttgcgacaggagtgggagaataacagggaaagtctgattactctcattgagaaggtacatattggcgtgaagggctttgtcaaggacagtattaccggctccggcttggaaaatgctacaatttcagtagccggcatcaaccacaatatcaccacagggaggttcggtgatttctacaggctgctggtgcccggcacctacaatctcaccgtagtattgacgggctacatgccccttaccgttacaaacgtggtcgtcaaagaagggcctgcaactgaggtggatttcagcctcaggcctaccgtcacgagcgtaatcccggatactacggaggccgtgagcaccgcatccaccgtggccatccctaatatactgtccgggacctcgagttcctatcagcccattcagccaaaagacttccaccaccatcacttcccagatatggagatctttctgagacggttcgctaacgaatatcctaatattaccaggctgtattcgctcgggaagtcggtagaaagtcgcgaactctacgttatggagataagtgacaatcctggtgtgcatgaacctggagaaccggagttcaagtatatcggaaacatgcacggcaatgaagttgtcgggcgcgaactgctgctgaatctcatcgaatacctgtgcaagaacttcggtacggacccagaggtcacagacttggtgcataatactagaatacacctgatgccttcgatgaaccctgatggctacgagaaaagtcaggagggcgacagcatctccgtcatcggaaggaacaattctaacaactttgacctcaaccgtaattttccagaccagttcgtccagattacggatccgacgcagcctgagacaatagcagttatgagttggatgaaaagctaccccttcgtattgtctgcaaatctgcatggcggctcgctcgtagtgaactacccctttgacgatgatgaacagggcctggctacctacagtaaaagcccggacgacgcagtgtttcagcagatcgcactgtcctacagcaaggagaacagccagatgttccagggcaggccatgtaagaatatgtaccctaatgagtactttccacatggaattacaaatggcgcttcctggtataacgtgcctggaggtatgcaggactggaactatttgcaaaccaactgtttcgaagttacaattgagctgggatgcgtaaaataccctctggaaaaggaattgcctaatttctgggagcagaatagacgcagcttaattcagttcatgaaacaagtgcaccagggcgttagaggatttgtgctggacgcgacggatggacgcgggatcctgaacgccacaataagcgtcgctgagattaatcaccccgtcacaacctataagaccggagactattggagattgctggtgcctggcacatacaagattaccgcatctgcccgagggtacaaccccgtgacaaagaacgtgactgttaagagtgaaggcgcaatccaggtcaactttactctagtcagatcctcgactgattcaaacaacgaatccaaaaaggggaaaggagcctcctcctccacgaacgacgcatcagatcccaccacaaaagagttcgagacacttataaaggatctgtccgcagagaacgggctggaaagcctgatgctgagatcaagtagcaacctggctctggccttgtaccgttaccactcatacaaggatttaagcgaatttctgcgcggactcgtgatgaattatcctcatatcactaacctgactaatctgggccagtccactgaataccgacatatatggtcactggaaatcagcaataagcctaacgtctcagagccagaggagcctaaaattaggttcgttgccgggatccacggcaacgctccagttggcacagagctgttgctcgcactcgctgaattcctctgtctgaactacaagaagaacccggctgtaacacagcttgtcgaccgcacccggatcgtaattgtgccatccctgaaccctgacggccgggagcgcgcccaggaaaaggattgcacgagtaagattggacaaacaaacgctagaggcaaggatctcgacactgactttacaaacaatgcaagtcagcccgagactaaggctattatcgaaaatcttatccaaaagcaggactttagcctgagcgtggctctcgatggcgggagtatgctcgtaacttacccctatgacaagccagtgcagacagtggaaaataaggagacactgaagcatctcgcgagtctgtacgctaacaaccatccatccatgcacatgggccaacctagctgtccaaataagagtgacgaaaatatcccgggtggcgttatgcgtggcgccgaatggcactcacatctgggatccatgaaggattacagtgtaacctatggtcattgtcccgagatcacagtgtatacgtcatgctgttatttcccttcagcagccagactcccatccctgtgggccgacaataagcgtagccttctgagcatgctggtcgaagtgcacaagggtgtccacggctttgtgaaggataaaacaggaaagccaatcagtaaagcggttattgtgctcaacgaaggaataaaggtgcagactaaagaaggcggttacttccatgtcttattggcgcccggtgtgcacaatatcattgctatcgcggacggttatcaacaacagcatagccaggttttcgtgcatcacgacgcagcttcctccgtggtgatcgtctttgatacagacaataggattttcgggctccccagagagctagttgttaccgtctctggagctaccatgtcggcactgatcttgaccgcctgcattatctggtgtatttgctctatcaagtcaaacaggcacaaggacggctttcaccggctcaggcaacatcacgatgagtacgaggacgaaattaggatgatgtcaaccggatccaaaaagtccctgctgagtcatgagtttcaggacgagacagacaccgaagaggagaccttgtacagtagcaaacactag

SEQ ID NO: 78375 - DNA, 3402 bp, Artificial Sequence
  derived and/or modified sequence
atgcgctttgtgctcagcggcaatcttcatggtggatcagttgtggcctcttaccccttcgatgattcccccgagcacaaggctacggggatatattccaaaacatccgacgacgaggtgttcaaatacttagcaaaggcgtacgcaagcaatcaccctatcatgaagactggcgaaccgcactgccccggagacgaggacgagacatttaaggacgggatcacgaacggggctcattggtacgacgttgaaggagggatgcaggattacaactacgtctgggctaattgctttgagattacacttgaactcagctgctgcaagtaccctccagcttctcagcttagacaggaatgggaaaacaacagggagtcacttatcacactgatcgagaaagtgcacatcggagtcaagggatttgtgaaagacagcatcaccggctccggtctggagaacgccacgatttctgtggcaggaatcaatcacaatatcacaacaggacgttttggggacttctatagactgctggtccccggtacttataacctcaccgttgtgcttaccggttatatgcctctgacagtgacaaatgttgttgtgaaagagggacccgcaactgaggttgactttagtttacgccctactgtgacttcagtgatcccagatactactgaagctgtgtctaccgcttctacagtggcaattcctaacatcttaagtggaacaagcagtagctatcagccaattcagccgaaagatttccaccaccatcattttcctgatatggaaatctttctgaggcgcttcgccaatgagtatcccaacattacccgcttgtacagcctcggcaagtcagtggagtcccgcgaattatacgttatggagatcagcgacaacccaggcgtgcatgaacccggtgagccggaattcaagtatataggcaatatgcacgggaacgaggtggtagggagggagctcctgttaaatctcatcgaatatttatgtaaaaattttggcaccgatccagaggtcacagacttggtgcataataccaggattcatcttatgccatccatgaatccggacggctacgagaagtctcaggagggagacagcattagcgtcatcggtcggaataactctaacaactttgatctgaaccgcaattttcccgatcagttcgtccagatcacagaccccacccagccagagaccatcgccgtgatgtcatggatgaagtcatacccctttgttttgtctgcaaacctgcacgggggttctttggtggtgaactacccttttgacgatgatgagcagggccttgctacctactctaaatcccccgacgatgccgtcttccagcagatcgctctgagttatagtaaagaaaattcccaaatgtttcagggaagaccatgcaaaaacatgtatcctaacgagtacttccctcacggtattacaaacggcgcatcctggtataatgtgcctggcggtatgcaagattggaattacctccaaacgaactgttttgaagtgactatcgaactggggtgcgttaagtaccctctggaaaaggagctcccgaacttttgggagcagaacaggcggtctctcatccagttcatgaaacaagtgcaccagggagtccgcggttttgttctggacgcaactgacgggcgaggcattctcaatgccactattagcgtggctgaaataaaccaccccgttactacctataaaactggcgactattggcgactcttggttcctgggacttataagataaccgcatcagcaaggggctacaatccggttaccaagaatgtcactgtaaagagcgaaggcgcaatccaggtcaactttaccctggtgagaagttcaacagactcaaataacgagtcaaagaaagggaagggcgcatctagcagcacaaacgacgcttcagatcccacaactaaggagttcgagactctgattaaagatttgtcggccgagaacggtttggagtccttaatgctgcgcagctcaagcaacctagcattggctctataccgataccattcctacaaggacttgtcagagtttctgagaggtttggtgatgaactaccctcacataaccaacctaaccaaccttggccagtccactgagtacaggcacatatggtcactggagatctctaacaaacccaatgtgtcagaacctgaggagcccaagatacggtttgtcgcaggaattcacggcaatgcgcctgtgggtacggagctcctgttggcactggccgaattcctgtgcctgaactacaagaagaacccagctgtcactcagctggttgaccggacccgtatcgttatcgtaccttccttgaatcctgacgggcgtgaaagagcgcaggaaaaggattgtaccagcaagatcgggcagacaaacgccagagggaaggacctggacaccgacttcacgaacaacgcatcccagcctgagacaaaggccatcatagagaacctgattcaaaagcaggattttagcttgtcagtcgccctggatggcggaagcatgctagtgacatatccctatgacaaacctgttcaaactgtagaaaataaggaaacattgaaacacttggcgagcctgtatgcaaacaatcacccatctatgcatatgggtcagccttcttgccccaataaaagcgacgagaatatccctggaggagtgatgaggggagcagaatggcactctcacctgggcagtatgaaggactattctgttacatacggccactgtccagagattactgtttatacatcatgttgctatttcccatctgctgctcggttgcccagcttgtgggctgataataaacgctcactgttaagtatgttggttgaagtccacaaaggggtccacggtttcgttaaggataagaccggtaagcccattagtaaggccgtcatcgtgctgaatgagggtataaaagtgcagaccaaggagggcggatacttccacgtgcttctggcaccaggcgtgcacaatataatcgccatcgcagacggctatcagcagcagcattctcaggtattcgtccatcacgatgccgctagctcagtggttattgtgttcgatacagacaacagaatattcgggctgccacgagagctggttgtgactgtcagcggggctaccatgtcagcccttattctcacagcctgcatcatctggtgcatctgtagtatcaagagcaacagacataaggatggtttccatcgactgagacagcatcacgacgagtacgaagacgaaatccgaatgatgtcgaccggtagcaaaaagtccctgctttcccacgagttccaggatgaaaccgacaccgaagaagagaccctctacagtagcaagcactag

SEQ ID NO: 78376 - DNA, 3953 bp, Artificial Sequence
  derived and/or modified sequence
agtgtggctgggacttagaattaggcaatctgattcccgatagtcctcttagccacggagggacactggagcccaaaaatggcagatgatattcccaggatcttccccttgcctatttgacagaagctgatttttctccaatttttacctctgactcagcttaagaagatatggacttagctggagaacttgcacagatctgtgagccgcttcattttagactctgaagggtttgtgatgtcatttgtgcaccttattagcctgggcagaatggctaatggtcacacttctaatacacactttaagtgttattaagcattgcatgaggtttaaaaaattacaaagtagaagaaggaggacctcaagaaattagtataaaacaagagaatgttataaatatttatgaggtttgtgctttctggaaatctgcatggtggctcagtggtagcaagctatccttttgatgattctccagaacataaggccactggaatctatagcaaaacctcagatgatgaagtatttaaatacttggcaaaagcttatgcttcaaaccaccccataatgaaaactggtgagcctcattgtccaggagatgaagacgagactttcaaagatggaatcacaaacggcgcacattggtatgatgtggaaggtggtatgcaagattacaattatgtgtgggccaactgttttgagatcacattagaactgtcttgttgcaagtacccacctgcttcacagcttcgacaggaatgggagaacaatcgtgagtctttgatcacattgattgaaaaggttcacattggagtgaaaggatttgttaaagattccataacaggatctgggttagagaatgcaaccatctcagtggctggtattaatcataatatcacaacaggcagatttggtgatttctaccgattacttgttcctggaacttacaaccttacagtagttttaactgggtatatgccattgactgttactaatgtagtggtgaaagaaggaccagccacagaggtggatttttctcttaggccaactgtaacttcagtaatccctgacacgacagaggctgtatcaactgctagcacagttgctatacctaatattctttctggaacatcatcctcctaccagccaattcagccaaaggactttcaccaccaccatttccctgatatggaaatcttcttgagaaggtttgccaatgaatatcctaacattacccggctttattccttgggaaaatcagtagagtcaagagaactttatgtgatggagatatctgataatccgggtgtccatgaaccaggtgaaccagaatttaagtacattggaaatatgcatggaaatgaagtggttggaagagaactgctgttgaacctcatagaatacctttgtaagaactttggaacagaccctgaagtcacagatttggttcataacactagaattcaccttatgccatccatgaatcctgatgggtatgaaaagtcccaggaaggagattcaataagtgtaattggcagaaacaacagcaacaactttgacctgaaccgaaatttcccagaccagtttgttcagatcacagatcctacgcaaccagaaactattgctgtaatgagctggatgaagtcctatccatttgtactttcagcaaacctgcatggaggttctttggtggttaactacccttttgatgatgatgaacaaggacttgccacatatagtaaatcaccagatgatgctgtgttccaacaaatagcactttcttattccaaggaaaattcccagatgtttcaaggtagaccttgcaagaatatgtatcctaatgaatattttcctcatggaataacaaatggagctagttggtataatgtgccaggaggaatgcaggactggaactatttacaaacaaattgctttgaagtgactattgaactaggttgtgtgaaatatccacttgagaaagagctgccaaacttttgggaacagaatcgaagatcactaatccagtttatgaaacaggttcatcagggcgtcagaggatttgttctagatgccacagatggcaggggtatattaaatgccaccattagtgttgctgagattaatcacccagtgactacttacaaaactggagattactggcgtctcttggttccaggaacttataaaatcacagcatctgctcgagggtataatccagttaccaagaatgtgactgtcaagagtgaaggcgctattcaggtcaacttcacacttgttcgatcctcaacagattcaaacaatgaatcaaagaaaggaaaaggggctagcagcagcaccaatgatgccagtgatccaactactaaagagtttgaaactttaattaaagacctttcagcggagaatggtttggaaagcctcatgttacgctcctcctcaaatctggctctggctctttatcgataccattcctacaaagacttatcagagtttctgagaggacttgtaatgaactatccacatattacaaatcttaccaatttgggacagagcactgaatatcgtcacatttggtcccttgaaatctccaataagcccaatgtatctgagcctgaagaaccaaagattcgttttgttgctggtatccatggaaatgcgccagttggaactgaactgcttttggctctggcagaatttctctgcctgaactacaaaaagaacccagctgttacccaattggttgacaggactaggattgtgattgtcccttctctaaatccagatgggcgagagagagctcaagagaaagactgtacttcaaaaataggacaaacaaatgctcgtggcaaagatttggatacagacttcacaaataatgcctcccaacctgagaccaaagccatcattgaaaatttgattcaaaaacaggactttagtctttctgttgccttagatggtggttccatgctggtcacatatccttatgacaagccagtacagacagtggaaaataaagagactctgaagcatttggcatctctttatgcaaataatcatccatccatgcacatgggtcagcccagttgcccaaataaatcagatgagaatattccaggaggagtaatgcgtggagcagaatggcatagtcacctgggcagcatgaaggattatagtgtcacctatggccattgtccggaaatcacagtatacacaagctgctgttactttcctagtgctgcacgactcccttccttgtgggcagacaataagagatctcttcttagtatgttagtggaggttcacaagggagttcatggatttgttaaagataagactggaaagccaatctctaaagcagtcattgtacttaatgaaggaataaaggtacaaacaaaagagggaggttatttccatgtactcttagcgccaggtgtccataacattattgccatcgctgatgggtaccagcaacaacattcacaggtctttgtgcatcatgatgcagctagttctgtggtgatagtctttgacacagataaccggatatttggtttgccaagggagcttgtggtaactgtatcaggtgctactatgtcggcattgatcctaacagcttgcattatttggtgcatctgctcaatcaagtctaatagacacaaggatggctttcatcggctcaggcagcatcatgatgagtatgaagatgaaattcgcatgatgtctaccggctccaagaagtccctcctaagccatgagttccaggatgaaacagacactgaagaggaaacattatattctagcaaacattgaaaaacacattttgcatatctcccagcataagtaccaagcaaaattacagttcctcttgggagaacactgcattaagaagagagactctcttgcttcttcaaagagctttgggaaattaaattgctaaatttgtattctctgtgaatttc

SEQ ID NO: 78377 - DNA, 3402 bp, Artificial Sequence
  derived and/or modified sequence
atgagattcgtgctgagcggcaacctgcacggcggcagcgtggtggccagctaccccttcgacgacagccccgagcacaaggccaccggcatctacagcaagaccagcgacgacgaggtgttcaagtacctggccaaggcctacgccagcaaccaccccatcatgaagaccggcgagccccactgccccggcgacgaggacgagaccttcaaggacggcatcaccaacggcgcccactggtacgacgtggagggcggcatgcaggactacaactacgtgtgggccaactgcttcgagatcaccctggagctgagctgctgcaagtacccccccgccagccagctgagacaggagtgggagaacaacagagagagcctgatcaccctgatcgagaaggtgcacatcggcgtgaagggcttcgtgaaggacagcatcaccggcagcggcctggagaacgccaccatcagcgtggccggcatcaaccacaacatcaccaccggcagattcggcgacttctacagactgctggtgcccggcacctacaacctgaccgtggtgctgaccggctacatgcccctgaccgtgaccaacgtggtggtgaaggagggccccgccaccgaggtggacttcagcctgagacccaccgtgaccagcgtgatccccgacaccaccgaggccgtgagcaccgccagcaccgtggccatccccaacatcctgagcggcaccagcagcagctaccagcccatccagcccaaggacttccaccaccaccacttccccgacatggagatcttcctgagaagattcgccaacgagtaccccaacatcaccagactgtacagcctgggcaagagcgtggagagcagagagctgtacgtgatggagatcagcgacaaccccggcgtgcacgagcccggcgagcccgagttcaagtacatcggcaacatgcacggcaacgaggtggtgggcagagagctgctgctgaacctgatcgagtacctgtgcaagaacttcggcaccgaccccgaggtgaccgacctggtgcacaacaccagaatccacctgatgcccagcatgaaccccgacggctacgagaagagccaggagggcgacagcatcagcgtgatcggcagaaacaacagcaacaacttcgacctgaacagaaacttccccgaccagttcgtgcagatcaccgaccccacccagcccgagaccatcgccgtgatgagctggatgaagagctaccccttcgtgctgagcgccaacctgcacggcggcagcctggtggtgaactaccccttcgacgacgacgagcagggcctggccacctacagcaagagccccgacgacgccgtgttccagcagatcgccctgagctacagcaaggagaacagccagatgttccagggcagaccctgcaagaacatgtaccccaacgagtacttcccccacggcatcaccaacggcgccagctggtacaacgtgcccggcggcatgcaggactggaactacctgcagaccaactgcttcgaggtgaccatcgagctgggctgcgtgaagtaccccctggagaaggagctgcccaacttctgggagcagaacagaagaagcctgatccagttcatgaagcaggtgcaccagggcgtgagaggcttcgtgctggacgccaccgacggcagaggcatcctgaacgccaccatcagcgtggccgagatcaaccaccccgtgaccacctacaagaccggcgactactggagactgctggtgcccggcacctacaagatcaccgccagcgccagaggctacaaccccgtgaccaagaacgtgaccgtgaagagcgagggcgccatccaggtgaacttcaccctggtgagaagcagcaccgacagcaacaacgagagcaagaagggcaagggcgccagcagcagcaccaacgacgccagcgaccccaccaccaaggagttcgagaccctgatcaaggacctgagcgccgagaacggcctggagagcctgatgctgagaagcagcagcaacctggccctggccctgtacagataccacagctacaaggacctgagcgagttcctgagaggcctggtgatgaactacccccacatcaccaacctgaccaacctgggccagagcaccgagtacagacacatctggagcctggagatcagcaacaagcccaacgtgagcgagcccgaggagcccaagatcagattcgtggccggcatccacggcaacgcccccgtgggcaccgagctgctgctggccctggccgagttcctgtgcctgaactacaagaagaaccccgccgtgacccagctggtggacagaaccagaatcgtgatcgtgcccagcctgaaccccgacggcagagagagagcccaggagaaggactgcaccagcaagatcggccagaccaacgccagaggcaaggacctggacaccgacttcaccaacaacgccagccagcccgagaccaaggccatcatcgagaacctgatccagaagcaggacttcagcctgagcgtggccctggacggcggcagcatgctggtgacctacccctacgacaagcccgtgcagaccgtggagaacaaggagaccctgaagcacctggccagcctgtacgccaacaaccaccccagcatgcacatgggccagcccagctgccccaacaagagcgacgagaacatccccggcggcgtgatgagaggcgccgagtggcacagccacctgggcagcatgaaggactacagcgtgacctacggccactgccccgagatcaccgtgtacaccagctgctgctacttccccagcgccgccagactgcccagcctgtgggccgacaacaagagaagcctgctgagcatgctggtggaggtgcacaagggcgtgcacggcttcgtgaaggacaagaccggcaagcccatcagcaaggccgtgatcgtgctgaacgagggcatcaaggtgcagaccaaggagggcggctacttccacgtgctgctggcccccggcgtgcacaacatcatcgccatcgccgacggctaccagcagcagcacagccaggtgttcgtgcaccacgacgccgccagcagcgtggtgatcgtgttcgacaccgacaacagaatcttcggcctgcccagagagctggtggtgaccgtgagcggcgccaccatgagcgccctgatcctgaccgcctgcatcatctggtgcatctgcagcatcaagagcaacagacacaaggacggcttccacagactgagacagcaccacgacgagtacgaggacgagatcagaatgatgagcaccggcagcaagaagagcctgctgagccacgagttccaggacgagaccgacaccgaggaggagaccctgtacagcagcaagcactag

SEQ ID NO: 78378 - protein, 436 aa, Artificial Sequence
  derived and/or modified sequence
MLWNFKPHARAYRYVGHKDVVTSVQFSPHGNLLASASRDRTVRLWIPDKRGKFSEFKAHTAPVRSVDFSADGQFLATASEDKSIKVWSMYRQRFLYSLYRHTHWVRCAKFSPDGRLIVSCSEDKTIKIWDTTNKQCVNNFSDSVGFANFVDFNPSGTCIASAGSDQTVKVWDVRVNKLLQHYQVHSGGVNCISFHPSGNYLITASSDGTLKILDLLEGRLIYTLQGHTGPVFTVSFSKGGELFASGGADTQVLLWRTNFDELHCKGLTKRNLKRLHFDSPPHLLDIYPRTPHPHEEKVETVEINPKLEVIDLQISTPPVMDILSFDSTTTTETSGRTLPDKGEEACGYFLNPSLMSPECLPTTTKKKTEDMSDLPCESQRSIPLAVTDALEHIMEQLNVLTQTVSILEQRLTLTEDKLKDCLENQQKLFSAVQQKS

SEQ ID NO: 78379 - DNA, 390 bp, Artificial Sequence
  derived and/or modified sequence
atgtacagacagagattcctgtacagcctgtacagacacacccactgggtgagatgcgccaagttcagccccgacggcagactgatcgtgagctgcagcgaggacaagaccatcaagatctgggacaccaccaacaagcagtgcgtgaacaacttcagcgacagcgtgggcgacctgagcctgctgttccacttccagaaggtggagagctacctgcaccaggaggtgcagacccacagaagctactacggcggcctgaccctgatgaactgcatcgtgaaggtgctgcccaaggagatcagcaaggactacatcctgatccaccaccacatcttcctgatcagcacccaggagcaccacatccccatgagaaagaagctgagactgtag

SEQ ID NO: 78380 - DNA, 687 bp, Artificial Sequence
  derived and/or modified sequence
atgtacagacagagattcctgtacagcctgtacagacacacccactgggtgagatgcgccaagttcagccccgacggcagactgatcgtgagctgcagcgaggacaagaccatcaagatctgggacaccaccaacaagcagtgcgtgaacaacttcagcgacagcgtgggcttcgccaacttcgtggacttcaaccccagcggcacctgcatcgccagcgccggcagcgaccagaccgtgaaggtgtgggacgtgagagtgaacaagctgctgcagcactaccaggtgcacagcggcggcgtgaactgcatcagcttccaccccagcggcaactacctgatcaccgccagcagcgacggcaccctgaagatcctggacctgctggagggcagactgatctacaccctgcagggccacaccggccccgtgttcaccgtgagcttcagcaagggcggcgagctgttcgccagcggcggcgccgacacccaggtgctgctgtggagaaccaacttcgacgagctgcactgcaagggcctgaccaagagaaacctgaagagactgcacttcgacagccccccccacctgctggacatctaccccagaaccccccacccccacgaggagaaggtggagaccgtggaggacttcttcctgcacctgctgagactgatccagagcctgagatag

SEQ ID NO: 78381 - DNA, 1311 bp, Artificial Sequence
  derived and/or modified sequence
atgctgtggaacttcaagccccacgccagagcctacagatacgtgggccacaaggacgtggtgaccagcgtgcagttcagcccccacggcaacctgctggccagcgccagcagagacagaaccgtgagactgtggatccccgacaagagaggcaagttcagcgagttcaaggcccacaccgcccccgtgagaagcgtggacttcagcgccgacggccagttcctggccaccgccagcgaggacaagagcatcaaggtgtggagcatgtacagacagagattcctgtacagcctgtacagacacacccactgggtgagatgcgccaagttcagccccgacggcagactgatcgtgagctgcagcgaggacaagaccatcaagatctgggacaccaccaacaagcagtgcgtgaacaacttcagcgacagcgtgggcttcgccaacttcgtggacttcaaccccagcggcacctgcatcgccagcgccggcagcgaccagaccgtgaaggtgtgggacgtgagagtgaacaagctgctgcagcactaccaggtgcacagcggcggcgtgaactgcatcagcttccaccccagcggcaactacctgatcaccgccagcagcgacggcaccctgaagatcctggacctgctggagggcagactgatctacaccctgcagggccacaccggccccgtgttcaccgtgagcttcagcaagggcggcgagctgttcgccagcggcggcgccgacacccaggtgctgctgtggagaaccaacttcgacgagctgcactgcaagggcctgaccaagagaaacctgaagagactgcacttcgacagccccccccacctgctggacatctaccccagaaccccccacccccacgaggagaaggtggagaccgtggagatcaaccccaagctggaggtgatcgacctgcagatcagcaccccccccgtgatggacatcctgagcttcgacagcaccaccaccaccgagaccagcggcagaaccctgcccgacaagggcgaggaggcctgcggctacttcctgaaccccagcctgatgagccccgagtgcctgcccaccaccaccaagaagaagaccgaggacatgagcgacctgccctgcgagagccagagaagcatccccctggccgtgaccgacgccctggagcacatcatggagcagctgaacgtgctgacccagaccgtgagcatcctggagcagagactgaccctgaccgaggacaagctgaaggactgcctggagaaccagcagaagctgttcagcgccgtgcagcagaagagctag

SEQ ID NO: 78382 - DNA, 390 bp, Artificial Sequence
  derived and/or modified sequence
atgtacaggcagaggttcttatacagcctctacagacacactcactgggtgcggtgtgccaagttttccccggacggtcggctcatcgtgtcctgcagcgaggataaaacaattaagatttgggatactaccaacaaacagtgcgtgaacaacttttcagacagtgttggcgatctgtccctgctgtttcacttccaaaaggtagaatcttacctgcaccaagaggtgcagacccaccggagttattatggtggtttaactctgatgaattgtatcgtgaaggtgctgcctaaagagatttcaaaagactatatactgatccatcaccacatatttctgatttctacacaggaacaccatattcccatgcgtaagaaactacggctctag

SEQ ID NO: 78383 - DNA, 687 bp, Artificial Sequence
  derived and/or modified sequence
atgtaccgtcagcggtttctctatagcctgtatcggcacacacattgggtgcgctgtgccaagttcagccccgacggtagactgatcgtctcctgttctgaggacaagacaatcaagatatgggatactacaaataaacaatgtgtgaataatttttcagattctgtgggcttcgcaaacttcgtcgatttcaacccaagcggaacctgtatcgccagcgccggatcagaccagacagtaaaggtttgggacgtgcgcgtgaataagctgctgcagcactatcaagttcatagcggcggggtgaattgcatctcgttccacccctccggcaactacctcattactgcatcgagtgatggaactctgaaaatcctcgatctgctcgaaggaagactgatctacacactacaaggacacactgggcccgtttttaccgtttccttctcaaaaggcggcgaattgttcgccagcggtggcgcggacacgcaggtcctgttatggaggacaaactttgacgagctgcactgcaagggcctcacaaagagaaacttgaaaagactgcatttcgactctccgccccaccttctggatatttatccccgcaccccacatccgcacgaggaaaaggtagaaaccgtggaagattttttcttacacctgctgcgactcatccagtccttgaggtag

SEQ ID NO: 78384 - DNA, 1311 bp, Artificial Sequence
  derived and/or modified sequence
atgttgtggaactttaaacctcatgctcgggcgtaccgttacgttggccataaggacgttgtcacatctgtccaattttcaccccacggcaacctgcttgctagcgcctctagagatcgcacggttcgactatggatacccgacaagagaggtaagttcagtgagtttaaggcccatacggcacccgtccgatcagtggatttctctgctgatgggcagtttttagcaactgctagcgaggacaagtctattaaggtatggtctatgtaccgacagagatttctgtactcgctgtaccgccacactcattgggtgcggtgtgcaaagttttctcctgatgggagattaatcgtaagctgctctgaagataaaaccatcaaaatatgggacacaactaacaagcagtgcgtgaacaacttctcagacagcgtgggtttcgccaactttgtggattttaacccgagcgggacttgcatcgccagtgctggctccgaccagaccgttaaggtgtgggatgtcagagtgaataaactgctgcaacactaccaggtgcattctggaggcgtgaattgcatcagttttcacccgtccggcaactatctgatcactgcttcttcagatgggacgctgaagatactggacctgctggaaggccggctcatctacacattacaagggcatacagggcccgtcttcacagtgagtttttcaaagggcggcgagctttttgcctctggtggcgcagatactcaggtcctgctttggaggaccaatttcgacgaactgcactgcaaaggccttaccaagagaaacctgaaacgtctccacttcgatagccccccccatcttctagatatttacccgcgtacccctcatccgcacgaggagaaagttgagaccgtggagataaatccgaaacttgaggtcattgacttgcaaatttctaccccacccgttatggacatccttagcttcgattctacaaccaccaccgaaacaagcggacgaacgcttcctgacaagggtgaagaagcctgcgggtacttcctgaacccaagcctgatgtccccagagtgcctacccacgacgacaaaaaaaaagaccgaagatatgagcgatctgccctgtgagtcacaaagaagcattccacttgccgtcacagatgccctggagcacattatggagcaacttaacgtgttaacccaaacagtgtctatccttgaacaacggctcacattgaccgaggataagctcaaggactgtctggaaaaccagcagaaactcttctctgcagttcaacagaaatcttag

SEQ ID NO: 78385 - DNA, 390 bp, Artificial Sequence
  derived and/or modified sequence
atgtaccggcagcgcttcctgtacagcctgtaccgccacacccactgggtgcgctgtgccaagttctccccagatggccgcctgattgtgtcctgcagcgaggacaagaccatcaagatctgggacaccaccaacaagcagtgtgtgaacaacttcagtgacagcgtgggggacctgagcctgctcttccacttccagaaggtggagagctacctgcaccaggaggtgcagacccacaggagctactatggaggcctgaccctgatgaactgcatcgtgaaggtgctgcccaaggagatcagcaaggactacatcctgatccaccaccacatcttcctgatcagcacccaggagcaccacatccccatgaggaagaagctgcggctgtag

SEQ ID NO: 78386 - DNA, 2432 bp, Artificial Sequence
  derived and/or modified sequence
tgtaaccagcgtgcagttttctccacatggaaacttattggcgtctgcctcacgagacagaaccgtgagactctggattcctgataagagaggaaaattctcagaatttaaagctcatacagctccagttcgaagtgtagacttttcagctgatggccagtttctagctacagcttctgaagacaaatccataaaagtatggagcatgtatcgccagcgcttcctgtattccttgtatcgacatacacactgggtacgctgtgccaaattttcacccgatggaagactaattgtgtcatgtagtgaggataaaactattaaaatttgggataccacaaataagcaatgtgttaataacttctcagattccgttggggacctgtctttactgtttcattttcaaaaggtggagagctatttgcatcaggaggtgcagacacacaggtcttattatggaggactaactttgatgaattgcattgtaaaggtcttaccaaaagaaatctcaaaagattacattttgattcaccaccacatcttcttgatatctacccaagaacaccacatccccatgaggaaaaagttgagactgtagaaattaatccaaagcttgaggtaatcgatttgcagatctctactccccctgttatggatatcctttcttttgattctaccacaacaacagaaaccagtggtaggactctgccagacaagggtgaagaggcctgtggatatttcttgaacccttccttaatgtcaccagaatgtttgccaacaaccacgaaaaagaaaacagaagacatgagtgacctcccctgtgaaagtcaaaggagcatacctctcgctgtgactgatgctttagagcatattatggaacaactcaatgttttgacacagactgtttcaatcttggagcagcgactgactttgacagaggataagctgaaagactgccttgaaaatcagcaaaagcttttcagtgctgtccaacagaaaagctgaataaaaaattcattttcatttgttgggcagaggcccaataaatgaacaaatgtacatacactcaggaaggtagtacaagatactccatacaacacaaccatgtgctatttatcatggcatttcttaaaagggtgagcaacagaacaaaaggcagaaaaggcatacctaaggactaatttaaacacatatcaatgtgaaggactaatttaaattactatcatttatgattgcagtaataaagtgataagcattcaagcaactctgtattttccccatattattttaaatgtccattttcatttataggccaaatcctgccaggaaagtaaccagatctctggatttcactgttaagtcatttcagattgaccatattcagacagtcatggggtgaaataattcacttacctccaaaatagcatcctatatgccaataatgagttattgatctgactagttgtatgtctttctgttcaaaatagaaattatcctttcttactaatgccttgaaagaatgaacaaataaaaattcccagaccacagaatttccacagcaagaatacacttattttaattaacaatagcacagatatagcatagggcagtgggttttttagttaatttatggcgtactttgtttatccattggccaacctgaaggaaatgaaactcacctatctttctatcacagatgaatgtgctagatgaatgatttgggttgtatctgatcatggttcacaaaaattatgttagtgtgttttcagtatgctaaaaagtcagagtgatacaaaagtgatatttaaaaatatacacacatgtatgtacacatgcttcagaaatattgttgcttagggtgatttgggcagctaaatagtaagtactttttaaaatttttgcatcatcatcttcctatttaatgaattgtgatttaaaacaaaatgaaaataagccaggtattctaaaagatcctggatacaaattaagaattttgctttattttaaaccaaattgagattaaattgaagaaaagcaagcaaattaatttcagcttgattatcaacctgtatcaagaacaaaaatgggaggaggtgtccacatttatggtgtgtataggtaacatggggaaaatgctattctgtgttttggaaaagaagaaatagtgccgtcctatttatttctatatttagaaatttttctcaaagaaatttcaattgtatctatgagatgggtttctaagtatcttattgtgtgttataagtgccttttaatatcatactaagtgtgagcttctggacattttcaagagcttacaaaaactaagtggcattgtatttttataaccccattgagaagactaagtaagaaatgaaatgtcctatcaattttattttgtcatgcttcaaacaataaagacatttctgctttaaaag

SEQ ID NO: 78387 - DNA, 687 bp, Artificial Sequence
  derived and/or modified sequence
atgtaccggcagcgcttcctgtacagcctgtaccgccacacccactgggtgcgctgtgccaagttctccccagatggccgcctgattgtgtcctgcagcgaggacaagaccatcaagatctgggacaccaccaacaagcagtgtgtgaacaacttcagtgacagcgtgggctttgccaactttgtggacttcaaccccagcggcacctgcatcgccagcgctggcagtgaccagacagtgaaggtgtgggatgtgcgggtgaacaagctgctgcagcactaccaggtgcacagcggcggcgtgaactgcatctccttccaccccagcggcaactacctgatcacagccagcagtgatggcaccctgaagatcctggacctgctggagggccgcctcatctacaccctgcagggccacacaggccctgtgttcaccgtgtccttcagcaagggcggggagctgtttgccagcggcggcgctgacacccaggtgctgctgtggaggaccaactttgatgagctgcactgcaagggcctgaccaagaggaacctgaagaggctgcactttgacagccccccccacctgctggacatctaccccaggaccccccacccccatgaggagaaggtggagaccgtggaggacttcttcctgcacctgctgcggctcatccagagcctgaggtag

SEQ ID NO: 78388 - DNA, 1311 bp, Artificial Sequence
  derived and/or modified sequence
atgctgtggaacttcaagccccacgcccgggcctaccgctacgtgggccacaaggatgtggtgacctctgtgcagttcagcccccacggcaacctgctggccagcgccagccgggacagaacagtgcggctgtggatcccagacaagaggggcaagttcagcgagttcaaggcccacacagcccctgtgcgctctgtggacttcagcgcagatggccagttcctggccacagccagcgaggacaagagcatcaaggtgtggagcatgtaccggcagcgcttcctgtacagcctgtaccgccacacccactgggtgcgctgtgccaagttctccccagatggccgcctgattgtgtcctgcagcgaggacaagaccatcaagatctgggacaccaccaacaagcagtgtgtgaacaacttcagtgacagcgtgggctttgccaactttgtggacttcaaccccagcggcacctgcatcgccagcgctggcagtgaccagacagtgaaggtgtgggatgtgcgggtgaacaagctgctgcagcactaccaggtgcacagcggcggcgtgaactgcatctccttccaccccagcggcaactacctgatcacagccagcagtgatggcaccctgaagatcctggacctgctggagggccgcctcatctacaccctgcagggccacacaggccctgtgttcaccgtgtccttcagcaagggcggggagctgtttgccagcggcggcgctgacacccaggtgctgctgtggaggaccaactttgatgagctgcactgcaagggcctgaccaagaggaacctgaagaggctgcactttgacagccccccccacctgctggacatctaccccaggaccccccacccccatgaggagaaggtggagaccgtggagatcaaccccaagctggaggtgattgacctgcagatcagcaccccacctgtgatggacatcctgagctttgacagcaccaccaccacagagaccagcggccgcaccctgcctgacaagggggaggaggcctgtggctacttcctgaaccccagcctgatgagccctgagtgcctgcccaccaccaccaagaagaagacagaggacatgtctgacctgccctgtgagagccagaggagcatccccctggccgtgacagatgccctggagcacatcatggagcagctgaatgtgctgacccagacagtgtccatcctggagcagaggctgaccctgacagaggacaagctgaaggactgcctggagaaccagcagaagctgttctctgctgtgcagcagaagagctag

SEQ ID NO: 78389 - DNA, 390 bp, Artificial Sequence
  derived and/or modified sequence
atgtaccggcagcggttcctgtacagcctgtaccggcacacccactgggtgcggtgtgccaagttttcccccgacggtaggctgattgtgtcgtgcagcgaggacaaaacgatcaaaatatgggatactacgaataaacagtgcgtgaataacttctctgactcagttggagacttgtctctcctgtttcattttcaaaaagtggaatcttatctgcaccaggaggttcagacgcataggagctactacgggggcttgacactcatgaactgcattgtgaaggttcttccaaaggaaatcagcaaggattatatcctcatccaccatcatatctttctgatctctactcaggagcatcacattcccatgcgaaagaagcttagactctag

SEQ ID NO: 78390 - DNA, 687 bp, Artificial Sequence
  derived and/or modified sequence
atgtaccggcagcggttcctgtacagcctgtaccggcacacccactgggtgcggtgcgctaagttttcaccagatggccgactcattgtctcatgctccgaggacaaaactatcaaaatatgggatactaccaataaacagtgtgtcaacaatttcagtgattccgtcggttttgcaaactttgtggattttaacccttctggaacttgcatcgcaagcgctggatcagaccagaccgtgaaggtgtgggatgtgagggtgaacaaattgctgcaacactatcaggttcatagcggaggtgtgaactgcatttcctttcatccatcaggcaattacctaatcacagcctcctcggacgggacgttgaagatattggacctactcgagggccggctgatatatacactccaggggcacacgggccccgtattcacagtctccttttctaagggcggggagctcttcgcctctggtggagccgacacgcaagtccttctgtggcgcactaattttgacgaactccattgtaaagggctaactaaaaggaatctgaagcgcttgcatttcgattctccacctcacttacttgatatttatcctcggaccccacatccccacgaggaaaaggtcgaaacagtggaagatttctttctccatctgctccggctcattcagagcctgaggtag

SEQ ID NO: 78391 - DNA, 1311 bp, Artificial Sequence
  derived and/or modified sequence
atgctgtggaacttcaagccccacgcccgggcctaccggtacgtggggcataaagatgtggttacttctgtccagttttcgcctcatgggaatctgctggccagcgcttcgcgcgaccggactgtcagactgtggatccccgataagcgaggcaaattctccgagtttaaagcgcataccgccccagtgcgttctgtcgatttttcggccgacggccaatttctggccactgcgagcgaagacaagtccattaaggtctggtctatgtaccgacagaggtttctttattccttgtacaggcacacccattgggtaagatgtgcgaagtttagccctgacggtagactgatagtctcatgttctgaggacaagactattaaaatctgggatactaccaacaagcagtgtgtcaataacttctccgatagtgtcggtttcgcaaacttcgttgactttaatccctccggaacttgtatagcctctgcagggtccgaccagaccgtgaaggtgtgggatgtacgagtgaacaagctacttcagcattatcaagtccacagcggaggcgtaaactgtatcagttttcacccctctgggaactacctgattacagcctcttcagatgggacactgaagatactggatctgttagagggtcggctcatttacacattacagggccacaccggacccgtgtttaccgtgagtttcagcaagggtggcgagttattcgcctcagggggagcggacacacaggtgctactgtggcggacgaatttcgacgaactgcattgtaagggcctgactaagcggaatcttaaacgcctacacttcgactctcccccacacttgctggacatctacccccgcacgccccaccctcatgaagaaaaggtggagaccgtggaaattaacccaaaactagaggtcatcgatttgcagatcagcacccctcccgtgatggatatactgagtttcgatagcactacgaccaccgagacgagcggtcgtacgcttccagacaaaggggaggaggcttgcggatactttctgaatccgtcactcatgagcccggaatgcttgccaactacaaccaaaaagaaaacagaggatatgtccgacctgccctgtgagtcccaaaggagcatcccacttgcagtcacagacgcgctggagcatattatggagcagctgaacgtgctgacgcagacagtatctatcttggaacagagactcacattgaccgaagataaactgaaggattgtctcgaaaatcagcagaaactcttcagcgcagttcaacagaagtcctag

SEQ ID NO: 78392 - DNA, 390 bp, Artificial Sequence
  derived and/or modified sequence
atgtacagacaacggttcctctattccctgtaccggcacacgcattgggtgagatgtgccaaattcagccccgatgggaggttgatcgtatcttgtagcgaagataaaacaatcaaaatatgggacacaactaataagcagtgcgtgaataacttctcagacagtgtcggggacctttccttactctttcatttccagaaggtggagagttacttacaccaggaggtgcaaacacacaggtcatactatggtgggttaacccttatgaactgtatagtgaaggtgctcccaaaggagatctccaaagattacatcctgatccatcaccacattttcctaatctcaacccaggaacaccacatccctatgagaaagaagctacgactgtag

SEQ ID NO: 78393 - DNA, 687 bp, Artificial Sequence
  derived and/or modified sequence
atgtatagacagagattcctctattccctctatagacacactcactgggtgaggtgcgctaagttcagccctgacggaaggctgatagtctcctgctccgaggataagacgattaagatctgggacaccacaaataagcaatgcgtaaacaacttctccgactctgtcggttttgcgaatttcgtagacttcaatccgtcagggacatgtatcgctagcgctgggagcgatcaaactgtaaaggtttgggatgtgcgtgtcaacaagttgctacagcattaccaggtacatagcgggggagtgaactgcatctcttttcatccgtctggcaattatctgataacggcctcttcagatgggacactcaaaatcctggatctactggagggacgactaatttatacgttacagggccacacaggccctgtcttcactgtcagctttagcaagggaggggaactattcgcaagtgggggtgcagatacccaagtgctgttgtggagaactaattttgatgaattgcactgcaaggggctgacaaagcggaacctgaagagactccatttcgattcccctcctcatttacttgatatctacccaaggactccccacccgcacgaagaaaaggtagaaacggtggaagacttcttcttgcacctcctcaggctgatccagagcctgcggtag

SEQ ID NO: 78394 - DNA, 1311 bp, Artificial Sequence
  derived and/or modified sequence
atgttgtggaacttcaaacctcatgctagagcctataggtacgtcggccacaaggacgtggtgacctctgtacagttctcccctcacggtaaccttctggcatcggctagccgggatcgcactgtcagactttggataccagataaacgtggcaagttcagtgagttcaaggcgcacactgcccctgtcagaagcgtggacttttcagccgatggccagtttttggctacggctagtgaggacaaaagtattaaggtgtggagcatgtaccgacagagattcctctacagcttgtataggcatacccattgggtccggtgcgcgaaattcagcccagatggccgattaatcgtgagctgctctgaagacaagaccataaagatatgggacaccacaaataagcaatgtgttaataacttttccgacagcgttggttttgccaacttcgtggattttaatccatccgggacctgtattgcttccgctgggtcagatcagaccgtgaaagtgtgggacgtaagagtcaacaagcttcttcaacattatcaagtacactcaggcggtgtcaactgcatctcctttcacccatcaggcaattacctgataactgcctcttctgacggtactttaaaaatactggacttgctagagggaaggttgatttatacccttcagggccacacggggcctgtgttcacagtcagcttctctaaggggggtgagctattcgcctcaggcggtgctgatacccaagtgttactgtggaggactaactttgatgaactgcactgtaaaggactgacgaagcggaatctgaagcgactgcattttgactctcctccacacttgctggacatctatcctcgaacgccacatccccacgaagagaaagtggaaacagtggagatcaacccaaagctggaagtgatcgatctccagatcagtacccctcctgtcatggacattctgtcctttgattccacaaccactaccgaaacatccggacgaacactgcccgacaaaggcgaggaggcgtgtggctacttcctgaatccttcactaatgtccccagagtgtctccccaccaccacaaaaaagaaaaccgaggatatgagcgaccttccatgtgaatcccagagaagtatcccattggccgtgacagacgctctggagcacatcatggagcagctgaacgttttgacccagaccgtgtctatcctggagcagaggcttactttaactgaggacaagctcaaagattgtcttgagaaccaacaaaagctcttttcggcagtgcagcagaaaagttag

SEQ ID NO: 78395 - DNA, 1392 bp, Artificial Sequence
  derived and/or modified sequence
gcagacggttccgggagccgcacggtcccctctccttccccatcctctcccctcccctctccgggttcccccacccacaggagccttgggccgaccactcccccgatggcctcagccacggaggaccccgttctggagcgttatttcaaaggccacaaagctgcgatcacctccttggacctcagccccaacggcaagcaacttggagaggaaaattctcagaatttaaagctcatacagctccagttcgaagtgtagacttttcagctgatggccagtttctagctacagcttctgaagacaaatccataaaagtatggagcatgtatcgccagcgcttcctgtattccttgtatcgacatacacactgggtacgctgtgccaaattttcacccgatggaagactaattgtgtcatgtagtgaggataaaactattaaaatttgggataccacaaataagcaatgtgttaataacttctcagattccgttggatttgcaaattttgtggactttaaccctagtggtacatgcatagcttcagcaggttctgatcaaactgtgaaagtctgggatgtaagagtgaacaaattactacagcattaccaagttcacagcggtggagttaattgcatatcattccatccttcgggtaactatctcatcacagcttcttcagatggtacccttaagattctggacctcttagaaggaaggctcatctatacacttcaaggacatacgggacctgtctttactgtttcattttcaaaaggtggagagctatttgcatcaggaggtgcagacacacaggtcttattatggaggactaactttgatgaattgcattgtaaaggtcttaccaaaagaaatctcaaaagattacattttgattcaccaccacatcttcttgatatctacccaagaacaccacatccccatgaggaaaaagttgagactgtagaagatttttttcttcatcttttgagattaatccaaagcttgaggtaatcgatttgcagatctctactccccctgttatggatatcctttcttttgattctaccacaacaacagaaaccagtggtaggactctgccagacaagggtgaagaggcctgtggatatttcttgaacccttccttaatgtcaccagaatgtttgccaacaaccacgaaaaagaaaacagaagacatgagtgacctcccctgtgaaagtcaaaggagcatacctctcgctgtgactgatgctttagagcatattatggaacaactcaatgttttgacacagactgtttcaatcttggagcagcgactgactttgacagaggataagctgaaagactgccttgaaaatcagcaaaagcttttcagtgctgtccaacagaaaagctg

SEQ ID NO: 78396 - protein, 292 aa, Artificial Sequence
  derived and/or modified sequence
MSSLYPSLEDLKVDQAIQAQVRASPKMPALPVQATAISPPPVLYPNLAELENYMGLSLSSQEVQESLLQIPEGDSTAVSGPGPGQMVAPVTGYSLGVRRAEIKPGVREIHLCKDERGKTGLRLRKVDQGLFVQLVQANTPASLVGLRFGDQLLQIDGRDCAGWSSHKAHQVVKKASGDKIVVVVRDRPFQRTVTMHKDSMGHVGFVIKKGKIVSLVKGSSAARNGLLTNHYVCEVDGQNVIGLKDKKIMEILATAGNVVTLTIIPSVIYEHMVKKLPPVLLHHTMDHSIPDA

SEQ ID NO: 78397 - protein, 207 aa, Artificial Sequence
  derived and/or modified sequence
MVAPVTGYSLGVRRAEIKPGVREIHLCKDERGKTGLRLRKVDQGLFVQLVQANTPASLVGLRFGDQLLQIDGRDCAGWSSHKAHQVVKKASGDKIVVVVRDRPFQRTVTMHKDSMGHVGFVIKKGKIVSLVKGSSAARNGLLTNHYVCEVDGQNVIGLKDKKIMEILATAGNVVTLTIIPSVIYEHMVKKLPPVLLHHTMDHSIPDA

SEQ ID NO: 78398 - DNA, 879 bp, Artificial Sequence
  derived and/or modified sequence
atgagcagcctgtaccccagcctggaggacctgaaggtggaccaggccatccaggcccaggtgagagccagccccaagatgcccgccctgcccgtgcaggccaccgccatcagccccccccccgtgctgtaccccaacctggccgagctggagaactacatgggcctgagcctgagcagccaggaggtgcaggagagcctgctgcagatccccgagggcgacagcaccgccgtgagcggccccggccccggccagatggtggcccccgtgaccggctacagcctgggcgtgagaagagccgagatcaagcccggcgtgagagagatccacctgtgcaaggacgagagaggcaagaccggcctgagactgagaaaggtggaccagggcctgttcgtgcagctggtgcaggccaacacccccgccagcctggtgggcctgagattcggcgaccagctgctgcagatcgacggcagagactgcgccggctggagcagccacaaggcccaccaggtggtgaagaaggccagcggcgacaagatcgtggtggtggtgagagacagacccttccagagaaccgtgaccatgcacaaggacagcatgggccacgtgggcttcgtgatcaagaagggcaagatcgtgagcctggtgaagggcagcagcgccgccagaaacggcctgctgaccaaccactacgtgtgcgaggtggacggccagaacgtgatcggcctgaaggacaagaagatcatggagatcctggccaccgccggcaacgtggtgaccctgaccatcatccccagcgtgatctacgagcacatggtgaagaagctgccccccgtgctgctgcaccacaccatggaccacagcatccccgacgcctag

SEQ ID NO: 78399 - DNA, 879 bp, Artificial Sequence
  derived and/or modified sequence
atgtcatcattgtatcccagtttggaagatctgaaggtcgaccaggccatccaagcacaggtgcgagcctctccaaaaatgcctgcactccctgtgcaggcaaccgcaatctctcccccacccgtgctgtatcctaacctcgccgagctggagaactatatgggactctcactctctagtcaggaggtacaggaatctcttctgcagattccagagggagatagcaccgccgttagcggcccagggcctggccagatggtggcaccagttactggttactctctgggagttaggcgggctgaaatcaaaccaggcgttcgcgagattcatctctgcaaagacgagcggggcaaaactggccttcggctacgtaaggtagatcagggcctgttcgtgcaactggtccaagctaatacccccgcttcactcgttgggctgagatttggcgatcaattgttgcagatcgatgggagggattgcgccgggtggtctagccacaaggctcaccaggtggtcaaaaaggcatccggggacaagatagtggtggtcgttcgcgatcgtccttttcagaggaccgtgaccatgcacaaggactcaatgggacacgtgggcttcgtgattaaaaagggaaaaatcgtgtctctggtgaaaggatcttctgccgccagaaatggtctactgactaaccactatgtgtgcgaagtggatgggcagaatgtcataggcctcaaggacaagaagataatggaaattttggcgacagctggcaatgtggtcactcttacgataatcccttcggttatatacgagcacatggtgaagaagttgccgcctgttctgctccatcatacaatggatcactccattcccgacgcttag

SEQ ID NO: 78400 - DNA, 879 bp, Artificial Sequence
  derived and/or modified sequence
atgtcgagcctttatccgtccctcgaagatctgaaagtcgatcaggccattcaagcgcaagtaagggcatcgcccaaaatgcccgcgcttcccgtccaggctaccgccattagccctcctcccgtcctttatccaaatctggcagagctggagaattacatgggtctgagtttaagcagtcaagaggtccaggagtccctcctccagatccccgaaggggacagcacagctgtgtcaggccctggcccggggcagatggtcgcccccgtgacgggctacagccttggcgtgcgcagagccgaaattaaaccaggggtgcgcgagattcacctgtgcaaagacgagcggggcaagactggtctgcgtctccggaaagttgatcagggcctgttcgtacagctcgtccaggcaaacactccggcatccttggtggggttacgctttggagatcaacttttgcagattgatggaagggattgtgccggttggtcgagccataaagctcaccaggtcgtgaaaaaggcatcgggagataagatagtcgtggtggtaagagaccggccctttcagagaaccgtgactatgcacaaggacagcatgggccatgtcggcttcgtcattaaaaaggggaaaatagtgtccctggtgaaagggagcagcgccgccagaaatggactgctgaccaaccactacgtatgcgaggtagatggtcagaatgtgattggccttaaggataagaagatcatggagatactggcgaccgccggcaatgtggtgaccctcacgatcatcccctcggtaatatatgaacacatggtgaaaaagcttcctcctgtgttactgcaccacactatggatcattctatccctgatgcatag

SEQ ID NO: 78401 - DNA, 879 bp, Artificial Sequence
  derived and/or modified sequence
atgtcatcactgtaccctagcctggaggatttaaaggtggaccaggccatacaggcgcaggtgagggcctccccaaagatgcccgcgttacccgtgcaagcgacagctataagtccaccccccgtgctgtaccccaacctcgcagaactcgagaactacatgggactgagtttgtctagccaggaggttcaagaatcactcttgcaaatccctgagggggacagcacagctgtgtccggcccagggccaggacagatggttgcccccgtcacaggctatagtctgggcgtgagaagagctgagatcaaacccggggtcagggagatccacctgtgtaaggatgagcgaggcaagacggggctgcgactgaggaaggttgatcagggtctattcgtccagttggtacaggctaacacccctgcatctctggtgggactgaggtttggcgaccagcttttacagattgatggacgagattgtgccgggtggagttctcacaaagcacaccaagtcgttaagaaggctagtggcgacaagattgtggtggttgtgcgggaccgcccatttcaacgaaccgttacaatgcataaggacagtatgggacatgtaggtttcgtgatcaagaagggcaaaattgtatctttggtgaaaggctcctccgccgccagaaatggactcttaacaaaccactacgtgtgcgaagtggatggccaaaacgtgatcggattgaaagataagaagattatggagatactggcaaccgcaggtaacgtggtcacgctgacaatcattccttccgtgatctatgaacacatggttaagaaattacccccggtgctcctgcaccataccatggatcattcaatcccagacgcctag

SEQ ID NO: 78402 - DNA, 879 bp, Artificial Sequence
  derived and/or modified sequence
atgagcagcctgtaccccagcctggaggacctgaaggtggaccaggccatccaggcccaggtgcgggccagccccaagatgcctgccctgcctgtgcaggccacagccatcagccccccacctgtgctgtaccccaacctggccgagctggagaactacatgggcctgagcctgagcagccaggaggtgcaggagagcctgctgcagatccctgagggggacagcacagctgtgtctggccctggccctggccagatggtggcccctgtgacaggctacagcctgggcgtgcggcgggcagagatcaagccaggagtgcgggagatccacctgtgcaaggatgagcggggcaagacaggcctgcggctgaggaaggtggaccagggcctgtttgtgcagctggtgcaggccaacaccccagccagcctggtgggcctgcgctttggagaccagctgctgcagattgatggccgggactgtgccggctggagcagccacaaggcccaccaggtggtgaagaaggccagcggggacaagatcgtggtggtggtgcgggaccggcccttccagaggacagtgaccatgcacaaggacagcatgggccacgtgggctttgtgatcaagaagggcaagatcgtgtccctggtgaagggcagcagcgctgccagaaatggcctgctgaccaaccactacgtgtgtgaggtggatggccagaatgtgattggcctgaaggacaagaagatcatggagatcctggccacagctggaaatgtggtgaccctgaccatcatccccagcgtcatctatgagcacatggtgaagaagctgccccctgtgctgctgcaccacaccatggaccacagcatcccagatgcctag

SEQ ID NO: 78403 - DNA, 879 bp, Artificial Sequence
  derived and/or modified sequence
atgagcagcctgtaccccagcctggaggacctgaaggtggaccaggcaatccaggcccaggttcgggcctctcctaagatgccagccctccctgttcaagccactgccatctccccaccgcctgtcctttaccccaatcttgcggaattagaaaactatatgggattatcactatcttcccaggaggtccaggagtctttactacagatcccagaaggggacagtacagccgtatcaggtccaggacccgggcagatggttgccccagtcacaggctactccttaggcgtgaggcgggccgaaatcaagcccggcgtaagggagatccatttgtgtaaggacgaaaggggcaaaaccgggctccgcctgagaaaggtggatcagggcctgtttgttcagctggttcaagccaacacgccagcatcacttgtgggtctgaggtttggcgaccaattgcttcagattgacggtcgcgactgcgccggctggtcaagtcataaagcccaccaggtggtgaaaaaagcgtctggtgataagatagttgtggtagtgcgagacaggccctttcagcggactgtcacaatgcacaaagacagcatgggccatgtagggtttgtaatcaagaagggcaagatcgttagcctggtgaaaggcagctccgcagcacgaaacggcctcctcactaaccattacgtgtgtgaggtcgatggccagaacgtgattggtttgaaggacaagaagattatggagatactggccacggcaggaaatgttgtgacactgaccattatcccgtccgtgatctacgagcacatggtgaagaaattgcctccagtgctactccatcacaccatggaccactcaatccctgatgcctag

SEQ ID NO: 78404 - DNA, 879 bp, Artificial Sequence
  derived and/or modified sequence
atgagcagcctgtaccccagcctggaggacctgaaggtggaccaggcgatccaggcacaggtacgggcctcccctaagatgccagcactcccagtgcaagccaccgcgatttcgcccccaccagtgctctaccctaacctcgctgagctcgagaactatatgggactgtcgctctccagccaggaggtgcaggagagcctgctgcaaattcccgaaggcgacagcactgccgtgtctggacccggcccaggtcagatggtggcacctgtgacaggctatagcttaggtgtccgcagggcagagatcaagcctggagtcagggaaatacacttgtgtaaggatgagaggggcaagaccggactccgccttcgaaaggtcgatcagggcctcttcgtgcaactcgtgcaagcgaatactccagcgtccctggtgggcctaaggttcggcgatcaactgctgcaaatcgacggccgcgattgcgcaggttggtccagtcacaaagcccatcaggtcgtaaagaaggccagtggcgacaaaatcgtggttgtcgtcagagatcgaccattccagcggacagttacaatgcataaggattcgatggggcacgtcgggttcgtcataaaaaaaggcaaaatcgtgagtttggtgaagggtagttctgcagcacggaatggcctgcttacaaatcactacgtctgcgaagtggatggtcaaaacgtgataggtctcaaagataaaaagataatggagattctggccactgctggaaatgtagttacactaaccattatcccatccgtcatttacgaacatatggtcaagaaacttccccccgtgctgctccaccacacaatggaccactccatccctgacgcttag

SEQ ID NO: 78405 - DNA, 879 bp, Artificial Sequence
  derived and/or modified sequence
atgagcagcctgtaccccagcctggaggacctgaaggtggaccaggccatacaagcacaggttagagcaagccccaagatgccagcactccctgtgcaggcaaccgctatctctccaccacccgtcctctaccctaacctagcggagttggaaaattacatgggcctgagtttgtcatctcaagaggttcaggagtcgctgctgcagattcccgagggcgatagcaccgccgtgtcaggccctgggcctggacagatggtggcaccagtgacaggctatagcttgggagttagaagggctgaaataaagcccggcgtccgggaaatccacctctgtaaggatgaaagggggaagacagggttaagactcaggaaagtagaccaaggacttttcgtacagctggtacaggccaatacccctgcctctctcgtgggcctgcgcttcggtgatcagctgctgcagatagatggaagggactgcgccggctggagctctcataaggcccatcaggtggtgaaaaaggcctccggtgacaaaattgtggtcgtggtccgagatcgtcccttccagaggactgtgacgatgcacaaggactcaatgggacacgtagggtttgtgattaagaaaggcaagatagtctccttggtcaagggatcatcggctgctagaaatggtctccttactaaccattacgtgtgtgaagtcgatggtcagaacgtaatcggcttgaaggataagaagattatggagattctggcgactgctgggaacgtggtgaccctgactatcattccctccgtaatttatgagcatatggttaagaaactcccacccgtgctgctgcaccatactatggaccatagcatacctgacgcatag

SEQ ID NO: 78406 - DNA, 879 bp, Artificial Sequence
  derived and/or modified sequence
atgtccagcctgtacccgagtttagaggacctcaaagtggatcaagccatccaggcgcaagtccgagcaagccccaaaatgcctgccctgcccgtccaggccaccgctatctcccccccaccagttttgtatcctaacctggccgaacttgagaactatatggggctcagtctgagttctcaagaggtgcaggagagcttgctgcagattcctgagggagactccactgccgtgtccgggcctgggccaggccagatggtcgcccctgtgaccggatattcattaggggtgagaagagcagagattaaacccggtgtgagggagattcacctgtgtaaggacgaaagaggaaagacaggattaagactcagaaaggtggaccagggactgttcgtgcagttggtgcaggccaatacaccagcgtcactggtcggactccgcttcggtgatcaactgctgcagatcgacggacgcgattgtgcgggatggtcttcacataaagcacaccaggtggtaaagaaagcgagcggcgacaagatcgtggtcgtggttagggatagaccgtttcagcgtaccgttactatgcacaaggattccatgggacatgttggattcgtgataaaaaaaggaaaaattgtctccttggtaaaaggttcctccgcagctcggaacggacttctgaccaatcactacgtatgcgaagtggatggccagaacgtgattgggttaaaggacaaaaaaattatggaaatcctcgccaccgctggcaatgtggtaaccctcactatcatcccttccgtgatatacgaacacatggtcaaaaaactgcctcctgtcttgttgcatcacaccatggaccactcaattcccgatgcctag

SEQ ID NO: 78407 - DNA, 879 bp, Artificial Sequence
  derived and/or modified sequence
atgtcgagcctctatccatcgttagaagatctgaaagtggatcaggcaatccaagcccaagtgagagcgtctcccaagatgccagctcttccagttcaggcaactgcgattagcccccctccagtgctctaccccaacctcgcggagctagagaattacatggggctgtcactgtctagccaggaagtgcaggaaagtctccttcagattcccgagggagacagtacggccgtgagcggcccaggtccaggtcagatggtggcccctgtgacaggctattccttgggagtgcgcagggcagagatcaagcctggggtgcgagagattcacttgtgtaaggatgaaaggggaaaaaccggcctccggctgaggaaagtggaccaagggctgtttgtgcagctagtgcaagctaatacaccagcctccttagtaggactgagattcggagatcagttactccaaattgacgggagggactgtgctggttggtcttcgcacaaagcacaccaggttgtaaagaaagcctccggtgataagatcgttgtcgtggtgagggaccggccttttcagcgcaccgtcactatgcacaaggatagcatgggtcacgttggttttgtgattaaaaaaggaaaaatagtatctcttgtaaaaggctcttctgcagcgcgaaacggcctacttactaatcattacgtttgtgaagtggacgggcaaaacgtcataggactcaaagataagaaaatcatggagatcctggctacagcgggaaacgtagtgacactcacaatcattccgagcgtaatctacgagcatatggtgaaaaaactgccacctgtgctgttacatcataccatggatcactccatccccgatgcctag

SEQ ID NO: 78408 - DNA, 879 bp, Artificial Sequence
  derived and/or modified sequence
atgtcaagtctctaccccagtttggaagacctgaaggttgatcaggctattcaagcccaggtgcgcgcatccccgaagatgcccgcactgccagtgcaggccactgccatcagtcctcccccagtactatatcccaatctggctgagctggagaactacatgggattaagtctaagcagtcaggaagttcaggagtcgttactgcagattcctgaaggcgattccacggctgtgtctgggcctggccctgggcagatggttgccccagtcaccggttatagtctgggtgtgaggagagccgaaatcaagcccggagtgcgggaaatccacctgtgcaaggacgaacgcggtaagacaggactgcgtctcagaaaggtggaccaaggactgtttgtccagctggtgcaggccaacacacctgcctccttggttggtctcagattcggcgaccagctcctgcagatcgatggcagagattgcgcaggctggtccagccacaaggctcatcaagtggtgaagaaggccagtggggataagattgtggtggtggttcgggatcgccctttccagagaacagtaacgatgcacaaagattctatgggacacgtaggattcgtcatcaaaaagggtaaaatagtctcacttgtgaagggatctagtgcggcacgaaacgggctgctcaccaaccactatgtctgcgaagtagacggtcagaacgtgattggcctcaaggataaaaaaatcatggagatcttggccaccgccggaaacgtggtgacactcacgatcattccatcagtgatatacgaacacatggtgaaaaagctacctccggtactattgcaccacacaatggaccatagcattcccgacgcgtag

SEQ ID NO: 78409 - DNA, 1404 bp, Artificial Sequence
  derived and/or modified sequence
ctcaacactgggtcagaagtcacggccagacaagaaacggggtgttctgagaatcagccatgtcatccctgtacccatctctagaggacctaaaagtggaccaagccattcaggcccaggtcagagcctcacccaagatgccagccctgccagtccaggcaacagccatttccccaccaccagttttgtacccaaacttggcagaactggaaaattatatgggtctttccctctccagccaagaagtccaggagagcctgcttcagattccagagggtgacagtacagcggtctcgggccccgggcccggccagatggtggcaccggtaaccgggtacagcctgggcgtgcggcgagctgagatcaagcccggggtgcgcgagatccacctgtgcaaggacgagcgcggcaagaccgggctgaggctgcggaaggtcgaccaggggctctttgtgcagttggtccaggccaacacccctgcatcccttgtggggctgcgctttggggaccagctcctgcagattgacgggcgtgactgtgctgggtggagctcgcacaaagcccatcaggtggtgaagaaggcatcaggcgataagattgtcgtggtggttcgggacaggccgttccagcggactgtcaccatgcacaaggacagcatgggccacgtcggcttcgtgatcaagaaggggaagattgtctctctggtcaaagggagttctgcggcccgcaacgggctcctcaccaaccactacgtgtgtgaggtggacgggcagaatgttatcgggctgaaggacaaaaagatcatggagattctggccacggctgggaacgttgtcaccctgaccatcatccccagtgtgatctacgagcacatggtcaaaaagttgcctccagtcctgctccaccacaccatggaccactccatcccagatgcctgaagccactgcagggcagggcaggcagggggggcttcccgccctcctgcagcaaagggcaaccaccctcggatgatgggttgcagccggcctgctgcttaaggtgggggctgccatgaggggggcgtgtccaggagggtgaccatgggatggcttatacacacaggcctccttggagcctcagactccaagctaggctgaggctcaggcagggcccacaggcagccgattctcttgtgctgatttaaatgctggacacggaggcaggctgtttaaacgctgcttaaagtcgcaactgggcccctttcaagaaattttgctctaccaggaaaacagttacacattttaagagaacagagctacgttctttgtgagagctttttccttgccttgacttgctctttgtcacagactgcataagttgtcagccttgactatcttttgaataaagatttgattttaaacaaaa

SEQ ID NO: 78410 - DNA, 1519 bp, Artificial Sequence
  derived and/or modified sequence
atcccagtccaaggtgagtcagctgaacaggggacaggcaccacccttcccagatcaggaagccagctgagagacagggctacgtttcagggagggaaacagattcagcagcggcagcagctggagaaggtcgtggagcagcaccttgcctgcagggtgttctgagaatcagccatgtcatccctgtacccatctctagaggacctaaaagtggaccaagccattcaggcccaggtcagagcctcacccaagatgccagccctgccagtccaggcaacagccatttccccaccaccagttttgtacccaaacttggcagaactggaaaattatatgggtctttccctctccagccaagaagtccaggagagcctgcttcagattccagagggtgacagtacagcggtctcgggccccgggcccggccagatggtggcaccggtaaccgggtacagcctgggcgtgcggcgagctgagatcaagcccggggtgcgcgagatccacctgtgcaaggacgagcgcggcaagaccgggctgaggctgcggaaggtcgaccaggggctctttgtgcagttggtccaggccaacacccctgcatcccttgtggggctgcgctttggggaccagctcctgcagattgacgggcgtgactgtgctgggtggagctcgcacaaagcccatcaggtggtgaagaaggcatcaggcgataagattgtcgtggtggttcgggacaggccgttccagcggactgtcaccatgcacaaggacagcatgggccacgtcggcttcgtgatcaagaaggggaagattgtctctctggtcaaagggagttctgcggcccgcaacgggctcctcaccaaccactacgtgtgtgaggtggacgggcagaatgttatcgggctgaaggacaaaaagatcatggagattctggccacggctgggaacgttgtcaccctgaccatcatccccagtgtgatctacgagcacatggtcaaaaagttgcctccagtcctgctccaccacaccatggaccactccatcccagatgcctgaagccactgcagggcagggcaggcagggggggcttcccgccctcctgcagcaaagggcaaccaccctcggatgatgggttgcagccggcctgctgcttaaggtgggggctgccatgaggggggcgtgtccaggagggtgaccatgggatggcttatacacacaggcctccttggagcctcagactccaagctaggctgaggctcaggcagggcccacaggcagccgattctcttgtgctgatttaaatgctggacacggaggcaggctgtttaaacgctgcttaaagtcgcaactgggcccctttcaagaaattttgctctaccaggaaaacagttacacattttaagagaacagagctacgttctttgtgagagctttttccttgccttgacttgctctttgtcacagactgcataagttgtcagccttgactatcttttgaataaagatttgattttaaacaaaa

SEQ ID NO: 78411 - DNA, 1295 bp, Artificial Sequence
  derived and/or modified sequence
ggccgcgtggagccacgtctcctctcgcccctaggggagaagcgtggactggggacgtggggggacccggggacggctccatcctcctttccccatccctacccccaccccagtgtctcctgaggcacagggtccccacgggccgggctgaccccctgccccctggtgtctgcagacagcggtctcgggccccgggcccggccagatggtggcaccggtaaccgggtacagcctgggcgtgcggcgagctgagatcaagcccggggtgcgcgagatccacctgtgcaaggacgagcgcggcaagaccgggctgaggctgcggaaggtcgaccaggggctctttgtgcagttggtccaggccaacacccctgcatcccttgtggggctgcgctttggggaccagctcctgcagattgacgggcgtgactgtgctgggtggagctcgcacaaagcccatcaggtggtgaagaaggcatcaggcgataagattgtcgtggtggttcgggacaggccgttccagcggactgtcaccatgcacaaggacagcatgggccacgtcggcttcgtgatcaagaaggggaagattgtctctctggtcaaagggagttctgcggcccgcaacgggctcctcaccaaccactacgtgtgtgaggtggacgggcagaatgttatcgggctgaaggacaaaaagatcatggagattctggccacggctgggaacgttgtcaccctgaccatcatccccagtgtgatctacgagcacatggtcaaaaagttgcctccagtcctgctccaccacaccatggaccactccatcccagatgcctgaagccactgcagggcagggcaggcagggggggcttcccgccctcctgcagcaaagggcaaccaccctcggatgatgggttgcagccggcctgctgcttaaggtgggggctgccatgaggggggcgtgtccaggagggtgaccatgggatggcttatacacacaggcctccttggagcctcagactccaagctaggctgaggctcaggcagggcccacaggcagccgattctcttgtgctgatttaaatgctggacacggaggcaggctgtttaaacgctgcttaaagtcgcaactgggcccctttcaagaaattttgctctaccaggaaaacagttacacattttaagagaacagagctacgttctttgtgagagctttttccttgccttgacttgctctttgtcacagactgcataagttgtcagccttgactatcttttgaataaagatttgattttaaacaaaa

SEQ ID NO: 78412 - DNA, 1484 bp, Artificial Sequence
  derived and/or modified sequence
cccttcccacggctgccttagtacagaatcttataagtcctcctccttcagaggctacaaatggtgttccgaggccaggggagtttaaagctcgatttcacccgcgcagcctccaatccgggtgttctgagaatcagccatgtcatccctgtacccatctctagaggacctaaaagtggaccaagccattcaggcccaggtcagagcctcacccaagatgccagccctgccagtccaggcaacagccatttccccaccaccagttttgtacccaaacttggcagaactggaaaattatatgggtctttccctctccagccaagaagtccaggagagcctgcttcagattccagagggtgacagtacagcggtctcgggccccgggcccggccagatggtggcaccggtaaccgggtacagcctgggcgtgcggcgagctgagatcaagcccggggtgcgcgagatccacctgtgcaaggacgagcgcggcaagaccgggctgaggctgcggaaggtcgaccaggggctctttgtgcagttggtccaggccaacacccctgcatcccttgtggggctgcgctttggggaccagctcctgcagattgacgggcgtgactgtgctgggtggagctcgcacaaagcccatcaggtggtgaagaaggcatcaggcgataagattgtcgtggtggttcgggacaggccgttccagcggactgtcaccatgcacaaggacagcatgggccacgtcggcttcgtgatcaagaaggggaagattgtctctctggtcaaagggagttctgcggcccgcaacgggctcctcaccaaccactacgtgtgtgaggtggacgggcagaatgttatcgggctgaaggacaaaaagatcatggagattctggccacggctgggaacgttgtcaccctgaccatcatccccagtgtgatctacgagcacatggtcaaaaagttgcctccagtcctgctccaccacaccatggaccactccatcccagatgcctgaagccactgcagggcagggcaggcagggggggcttcccgccctcctgcagcaaagggcaaccaccctcggatgatgggttgcagccggcctgctgcttaaggtgggggctgccatgaggggggcgtgtccaggagggtgaccatgggatggcttatacacacaggcctccttggagcctcagactccaagctaggctgaggctcaggcagggcccacaggcagccgattctcttgtgctgatttaaatgctggacacggaggcaggctgtttaaacgctgcttaaagtcgcaactgggcccctttcaagaaattttgctctaccaggaaaacagttacacattttaagagaacagagctacgttctttgtgagagctttttccttgccttgacttgctctttgtcacagactgcataagttgtcagccttgactatcttttgaataaagatttgattttaaacaaaa

SEQ ID NO: 78413 - protein, 441 aa, Artificial Sequence
  derived and/or modified sequence
KRRRAASMNRLGCWPARSLPRSGRGSGQRSLGLGGHPSGPRHPGTPAAKRTWESPGVRARDCPLSTSWLSEPPLGPAPHLSMVQAHGGRSRAQPLTLSLGAAMTQPPPEKTPAKKHVRLQERRGSNVALMLDVRSLGAVEPICSVNTPREVTLHFLRTAGHPLTRWALQRQPPSPKQLEEEFLKIPSNFVSPEDLDIPGHASKDRYKTILPNPQSRVCLGRAQSQEDGDYINANYIRGYDGKEKVYIATQGPMPNTVSDFWEMVWQEEVSLIVMLTQLREGKEKCVHYWPTEEETYGPFQIRIQDMKECPEYTVRQLTIQYQEERRSVKHILFSAWPDHQTPESAGPLLRLVAEVEESPETAAHPGPIVVHCSAGIGRTGCFIATRIGCQQLKARGEVDILGIVCQLRLDRGGMIQTAEQYQFLHHTLALYAGQLPEEPSP

SEQ ID NO: 78414 - DNA, 372 bp, Artificial Sequence
  derived and/or modified sequence
atgtgcggccaatgccagagctcgtctgggcacatggaggaagaagcccatcctgaactctgtcctcactggcctctccaatttagtcctcagagtcactgtcgccaagcttatggacgggacacccacgctggagggcctggtgctagagtggacagcggacaccatttgggcctgtttcccggactcctatctacctgcccggatgggctgtgcgtgttcccagtgccctcccctacgttctccactagtctgcatgtgttaatggagtgtaaggtccatcagcccggacccctgcctgggcgtggcagtgccgacgctgggctacggggtttacctcagggcagaacactgtgcgtcctaactgcttag

SEQ ID NO: 78415 - DNA, 1326 bp, Artificial Sequence
  derived and/or modified sequence
aagcggcgtcgggctgctagcatgaaccgcctgggttgctggcctgcccgtagtctgccaagaagcgggcgcgggtccggtcaacgctccctgggcctgggcggacatccgagcgggccccgtcatcccggaacccccgctgctaaaagaacctgggagtcccccggagtgagggctcgggactgcccgctttccacgtcatggctgtccgagccgcccctcggccccgccccacacttgtcaatggtacaagctcatggagggcgttcccgagcccaaccccttactttgagcctcggagcagccatgacccaacccccgcctgaaaagacgcccgcgaagaagcatgtacgactgcaagaaagaagaggatctaacgtcgcgttgatgctggatgtgaggtcgctgggagctgtcgaacctatttgttcagtgaatactcccagagaggtcaccttacactttctgcggactgccggacaccctctgactcgctgggccctccagcgccagccgcctagtcctaaacaactggaagaggagtttttgaagatcccgagcaacttcgtgagtccggaggaccttgacatccccggccatgcctcaaaggaccgctacaaaaccattttacctaatcctcagtcccgcgtgtgtctggggcgagcgcagtcccaagaggacggcgactatattaatgctaactacatccgcggatacgacggaaaggaaaaggtttatattgccactcaggggccgatgcctaacacagtcagtgatttctgggaaatggtctggcaagaagaggtttcactgatcgtgatgctgactcagcttcgggagggcaaagaaaagtgtgttcattactggcccactgaggaggagacctacgggccttttcagattaggattcaggatatgaaggagtgtccagaatatacagtgaggcagctaacaattcaatatcaggaagagagacgctccgtcaaacatatcctcttctctgcatggcctgaccaccagacccccgagtcagccggccccctgctcaggctagtggctgaggtggaagaaagcccggagaccgccgcccaccctgggcctatagtggtgcattgtagcgcaggaattgggagaacagggtgctttattgcaaccaggatcggatgccaacagcttaaagcacgtggggaggttgatattttgggcattgtgtgccagctacgtctcgataggggtggtatgattcagacagcagagcaatatcaatttctccatcatactctggctctatacgctggccagcttcccgaggagccctctccctag

SEQ ID NO: 78416 - DNA, 1326 bp, Artificial Sequence
  derived and/or modified sequence
aagagaagaagagctgcctccatgaaccggctgggctgctggccagcccggagcctgcccaggagcggccggggcagcggccagaggagcctgggcctgggcggccaccccagcggccccaggcaccctggcaccccagctgccaagaggacctgggagagccctggggtgcgggcccgggactgccccctgagcacctcctggctgtctgagccccccctgggccctgccccccacctgtccatggtgcaggcccacggcggccgcagccgggcccagcccctgaccctgagcctgggcgccgccatgacccagcccccacctgagaagaccccagccaagaagcacgtgcggctgcaggagcggcggggcagcaatgtggccctgatgctggatgtgcgcagcctgggcgctgtggagcccatctgcagcgtgaacaccccccgggaggtgaccctgcacttcctgaggacagctggccaccccctgacccgctgggccctgcagaggcagccccccagccccaagcagctggaggaggagttcctgaagatccccagcaactttgtgtccccagaggacctggacatccctggccacgccagcaaggaccgctacaagaccatcctgcccaacccccagagccgggtgtgcctgggccgggcccagagccaggaggatggagactacatcaatgccaactacatccggggctatgatggcaaggagaaggtgtacatcgccacccagggccccatgcccaacacagtgtctgacttctgggagatggtgtggcaggaggaggtgtccctcatcgtgatgctgacccagctgcgggagggcaaggagaagtgtgtgcactactggcccacagaggaggagacctacggccccttccagatccgcatccaggacatgaaggagtgcccagagtacacagtgcggcagctgaccatccagtaccaggaggagaggagatctgtgaagcacatcctcttcagcgcctggccagaccaccagaccccagagagcgctggccccctgctgcggctggtggccgaggtggaggagagccctgagacagctgcccaccctggccccatcgtggtgcactgcagcgctggcatcggccgcacaggctgcttcatcgccaccagaattggctgccagcagctgaaggcccggggggaggtggacatcctgggcatcgtgtgccagctgcggctggaccggggcggcatgatccagacagctgagcagtaccagttcctgcaccacaccctggccctgtatgccggccagctgcctgaggagcccagcccctag

SEQ ID NO: 78417 - DNA, 1326 bp, Artificial Sequence
  derived and/or modified sequence
aagcggcggcgggccgccagcatgaaccggctgggctgctggcccgccagatcacttccccgaagcggcagaggtagcgggcagcgctctctgggtttaggtggccatccgtctggacctcgacacccaggcacacccgctgcaaaacggacatgggagagcccaggcgtgcgcgctcgagactgcccactgtctacttcatggctgtctgagccccccctcgggccggccccccacctgtccatggtccaagcacacggtggccgcagtagagcccaacccctcaccctgtctctgggcgccgccatgactcaaccaccccccgaaaagaccccagcaaagaaacatgtccggctgcaggagcggagagggtccaatgtggcgttgatgttggatgtacgaagtttaggtgctgtggagcccatctgttccgtgaatacccctcgagaggtgaccctgcactttctgcgcacagctgggcaccctctgacaagatgggccctgcagcgacagccaccaagcccgaaacagttggaagaggaatttctaaaaatcccctctaattttgtgtcccccgaagatttagacatcccaggtcacgcaagtaaggaccggtacaaaacgattctgccaaacccacagagccgtgtgtgcctgggcagggcccagtcccaggaggacggcgattacattaacgccaattacatccgcgggtacgacggcaaagagaaggtgtacatcgccacgcaagggcccatgcccaataccgtgtcggatttttgggagatggtatggcaagaggaggtttcattaattgttatgttgacacaacttcgagagggtaaggagaaatgcgtgcactactggcctacagaggaggagacttacgggcccttccagatccgcatccaggatatgaaagagtgcccagagtacacagtgaggcagttgacaatccagtatcaggaggagagaaggtcagtgaaacacatcctcttcagtgcgtggccagatcaccagaccccagaatccgccggccccctcttgcggcttgttgctgaggtggaggagtcaccagagacagctgcccatcctggccccattgttgtgcactgctcagccggaataggccgaacaggatgttttattgctacgaggatcggatgtcaacagcttaaagcccgcggagaagtcgacatcctggggatcgtgtgtcagctgcgcctggatcggggcgggatgattcagacggcggagcagtaccagttccttcatcacaccctcgccttgtatgccggccagcttcccgaagaaccttccccttag

SEQ ID NO: 78418 - DNA, 1326 bp, Artificial Sequence
  derived and/or modified sequence
aaaaggcgtagggctgcaagcatgaaccgcctggggtgttggcctgccagatctctcccaaggagtggcagagggtccggacagagatctctgggactgggcggacacccttctggccctagacaccccggtactccggctgcaaaaaggacttgggagagccccggagtgagggcccgtgactgtcctttgtctactagctggctgtccgaacctcctcttggaccagcaccacatctatctatggtacaagcacacggcggaaggagcagagctcaaccacttactctgagtctcggagctgctatgacccagcccccacctgagaaaacaccagcgaagaaacatgttaggcttcaggaacggagaggcagcaatgtcgctctgatgttggacgttcgatctctgggcgcagtcgagccaatatgctctgttaacacccccagggaagtgaccctgcacttcttaaggaccgccggtcacccactgactagatgggccctccaaagacagcccccatcacctaagcagctcgaagaggaatttctgaagatcccttccaattttgttagtccagaggatctggacatccctggacacgcttcaaaggaccgctataagacaatcctgcccaatcctcagagtcgggtatgcctgggtcgagctcaaagtcaggaggacggcgactatattaacgctaattatattcgcggttacgacggtaaggagaaagtttatattgccacgcagggcccaatgccaaataccgtctcggacttttgggagatggtgtggcaggaagaggtgtctctgatcgtgatgcttacacagcttagagaaggcaaagagaagtgcgtgcactactggcctacagaggaggagacctacggcccatttcaaattaggatccaagacatgaaggaatgtcctgagtatacagtccgacaactcacaattcagtaccaagaggagagaaggagcgtgaagcacattttgtttagcgcctggccagatcaccagacaccagagtctgcagggccactgctacgtctggtggcagaagtcgaggagagcccggagaccgcggctcatcccggaccgattgtggtgcactgcagcgccggaataggccgtacggggtgcttcatagccacccgcattggctgccagcagctgaaagctagaggcgaagttgacattctgggcatcgtgtgccaactgcggcttgacaggggagggatgatacagacggctgaacagtatcagtttctacatcacacgctggcgctgtatgcagggcaattgccggaagaaccatctccctag

SEQ ID NO: 78419 - DNA, 1432 bp, Artificial Sequence
  derived and/or modified sequence
aaaaggaggcgtgcagcgagcatgaaccggctgggctgctggcccgcaaggagcctgccaaggtcaggcaggggcagtgggcagaggagtcttggacttgggggccacccttcaggtcccaggcatccaggcaccccagcagcgaagaggacatgggagtcccctggtgtgagggccagagactgtccactgtctacctcatggctgagtgagcctcccctgggcccagcaccccacctcagcatggtccaagcccatggggggcgctccagagcacagccgttgaccttgtctttgggggcagccatgacccagcctccgcctgaaaaaacgccagccaagaagcatgtgcgactgcaggagaggcggggctccaatgtggctctgatgctggacgttcggtccctgggggccgtagaacccatctgctctgtgaacacaccccgggaggtcaccctacactttctgcgcactgctggacacccccttacccgctgggcccttcagcgccagccacccagccccaagcaactggaagaagaattcttgaagatcccttcaaactttgtcagccccgaagacctggacatccctggccacgcctccaaggaccgatacaagaccatcttgccaaatccccagagccgtgtctgtctaggccgggcacagagccaggaggacggagattacatcaatgccaactacatccgaggctatgacgggaaggagaaggtctacattgccacccagggccccatgcccaacactgtgtcggacttctgggagatggtgtggcaagaggaagtgtccctcattgtcatgctcactcagctccgagagggcaaggagaaatgtgtccactactggcccacagaagaggaaacctatggacccttccagatccgcatccaggacatgaaagagtgcccagaatacactgtgcggcagctcaccatccagtaccaggaagagcgccggtcagtaaagcacatcctcttttcggcctggccagaccatcagacaccagaatcagctgggcccctgctgcgcctagtggcagaggtggaggagagcccggagacagccgcccaccccgggcctatcgtagtccactgcagtgcagggattggccggacgggctgcttcatcgccacgcgaattggctgtcaacagctgaaagcccgaggagaagtggacattctgggtattgtgtgccaactgcggctagacagaggggggatgatccagacggcagagcagtaccagttcctgcaccacactttggccctgtatgcaggccagctgcctgaggaacccagcccctgacccctgccaccctccggtggcccaggtgcctacctccctcaagcctgggaaggtgggtctggggaaagtgggccgagtgatctgggggtaccccttgggttggtgt

SEQ ID NO: 78420 - DNA, 1326 bp, Artificial Sequence
  derived and/or modified sequence
aagagaagaagagccgccagcatgaacagactgggctgctggcccgccagaagcctgcccagaagcggcagaggcagcggccagagaagcctgggcctgggcggccaccccagcggccccagacaccccggcacccccgccgccaagagaacctgggagagccccggcgtgagagccagagactgccccctgagcaccagctggctgagcgagccccccctgggccccgccccccacctgagcatggtgcaggcccacggcggcagaagcagagcccagcccctgaccctgagcctgggcgccgccatgacccagcccccccccgagaagacccccgccaagaagcacgtgagactgcaggagagaagaggcagcaacgtggccctgatgctggacgtgagaagcctgggcgccgtggagcccatctgcagcgtgaacacccccagagaggtgaccctgcacttcctgagaaccgccggccaccccctgaccagatgggccctgcagagacagccccccagccccaagcagctggaggaggagttcctgaagatccccagcaacttcgtgagccccgaggacctggacatccccggccacgccagcaaggacagatacaagaccatcctgcccaacccccagagcagagtgtgcctgggcagagcccagagccaggaggacggcgactacatcaacgccaactacatcagaggctacgacggcaaggagaaggtgtacatcgccacccagggccccatgcccaacaccgtgagcgacttctgggagatggtgtggcaggaggaggtgagcctgatcgtgatgctgacccagctgagagagggcaaggagaagtgcgtgcactactggcccaccgaggaggagacctacggccccttccagatcagaatccaggacatgaaggagtgccccgagtacaccgtgagacagctgaccatccagtaccaggaggagagaagaagcgtgaagcacatcctgttcagcgcctggcccgaccaccagacccccgagagcgccggccccctgctgagactggtggccgaggtggaggagagccccgagaccgccgcccaccccggccccatcgtggtgcactgcagcgccggcatcggcagaaccggctgcttcatcgccaccagaatcggctgccagcagctgaaggccagaggcgaggtggacatcctgggcatcgtgtgccagctgagactggacagaggcggcatgatccagaccgccgagcagtaccagttcctgcaccacaccctggccctgtacgccggccagctgcccgaggagcccagcccctag

SEQ ID NO: 78421 - protein, 546 aa, Artificial Sequence
  derived and/or modified sequence
MAWPKLPAPWLLLCTWLPAGCLSLLVTVQHTERYVTLFASIILKCDYTTSAQLQDVVVTWRFKSFCKDPIFDYYSASYQAALSLGQDPSNDCNDNQREVRIVAQRRGQNEPVLGVDYRQRKITIQNRADLVINEVMWWDHGVYYCTIEAPGDTSGDPDKEVKLIVLHWLTVIFIILGALLLLLLIGVCWCQCCPQYCCCYIRCPCCPAHCCCPEEALARHRYMKQAQALGPQMMGKPLYWGADRSSQVSSYPMHPLLQRDLSLPSSLPQMPMTQTTNQPPIANGVLEYLEKELRNLNLAQPLPPDLKGRFGHPCSMLSSLGSEVVERRIIHLPPLIRDLSSSRRTSDSLHQQWLTPIPSRPWDLREGRSHHHYPDFHQELQDRGPKSWALERRELDPSWSGRHRSSRLNGSPIHWSDRDSLSDVPSSSEARWRPSHPPFRSRCQERPRRPSPRESTQRHGRRRRHRSYSPPLPSGLSSWSSEEDKERQPQSWRAHRRGSHSPHWPEEKPPSYRSLDITPGKNSRKKGSVERRSEKDSSHSGRSVVI

SEQ ID NO: 78422 - DNA, 1641 bp, Artificial Sequence
  derived and/or modified sequence
atggcttggcctaagctgcctgccccatggctgcttctgtgtacttggctccctgccggctgtcttagtctcttggttaccgtgcagcacaccgaaaggtacgtgactctatttgcaagcatcatcctcaagtgtgattacacaacaagcgcacagctgcaggatgttgttgttacctggcgctttaagtctttctgcaaggatccaatattcgactattacagtgcatcttaccaagcagcactctccctgggtcaagaccccagcaatgactgtaatgacaatcaaagggaagtaagaatcgtcgctcagaggcgaggtcaaaacgagccagtcctgggcgtggactaccggcagagaaagataacaattcaaaaccgcgccgatttagtcatcaatgaagtgatgtggtgggatcacggcgtgtattactgtactatcgaggctcccggcgatacaagtggcgatcccgataaggaggtgaaactgatagtgctccattggcttacagtgatttttattatactgggcgcactcctgctgctgctcttaattggggtatgctggtgccagtgctgtccgcagtattgttgctgctatatcagatgtccttgctgccctgcacattgctgctgcccggaagaagcgctggcacggcaccgctacatgaagcaagcccaggcactggggccacaaatgatgggtaagcccctgtattggggagcagaccgcagcagtcaggtgtcatcctaccctatgcaccctctgctacagagggacttgtccctgccatcatctttaccccagatgcctatgacacagacaaccaaccagccaccaatcgcaaatggtgtcctggaataccttgagaaggaactgcgcaacctgaacctggcacagcctctcccaccagacttgaagggtcggtttggccacccgtgtagcatgctgagctccctaggttctgaggttgtcgaacgaagaatcatacatctgccacctctgattagagaccttagttcgtcacggcgaacctctgacagtttacatcagcagtggctcacaccaatccctagcaggccttgggacctaagagagggccgttcacatcatcattatcctgacttccatcaggaactgcaggatcgtggaccaaagagctgggctctggagcggagagagctggaccctagttggagtggtaggcacaggtctagccgcctgaatgggtcccctattcattggtccgacagggactcccttagcgatgtgccaagctcgtctgaggcgaggtggaggcccagccacccaccatttcgctcccggtgtcaggagcgtccccgtcgacctagtccaagggagtctacacagagacatggacggcgacgacgccataggagttattccccacccctcccaagcggcctttcttcgtggagttctgaagaagacaaggagcgccaaccgcagagctggcgcgctcataggagggggtcccatagcccccactggcccgaggaaaaaccaccatcataccggagcctcgatattacaccaggtaaaaattcccggaagaaagggtccgtcgagaggcgttcagaaaaggattcatcacactccggtaggagtgtggtgatttag

SEQ ID NO: 78423 - DNA, 2226 bp, Artificial Sequence
  derived and/or modified sequence
ctgcgccgagggaggggaaacccgaggggttccttggagaaggtggtgcgtcctggggcggcagctgaggaagaaagacgcagtgccccgaagcccctgagctgaaaagggccagaaagggggcggcatggcatggcccaaactgcccgcaccttggctgctgctctgcacctggctcccagcagggtgcctgtccttgcttgtgacggtccagcacacagaacgctatgtcaccctgtttgcctctatcatcctcaaatgtgactacaccacctctgcccagctccaggacgtggtggtgacatggcgcttcaagtccttctgcaaggaccctatctttgactactactcagcgtcataccaggcagctttatccctgggccaggacccatccaatgactgcaacgacaaccagcgggaagttcgcatagtggcccagcggcgggggcagaatgagcccgtgctgggggtagattaccggcagcgcaagatcaccatccagaaccgagcagatctcgtgataaatgaagtgatgtggtgggaccatggagtgtattactgcaccattgaggctccaggggacacatcaggagaccccgataaggaagtaaagctcatcgtcctacactggctgacagtgatcttcatcatcctgggagccctcctcctcctgctgctgattggagtgtgctggtgccagtgctgtcctcagtattgctgctgctatatccgctgtccctgctgtcctgcccactgctgctgtcctgaggaagccctggcccgccaccgctacatgaagcaggcccaggccctaggtcctcagatgatgggaaaacccctgtactggggggcggacaggagctcccaggtttcatcttatccaatgcacccgctgctgcagcgagatttgtccctgccgtccagcctcccgcagatgccaatgacccagaccaccaatcagcctcccatcgccaatggtgtcctggagtatttggagaaagaactgcggaacctcaacctggcccagcctctgccccctgacctcaaaggcagatttggccatccctgcagcatgctgtcctccctgggctctgaggtcgtggaacgcagaatcatccacctgcccccactgatcagagacctgtcatcctcaaggaggaccagtgactccctgcaccagcagtggctcaccccaattccctccaggccctgggatctgagggaggggagaagccaccaccattaccctgatttccaccaggagctccaggaccgggggccaaagtcttgggcattggaaagaagggagttggacccatcgtggagtggaaggcaccgtagctctaggctgaatgggtcacccatacactggtcagacagggacagcctaagcgatgtcccctcatccagtgaggcacgctggcggccgagccaccctcctttcaggagccgctgtcaggagaggccccgcaggcccagcccccgggagagcactcagaggcacgggagacgacgcaggcaccgcagctactctcctcccttgccctccggcctcagttcctggagctctgaagaggacaaggagaggcagccccagagctggcgggcccaccgccgcggctcgcactccccacactggcccgaggagaagccgcctagctaccgctcacttgatatcactccaggcaagaatagcaggaaaaaagggagtgtggagaggcgctcggagaaagacagctctcatagtggaaggagtgtggtcatttagtcaccaagcacagcacaacttctgtggctacttctcggctcctgtgtgtcatcagcatcacctaggtttccagctgacttgggaactgcaagtctgagtctaacagtttttggcttagattctgagaatcaaatagaagaattttaaatacaagagtttgagattgggtatagtggctcacacctgtaatcacagcactttgggaggctaagaatcacttgagactaggagttcaagatcagcctgggaaacatagtgagaccccgtctctacaaaaaatataaaaattagttaggtgtggtggcatgcacttgtagtcccagctactcaagaggctgaggcagaaggatcccttgagcccaggagtgcaaggctgcaatgagccaggatcccatgatcacacatctgtattccagcctgggcaatagagcaagtccccattactaaaaaacccaaaa

SEQ ID NO: 78424 - DNA, 1641 bp, Artificial Sequence
  derived and/or modified sequence
atggcctggcccaagctgcctgccccctggctgctgctgtgcacctggctgcctgctggctgcctgagcctgctggtgacagtgcagcacacagagcgctacgtgaccctgtttgccagcatcatcctgaagtgtgactacaccaccagcgcccagctgcaggatgtggtggtgacctggaggttcaagagcttctgcaaggaccccatctttgactactacagcgccagctaccaggccgccctgagcctgggccaggaccccagcaatgactgcaatgacaaccagcgggaggtgagaattgtggcccagaggcggggccagaatgaacctgtgctgggcgtggactaccggcagaggaagatcaccatccagaacagagctgacctggtgatcaatgaggtgatgtggtgggaccacggcgtgtactactgcaccatcgaggcccctggggacaccagcggggaccctgacaaggaggtgaagctgattgtgctgcactggctgaccgtcatcttcatcatcctgggcgccctgctgctgctgctgctgattggagtgtgctggtgccagtgctgcccccagtactgctgctgctacatccgctgcccctgctgcccagcccactgctgctgcccagaggaggccctggcccggcaccgctacatgaagcaggcccaggccctgggcccccagatgatgggcaagcccctgtactggggcgctgacaggagcagccaggtgagcagctaccccatgcaccccctgctgcagagggacctgagcctgcccagcagcctgccccagatgcccatgacccagaccaccaaccagccccccatcgccaatggagtgctggagtacctggagaaggagctgaggaacctgaacctggcccagcccctgcccccagacctgaagggccgcttcggccacccctgcagcatgctgagcagcctgggcagcgaggtggtggagcggcgcatcatccacctgcccccactcatccgggacctgagcagcagcaggaggaccagtgacagcctgcaccagcagtggctgacccccatccccagccggccctgggacctgcgggagggccgcagccaccaccactacccagacttccaccaggagctgcaggaccggggccccaagtcctgggccctggagcggcgggagctggaccccagctggagcggccgccacaggagcagccggctgaatggcagccccatccactggagcgaccgggacagcctgagtgatgtgcccagcagcagcgaggcccgctggaggcccagccacccccccttccgcagccgctgccaggagcggccccggcggcccagcccccgggagagcacccagagacatggaagaagaagaagacacaggagctacagcccccccctgcccagcggcctgagctcctggagcagcgaggaggacaaggagcggcagccccagagctggagggcccaccggcggggcagccacagcccccactggccagaggagaagcccccatcctaccgcagcctggacatcaccccaggcaagaacagcaggaagaagggctctgtggagaggagaagtgagaaggacagcagccacagcggccgctctgtggtgatctag

SEQ ID NO: 78425 - DNA, 1641 bp, Artificial Sequence
  derived and/or modified sequence
atggcctggcccaagctgcccgccccctggctgctgctgtgcacctggctgccagctggctgcctgtctttactggttacagtgcagcacactgagaggtatgtgactctgttcgcttctattatcctgaagtgtgactatacgaccagcgcccagctccaggacgttgttgtcacttggaggtttaaatccttctgcaaagatcccatattcgactactactctgcttcttaccaggctgcgctcagtttgggacaggacccctcaaatgattgtaacgacaaccaacgggaagtgcgaatcgtagcccagaggagaggacagaatgaacctgtgctgggcgttgactacaggcagagaaaaataacgatccagaatcgggctgaccttgtaatcaatgaagtcatgtggtgggaccacggagtttactattgtaccattgaagcccccggggacaccagcggagatccagacaaagaagtcaaactgattgtattacattggcttacagtgattttcattatactcggggccctcctcctcttactactgattggtgtgtgctggtgccagtgttgcccccagtactgttgttgctacattcggtgtccatgctgccccgctcactgctgctgccccgaggaagctctggcacggcaccgctacatgaaacaggcccaagctctgggtccacagatgatggggaaacccctatattggggagctgatcgctcaagccaggtctcctcttacccaatgcatccattgctgcagagggaccttagtctgccatcttcccttcctcagatgcctatgacacagactaccaatcagccacctattgccaatggagtgctggagtatcttgaaaaggagctcaggaacctgaacctggctcagcctctgccccccgatctgaaagggcgctttggacatccctgttctatgctaagcagtttgggaagcgaggtcgttgagaggaggatcatacatctcccgcctctgatcagagacctgagcagctcccgacgcaccagcgatagtctgcaccagcagtggttaactcctataccaagtagaccatgggatttacgcgagggacgttcccaccaccattaccctgacttccatcaagagctgcaggataggggccccaagtcttgggctctcgaacggagggagctggatcctagctggagtgggcgccatcggtctagccgtcttaatgggtccccgatccactggagcgatagagattcgctttccgacgttccctcatcctctgaagcgcggtggcgccccagccatcccccatttcggagccgctgccaggaacgaccccgaagaccgtccccaagagaatctacgcagcggcacggaaggcggcgacgtcaccggtcttactcgccacctcttccctccggactaagcagctggtcatccgaagaagacaaggaaagacaacctcaaagctggcgcgcccaccgtcggggctctcactctccccactggcccgaagagaagcccccgtcttacaggtccctggatataacacccggaaagaacagcagaaaaaagggctcagtcgagaggaggtccgaaaaagatagttcgcacagtggccgctcagtggtcatctag

SEQ ID NO: 78426 - DNA, 1641 bp, Artificial Sequence
  derived and/or modified sequence
atggcctggccaaagcttcccgcaccttggcttctgctgtgtacctggcttcctgctggttgcttgtccctgttagtcaccgtacagcacaccgagcgctacgtgaccctgttcgcctcaataatacttaaatgtgactacactacatcagcacagctccaagatgtggtagtgacgtggaggtttaaaagcttttgcaaggatcctatctttgactactacagcgccagttaccaggcagctctgagcctgggtcaggatccttccaacgactgtaacgacaatcagcgtgaggttcgaatcgtcgcgcagcgaaggggccagaacgaacccgtcttgggcgtcgactatagacagcggaagatcacaatccagaaccgggcagacctcgttataaatgaggttatgtggtgggaccatggggtctactactgtaccatagaagcccctggagacacttcgggcgacccagacaaagaggtaaaactgattgtgctgcattggttaacggtgatcttcatcatcttgggagcactgctgctgcttctgttaatcggagtttgctggtgtcagtgctgcccccagtactgttgctgttacatcagatgcccttgctgccctgctcactgctgctgtcccgaggaagccctcgcaagacatcggtacatgaaacaagcacaggctctgggacctcaaatgatgggcaaacccctgtattggggagcggatcggtcttctcaggtatccagctatcctatgcaccccctccttcagcgcgatctgagcttaccctcaagtctgccgcagatgcccatgactcagaccaccaatcagcccccaatcgccaatggggtgttggagtacctggagaaagaactgcggaatctgaatctcgcacagcccctacctccagacctgaaagggcgttttggccacccttgctccatgttgtcatccctcggatctgaagttgtcgaacgccgaattatccatctcccaccgttgatacgcgacctgtctagctcaagaaggacgtcagactcattgcatcagcagtggcttacacctataccgtcaaggccttgggatcttagagaagggcgttcacaccaccattaccctgatttccaccaagagctccaggatagagggccaaaaagttgggctctggagcggagggagctggaccccagctggagtgggagacacagatcatcccgcctgaacggctctcctatccattggagtgacagagactccttgtccgacgtaccttccagcagtgaggccagatggaggccatcccaccccccatttcgaagccgctgtcaagagcgcccaaggcggccttcaccgcgagagtctacccagcgacatggaagacgtaggagacaccgatcatacagtcccccactccctagcggcttgagctcttggagctccgaggaggataaagaacgccaaccacagagttggagagcacacaggagaggaagccattccccacactggcctgaagagaaacccccaagctaccgctcgctagatattacacccggtaaaaactctcggaaaaaaggttcggtggagaggcggtccgaaaaagactcaagtcattctggacggtcagtcgtgatctag

SEQ ID NO: 78427 - DNA, 1641 bp, Artificial Sequence
  derived and/or modified sequence
atggcctggcccaagctgcccgccccctggctgctgctgtgcacctggctgcccgccggctgcctgagcctgctggtgaccgtgcagcacaccgagagatacgtgaccctgttcgccagcatcatcctgaagtgcgactacaccaccagcgcccagctgcaggacgtggtggtgacctggagattcaagagcttctgcaaggaccccatcttcgactactacagcgccagctaccaggccgccctgagcctgggccaggaccccagcaacgactgcaacgacaaccagagagaggtgagaatcgtggcccagagaagaggccagaacgagcccgtgctgggcgtggactacagacagagaaagatcaccatccagaacagagccgacctggtgatcaacgaggtgatgtggtgggaccacggcgtgtactactgcaccatcgaggcccccggcgacaccagcggcgaccccgacaaggaggtgaagctgatcgtgctgcactggctgaccgtgatcttcatcatcctgggcgccctgctgctgctgctgctgatcggcgtgtgctggtgccagtgctgcccccagtactgctgctgctacatcagatgcccctgctgccccgcccactgctgctgccccgaggaggccctggccagacacagatacatgaagcaggcccaggccctgggcccccagatgatgggcaagcccctgtactggggcgccgacagaagcagccaggtgagcagctaccccatgcaccccctgctgcagagagacctgagcctgcccagcagcctgccccagatgcccatgacccagaccaccaaccagccccccatcgccaacggcgtgctggagtacctggagaaggagctgagaaacctgaacctggcccagcccctgccccccgacctgaagggcagattcggccacccctgcagcatgctgagcagcctgggcagcgaggtggtggagagaagaatcatccacctgccccccctgatcagagacctgagcagcagcagaagaaccagcgacagcctgcaccagcagtggctgacccccatccccagcagaccctgggacctgagagagggcagaagccaccaccactaccccgacttccaccaggagctgcaggacagaggccccaagagctgggccctggagagaagagagctggaccccagctggagcggcagacacagaagcagcagactgaacggcagccccatccactggagcgacagagacagcctgagcgacgtgcccagcagcagcgaggccagatggagacccagccacccccccttcagaagcagatgccaggagagacccagaagacccagccccagagagagcacccagagacacggcagaagaagaagacacagaagctacagcccccccctgcccagcggcctgagcagctggagcagcgaggaggacaaggagagacagccccagagctggagagcccacagaagaggcagccacagcccccactggcccgaggagaagccccccagctacagaagcctggacatcacccccggcaagaacagcagaaagaagggcagcgtggagagaagaagcgagaaggacagcagccacagcggcagaagcgtggtgatctag

SEQ ID NO: 78428 - protein, 212 aa, Artificial Sequence
  derived and/or modified sequence
MAWPKLPAPWLLLCTWLPAGCLSLLVTVQHTERYVTLFASIILKCDYTTSAQLQDVVVTWRFKSFCKDPIFDYYSASYQAALSLGQDPSNDCCCCPEEALARHRYMKQAQALGPQMMGKPLYWGADRSSQVSSYPMHPLLQRDLSLPSSLPQMPMTQTTNQPPIANGVLEYLEKELRNLNLAQPLPPDLKGRFGHPCSMLSSLGSENQIEEF

SEQ ID NO: 78429 - protein, 457 aa, Artificial Sequence
  derived and/or modified sequence
MAWPKLPAPWLLLCTWLPAGCLSLLVTVQHTERYVTLFASIILKCDYTTSAQLQDVVVTWRFKSFCKDPIFDYYSASYQAALSLGQDPSNDCNDNQREVRIVAQRRGQNEPVLGVDYRQRKITIQNPLARHRYMKQAQALGPQMMGKPLYWGADRSSQVSSYPMHPLLQRDLSLPSSLPQMPMTQTTNQPPIANGVLEYLEKELRNLNLAQPLPPDLKGRFGHPCSMLSSLGSEVVERRIIHLPPLIRDLSSSRRTSDSLHQQWLTPIPSRPWDLREGRSHHHYPDFHQELQDRGPKSWALERRELDPSWSGRHRSSRLNGSPIHWSDRDSLSDVPSSSEARWRPSHPPFRSRCQERPRRPSPRESTQRHGRRRRHRSYSPPLPSGLSSWSSEEDKERQPQSWRAHRRGSHSPHWPEEKPPSYRSLDITPGKNSRKKGSVERRSEKDSSHSGRSVVI

SEQ ID NO: 78430 - DNA, 639 bp, Artificial Sequence
  derived and/or modified sequence
atggcttggccgaagctgcccgccccatggctcctcctgtgtacctggctaccagcaggctgcttgtcattgttggtcaccgttcaacacacagaacggtacgtgaccctatttgcgtccatcattttgaagtgtgactacacaacatccgcgcaactgcaggacgtagttgtcacatggcgttttaagagtttctgtaaggatccaatttttgactactacagtgcatcctaccaggcggcactgtccttagggcaggatccgagcaatgactgttgttgctgcccagaggaggcgctggcacgccatcgttatatgaaacaggcgcaggcactggggccccaaatgatggggaagcccctgtattggggggctgaccggtcaagtcaggtttctagctatcctatgcaccctctcctccagagagacctcagcttgccttcttcccttcctcaaatgccaatgacccagaccaccaatcaaccacctattgctaatggggtgctggagtacctggagaaggaactgagaaatctgaatttggcacagcctctccctcctgacctgaagggcaggttcggacacccctgttctatgctctcatctttgggaagtgaaaaccaaatagaagagttttag

SEQ ID NO: 78431 - DNA, 1374 bp, Artificial Sequence
  derived and/or modified sequence
atggcatggccaaagcttcccgccccttggctcctcttgtgcacttggctgcctgccgggtgcctgtcacttctagtcacagtgcagcacaccgaacgctacgtgacactatttgccagcattattctcaagtgtgactacacaacatccgcacagctccaagacgtcgtggtgacatggcgattcaagtccttctgtaaagatcccattttcgactattactctgcctcttatcaggcggctttgagcctcggccaggacccctcaaacgactgtaacgataaccaacgcgaggtgcgtatcgtagctcagagacgcggtcagaacgagcccgtgctcggcgtggactaccggcagcgcaaaatcacgatacaaaaccccctggccaggcacaggtacatgaaacaagcgcaggccctgggacctcagatgatgggcaaaccgctgtactggggcgcagacagatcttcccaggttagctcttacccaatgcatccacttcttcagagagatctcagcctgcctagcagcttacctcagatgcccatgacgcaaaccaccaatcagcctcccattgccaacggagtcttggagtacctggagaaagagctgagaaacctgaaccttgcccagccactaccccccgatctgaaaggtagattcggtcatccctgcagcatgttatcatctctgggctcagaagtggtcgagagacggatcatacacttgcccccactcatccgggatctgagctcctccaggagaacatccgacagtctacaccagcagtggctcacacccattccaagccgcccttgggacttgcgggagggcagatcccatcatcattaccccgattttcaccaggagctccaggataggggaccaaagtcgtgggctctggagcgtcgggaattagacccctcgtggtctggaaggcatcgctcttcccgccttaatggctctcccattcattggtcagatcgtgactcactgtccgacgtcccatctagcagcgaggctagatggaggccctcacacccgcctttccggtcccgatgccaagagagacccaggcgacctagcccccgggagagcactcagagacacgggcggcgacgcagacatagatcttattcccctcccctccccagcggcctctcgtcctggagctctgaggaagataaagagcgtcaaccacagagttggcgggcacaccgtagagggagtcactctcctcactggcccgaggaaaagcccccatcatatcggagcttagacatcactcccggcaagaatagcagaaagaagggaagtgtggaacgcagaagcgagaaggacagtagccactctggacggtccgtggtgatttag

SEQ ID NO: 78432 - DNA, 684 bp, Artificial Sequence
  derived and/or modified sequence
gtgccccgaagcccctgagctgaaaagggccagaaagggggcggcatggcatggcccaaactgcccgcaccttggctgctgctctgcacctggctcccagcagggtgcctgtccttgcttgtgacggtccagcacacagaacgctatgtcaccctgtttgcctctatcatcctcaaatgtgactacaccacctctgcccagctccaggacgtggtggtgacatggcgcttcaagtccttctgcaaggaccctatctttgactactactcagcgtcataccaggcagctttatccctgggccaggacccatccaatgactgctgctgctgtcctgaggaagccctggcccgccaccgctacatgaagcaggcccaggccctaggtcctcagatgatgggaaaacccctgtactggggggcggacaggagctcccaggtttcatcttatccaatgcacccgctgctgcagcgagatttgtccctgccgtccagcctcccgcagatgccaatgacccagaccaccaatcagcctcccatcgccaatggtgtcctggagtatttggagaaagaactgcggaacctcaacctggcccagcctctgccccctgacctcaaaggcagatttggccatccctgcagcatgctgtcctccctgggctctgagaatcaaatagaagaattttaa

SEQ ID NO: 78433 - DNA, 1456 bp, Artificial Sequence
  derived and/or modified sequence
gtgccccgaagcccctgagctgaaaagggccagaaagggggcggcatggcatggcccaaactgcccgcaccttggctgctgctctgcacctggctcccagcagggtgcctgtccttgcttgtgacggtccagcacacagaacgctatgtcaccctgtttgcctctatcatcctcaaatgtgactacaccacctctgcccagctccaggacgtggtggtgacatggcgcttcaagtccttctgcaaggaccctatctttgactactactcagcgtcataccaggcagctttatccctgggccaggacccatccaatgactgcaacgacaaccagcgggaagttcgcatagtggcccagcggcgggggcagaatgagcccgtgctgggggtagattaccggcagcgcaagatcaccatccagaaccccctggcccgccaccgctacatgaagcaggcccaggccctaggtcctcagatgatgggaaaacccctgtactggggggcggacaggagctcccaggtttcatcttatccaatgcacccgctgctgcagcgagatttgtccctgccgtccagcctcccgcagatgccaatgacccagaccaccaatcagcctcccatcgccaatggtgtcctggagtatttggagaaagaactgcggaacctcaacctggcccagcctctgccccctgacctcaaaggcagatttggccatccctgcagcatgctgtcctccctgggctctgaggtcgtggaacgcagaatcatccacctgcccccactgatcagagacctgtcatcctcaaggaggaccagtgactccctgcaccagcagtggctcaccccaattccctccaggccctgggatctgagggaggggagaagccaccaccattaccctgatttccaccaggagctccaggaccgggggccaaagtcttgggcattggaaagaagggagttggacccatcgtggagtggaaggcaccgtagctctaggctgaatgggtcacccatacactggtcagacagggacagcctaagcgatgtcccctcatccagtgaggcacgctggcggccgagccaccctcctttcaggagccgctgtcaggagaggccccgcaggcccagcccccgggagagcactcagaggcacgggagacgacgcaggcaccgcagctactctcctcccttgccctccggcctcagttcctggagctctgaagaggacaaggagaggcagccccagagctggcgggcccaccgccgcggctcgcactccccacactggcccgaggagaagccgcctagctaccgctcacttgatatcactccaggcaagaatagcaggaaaaaagggagtgtggagaggcgctcggagaaagacagctctcatagtggaaggagtgtggtcatttagtcaccaagcacagcacaacttctgtggctacttctcg

SEQ ID NO: 78434 - DNA, 639 bp, Artificial Sequence
  derived and/or modified sequence
atggcctggcccaagctgcctgccccctggctgctgctgtgcacctggctgcctgctggctgcctgagcctgctggtgacagtgcagcacacagagcgctacgtgaccctgtttgccagcatcatcctgaagtgtgactacaccaccagcgcccagctgcaggatgtggtggtgacctggaggttcaagagcttctgcaaggaccccatctttgactactacagcgccagctaccaggccgccctgagcctgggccaggaccccagcaatgactgctgctgctgcccagaggaggccctggcccggcaccgctacatgaagcaggcccaggccctgggcccccagatgatgggcaagcccctgtactggggcgctgacaggagcagccaggtgtcctcctaccccatgcaccccctgctgcagagggacctgagcctgcccagcagcctgccccagatgcccatgacccagaccaccaaccagccccccatcgccaacggggtgctggagtacctggagaaggagctgaggaacctgaacctggcccagcccctgcccccagacctgaagggccgcttcggccacccctgcagcatgctgagcagcctgggcagcgagaaccagatcgaggagttctag

SEQ ID NO: 78435 - DNA, 1374 bp, Artificial Sequence
  derived and/or modified sequence
atggcctggcccaagctgcctgccccctggctgctgctgtgcacctggctgcctgctggctgcctgagcctgctggtgacagtgcagcacacagagcgctacgtgaccctgtttgccagcatcatcctgaagtgtgactacaccaccagcgcccagctgcaggatgtggtggtgacctggaggttcaagagcttctgcaaggaccccatctttgactactacagcgccagctaccaggccgccctgagcctgggccaggaccccagcaatgactgcaatgacaaccagcgggaggtgagaattgtggcccagaggcggggccagaatgaacctgtgctgggcgtggactaccggcagaggaagatcaccatccagaaccccctggcccggcaccgctacatgaagcaggcccaggccctgggcccccagatgatgggcaagcccctgtactggggcgctgacaggagcagccaggtgtcctcctaccccatgcaccccctgctgcagagggacctgagcctgcccagcagcctgccccagatgcccatgacccagaccaccaaccagccccccatcgccaacggggtgctggagtacctggagaaggagctgaggaacctgaacctggcccagcccctgcccccagacctgaagggccgcttcggccacccctgcagcatgctgagcagcctgggcagcgaggtggtggagcggcgcatcatccacctgcccccactcatccgggacctgagcagcagcaggaggaccagtgacagcctgcaccagcagtggctgacccccatccccagccggccctgggacctgcgggagggccgcagccaccaccactacccagacttccaccaggagctgcaggaccggggccccaagtcctgggccctggagcggcgggagctggaccccagctggagcggccgccacaggagcagccggctgaatggcagccccatccactggagcgaccgggacagcctgagtgatgtgcccagcagcagcgaggcccgctggaggcccagccacccccccttccgcagccgctgccaggagcggccccggcggcccagcccccgggagagcacccagagacatggaagaagaagaagacacaggagctacagcccccccctgcccagcggcctgagctcctggagcagcgaggaggacaaggagcggcagccccagagctggagggcccacagaagaggcagccacagcccccactggccagaggagaagccacccagctaccgcagcctggacatcacccctgggaagaacagcaggaagaagggctctgtggagcggcgctctgagaaggacagcagccacagcggccgctctgtggtgatctag

SEQ ID NO: 78436 - DNA, 639 bp, Artificial Sequence
  derived and/or modified sequence
atggcctggcccaagctgcccgccccctggctgctgctgtgcacctggctgcccgcaggctgcctgtctttgctggtaaccgttcagcataccgaacgttacgttacactattcgcaagcatcatcctgaagtgcgattataccacctctgcacagcttcaagatgtggtggtgacctggagatttaagtcgttttgtaaggaccccatttttgactattatagtgccagttaccaggccgccctgtctttaggccaggatccatctaatgactgctgttgctgtcctgaagaggcattggctagacaccgttatatgaagcaagcccaggccctgggaccccagatgatgggcaagcccctttattggggcgccgaccgctcttctcaggtgtcttcatatcctatgcaccccttgctgcaacgagacctgtctctgccctcaagcctgcctcagatgcctatgacgcaaactactaaccaaccccctatagcaaacggagtcctggagtacctggaaaaagagctgaggaatctcaacttagcgcaacccttaccaccggatctgaagggacgttttggacacccctgttccatgttgtcatccctagggtccgagaatcagatcgaagagttctag

SEQ ID NO: 78437 - DNA, 1374 bp, Artificial Sequence
  derived and/or modified sequence
atggcctggcccaagctgcccgccccctggctgctgctgtgcacctggctcccggccggatgtctgtcactgctagtcaccgtgcagcacacagagcggtatgtgactctgtttgcgagtatcatcttaaagtgcgactataccacgagcgcccaactacaggatgtcgtcgtcacttggaggtttaaatccttctgtaaggatcccatattcgactactacagtgcctcataccaggcggctctctcactagggcaggaccccagcaatgactgcaacgacaaccagcgggaggtccgcatcgtagcacagcgacgcggacaaaatgaaccagtgttgggcgttgattaccgacagcgcaaaattacaatccagaaccctctcgccagacataggtacatgaagcaggctcaggccctggggcctcagatgatgggaaagcccttatattggggggccgaccggagctctcaggtgtcatcttacccaatgcatcctttgcttcagagggatctctccctgccctcttctcttccccaaatgccgatgacccagaccactaatcagcccccaatagcaaacggggtgctggaatacctggagaaagagctgcggaatttgaacttggctcaaccgcttcccccggatctgaagggtaggtttggccatccttgttccatgctctcctcattaggatctgaagtggtcgagcgcaggattattcatttgccccccctcattcgcgaccttagttccagtaggcgcacatcagattcacttcatcagcagtggctgacgcccattccaagtcgcccctgggatctgcgcgagggaagaagccaccatcactaccccgacttccaccaggagctccaggaccgaggtcccaaaagttgggccttagaacgccgtgagctggatccctcttggagcggccgccatcggtcctcccgactcaatgggtcccccattcattggtcagaccgggactctctgtcagatgtgcccagctcctctgaggccagatggcggccgtcacatcctccgttccgctccaggtgtcaggagcggcctaggagaccctctccaagagaatctacgcagcggcatggtcgcaggcgaagacacaggtcatactctcccccattaccttctggattaagtagctggtctagcgaggaggataaggaacgccagccgcagtcctggcgggcacacagacggggatctcacagtcctcactggcctgaagagaaacccccatcctacagatccctggatataacacctggaaaaaactctagaaaaaaaggaagtgtcgaaagaaggtctgagaaggattcttctcacagcggtcgaagcgtggtgatctag

SEQ ID NO: 78438 - DNA, 639 bp, Artificial Sequence
  derived and/or modified sequence
atggcctggccaaaactgccagctccgtggctgcttttatgtacctggctgcctgctggctgtctgtcacttctggtaaccgtccagcatacagaacggtatgtgacactttttgccagcatcatattgaaatgtgactatacgaccagtgcccagctgcaggatgtcgttgtgacgtggcgcttcaagtccttttgcaaagaccccatcttcgactattacagtgccagttatcaagctgcactgagtctaggccaagatcctagcaacgactgttgctgttgtccagaagaggctctggccagacatcgctatatgaagcaggcccaggccctaggaccgcaaatgatgggtaaaccgctgtactggggtgccgaccgtagctcgcaggtgtctagctatccaatgcatcctcttttacagagagacttgagcctcccaagttccctaccccaaatgccaatgactcagactaccaaccagccaccgatcgcaaacggagtgctggagtacctggagaaggagctgaggaacctcaacctagctcagcctttgccacctgacctgaagggcagatttggccatccttgctcaatgcttagctccctgggtagcgaaaaccagatcgaggagttctag

SEQ ID NO: 78439 - DNA, 1374 bp, Artificial Sequence
  derived and/or modified sequence
atggcctggcctaagttacctgccccttggctcctcctgtgcacttggctgcctgccggatgcctttcattactggtaactgtgcagcacaccgaaaggtacgtcaccctgtttgcttccatcatcttgaagtgcgactataccacctctgcacagcttcaggacgtggtcgtgacatggcgatttaagtcattctgtaaggatcccatatttgattattattccgctagctatcaggcagctctatctctggggcaggatcccagcaacgattgcaatgacaatcagagagaagtaaggatagttgctcagaggcggggacagaacgagccagttctgggcgtggattacaggcagagaaaaattaccatccaaaacccacttgctcgccaccgctacatgaagcaggcccaagccttaggaccgcagatgatggggaagcccctttactggggtgcagacagaagcagtcaggtgtcgtcatacccaatgcatcccttgctgcagcgcgatctgtccttgccttctagtctacctcagatgcctatgacacagaccaccaatcagccacccatcgcaaatggagtcttagaatacctcgaaaaggaactgcggaatctgaaccttgctcagcccctgccacccgatcttaaaggcagatttgggcatccctgctccatgctgtcgagcttgggctctgaagtggtagagagacgaataatccatcttcccccactaatacgggacctctcaagtagccgtcgcacaagcgacagccttcatcagcaatggctcaccccaattccatcgagaccctgggatctcagagaaggaaggagccatcaccactatcccgatttccaccaagagctgcaggatcggggtccgaagagctgggcgctggagaggagagaattggaccctagctggtccgggaggcaccggtcttcacggctgaacgggagccccatccattggagcgacagagattcattgtccgatgtgccaagcagttccgaagctcggtggagacccagtcatcctcctttccggtcaaggtgccaagaaagacccaggcgtcctagtcccagggaatctacccagcgtcacggcagaagacggcgacataggagttattccccaccgttgccgagcggactgtcatcatggagcagtgaagaagataaggagcggcagccccaaagttggcgggcacacagacgtggttctcatagtcctcattggcccgaggagaagccgccatcgtataggagcctagatatcacgccaggcaaaaatagtagaaaaaaaggttctgttgagagaaggagtgagaaggattcctctcactcgggacgatcagttgtgatctag

SEQ ID NO: 78440 - DNA, 639 bp, Artificial Sequence
  derived and/or modified sequence
atggcctggcccaagctgcccgccccctggctgctgctgtgcacctggctgcccgccggctgcctgagcctgctggtgaccgtgcagcacaccgagagatacgtgaccctgttcgccagcatcatcctgaagtgcgactacaccaccagcgcccagctgcaggacgtggtggtgacctggagattcaagagcttctgcaaggaccccatcttcgactactacagcgccagctaccaggccgccctgagcctgggccaggaccccagcaacgactgctgctgctgccccgaggaggccctggccagacacagatacatgaagcaggcccaggccctgggcccccagatgatgggcaagcccctgtactggggcgccgacagaagcagccaggtgagcagctaccccatgcaccccctgctgcagagagacctgagcctgcccagcagcctgccccagatgcccatgacccagaccaccaaccagccccccatcgccaacggcgtgctggagtacctggagaaggagctgagaaacctgaacctggcccagcccctgccccccgacctgaagggcagattcggccacccctgcagcatgctgagcagcctgggcagcgagaaccagatcgaggagttctag

SEQ ID NO: 78441 - DNA, 1374 bp, Artificial Sequence
  derived and/or modified sequence
atggcctggcccaagctgcccgccccctggctgctgctgtgcacctggctgcccgccggctgcctgagcctgctggtgaccgtgcagcacaccgagagatacgtgaccctgttcgccagcatcatcctgaagtgcgactacaccaccagcgcccagctgcaggacgtggtggtgacctggagattcaagagcttctgcaaggaccccatcttcgactactacagcgccagctaccaggccgccctgagcctgggccaggaccccagcaacgactgcaacgacaaccagagagaggtgagaatcgtggcccagagaagaggccagaacgagcccgtgctgggcgtggactacagacagagaaagatcaccatccagaaccccctggccagacacagatacatgaagcaggcccaggccctgggcccccagatgatgggcaagcccctgtactggggcgccgacagaagcagccaggtgagcagctaccccatgcaccccctgctgcagagagacctgagcctgcccagcagcctgccccagatgcccatgacccagaccaccaaccagccccccatcgccaacggcgtgctggagtacctggagaaggagctgagaaacctgaacctggcccagcccctgccccccgacctgaagggcagattcggccacccctgcagcatgctgagcagcctgggcagcgaggtggtggagagaagaatcatccacctgccccccctgatcagagacctgagcagcagcagaagaaccagcgacagcctgcaccagcagtggctgacccccatccccagcagaccctgggacctgagagagggcagaagccaccaccactaccccgacttccaccaggagctgcaggacagaggccccaagagctgggccctggagagaagagagctggaccccagctggagcggcagacacagaagcagcagactgaacggcagccccatccactggagcgacagagacagcctgagcgacgtgcccagcagcagcgaggccagatggagacccagccacccccccttcagaagcagatgccaggagagacccagaagacccagccccagagagagcacccagagacacggcagaagaagaagacacagaagctacagcccccccctgcccagcggcctgagcagctggagcagcgaggaggacaaggagagacagccccagagctggagagcccacagaagaggcagccacagcccccactggcccgaggagaagccccccagctacagaagcctggacatcacccccggcaagaacagcagaaagaagggcagcgtggagagaagaagcgagaaggacagcagccacagcggcagaagcgtggtgatctag

SEQ ID NO: 78442 - protein, 294 aa, Artificial Sequence
  derived and/or modified sequence
MAGILASGLGVLAHLERLETQVSRSRKQSEELQSVQAQEGALGTKIHKLRRLRDELRAVVRHRRASVKACIANVEPNQTVEINEQEALEEKLENVKAILQAYHFTGLSGKLTSRGVCVCISTAFEGNLLDSYFVDLVIQKPLRIHHHSVPVFIPLEEIAAKYLQTNIQHFLFSLCEYLNAYSGRKYQADRLQSDFAALLTGPLQRNPLCNLLSFTYKLDPGGQSFPFCARLLYKDLTATLPTDVTVTCQGVEVLSTSWEEQRASHETLFCTKPLHQVFASFTRKGEKLDMSLVS

SEQ ID NO: 78443 - DNA, 885 bp, Artificial Sequence
  derived and/or modified sequence
atggctggcattctggcctctggcttgggcgtactcgcacacttagaacgtctggagacacaagttagcagaagccgtaagcagtccgaggaactacaatctgtgcaagcgcaggagggggcgttgggaaccaagattcataagctgaggaggttgagagacgagttgagggcagttgtgcgccatcggcgggccagcgtgaaggcatgtatcgccaacgtggagccgaaccagacagtggaaattaacgaacaggaggcattggaagagaagctggagaacgtgaaggcgatcttgcaggcttaccattttaccggtctctctgggaagttaacttctaggggtgtgtgtgtatgcatttccacagcctttgaggggaatctgctggacagttactttgtcgacctcgtgattcaaaagcctcttaggatccatcaccactctgtccctgtttttatacccttggaggagattgcggccaagtatctgcagactaatatacagcactttctgttttcactgtgcgagtacctgaacgcatacagtgggagaaaataccaggccgaccggctccaatcagacttcgcagccctgctaacaggaccactccagcggaatccactgtgcaatcttctctcatttacctataagctggacccgggaggccagtcttttcccttttgcgccagactgttatacaaggacctgacagccacacttccgacggatgtgacggtgacctgccagggagtcgaggttctgtcaacttcttgggaggagcagcgggccagccatgagacgctgttctgcaccaagccactgcaccaggtcttcgcctcgtttacgaggaagggtgaaaaactagatatgtcgctggtgtcatag

SEQ ID NO: 78444 - DNA, 885 bp, Artificial Sequence
  derived and/or modified sequence
atggccggcatcctggccagcggcctgggcgtgctggcccacctggagcggctggagacccaggtgagccgcagcaggaagcagagcgaggagctgcagagcgtgcaggcccaggagggcgccctgggcaccaagatccacaagctgcggcggctgagagatgagctgcgggctgtggtgcgccacagaagagcctctgtgaaggcctgcatcgccaacgtggagcccaaccagacagtggagatcaatgagcaggaggccctggaggagaagctggagaatgtgaaggccatcctgcaggcctaccacttcaccggcctgagcggcaagctgaccagcagaggagtgtgtgtgtgcatcagcacagcctttgagggcaacctgctggacagctactttgtggacctggtgatccagaagcccctgcgcatccaccaccacagcgtgcctgtgttcatccccctggaggagattgctgccaagtacctgcagaccaacatccagcacttcctgttcagcctgtgtgagtacctgaatgcctacagcggcaggaagtaccaggccgaccggctgcagagcgactttgctgccctgctgaccggccccctgcagaggaaccccctgtgcaacctgctgtccttcacctacaagctggaccccggcggccagagcttccccttctgtgcccggctgctgtacaaggacctgacagccaccctgcccacagatgtgacagtgacctgccagggcgtggaggtgctgagcacctcctgggaggagcagagggccagccatgagaccctcttctgcaccaagcccctgcaccaggtgtttgccagcttcaccaggaagggggagaagctggacatgagcctggtgtcctag

SEQ ID NO: 78445 - DNA, 885 bp, Artificial Sequence
  derived and/or modified sequence
atggccggcatcctggccagcggcctgggcgtgctggcccacctggagcgccttgaaacacaggtaagccgctcgagaaaacagagtgaagagctgcaaagtgttcaggctcaagaaggggccctgggaacaaagatccacaagctgaggcgtttgagggatgaactgagggctgtggtcagacatcggcgagcctcggtgaaggcgtgtattgccaatgtggaaccgaatcagacagtggagatcaacgagcaggaggccctcgaagagaagctcgagaatgtcaaggctatactgcaggcctaccattttacaggcctcagcggcaaactgacaagccgtggggtatgcgtgtgtatttcaaccgcctttgagggcaacctactggattcatacttcgtggatctcgtgatacagaaaccattaaggattcatcaccacagtgtgccggtttttatccctctagaagaaattgcagccaagtatctgcaaaccaacatccagcactttctcttttccttgtgcgagtacctcaacgcttacagcggacgcaaatatcaagcagaccgcctgcagtccgactttgcggccctgctaactgggccgctgcaaaggaacccactgtgcaacctcctaagtttcacttacaagctggaccctggggggcagagcttccccttctgtgctcggctcctgtataaagacctcaccgctactttgccaacggacgttaccgtgacctgccagggggtggaggttttgagtacgtcatgggaggaacaaagagctagtcatgaaacattgttctgcacgaagcccctgcatcaagtgtttgcaagctttacacggaaaggcgagaagctggacatgagcctggtgtcctag

SEQ ID NO: 78446 - DNA, 885 bp, Artificial Sequence
  derived and/or modified sequence
atggccggaattttggctagtggcctgggagtgcttgcccacctggaacgcctggagacccaagtctccagatctcgcaagcagagcgaagagctccagtctgtgcaagctcaggaaggggctctggggactaaaattcacaagctaagacggttgagagatgagctgcgggcagtagttagacatcgacgagcaagcgtcaaagcttgcatagctaatgtcgagccaaaccaaacagtcgagatcaacgaacaagaggccctggaagaaaagctcgaaaacgtcaaggctattttacaagcttaccactttaccggcctatccggaaaattaacttctaggggagtgtgcgtgtgcatcagcacggcatttgaaggcaacctgctcgacagctacttcgtggatctggtgattcagaagccactgagaattcatcaccactctgtgcctgtcttcattcccttggaagagatcgcagccaaatacctgcaaactaatatccagcactttctgttctccctgtgtgaatatcttaatgcctacagcggcagaaagtatcaagctgaccgcttgcagtccgacttcgcagccctgttaaccggcccacttcagcggaatccgctgtgtaacttgctaagctttacttataagcttgacccaggtggccagtcttttcctttttgtgcacgactactgtacaaagatctgacggccacacttcctactgacgttaccgtaacgtgtcagggagtggaggttctgagcacatcttgggaggaacagcgagccagccacgagaccttgttctgtaccaaacctctgcaccaggtcttcgccagtttcaccagaaaaggcgagaaactggatatgtctttggtatcttag

SEQ ID NO: 78447 - DNA, 4272 bp, Artificial Sequence
  derived and/or modified sequence
atgcgccccagctcttggaggtaagcggctgtgtgcgggtggtcgcggtgagtgtgcaaggccgcggtggccgcgtgacaagcctgcgctaccagtgcgcccgccggccaggagaacggagcttgtgatagatcctttcgtaacaccaagtattgtaccaggacctgcggctccgccccagaggccgccatcttcctgaccacccgaaaggccggacctactccccggtgcatcttgggatcagggcggggccctgagcgccgccatgcttttgtacggcaggatcgcaaagcacgccgggaccggttggtttggttttgaagacgtggatggcgggaattctcgcttctggcctgggtgttttagctcacttggaaaggctagagacccaagtgagcagatcccgtaaacagtctgaagagctgcagagcgtgcaggcccaggaaggtgctcttggaaccaagattcataaactaaggcgtctgcgagatgagctgagggctgtggtgcggcaccggcgagccagcgtgaaagcatgtattgccaatgtagaacccaaccaaacagtggagatcaatgagcaagaagcattggaagagaaattggaaaatgtgaaagccattctgcaggcatatcattttacaggcctcagtggtaaactgaccagccgaggagtttgtgtctgcatcagtactgcttttgaggggaacctattggattcctattttgtggaccttgtcatacagaaaccactccggatacatcaccattcagtcccagtcttcattcccctggaagagatagctgcaaaatatttacagaccaacatccagcacttcctgttcagtctctgcgagtacctgaatgcttactctgggaggaagtaccaggcagaccggcttcagagtgactttgcagccctcctgactgggcccttgcagagaaacccactgtgtaacttgctgtcatttacttacaaactggatccagggggtcagtccttcccgttctgtgctagattgctgtataaggacctcacagcaactcttcccactgacgtcaccgtgacatgtcaaggagtggaagtattatccacttcatgggaggagcaacgagcatctcatgaaactctgttctgtacgaagcccttgcatcaagtgtttgcctcatttacaagaaaaggagaaaagttggatatgagtctggtctcctaatagattgttttcactgcactgggagcacatcagagaaataaatcccccctcccctgccaggtgaaaggaaatattgcactttctgttctcatgactaaggggacaggagttccagaagaacctttcaagatgatcaggaacaccaggacgagggccgtctcacctcactcggaccacatggagacctcccttcaaaatgggagccatgtcctgccccaccaagccctgtctgaagtggagcttccccgcctgtgctccctccacagtcccggaaagcccagcggcaaaggcagctttgtcccagctctgccaccctcctgctcacagtggtcagggcccctcaggggcaaggacggcagggattggaacgagggctctggaaggactgttcagccctatgcctaagacccctatgctggggacactacaggcacacacaggaatagcagggccaccctcagagctcacacatccacgaacaaatgaaggctgaggaggtttctaaacctaaagtccatgagtgtgcacttcaatccaggaaggtcgggacttccttcagtttcaaaaaataaattctcccttccggtttggactgttgcaggctcgaggccattcaggagttgtccaccacctggtggggcagtgtgacagaggggccattggggaaggtggctagcttatcccgccccttcaagaagaaggtcagcagctcccccttccccttcacaaagatggggcctcgcctcacaaagcggaagccgtactctcggaggatgacttgggtttcttctaccacctggagagggagggggagcaagaacgtggcgttacggggggagcctagactgagggcgggtgggggctttgggtggttggagccgagcactgatccatgggtcccaagcagtacgggacactccccaaacctcccagggccaagcccttccacccgtggcgagcagcgggtgggaaggagaaccctggagtgactggctgggggcctcctctcatccagagacttctctcctaggatggccatggtcacctgggtggcagcactgttacctggaaactgccactgcctgctcttctgtccctttgcccctttcgtggagcttttctgccagacgccactgagacagatcacaaggtattagaaggttcatacccaaaggtaggccatatgcatctagaacttcagcccagattttgtggatgggtggaagtgtttcttcctgtgctgaggctagctattgcagagattcttttccacttgccccacgtctctgcctctggacttactgttcagggccagggtgggaggcaggggcacgtgggaaagcactgttccggttttgttctcatgccgagtctgagcacgtgccagctgtgccactggacatacctgaatgttgcccatgacccccgtggactccatcctgctggctacattgactgtattgccccagatgtcgtagtgtggtttccgggctccgatgaccccagccagaaccccgcctttgttcatgcctagggtagaggcataaagttcagcacagccacaggccacaccttgttatgggcctcagaagccatctcctctccagacctgtaccacaaagctcctaatgtaacacatcattgtcctcattcaacttggctgtatgctattggagggtggaaatcacatctcctgtttatccgtgtgcttgttaggtgtcagccgccaccccccccccatatgcagatttactcggcatggtagtggccagcttctaacacagctggtatttcaagtctcctgggacctcactcaggaatgataccccctcagtagaagcagcaggtgatcttaactcctttcaaagagcaggcctgtctgggaagccatgtcctcagcaggcacagcaacccctctggaaatggatcacaaactcacttctcagccaggcaggccaagcttctattgtaacagtaggcacagtatagtcggatcatcacatcagctgggtttttggtttagtcatctagagtcgtctggactaaaggtctttcaggtctccttgccctgtgagtgcgtgaacctccccacccgaattgcctcagttgtcctgagcctcatgtctctcctggtggtgggccaggcccctgcatgggaagggagcctgctgcggggcaggccagctgggggtgctcacctatgcgcagcatgaagttattgaaggactggttgttgatgttggtgagcgtatccttcatggccagcgcgaagtcggccaggtcagccaggtgctgccagcgctctctctcggacttgtcttcctgtgccaggggaccgtggagaaagtgtcaggggccgctcactgcagcagcctgctctgctgccttccctggcagtgttctgggggtggattccctacacctagatgttcaaggccttacttttcctcccacaaaggagtcgcagccacgctagctctgacttgccactgtgacaaagttcacgtagcaggtctaggcaaagactgggcaattgagcagaggagacggacctgtgagtctgaccacgaggcggaccccttcaccttggctgggcctggtcctggtccttaggttttgtcaggttgtccttgtttggatccctcaactaggtgataagcactggagggggatgacccgccttggacgtgtttctttaacctcatccatataatagggccgtgggatggttgtagaggtaaagcaggatgatggtgttttaagaccagagcttgggaccagggctcctacacctaattttctctcctggtagctgaacaaaggtctaaattagcttaacaaaagaacaggctgccgtcagccagagttctgaaggccatgctttcagtttcccttgttgacaattgctctccagttcctatgaaagcacagagccttagggggcctggccacagaacacaaccatcttaggcctgagctgtgaacagcagggggttgtgtgtctgttctgtttctctgcttgccgaactttctcaataaaccctatttcttatttata

SEQ ID NO: 78448 - DNA, 885 bp, Artificial Sequence
  derived and/or modified sequence
atggccggcatcctggccagcggcctgggcgtgctggcccacctggagagactggagacccaggtgagcagaagcagaaagcagagcgaggagctgcagagcgtgcaggcccaggagggcgccctgggcaccaagatccacaagctgagaagactgagagacgagctgagagccgtggtgagacacagaagagccagcgtgaaggcctgcatcgccaacgtggagcccaaccagaccgtggagatcaacgagcaggaggccctggaggagaagctggagaacgtgaaggccatcctgcaggcctaccacttcaccggcctgagcggcaagctgaccagcagaggcgtgtgcgtgtgcatcagcaccgccttcgagggcaacctgctggacagctacttcgtggacctggtgatccagaagcccctgagaatccaccaccacagcgtgcccgtgttcatccccctggaggagatcgccgccaagtacctgcagaccaacatccagcacttcctgttcagcctgtgcgagtacctgaacgcctacagcggcagaaagtaccaggccgacagactgcagagcgacttcgccgccctgctgaccggccccctgcagagaaaccccctgtgcaacctgctgagcttcacctacaagctggaccccggcggccagagcttccccttctgcgccagactgctgtacaaggacctgaccgccaccctgcccaccgacgtgaccgtgacctgccagggcgtggaggtgctgagcaccagctgggaggagcagagagccagccacgagaccctgttctgcaccaagcccctgcaccaggtgttcgccagcttcaccagaaagggcgagaagctggacatgagcctggtgagctag

SEQ ID NO: 78449 - protein, 216 aa, Artificial Sequence
  derived and/or modified sequence
MGWIRGRRSRHSWEMSEFHNYNLDLKKSDFSTRWQKQRCPVVKSKCRENASPFFFCCFIAVAMGIRFIIMVTIWSAVFLNSLFNQEVQIPLTESYCGPCPKNWICYKNNCYQFFDESKNWYESQASCMSQNASLLKVYSKEDQDLLKLVKSYHWMGLVHIPTNGSWQWEDGSILSPNLLTIIEMQKGDCALYASSFKGYIENCSTPNTYICMQRTV

SEQ ID NO: 78450 - protein, 80 aa, Artificial Sequence
  derived and/or modified sequence
MGWIRGRRSRHSWEMSEFHNYNLDLKKSDFSTRWQKQRCPVVKSKCRENASPFFFCCFIAVAMGIRFIIMVTIWSAVFLN

SEQ ID NO: 78451 - DNA, 1750 bp, Artificial Sequence
  derived and/or modified sequence
gaggagtggattacatattccaacagttgttattacattggtaaggaaagaagaacttgggaagaaagagtttgctggcctgtgcttcgaagaactctgatctgctttctatagataatgaggaagaaatggtatgtgtggggacttcccagttggctgtaagttgccatttgaactaaacgaaatagatcaggaactgaggacatatctaaattttctagttttatagaaggcttttatccacaagaatcaagatcttccctctctgagcaggaatcctttgtgcattgaagactttagattcctctctgcggtagacgtgcacttataagtatttgatggggtggattcgtggtcggaggtctcgacacagctgggagatgagtgaatttcataattataacttggatctgaagaagagtgatttttcaacacgatggcaaaagcaaagatgtccagtagtcaaaagcaaatgtagagaaaatgcatctccattttttttctgctgcttcatcgctgtagccatgggaatccgtttcattattatggtaacaatatggagtgctgtattcctaaactcattattcaaccaagaagttcaaattcccttgaccgaaagttactgtggcccatgtcctaaaaactggatatgttacaaaaataactgctaccaattttttgatgagagtaaaaactggtatgagagccaggcttcttgtatgtctcaaaatgccagccttctgaaagtatacagcaaagaggaccaggatttacttaaactggtgaagtcatatcattggatgggactagtacacattccaacaaatggatcttggcagtgggaagatggctccattctctcacccaacctactaacaataattgaaatgcagaagggagactgtgcactctatgcctcgagctttaaaggctatatagaaaactgttcaactccaaatacgtacatctgcatgcaaaggactgtgtaaagatgatcaaccatctcaataaaagccaggaacagagaagagattacaccagcggtaacactgccaactgagactaaaggaaacaaacaaaaacaggacaaaatgaccaaagactgtcagatttcttagactccacaggaccaaaccatagaacaatttcactgcaaacatgcatgattctccaagacaaaagaagagagatcctaaaggcaattcagatatccccaaggctgcctctcccaccacaagcccagagtggatgggctgggggaggggtgctgttttaatttctaaaggtaggaccaacacccaggggatcagtgaaggaagagaaggccagcagatcactgagagtgcaaccccaccctccacaggaaattgcctcatgggcagggccacagcagagagacacagcatgggcagtgccttccctgcctgtgggggtcatgctgccacttttaatgggtcctccacccaacggggtcagggaggtggtgctgccccagtgggccatgattatcttaaaggcattattctccagccttaagtaagatcttaggacgtttcctttgctatgatttgtacttgcttgagtcccatgactgtttctcttcctctctttcttccttttggaatagtaatatccatcctatgtttgtcccactattgtattttggaagcacataacttgtttggtttcacaggttcacagttaagaaggaattttgcctctgaataaatagaatcttgagtctcatgca

SEQ ID NO: 78452 - DNA, 651 bp, Artificial Sequence
  derived and/or modified sequence
atgggctggatcagaggccgaagaagccgccatagttgggagatgagcgagttccataattataacctcgatctaaaaaagtcagatttcagcactcgctggcagaaacagcgctgccccgttgtgaaatcaaagtgtagagagaatgcaagccctttcttcttttgctgcttcatcgccgtggctatgggaatccgcttcattatcatggtgactatctggagcgcagtgttcttaaattccctttttaatcaggaggttcaaatcccccttacagagagttactgtggcccctgtcctaagaactggatttgctacaagaacaactgttaccagttcttcgatgagtcaaaaaactggtatgagtcccaggcgtcatgtatgagccagaatgctagcttgttaaaggtctattccaaagaagaccaggatcttctgaaattagtcaaatcataccactggatgggtctcgtacacattcctacgaatgggagctggcagtgggaggacgggtctatcttatcgcctaatctgcttactatcatagaaatgcagaagggcgactgcgccctatacgccagctccttcaaggggtacatagagaattgcagtacacccaacacatacatctgtatgcaacggaccgtgtag

SEQ ID NO: 78453 - DNA, 243 bp, Artificial Sequence
  derived and/or modified sequence
atgggatggatacgcggtaggagatcacggcattcatgggaaatgagcgaattccacaattacaatctggacctcaagaagagcgacttctcaactagatggcagaagcagcggtgtccggtagtaaaatccaagtgtcgcgagaacgcctcacccttcttcttttgttgtttcattgcggtcgccatgggaatcaggtttattattatggtgacaatctggagtgccgtgtttctaaactag

SEQ ID NO: 78454 - DNA, 651 bp, Artificial Sequence
  derived and/or modified sequence
atgggatggattagggggagacgctctaggcactcatgggagatgtctgagttccataattataacctggatcttaaaaaatcagattttagcaccagatggcagaaacagcgctgtcccgtcgttaaatctaagtgccgcgagaacgcctcccccttcttcttttgttgttttatagctgtggcaatgggaatacgctttatcataatggtgaccatctggtctgctgtctttctgaactctctgtttaaccaggaggtccagataccactgaccgagagctattgtggcccatgccctaagaactggatctgctacaagaataattgttatcagtttttcgacgagagtaaaaactggtacgagtcccaggcctcgtgcatgtcacagaacgccagcctccttaaggtgtactctaaggaggatcaagacctgttaaaactcgtgaagagttatcattggatggggctcgttcacatcccaaccaacggatcctggcagtgggaggatgggtctatcctgtcccccaatctgctgacgatcatcgaaatgcagaagggcgactgcgccctgtacgcatcttccttcaaaggctatattgagaattgttcgactccaaacacttatatctgtatgcagcggacagtttag

SEQ ID NO: 78455 - DNA, 1553 bp, Artificial Sequence
  derived and/or modified sequence
tgaggacatatctaaattttctagttttatagaaggcttttatccacaagaatcaagatcttccctctctgagcaggaatcctttgtgcattgaagactttagattcctctctgcggtagacgtgcacttataagtatttgatggggtggattcgtggtcggaggtctcgacacagctgggagatgagtgaatttcataattataacttggatctgaagaagagtgatttttcaacacgatggcaaaagcaaagatgtccagtagtcaaaagcaaatgtagagaaaatgcatctccattttttttctgctgcttcatcgctgtagccatgggaatccgtttcattattatggtaacaatatggagtgctgtattcctaaactcattattcaaccaagaagttcaaattcccttgaccgaaagttactgtggcccatgtcctaaaaactggatatgttacaaaaataactgctaccaattttttgatgagagtaaaaactggtatgagagccaggcttcttgtatgtctcaaaatgccagccttctgaaagtatacagcaaagaggaccaggatttacttaaactggtgaagtcatatcattggatgggactagtacacattccaacaaatggatcttggcagtgggaagatggctccattctctcacccaacctactaacaataattgaaatgcagaagggagactgtgcactctatgcctcgagctttaaaggctatatagaaaactgttcaactccaaatacgtacatctgcatgcaaaggactgtgtaaagatgatcaaccatctcaataaaagccaggaacagagaagagattacaccagcggtaacactgccaactgagactaaaggaaacaaacaaaaacaggacaaaatgaccaaagactgtcagatttcttagactccacaggaccaaaccatagaacaatttcactgcaaacatgcatgattctccaagacaaaagaagagagatcctaaaggcaattcagatatccccaaggctgcctctcccaccacaagcccagagtggatgggctgggggaggggtgctgttttaatttctaaaggtaggaccaacacccaggggatcagtgaaggaagagaaggccagcagatcactgagagtgcaaccccaccctccacaggaaattgcctcatgggcagggccacagcagagagacacagcatgggcagtgccttccctgcctgtgggggtcatgctgccacttttaatgggtcctccacccaacggggtcagggaggtggtgctgccccagtgggccatgattatcttaaaggcattattctccagccttaagtaagatcttaggacgtttcctttgctatgatttgtacttgcttgagtcccatgactgtttctcttcctctctttcttccttttggaatagtaatatccatcctatgtttgtcccactattgtattttggaagcacataacttgtttggtttcacaggttcacagttaagaaggaattttgcctctgaataaatagaatcttgagtctcatgca

SEQ ID NO: 78456 - DNA, 734 bp, Artificial Sequence
  derived and/or modified sequence
ccagttggctgtaagttgccatttgaactaaacgaaatagatcaggaactgaggacatatctaaattttctagttttatagaaggcttttatccacaagaatcaagatcttccctctctgagcaggaatcctttgtgcattgaagactttagattcctctctgcggtagacgtgcacttataagtatttgatggggtggattcgtggtcggaggtctcgacacagctgggagatgagtgaatttcataattataacttggatctgaagaagagtgatttttcaacacgatggcaaaagcaaagatgtccagtagtcaaaagcaaatgtagagaaaatgcatctccattttttttctgctgcttcatcgctgtagccatgggaatccgtttcattattatggtaacaatatggagtgctgtattcctaaactaaagttactgtggcccatgtcctaaaaactggatatgttacaaaaataactgctaccaattttttgatgagagtaaaaactggtatgagagccaggcttcttgtatgtctcaaaatgccagccttctgaaagtatacagcaaagaggaccaggatttacttaaactggtgaagtcatatcattggatgggactagtacacattccaacaaatggatcttggcagtgggaagatggctccattctctcacccaacctactaacaataattgaaatgcagaagggagactgtgcactctatgcct

SEQ ID NO: 78457 - DNA, 951 bp, Artificial Sequence
  derived and/or modified sequence
cacaggggaaaagtttctgcattttacttttctattcaaaatattttatctcaccacgggaaagagaacaaaaaacaaatgcccagttttattttattcaggaatcctttgtgcattgaagactttagattcctctctgcggtagacgtgcacttataagtatttgatggggtggattcgtggtcggaggtctcgacacagctgggagatgagtgaatttcataattataacttggatctgaagaagagtgatttttcaacacgatggcaaaagcaaagatgtccagtagtcaaaagcaaatgtagagaaaatgcatctccattttttttctgctgcttcatcgctgtagccatgggaatccgtttcattattatggtaacaatatggagtgctgtattcctaaactcattattcaaccaagaagttcaaattcccttgaccgaaagttactgtggcccatgtcctaaaaactggatatgttacaaaaataactgctaccaattttttgatgagagtaaaaactggtatgagagccaggcttcttgtatgtctcaaaatgccagccttctgaaagtatacagcaaagaggaccaggatttacttaaactggtgaagtcatatcattggatgggactagtacacattccaacaaatggatcttggcagtgggaagatggctccattctctcacccaacctactaacaataattgaaatgcagaagggagactgtgcactctatgcctcgagctttaaaggctatatagaaaactgttcaactccaaatacgtacatctgcatgcaaaggactgtgtaaagatgatcaaccatctcaataaaagccaggaacagagaagagattacaccagcggtaacactgccaactgagactaaaggaaacaaacaaaaacaggacaaaatgaccaaagactgtcagatttcttagactcc

SEQ ID NO: 78458 - DNA, 651 bp, Artificial Sequence
  derived and/or modified sequence
atgggctggatccggggcagaagaagccgccacagctgggagatgtctgagttccacaactacaacctggacctgaagaagagtgacttcagcacccgctggcagaagcagcgctgccctgtggtgaagagcaaatgtcgggagaatgccagccccttcttcttctgctgcttcatcgctgtggccatgggcatccgcttcatcatcatggtgaccatctggagcgctgtgttcctgaacagcctcttcaaccaggaggtgcagatccccctgacagagagctactgcggcccctgccccaagaactggatctgctacaagaacaactgctaccagttctttgatgagagcaagaactggtatgagagccaggccagctgcatgagccagaatgccagcctgctgaaggtgtacagcaaagaagaccaggacctgctgaagctggtgaagagctaccactggatgggcctggtgcacatccccaccaacggctcctggcagtgggaggatggcagcatcctgagccccaacctgctgaccatcatcgagatgcagaagggggactgtgccctgtatgccagcagcttcaagggctacatcgagaactgcagcacccccaacacctacatctgcatgcagaggacagtgtag

SEQ ID NO: 78459 - DNA, 243 bp, Artificial Sequence
  derived and/or modified sequence
atgggctggatccggggcagaagaagccgccacagctgggagatgtctgagttccacaactacaacctggacctgaagaagagtgacttcagcacccgctggcagaagcagcgctgccctgtggtgaagagcaaatgtcgggagaatgccagccccttcttcttctgctgcttcatcgctgtggccatgggcatccgcttcatcatcatggtgaccatctggagcgctgtgttcctgaactag

SEQ ID NO: 78460 - DNA, 651 bp, Artificial Sequence
  derived and/or modified sequence
atgggctggatccggggccggcggagccggcacagctgggagatgagcgagttccacaattacaatctggacctgaagaaaagtgatttctcaaccaggtggcagaagcaaaggtgtccggtggtcaagtcaaagtgcagggaaaacgcctcaccattctttttttgttgctttattgcggtcgcgatggggattagattcattatcatggttaccatctggtcggctgtgttcctgaatagtctctttaaccaggaggtgcaaattcctctgacggaaagctattgtggcccgtgccctaagaattggatctgctataagaataattgctaccagttttttgacgagtcaaagaactggtacgagtcccaagcttcctgtatgagtcagaacgcctccctgcttaaagtgtattctaaggaagatcaggacctccttaagctggtcaagtcataccactggatgggtttagtgcatattcctactaacggtagctggcagtgggaggatggctccatcctctcacccaacctcctgacgatcatagagatgcagaaaggtgattgcgctctatatgcaagctcatttaaaggatacattgaaaattgctctaccccaaacacttacatttgtatgcagcgcactgtatag

SEQ ID NO: 78461 - DNA, 243 bp, Artificial Sequence
  derived and/or modified sequence
atgggctggatccggggccggcggagccggcacagctgggagatgtcagagtttcacaattataatctggatcttaaaaaatccgattttagcactcgatggcagaaacagcggtgccccgtggttaagtctaaatgccgggaaaacgcctctccattctttttctgctgcttcatcgcagtcgctatgggcatccgcttcattattatggtgacaatttggagcgctgtgtttctgaattag

SEQ ID NO: 78462 - DNA, 651 bp, Artificial Sequence
  derived and/or modified sequence
atgggctggatccggggccggcggagccggcacagctgggagatgtcagagtttcataactacaatctcgatctcaaaaaatccgatttctcaacgcgctggcagaagcagagatgcccagtcgttaagtcaaaatgtcgcgaaaatgcatctccgttcttcttctgctgcttcatcgctgtggcaatggggattcgtttcattattatggtgaccatctggtccgcagtcttcctgaacagtttgtttaatcaggaggtccaaatcccactgacagaatcctactgtggaccctgtcctaaaaattggatttgctacaaaaacaactgttatcagttcttcgacgagagcaagaactggtatgaatcccaggcatcctgtatgtcccagaatgcctcgttgctgaaagtgtactccaaagaggaccaggacctcctgaaactggtgaagtcctatcactggatgggtctagttcacatacctactaacggtagttggcagtgggaagatggcagcatcctgtcccccaatctgctgactattatagaaatgcagaaaggagactgcgccctctacgcgagcagcttcaagggatacatcgagaattgtagcacacccaacacatacatctgcatgcaacggaccgtgtag

SEQ ID NO: 78463 - DNA, 651 bp, Artificial Sequence
  derived and/or modified sequence
atgggttggatccgagggaggcgatcccggcactcctgggagatgagtgagttccataactacaatctggacttgaagaagtctgacttttcaacacggtggcagaagcagcgttgtccggtggtgaagagcaagtgccgcgaaaacgcctctccattttttttctgttgcttcattgctgtagcgatgggcattcgcttcatcataatggtgaccatatggtcagccgtcttcctcaattccctcttcaaccaggaggtgcagatcccacttactgagtcctattgcggcccatgtcccaaaaattggatctgttacaagaataactgttatcaattttttgatgaaagcaaaaactggtacgagtcccaggcttcatgtatgagtcagaacgcatctctcctgaaagtgtatagcaaggaggatcaggatctcctaaagctcgtcaaaagctaccactggatgggcctcgtgcacattccaaccaatgggtcttggcagtgggaggacggaagtatcctgtcgcccaatctgctgaccattatcgagatgcagaaaggcgactgtgccttgtatgccagctcgttcaagggttatatcgaaaattgtagcacccctaacacgtacatatgcatgcaacggaccgtgtag

SEQ ID NO: 78464 - DNA, 243 bp, Artificial Sequence
  derived and/or modified sequence
atgggctggatacggggacgcagatctcgtcattcgtgggagatgagcgagttccacaattacaacttggatctgaaaaagtccgacttctccaccaggtggcagaagcagaggtgccctgtcgtgaagagtaaatgcagagaaaatgccagccccttttttttctgttgcttcattgctgtagccatgggcattagattcatcatcatggtaaccatttggagtgctgtgtttctcaactag

SEQ ID NO: 78465 - DNA, 651 bp, Artificial Sequence
  derived and/or modified sequence
atgggttggatccggggaaggcgtagcaggcacagctgggaaatgagcgagtttcataattacaatttagatctgaaaaagtctgacttttccacaagatggcagaagcagagatgccccgttgtgaagtcaaagtgccgggaaaacgcttcgccatttttcttctgttgttttatcgctgtcgccatgggaatccggtttattatcatggtgaccatctggtcagctgtgttcttgaactctctgttcaatcaggaagtccagatccccctcaccgagagctattgtgggccttgccccaagaattggatctgttacaagaacaactgctaccagttttttgacgagtccaagaattggtacgaatctcaagcaagctgcatgtctcagaacgcgtctctgctgaaggtctactctaaggaagaccaagatcttctgaagcttgtcaaatcataccactggatggggcttgtgcacattccaacaaatggttcctggcaatgggaagacgggagtatactgtcacctaatcttctgacgatcattgagatgcagaagggggattgcgccctgtacgccagtagcttcaagggttacatcgagaactgctcaacaccgaatacatacatctgtatgcaaagaacggtttag

SEQ ID NO: 78466 - DNA, 651 bp, Artificial Sequence
  derived and/or modified sequence
atgggctggatcagaggcagaagaagcagacacagctgggagatgagcgagttccacaactacaacctggacctgaagaagagcgacttcagcaccagatggcagaagcagagatgccccgtggtgaagagcaagtgcagagagaacgccagccccttcttcttctgctgcttcatcgccgtggccatgggcatcagattcatcatcatggtgaccatctggagcgccgtgttcctgaacagcctgttcaaccaggaggtgcagatccccctgaccgagagctactgcggcccctgccccaagaactggatctgctacaagaacaactgctaccagttcttcgacgagagcaagaactggtacgagagccaggccagctgcatgagccagaacgccagcctgctgaaggtgtacagcaaggaggaccaggacctgctgaagctggtgaagagctaccactggatgggcctggtgcacatccccaccaacggcagctggcagtgggaggacggcagcatcctgagccccaacctgctgaccatcatcgagatgcagaagggcgactgcgccctgtacgccagcagcttcaagggctacatcgagaactgcagcacccccaacacctacatctgcatgcagagaaccgtgtag

SEQ ID NO: 78467 - DNA, 243 bp, Artificial Sequence
  derived and/or modified sequence
atgggctggatcagaggcagaagaagcagacacagctgggagatgagcgagttccacaactacaacctggacctgaagaagagcgacttcagcaccagatggcagaagcagagatgccccgtggtgaagagcaagtgcagagagaacgccagccccttcttcttctgctgcttcatcgccgtggccatgggcatcagattcatcatcatggtgaccatctggagcgccgtgttcctgaactag

SEQ ID NO: 78468 - protein, 913 aa, Artificial Sequence
  derived and/or modified sequence
MASNSTKSFLADAGYGEQELDANSALMELDKGLRSGKLGEQCEAVVRFPRLFQKYPFPILINSAFLKLADVFRVGMLGSLASIIPERKNAHHSIRQSLDSHDNVEVEAAVFAAANFSAQSKDFAVGICNKISEMIQGLATPVDLKLKLIPILQHMHHDAILASSARQLLQQLVTSYPSTKMVIVSLHTFTLLAASSLVDTPKQIQLLLQYLKNDPRKAVKRLAIQDLKLLANKTPHTWSRENIQALCECALQTPYDSLKLGMLSVLSTLSGTIAIKHYFSIVPGNVSSSPRSSDLVKLAQECCYHNNRGIAAHGVRVLTNITVSCQEKDLLALEQDAVFGLESLLVLCSQDDSPGAQATLKIALNCMVKLAKGRPHLSQSVVETLLTQLHSAQDAARILMCHCLAAIAMQLPVLGDGMLGDLMELYKVIGRSATDKQQELLVSLATVIFVASQKALSVESKAVIKQQLESVSNGWTVYRIARQASRMGNHDMAKELYQSLLTQVASEHFYFWLNSLKEFSHAEQCLTGLQEENYSSALSCIAESLKFYHKGIASLTAASTPLNPLSFQCEFVKLRIDLLQAFSQLICTCNSLKTSPPPAIATTIAMTLGNDLQRCGRISNQMKQSMEEFRSLASRYGDLYQASFDADSATLRNVELQQQSCLLISHAIEALILDPESASFQEYGSTGTAHADSEYERRMMSVYNHVLEEVESLNRKYTPVSYMHTACLCNAIIALLKVPLSFQRYFFQKLQSTSIKLALSPSPRNPAEPIAVQNNQQLALKVEGVVQHGSKPGLFRKIQSVCLNVSSTLQSKSGQDYKIPIDNMTNEMEQRVEPHNDYFSTQFLLNFAILGTHNITVESSVKDANGIVWKTGPRTTIFVKSLEDPYSQQIRLQQQQAQQPLQQQQQRNAYTRF

SEQ ID NO: 78469 - DNA, 3127 bp, Artificial Sequence
  derived and/or modified sequence
gcgcggaagaaaaaccagcaagaaggcggcgggggaagatggcggtcctggggtagagtttgcaagctttctgactaggctagtcgagtaactattcgggtcatggcgtcaaactcaactaagtctttcctggcagatgccggctatggcgaacaggaactggatgccaactctgcccttatggaattggacaaaggcctaagatctggcaaacttggtgaacagtgtgaagcagttgttcgctttcccagactttttcagaagtatccattccctattcttatcaattctgcattcctaaagttagctgatgttttcagagttgggatgttgggaagtctggcatcaataattcctgagaggaagaatgctcatcatagtattcgtcagagtttagattcacatgataatgtagaagttgaagctgctgtttttgctgctgcaaacttctctgcacagtcaaaggattttgctgtaggaatctgtaacaaaatcagtgaaatgattcaaggtttagcgacaccagtagacttgaagctaaaattgatacccattctacagcacatgcaccatgatgcaatcttggcttccagtgctcgtcagcttttacaacagctggtcacatcctatccgtccaccaaaatggtgattgtgtctttgcacactttcactctgcttgcagcgtcatctttggttgatacacctaagcagattcagcttctgttgcagtatttgaagaatgatcccaggaaggcagtaaagagacttgctattcaagatctgaaattacttgctaataaaacaccacatacttggagtagggagaatattcaggcactttgtgagtgtgccctccagactccttatgacagcttaaaactagggatgttgtctgtcctttccacactatcagggaccatcgccatcaaacattacttcagtatagttccaggaaatgtgagttcttctcccagatcttctgatttagtcaaattagcccaagagtgctgttaccataataacaggggcattgcagctcatggagttagagtcctaactaatataactgtttcttgtcaagaaaaggatcttttggcactggaacaagatgctgtctttggcctggaatccctactggtactttgtagtcaagatgatagtccaggtgctcaggccactttaaagattgctctaaactgtatggtgaagttggccaagggcaggccccatcttagccagtcagtagttgagaccttgttgactcaattgcacagtgctcaagacgctgcccggattttgatgtgccattgcctggcagccattgccatgcaactgccggtgctgggtgatgggatgcttggtgacctcatggagctgtacaaggtgattggacgatcagccacagacaagcaacaagaacttctggtgagtttggctactgtgatttttgttgcaagtcagaaggcattgtctgtggaaagtaaggcagtaattaagcagcagcttgaaagtgtctccaatggatggactgtataccgtattgccagacaggcttccagaatgggtaatcatgacatggccaaagagctttatcagagtttgctgactcaggttgcctcagaacatttctacttctggctaaatagtttgaaggagttttcacatgcagaacagtgtctcactgggttgcaagaggaaaattatagttcagcactttcttgcattgctgaatctttaaaattctatcacaaagggattgcttccttaacagcagctagtacaccactgaatcctttaagctttcagtgtgaatttgtaaaactcaggattgaccttttacaagccttctctcaacttatctgtacttgtaatagcctgaagacaagcccaccacctgcaattgccacaacaattgccatgaccttaggaaatgacctccagaggtgtggtcgcatctccaatcagatgaaacagtccatggaagaatttcgaagccttgcttctcgatatggagatctttaccaggcatcttttgatgctgactcagcaactttgaggaatgttgaactacagcagcagagctgtttactgatatctcatgcaatagaagccctgattttggatccagaatcagcaagtttccaggaatatggatctactggaacagcccatgctgatagtgaatatgaaagaagaatgatgtctgtatataatcatgtcttggaggaggtagaatcactcaatcggaaatatacccctgtttcttatatgcacacagcatgcctctgcaatgccatcattgctttgctgaaagttcccctttctttccagagatattttttccagaaactacagtctaccagcatcaagcttgctctgtcaccatcgccccggaatcctgcagagcccattgctgtccagaataaccagcagctggcgctaaaggtagagggagtggttcagcacggatctaaaccaggactcttccgcaaaattcagtctgtctgtctgaatgtttcttccacactgcagagtaaatctggacaagactacaagatacccattgacaacatgaccaatgagatggagcaaagggttgaacctcataatgattacttcagtactcaatttctgttgaactttgctatccttggaacacacaacattacagtggaatcttctgtgaaagatgccaatggtatagtatggaagactggtcccagaactaccatatttgtaaaatccctggaagacccttattcccagcaaattcgcttacaacagcagcaagcccagcagccattacagcagcagcagcaacgcaatgcctacacacggttttaaccatggaatgaatgcactgcagactctcaagagatcaatcaaattgccagaaacagtttggtttttcatatggaataagtattaaagttacagtgtagttcatttattcattgatttttgtaatgtaatattctggaaaaaattttgttttcttaaaaattttgtctgacagctgggcgtggttgctcacgcctgtaatcccagcactttgggaggctgaggtgggcggctcacgaggagatcaagaccatcctggctaacacagtgaaaccccgtctccact

SEQ ID NO: 78470 - DNA, 2742 bp, Artificial Sequence
  derived and/or modified sequence
atggcctccaatagcaccaaaagctttcttgcagatgccggctacggagagcaggaacttgatgccaacagcgctctcatggaacttgacaaggggctccgaagcggaaagttgggagaacagtgcgaagccgtcgtacgttttcctcggctttttcaaaagtatccctttcctatcttaattaactcagcctttctgaagttagccgacgtgttccgcgtgggcatgctcgggtccttagcttctataatcccagaacgcaaaaacgcccaccactcaatccggcagtccctcgactctcacgacaacgtggaagttgaagctgcagtctttgctgccgctaacttctccgcccagtctaaggatttcgctgtcggcatttgtaacaaaatttccgagatgattcaggggctcgctacacccgtcgacctgaagctgaaactcatcccgatccttcaacacatgcaccacgacgccattctcgcttcatcagcccgccagttgcttcaacagcttgtcacgagctaccctagtactaagatggtgatagtttccttacacaccttcaccctgctggccgctagttcgttggtggacaccccaaaacaaatccaactgctgctccagtacttaaaaaatgatccaaggaaagcagtcaagaggctggccattcaggatctaaagttactggctaacaagacaccccatacctggagtcgggaaaatatccaggccttgtgcgagtgcgccctgcagacaccgtatgatagcctgaagttaggcatgctgagtgtgctgtccactctgtctggcactatcgcaatcaagcattatttctcaattgtgcccggtaacgtgtctagtagccctcgaagcagcgatctcgtgaagctggcccaggagtgctgctaccataacaatagggggattgctgctcacggtgtacgagtgcttacaaacatcacagtcagctgccaggagaaggaccttctggccctggaacaggacgctgtgttcggactcgaaagccttcttgtgttgtgctctcaggacgacagtccaggagctcaggcaacactgaagatcgctctcaattgtatggtgaagctggccaaaggtaggccccacctgtcccagtccgttgtggagacgctgctgacccagttgcattctgcacaggacgcagcacggattttgatgtgccattgtcttgctgctatagcaatgcagctgcctgtgctgggagacggcatgctgggagacctcatggaattgtataaggttataggtcgcagcgctaccgacaaacaacaggaactgctggtctcacttgctacagtcatattcgtagcttctcagaaagcactatccgtggaaagcaaggctgtcatcaaacagcagctggaaagtgtgtctaacggttggacagtgtatcgcatcgcccggcaggcaagtagaatgggcaaccatgacatggccaaagagttgtatcagtccctgctcacccaggttgcctccgaacatttttatttttggctcaacagtctgaaggaattcagccatgccgagcaatgcttgactggcctccaggaggaaaattactctagtgccctctcctgtatcgcagagtccctcaagttctatcacaagggcatcgcgtcattaaccgcagcttccactcctctcaatccccttagttttcagtgtgaattcgtcaagctccgcattgaccttttacaggccttcagtcagctcatctgcacctgcaatagtttgaaaactagcccacctcctgcaatagccactacaatcgctatgaccctcggcaatgacctgcagcggtgtggaaggataagtaatcagatgaaacagtcaatggaagaattccgcagcttagccagccgctacggggacctctatcaggccagctttgacgcggatagtgccacactgagaaacgtggagctgcaacagcagtcatgcctgctgatttcccatgctatagaggctctcattctagaccctgaaagcgcatcattccaggagtacgggtccaccgggacagctcatgccgactcagagtatgagcgcagaatgatgagcgtgtacaatcatgtgctcgaggaagtggaatctctgaaccggaagtatactcctgtttcctacatgcacaccgcttgcctttgtaatgccatcatcgccctgctcaaagtgcccctgtctttccaacgctatttcttccaaaagctccagtcaactagcattaagctcgccttgtctccctcacctaggaatcctgctgagcctattgcagtgcaaaataatcaacagctggcgctgaaagtggaaggtgtggtccagcacggctcgaagccgggactgttccgcaagattcagtccgtttgtcttaacgtttcgtcaactcttcagagtaaatccgggcaggactacaaaattccaatcgacaatatgaccaatgaaatggagcagcgagttgagccacacaacgattacttctctacgcagtttttgctgaatttcgctatcctggggactcataacatcactgttgagagtagcgtgaaagatgccaacggaattgtgtggaagaccgggccccgcacaacgatctttgtgaaaagtttagaagacccttattctcagcagatccggctacagcagcagcaagctcagcagccccttcagcagcagcagcagcgcaatgcatacaccaggttttag

SEQ ID NO: 78471 - DNA, 2742 bp, Artificial Sequence
  derived and/or modified sequence
atggccagcaacagcaccaagagcttcctggctgatgctggctatggagagcaggagctggatgccaacagcgccctgatggagctggacaagggcctgcggagcggcaagctgggggagcagtgtgaggccgtggtgcgcttccccaggctcttccagaagtaccccttccccatcctgatcaacagcgccttcctgaagctggctgatgtgttccgggtgggcatgctgggcagcctggccagcatcatccctgagaggaagaatgcccaccacagcatccggcagagcctggacagccatgacaacgtggaggtggaggccgctgtgtttgctgctgccaacttcagcgcccagagcaaggactttgctgtgggcatctgcaacaagatcagcgagatgatccagggcctggccacccctgtggacctgaagctgaagctgatccccatcctgcagcacatgcaccatgatgccatcctggccagcagcgcccggcagctgctgcagcagctggtgaccagctaccccagcaccaagatggtgattgtgtccctgcacaccttcaccctgctggccgccagcagcctggtggacacccccaagcagatccagctgctgctgcagtacctgaagaatgaccccaggaaggctgtgaagaggctggccatccaggacctgaagctgctggccaacaagaccccccacacctggagccgggagaacatccaggccctgtgtgaatgtgccctgcagaccccctatgacagcctgaagctgggcatgctgtctgtgctgagcaccctgagcggcaccatcgccatcaagcactacttcagcatcgtgcctggaaatgtgagcagcagccccaggagcagtgacctggtgaagctggcccaggagtgctgctaccacaacaacagaggaattgctgcccatggagtgcgggtgctgaccaacatcaccgtgtcctgccaggagaaggacctgctggccctggagcaggatgctgtgtttggcctggagagcctgctggtgctgtgcagccaggatgacagccctggggcccaggccaccctgaagatcgccctgaactgcatggtgaagctggccaagggccggccccacctgagccagagcgtggtggagaccctgctgacccagctgcacagcgcccaggatgctgcccgcatcctgatgtgccactgcctggccgccatcgccatgcagctgcctgtgctgggagatggcatgctgggggacctgatggagctgtacaaggtgattggccgcagcgccacagacaagcagcaggagctgctggtgtccctggccaccgtcatctttgtggccagccagaaggccctgtctgtggagagcaaggccgtcatcaagcagcagctggagagcgtgtccaatggctggacagtgtaccgcatcgcccggcaggccagcaggatgggcaaccacgacatggccaaggagctgtaccagagcctgctgacccaggtggccagcgagcacttctacttctggctgaacagcctgaaggagttcagccacgccgagcagtgcctgaccggcctgcaggaggagaactacagcagcgccctgagctgcatcgccgagagcctgaagttctaccacaagggcatcgccagcctgacagctgccagcacccccctgaaccccctgtccttccagtgtgaatttgtgaagctgagaattgacctgctgcaggccttcagccagctgatctgcacctgcaacagcctgaagaccagccccccaccagccatcgccaccaccatcgccatgaccctgggcaatgacctgcagagatgtggccgcatcagcaaccagatgaagcagagcatggaggagttccgcagcctggccagccgctacggggacctgtaccaggccagctttgatgctgacagcgccaccctgagaaatgtggagctgcagcagcagagctgcctgctgatcagccacgccatcgaggccctgatcctggaccctgagagcgccagcttccaggagtatggcagcactggaacagcccatgctgacagtgaatatgaaagaaggatgatgtctgtgtacaaccacgtgctggaggaggtggagagcctgaacaggaagtacacccctgtgtcctacatgcacacagcctgcctgtgcaatgccatcatcgccctgctgaaggtgcccctgtccttccagcgctacttcttccagaagctgcagagcaccagcatcaagctggccctgagccccagccccaggaacccagctgagcccatcgctgtgcagaacaaccagcagctggccctgaaggtggagggcgtggtgcagcacggcagcaagccaggcctcttcaggaagatccagagcgtgtgcctgaatgtgagcagcaccctgcagagcaagagcggccaggactacaagatccccatcgacaacatgaccaatgagatggagcagagggtggagccccacaatgactacttcagcacccagttcctgctgaactttgccatcctgggcacccacaacatcaccgtggagagctctgtgaaggatgccaatggaattgtgtggaagacaggccccaggaccaccatctttgtgaagagcctggaggacccctacagccagcagatccggctgcagcagcagcaggcccagcagcccctgcagcagcagcagcagagaaatgcctacacccgcttctag

SEQ ID NO: 78472 - DNA, 2742 bp, Artificial Sequence
  derived and/or modified sequence
atggccagcaacagcaccaagagcttcctggccgacgccggctacggtgagcaggaactggatgctaattctgctctgatggagctggacaaaggactccgcagcggcaagcttggcgagcagtgtgaggccgtcgttagatttccaaggctgttccaaaagtacccatttcccatcctcatcaacagcgcctttctaaagcttgctgatgtgtttcgagtgggaatgctgggcagcttggccagtattatccccgaaaggaaaaacgctcatcacagcattaggcaaagtctagacagccatgataatgtagaggttgaagcagctgtcttcgcagcggccaattttagcgcccaatccaaagacttcgcagttggcatctgtaataagatcagtgaaatgatccagggtctggcaactcctgtggacttaaagctgaaactgatccccattttgcagcacatgcaccacgacgccatactggctagctcagcacgccaattactgcaacagctggtgacgagctaccccagcacaaaaatggtgatagtgtctctacatacgttcaccctgttggctgcttcatcattagtggacactcctaaacagattcaactgttattacagtaccttaaaaatgatcccaggaaggctgtgaagaggctggccattcaggacctgaagctgctagctaacaaaacacctcatacatggtccagagaaaatatccaagctctgtgcgaatgcgcactgcagacgccatacgactcgttgaaactgggcatgctcagcgttctaagcaccctaagcggaaccattgcgattaagcattatttctccattgttcccggaaacgtgtcttcttcacctagatcctccgatctagtgaaactggcacaagagtgctgttatcataataatcgcgggatcgctgcgcacggcgtccgcgtgttgacaaacataactgtctcatgtcaggagaaggacctgctggcactcgagcaggacgcagtgttcggtttagagagcctgttagtgctgtgtagccaggacgattccccaggggcgcaggcaactcttaaaattgcccttaactgcatggtgaaactcgcaaaaggccgtccgcacctctctcagagtgttgttgaaacactgcttacccagttacactccgcccaggacgcagcacgaatcttgatgtgccactgtttggccgccatcgccatgcagttgcccgtgttgggggacgggatgttaggggacctgatggaactgtacaaggttattggtcggagcgcaactgataaacagcaggagctcctggtatcactggccaccgtgatattcgtggcgagccagaaagccctgtccgtggagtccaaggcagtgatcaagcagcagctggaatccgtttcgaacgggtggacggtttaccgcatcgcgaggcaggcatcgcggatgggaaaccacgacatggccaaggaactgtaccagagcctgctgacgcaggtcgcaagtgaacacttttacttctggcttaattcactgaaggaattctctcacgcagaacagtgtctgactggcttgcaagaggaaaactattcttctgctttatcttgcatcgcagaatcgctaaagttttatcacaaagggatagccagtctcacggctgctagtactccactaaatcccctctcttttcaatgtgagttcgtgaaacttcgaattgacctgctgcaagcattttcacagctgatatgcacttgtaattccctcaaaacttcacctcccccagcaattgccaccacgatcgccatgacgctcggaaacgatctccagcgttgcgggaggatcagtaaccagatgaaacagtccatggaggaatttagatccttagcatcaagatacggcgatctgtaccaggcgtcgtttgacgcagactctgctacactgcgaaatgtcgagctccagcaacagagctgcctcctcattagtcacgccattgaagcccttatcctagatcctgaatcggcgagctttcaggagtacggctctacagggaccgctcacgctgattccgagtacgagaggaggatgatgtctgtgtataatcatgttcttgaagaagttgagagcctgaaccgtaaatacacaccagtaagttatatgcacaccgcatgcctctgtaacgccattatcgccctactcaaggtgcccctgagcttccaacggtatttctttcaaaagctccagagcactagtattaagctggcccttagtcctagcccacgaaatccagcagaaccaatcgctgtccaaaataatcagcagctcgcgttaaaagtggagggagttgtacagcatggctccaagccaggcctgttccgaaaaattcagtccgtgtgcctgaatgtctcatccaccctgcagtcaaagtcagggcaggactacaagatccccattgataacatgactaatgagatggaacagcgggtcgaaccacataacgattatttttccacacagttcctgctgaatttcgcaatcctgggaactcacaatatcaccgtggaatcctccgtgaaggacgccaacggtattgtctggaagacaggtcccagaacaaccattttcgtcaagtctctcgaagacccttactcccagcagattcgtcttcagcagcagcaggcccagcagccattgcagcagcagcagcagcgaaatgcatacacacgcttttag

SEQ ID NO: 78473 - DNA, 2742 bp, Artificial Sequence
  derived and/or modified sequence
atggcaagcaatagtacaaagtccttcctggccgacgctggctacggggaacaagaattggacgccaactctgctctgatggaactagacaaagggctgcggtctggaaagctcggcgagcagtgtgaggccgtggtgcgttttccaaggctgttccagaagtaccccttccccatcttgattaactcggctttcttgaagctggcagatgtcttccgagtgggtatgttgggcagtttagcatctataatccccgaacggaagaatgcacaccactcaatcaggcaatctttggacagccatgataatgtcgaggtcgaagccgctgtcttcgccgctgcaaacttcagcgcgcagagcaaggacttcgccgtgggtatttgcaataaaatttccgagatgatacaaggtcttgcgaccccagtggacctgaagctgaagctgatcccgattttgcagcacatgcaccacgacgctattctcgcctcatctgctcgtcagctactccaacagctggtcacctcttacccctccactaagatggtgatcgtatcactccacacctttacactgctggccgcttcatccctggtggacacccccaagcagatccagctgctgctccaatacttaaagaatgatcctcggaaggcagtgaagcgcctcgctatccaggaccttaaacttctggctaataaaacacctcacacatggtcaagggaaaacattcaagccctgtgtgagtgtgccctgcagactccttacgactctttgaaacttggaatgctcagcgttctctctaccctgagtgggaccatcgccattaaacactacttctccatagtacccggaaatgtgtccagttcaccgaggtctagcgatcttgtgaagctggcccaagagtgctgttaccataataatagaggtatagcagctcacggggtcagggtgctgaccaacattaccgtaagctgccaggagaaggacctgctcgccctcgagcaggacgcagtcttcggccttgaatctctgttggttttgtgctcccaggatgactctccaggtgcccaggcaaccctgaagatagcactcaattgtatggttaagctcgccaagggccgacctcatctgtcacagtccgtcgttgagacgctcctgactcagctgcattccgctcaggacgcggcaaggatcctgatgtgccattgcctcgccgcaatagctatgcagctgcccgtcttgggagacggcatgcttggcgatctgatggaactgtataaagtgatcggacgcagtgctaccgataagcagcaagaattgctggtctctttagccaccgtaatcttcgtggccagtcagaaggcgctctctgtcgaaagtaaagcggtcattaagcaacagctcgagtcagtctcaaatggttggactgtctaccgcatcgcccgtcaagcgtccagaatgggaaatcatgacatggcaaaggagctgtaccaaagcctgttaacccaagtcgcctcagagcacttctatttctggttaaattcgctcaaggagtttagccatgcggaacagtgtctaactgggctgcaagaggagaattactcctcagctctttcttgcatcgctgaaagtctcaaattctaccacaagggaattgcaagtctaacagcagccagtacacctctcaacccacttagttttcagtgtgagtttgtaaaactgcgtatagatcttcttcaggcattttcgcagcttatttgcacctgtaattcccttaaaacctcccctcccccagccatagccaccacgatcgctatgacattaggtaacgatttacagagatgtggtcggatctctaaccagatgaagcagtctatggaggaattcaggagcttggccagccggtacggagatctatatcaggcctcattcgacgccgactccgccaccctgcggaacgtggagctgcaacagcagagctgcctattaatctcacacgcaattgaggcgctgatcctagaccctgagtccgcttcctttcaggagtacgggagcactggcactgcccacgccgactctgagtatgagcgacggatgatgagcgtctataaccatgtactggaggaagtcgaaagcctaaatagaaagtacacaccagttagttatatgcacacagcctgtctgtgcaacgctatcattgctctgttgaaagtgcctcttagtttccagcgctatttcttccaaaagcttcagtccacaagcatcaagcttgcactgtccccttcccccagaaatcccgcagagcccatcgccgtgcaaaacaaccagcagcttgctctcaaggtggagggcgtcgtgcagcacggctccaagccgggactgttcagaaaaattcaatccgtgtgcctcaacgtctccagcactctgcagtccaaaagcggacaggattataaaattcccattgataacatgactaacgaaatggaacagcgggtggaaccccacaatgattacttttctacgcagtttctgttaaatttcgcaattcttggcacccataacataactgtggaaagctcagttaaagacgcaaacggaatcgtgtggaagactggcccaagaaccacaatcttcgttaaaagtctggaagatccctactctcagcaaatcagactacagcaacagcaggcccagcaacctctccagcaacagcagcagcgaaacgcctatacacggttttag

SEQ ID NO: 78474 - DNA, 2742 bp, Artificial Sequence
  derived and/or modified sequence
atggccagcaacagcaccaagagcttcctggccgacgccggctacggcgagcaggagctggacgccaacagcgccctgatggagctggacaagggcctgagaagcggcaagctgggcgagcagtgcgaggccgtggtgagattccccagactgttccagaagtaccccttccccatcctgatcaacagcgccttcctgaagctggccgacgtgttcagagtgggcatgctgggcagcctggccagcatcatccccgagagaaagaacgcccaccacagcatcagacagagcctggacagccacgacaacgtggaggtggaggccgccgtgttcgccgccgccaacttcagcgcccagagcaaggacttcgccgtgggcatctgcaacaagatcagcgagatgatccagggcctggccacccccgtggacctgaagctgaagctgatccccatcctgcagcacatgcaccacgacgccatcctggccagcagcgccagacagctgctgcagcagctggtgaccagctaccccagcaccaagatggtgatcgtgagcctgcacaccttcaccctgctggccgccagcagcctggtggacacccccaagcagatccagctgctgctgcagtacctgaagaacgaccccagaaaggccgtgaagagactggccatccaggacctgaagctgctggccaacaagaccccccacacctggagcagagagaacatccaggccctgtgcgagtgcgccctgcagaccccctacgacagcctgaagctgggcatgctgagcgtgctgagcaccctgagcggcaccatcgccatcaagcactacttcagcatcgtgcccggcaacgtgagcagcagccccagaagcagcgacctggtgaagctggcccaggagtgctgctaccacaacaacagaggcatcgccgcccacggcgtgagagtgctgaccaacatcaccgtgagctgccaggagaaggacctgctggccctggagcaggacgccgtgttcggcctggagagcctgctggtgctgtgcagccaggacgacagccccggcgcccaggccaccctgaagatcgccctgaactgcatggtgaagctggccaagggcagaccccacctgagccagagcgtggtggagaccctgctgacccagctgcacagcgcccaggacgccgccagaatcctgatgtgccactgcctggccgccatcgccatgcagctgcccgtgctgggcgacggcatgctgggcgacctgatggagctgtacaaggtgatcggcagaagcgccaccgacaagcagcaggagctgctggtgagcctggccaccgtgatcttcgtggccagccagaaggccctgagcgtggagagcaaggccgtgatcaagcagcagctggagagcgtgagcaacggctggaccgtgtacagaatcgccagacaggccagcagaatgggcaaccacgacatggccaaggagctgtaccagagcctgctgacccaggtggccagcgagcacttctacttctggctgaacagcctgaaggagttcagccacgccgagcagtgcctgaccggcctgcaggaggagaactacagcagcgccctgagctgcatcgccgagagcctgaagttctaccacaagggcatcgccagcctgaccgccgccagcacccccctgaaccccctgagcttccagtgcgagttcgtgaagctgagaatcgacctgctgcaggccttcagccagctgatctgcacctgcaacagcctgaagaccagccccccccccgccatcgccaccaccatcgccatgaccctgggcaacgacctgcagagatgcggcagaatcagcaaccagatgaagcagagcatggaggagttcagaagcctggccagcagatacggcgacctgtaccaggccagcttcgacgccgacagcgccaccctgagaaacgtggagctgcagcagcagagctgcctgctgatcagccacgccatcgaggccctgatcctggaccccgagagcgccagcttccaggagtacggcagcaccggcaccgcccacgccgacagcgagtacgagagaagaatgatgagcgtgtacaaccacgtgctggaggaggtggagagcctgaacagaaagtacacccccgtgagctacatgcacaccgcctgcctgtgcaacgccatcatcgccctgctgaaggtgcccctgagcttccagagatacttcttccagaagctgcagagcaccagcatcaagctggccctgagccccagccccagaaaccccgccgagcccatcgccgtgcagaacaaccagcagctggccctgaaggtggagggcgtggtgcagcacggcagcaagcccggcctgttcagaaagatccagagcgtgtgcctgaacgtgagcagcaccctgcagagcaagagcggccaggactacaagatccccatcgacaacatgaccaacgagatggagcagagagtggagccccacaacgactacttcagcacccagttcctgctgaacttcgccatcctgggcacccacaacatcaccgtggagagcagcgtgaaggacgccaacggcatcgtgtggaagaccggccccagaaccaccatcttcgtgaagagcctggaggacccctacagccagcagatcagactgcagcagcagcaggcccagcagcccctgcagcagcagcagcagagaaacgcctacaccagattctag

SEQ ID NO: 78475 - protein, 948 aa, Artificial Sequence
  derived and/or modified sequence
MASNSTKSFLADAGYGEQELDANSALMELDKGLRSGKLGEQCEAVVRFPRLFQKYPFPILINSAFLKLADVFRVGNNFLRLCVLKVTQQSEKHLEKILNVDEFVKRIFSVIHSNDPVARAITLRMLGSLASIIPERKNAHHSIRQSLDSHDNVEVEAAVFAAANFSAQSKDFAVGICNKISEMIQGLATPVDLKLKLIPILQHMHHDAILASSARQLLQQLVTSYPSTKMVIVSLHTFTLLAASSLVDTPKQIQLLLQYLKNDPRKAVKRLAIQDLKLLANKTPHTWSRENIQALCECALQTPYDSLKLGMLSVLSTLSGTIAIKHYFSIVPGNVSSSPRSSDLVKLAQECCYHNNRGIAAHGVRVLTNITVSCQEKDLLALEQDAVFGLESLLVLCSQDDSPGAQATLKIALNCMVKLAKGRPHLSQSVVETLLTQLHSAQDAARILMCHCLAAIAMQLPVLGDGMLGDLMELYKVIGRSATDKQQELLVSLATVIFVASQKALSVESKAVIKQQLESVSNGWTVYRIARQASRMGNHDMAKELYQSLLTQVASEHFYFWLNSLKEFSHAEQCLTGLQEENYSSALSCIAESLKFYHKGIASLTAASTPLNPLSFQCEFVKLRIDLLQAFSQLICTCNSLKTSPPPAIATTIAMTLGNDLQRCGRISNQMKQSMEEFRSLASRYGDLYQASFDADSATLRNVELQQQSCLLISHAIEALILDPESASFQEYGSTGTAHADSEYERRMMSVYNHVLEEHTACLCNAIIALLKVPLSFQRYFFQKLQSTSIKLALSPSPRNPAEPIAVQNNQQLALKVEGVVQHGSKPGLFRKIQSVCLNVSSTLQSKSGQDYKIPIDNMTNEMEQRVEPHNDYFSTQFLLNFAILGTHNITVESSVKDANGIVWKTGPRTTIFVKSLEDPYSQQIRLQQQQAQQPLQQQQQRNAYTRF

SEQ ID NO: 78476 - DNA, 3422 bp, Artificial Sequence
  derived and/or modified sequence
cggaagaaaaaccagcaagaaggcggcgggggaagatggcggtcctggggtagagtttgcaagctttctgactaggctagtcgagtaactattcgggtcatggcgtcaaactcaactaagtctttcctggcagatgccggctatggcgaacaggaactggatgccaactctgcccttatggaattggacaaaggcctaagatctggcaaacttggtgaacagtgtgaagcagttgttcgctttcccagactttttcagaagtatccattccctattcttatcaattctgcattcctaaagttagctgatgttttcagagttggaaataatttcctgaggctatgtgttcttaaagttacccaacaaagtgagaaacatttggagaagattctaaatgtggatgaatttgtgaagagaattttttctgtgattcatagtaatgatcctgtggcaagagccatcaccctccggatgttgggaagtctggcatcaataattcctgagaggaagaatgctcatcatagtattcgtcagagtttagattcacatgataatgtagaagttgaagctgctgtttttgctgctgcaaacttctctgcacagtcaaaggattttgctgtaggaatctgtaacaaaatcagtgaaatgattcaaggtttagcgacaccagtagacttgaagctaaaattgatacccattctacagcacatgcaccatgatgcaatcttggcttccagtgctcgtcagcttttacaacagctggtcacatcctatccgtccaccaaaatggtgattgtgtctttgcacactttcactctgcttgcagcgtcatctttggttgatacacctaagcagattcagcttctgttgcagtatttgaagaatgatcccaggaaggcagtaaagagacttgctattcaagatctgaaattacttgctaataaaacaccacatacttggagtagggagaatattcaggcactttgtgagtgtgccctccagactccttatgacagcttaaaactagggatgttgtctgtcctttccacactatcagggaccatcgccatcaaacattacttcagtatagttccaggaaatgtgagttcttctcccagatcttctgatttagtcaaattagcccaagagtgctgttaccataataacaggggcattgcagctcatggagttagagtcctaactaatataactgtttcttgtcaagaaaaggatcttttggcactggaacaagatgctgtctttggcctggaatccctactggtactttgtagtcaagatgatagtccaggtgctcaggccactttaaagattgctctaaactgtatggtgaagttggccaagggcaggccccatcttagccagtcagtagttgagaccttgttgactcaattgcacagtgctcaagacgctgcccggattttgatgtgccattgcctggcagccattgccatgcaactgccggtgctgggtgatgggatgcttggtgacctcatggagctgtacaaggtgattggacgatcagccacagacaagcaacaagaacttctggtgagtttggctactgtgatttttgttgcaagtcagaaggcattgtctgtggaaagtaaggcagtaattaagcagcagcttgaaagtgtctccaatggatggactgtataccgtattgccagacaggcttccagaatgggtaatcatgacatggccaaagagctttatcagagtttgctgactcaggttgcctcagaacatttctacttctggctaaatagtttgaaggagttttcacatgcagaacagtgtctcactgggttgcaagaggaaaattatagttcagcactttcttgcattgctgaatctttaaaattctatcacaaagggattgcttccttaacagcagctagtacaccactgaatcctttaagctttcagtgtgaatttgtaaaactcaggattgaccttttacaagccttctctcaacttatctgtacttgtaatagcctgaagacaagcccaccacctgcaattgccacaacaattgccatgaccttaggaaatgacctccagaggtgtggtcgcatctccaatcagatgaaacagtccatggaagaatttcgaagccttgcttctcgatatggagatctttaccaggcatcttttgatgctgactcagcaactttgaggaatgttgaactacagcagcagagctgtttactgatatctcatgcaatagaagccctgattttggatccagaatcagcaagtttccaggaatatggatctactggaacagcccatgctgatagtgaatatgaaagaagaatgatgtctgtatataatcatgtcttggaggagcacacagcatgcctctgcaatgccatcattgctttgctgaaagttcccctttctttccagagatattttttccagaaactacagtctaccagcatcaagcttgctctgtcaccatcgccccggaatcctgcagagcccattgctgtccagaataaccagcagctggcgctaaaggtagagggagtggttcagcacggatctaaaccaggactcttccgcaaaattcagtctgtctgtctgaatgtttcttccacactgcagagtaaatctggacaagactacaagatacccattgacaacatgaccaatgagatggagcaaagggttgaacctcataatgattacttcagtactcaatttctgttgaactttgctatccttggaacacacaacattacagtggaatcttctgtgaaagatgccaatggtatagtatggaagactggtcccagaactaccatatttgtaaaatccctggaagacccttattcccagcaaattcgcttacaacagcagcaagcccagcagccattacagcagcagcagcaacgcaatgcctacacacggttttaaccatggaatgaatgcactgcagactctcaagagatcaatcaaattgccagaaacagtttggtttttcatatggaataagtattaaagttacagtgtagttcatttattcattgatttttgtaatgtaatattctggaaaaaattttgttttcttaaaaattttgtctgacagctgggcgtggttgctcacgcctgtaatcccagcactttgggaggctgaggtgggcggctcacgaggagatcaagaccatcctggctaacacagtgaaaccccgtctccactaaaaaatacaaaaaaattagccaagcatggtggcaggcgcctgtagtcccagctacttgggaggctgaggcaggagaatggtgtgaacctgggaggcggagcttgcagtgagccgagactgtgctccagcctgggcgacagagcgagactccgtctcaaaaaaataaataaatacattttgtctgaaaaataa

SEQ ID NO: 78477 - DNA, 2847 bp, Artificial Sequence
  derived and/or modified sequence
atggcatcaaatagtactaagagtttcctcgcagatgccggctatggcgaacaggagctcgatgcgaactccgctctcatggagctggataaaggcctgaggtccgggaagctgggtgagcaatgcgaggccgtcgttaggttccccaggctttttcaaaagtaccctttcccaatcttgatcaacagtgctttcttaaagctggccgatgtgtttagggttgggaacaatttccttcggttgtgcgttttgaaagttacccagcagtccgaaaagcatctggagaaaatcctgaatgtcgatgagttcgtcaagaggatctttagcgtgatacacagcaatgacccagtggctagagcaatcaccctgagaatgctggggtctctggcttccatcattccggagaggaagaatgcccaccactctattaggcagagtctggacagccacgacaatgttgaggtggaagctgccgtcttcgcagctgcgaacttctccgcccagagcaaagactttgcggtcggaatctgtaacaaaattagcgagatgatccaaggtttagcgacccccgttgatctgaaactgaagttaattcccatcctgcagcatatgcaccacgatgcaatattggcaagtagcgcccggcagttactgcagcagctcgtgactagctacccgagtaccaaaatggttatagtgagtctccacacttttaccttgctggctgcctcttctctggtagatacacccaagcagatccagctacttctgcagtacctgaaaaacgaccccagaaaggctgtgaaaagattagcaatccaggacctgaagctgctggccaacaaaactcctcacacatggagccgagagaatattcaagccctgtgcgagtgcgctctgcagacaccctatgactcgttgaagctcggtatgctgagcgtactgagcactctgtcagggaccattgcaatcaaacattatttctcaatagtacctggaaacgtcagctcttccccccgatcttctgatttggttaagttggcacaggagtgctgttatcacaacaatcggggcatcgccgcccacggagtgagggttcttaccaatatcaccgtgagttgtcaggaaaaggacttactggcactcgagcaggacgctgtgttcggtctggagtccctgctcgtcctgtgttcacaagatgacagccccggggcccaggcgacactaaaaattgccttaaattgtatggtaaagcttgccaaagggcgaccacatctctcccaatctgttgttgaaactctgttaactcagttgcactccgcccaggacgcagcacggatcttgatgtgccactgcctcgcagccatcgcaatgcagctccctgtgctgggtgatgggatgttaggggatctgatggaactctacaaggtgattggccgcagcgctacagataaacagcaagaactcctcgtctcattggccacagtgatttttgtggcatctcaaaaagctctgtccgtggagagtaaggccgtgatcaagcagcaactcgagtccgtcagcaatgggtggactgtttaccggattgccagacaagcctccaggatggggaaccacgatatggcgaaagagctctatcagtcgcttctgacacaggtagcatcagaacacttttatttctggttgaactctctgaaggaattctcccatgccgagcagtgcctcacgggcttacaggaggagaactattcatcggccctgagttgcatagcggagagtctcaaattttatcacaaagggatcgccagcctgactgccgcgtccactccactgaatcctcttagtttccagtgcgaatttgtcaaattacgcatagaccttctgcaagccttcagtcagctcatttgtacctgtaacagcctaaagacaagtccaccccctgcaatcgccacgaccatcgcaatgactctcgggaatgacctgcagcgatgtgggaggattagcaaccagatgaaacagtccatggaggagttccgatcactagcctccagatacggtgatctttaccaggcaagttttgatgcagacagcgctacgctgaggaacgtggaattacagcaacagtcctgcctcttgatctcccatgccatagaggccctgatcctagatccagagtcggcctctttccaggaatacggttccacaggcactgctcacgcagactcagaatatgaacgacggatgatgagtgtctataaccatgtgcttgaggaacacactgcctgcctctgcaacgccatcatcgcccttctaaaagtgcctctgtccttccagagatatttttttcagaaacttcagtccacatccataaagctcgccctttcaccatctccacgaaatccagctgaacccattgccgttcagaacaaccagcaactggccctcaaggtggaaggagtggttcagcacgggtccaagcccggactgtttcgtaaaatccagtctgtttgcctgaacgtttccagtacccttcagtcaaaaagcggacaggattacaagataccgatagacaacatgacgaacgaaatggagcagcgcgtagagccacataacgattatttttccactcagttcctgctaaacttcgctatcctgggaacacataatattacggtagaatctagcgtgaaggacgcaaatgggattgtctggaaaaccggcccacggactacaatcttcgtcaaatctctggaagacccatactctcagcaaatccgtctccaacagcagcaggctcaacaacctctgcagcagcagcagcaacgaaatgcttacacacgattctag

SEQ ID NO: 78478 - DNA, 2847 bp, Artificial Sequence
  derived and/or modified sequence
atggccagcaacagcaccaagagcttcctggctgatgctggctatggagagcaggagctggatgccaacagcgccctgatggagctggacaagggcctgcggagcggcaagctgggggagcagtgtgaggccgtggtgcgcttccccaggctcttccagaagtaccccttccccatcctgatcaacagcgccttcctgaagctggctgatgtgttccgggtgggcaacaacttcctgcggctgtgtgtgctgaaggtgacccagcagagcgagaagcacctggagaagatcctgaatgtggatgaatttgtgaagaggatcttcagcgtcatccacagcaatgaccctgtggcccgggccatcaccctgaggatgctgggcagcctggccagcatcatccctgagaggaagaatgcccaccacagcatccggcagagcctggacagccatgacaacgtggaggtggaggccgctgtgtttgctgctgccaacttcagcgcccagagcaaggactttgctgtgggcatctgcaacaagatcagcgagatgatccagggcctggccacccctgtggacctgaagctgaagctgatccccatcctgcagcacatgcaccatgatgccatcctggccagcagcgcccggcagctgctgcagcagctggtgaccagctaccccagcaccaagatggtgattgtgtccctgcacaccttcaccctgctggccgccagcagcctggtggacacccccaagcagatccagctgctgctgcagtacctgaagaatgaccccaggaaggctgtgaagaggctggccatccaggacctgaagctgctggccaacaagaccccccacacctggagccgggagaacatccaggccctgtgtgaatgtgccctgcagaccccctatgacagcctgaagctgggcatgctgtctgtgctgagcaccctgagcggcaccatcgccatcaagcactacttcagcatcgtgcctggaaatgtgagcagcagccccaggagcagtgacctggtgaagctggcccaggagtgctgctaccacaacaacagaggaattgctgcccacggcgtgcgggtgctgaccaacatcaccgtgtcctgccaggagaaggacctgctggccctggagcaggatgctgtgtttggcctggagagcctgctggtgctgtgcagccaggatgacagccctggggcccaggccaccctgaagatcgccctgaactgcatggtgaagctggccaagggccggccccacctgagccagagcgtggtggagaccctgctgacccagctgcacagcgcccaggatgctgcccgcatcctgatgtgccactgcctggccgccatcgccatgcagctgcctgtgctgggagatggcatgctgggggacctgatggagctgtacaaggtgattggccgcagcgccacagacaagcagcaggagctgctggtgtccctggccaccgtcatctttgtggccagccagaaggccctgtctgtggagagcaaggctgtgatcaagcagcagctggagagcgtgtccaatggctggacagtgtacagaattgcccggcaggccagcaggatgggcaaccacgacatggccaaggagctgtaccagagcctgctgacccaggtggccagcgagcacttctacttctggctgaacagcctgaaggagttcagccatgctgagcagtgcctgaccggcctgcaggaggagaactacagcagcgccctgagctgcatcgccgagagcctgaagttctaccacaagggcatcgccagcctgacagctgccagcacccccctgaaccccctgtccttccagtgtgaatttgtgaagctgagaattgacctgctgcaggccttcagccagctgatctgcacctgcaacagcctgaagaccagccccccaccagccatcgccaccaccatcgccatgaccctgggcaatgacctgcagagatgtggccgcatcagcaaccagatgaagcagagcatggaggagttccgcagcctggccagccgctatggagacctgtaccaggccagctttgatgctgacagcgccaccctgagaaatgtggagctgcagcagcagagctgcctgctgatcagccacgccatcgaggccctgatcctggaccctgagagcgccagcttccaggagtatggcagcactggaacagcccacgccgacagtgaatatgaaagaaggatgatgtctgtgtacaaccacgtgctggaggagcacacagcctgcctgtgcaatgccatcatcgccctgctgaaggtgcccctgtccttccagcgctacttcttccagaagctgcagagcaccagcatcaagctggccctgagccccagccccagaaatcctgctgagcccatcgctgtgcagaacaaccagcagctggccctgaaggtggagggcgtggtgcagcacggcagcaagccaggcctcttcaggaagatccagagcgtgtgcctgaatgtgagcagcaccctgcagagcaagagcggccaggactacaagatccccatcgacaacatgaccaatgagatggagcagagggtggagccccacaatgactacttcagcacccagttcctgctgaactttgccatcctgggcacccacaacatcaccgtggagagctctgtgaaggatgccaacggcatcgtgtggaagacaggccccaggaccaccatctttgtgaagagcctggaggacccctacagccagcagatccggctgcagcagcagcaggcccagcagcccctgcagcagcagcagcagagaaatgcctacacccgcttctag

SEQ ID NO: 78479 - DNA, 2847 bp, Artificial Sequence
  derived and/or modified sequence
atggccagcaacagcaccaagagcttcctggccgacgccggctacggagagcaggagttggacgcgaacagcgctcttatggaactggataaggggttgcgtagcggcaagctcggcgagcagtgtgaggccgtcgtgaggttcccccgcttatttcaaaagtaccctttccctatcctgatcaattctgcttttctcaagctagccgatgtgttcagagtaggcaacaacttcctgagactatgtgttctcaaggtgacacagcaatcagagaaacatctcgaaaaaatactgaatgtggacgagtttgtcaagagaattttttccgtgatccactcaaatgacccagtcgcacgagcaatcacgttacggatgcttggaagtttagcgagcatcatccctgagagaaaaaatgcacatcacagtatcaggcaatccttggattcccacgacaatgtggaggttgaggcggcagtgttcgcagcagcaaacttttcagcccaatctaaagatttcgctgtgggtatctgtaacaaaataagcgagatgatccaaggtctggctactccagtcgaccttaagcttaagttaattccaatcctgcagcacatgcaccacgacgcaatactagcaagcagtgctcgccaacttttgcagcagctcgtcacgtcgtacccttcgaccaagatggtgattgtgtcccttcatacattcaccttactcgcagctagctctttggttgacacacctaagcagattcagttgctgctgcagtatctgaagaatgacccgcggaaagcagttaagcggctagccatccaggatctcaagctgctggctaataagacacctcacacctggagccgcgaaaacatccaggctctgtgtgagtgcgccctgcaaaccccttatgactcattgaagctggggatgttgtcggtcctttcaaccctgagcgggacgatcgccataaaacattatttttcaatagtgcctggaaatgtgtcttcctcccctcgatctagcgacctggtcaagcttgcgcaggaatgttgctatcacaataatagaggaatcgccgctcacggtgttagggtgctcaccaatattaccgtgtcctgccaggagaaggatctgttggcactcgagcaagacgccgtgtttggcctggagtctcttttggtgctgtgttcacaggacgattctcccggggcccaggccactctgaagatcgcactgaactgtatggtgaagctggctaagggaagaccacatcttagccagagcgtggtagaaacactcttgactcagctccacagcgctcaggatgcagcgagaattctgatgtgccactgtttagcggcgatcgctatgcaactgccagtactgggagacgggatgctcggtgacctcatggagctgtacaaggttattggcagaagcgctactgataaacagcaagaactgttggtcagccttgctaccgtgatttttgtagccagccagaaagcgctgtcagtggagtccaaagccgtaataaaacagcagcttgaatcggtctccaacggctggacagtctacagaatcgctcgtcaagcttccaggatggggaaccatgatatggcaaaagaactctaccagtcactacttacccaggtcgcgtctgagcacttttacttctggcttaatagtttaaaagagtttagccacgccgagcagtgtttgacaggccttcaggaggagaactactcaagcgccttatcatgtatagccgagagcctaaagttttaccataaagggatagccagcctcacagcagcaagcactcctctgaaccccttatcatttcagtgcgagtttgtgaaactcagaatagacctgctgcaagccttctctcagcttatttgtacgtgtaacagtctgaaaacatccccacccccagcaatcgccacaaccatcgcaatgactcttggaaatgatctgcagaggtgcggccggatcagtaaccagatgaagcaaagcatggaggagttcaggtccttagcttcgaggtatggggacctgtatcaggcctccttcgacgcggacagtgccacactgaggaatgtggagctgcagcagcagtcatgcttacttatcagccacgctattgaggctttaatcctcgaccccgaatccgcctcattccaggaatatgggagtacaggcaccgctcacgcggatagcgagtatgaacgtcggatgatgtcagtgtacaaccatgtgctggaggaacacactgcctgcctatgtaacgccatcattgcattactgaaggttcccctgtcctttcaacgctatttctttcagaaacttcaaagcacttccattaagctcgcgctttcacctagccccagaaacccagccgaaccaatcgcagtccaaaacaatcagcagctggcccttaaggtcgagggggtggtccagcatgggtcgaagcctggtctctttaggaagatccagagcgtgtgcctaaacgtaagctctacgcttcagagcaaatccgggcaggattataagatcccaatagacaacatgaccaacgagatggagcaacgggtggagccccacaatgattacttctcaacacagtttcttctgaacttcgccatcctgggcacccataacattaccgtggagagctcagtcaaggatgccaacggcatagtatggaagacaggaccgcgtaccacaattttcgttaagagtctggaagacccatattcgcaacagattagacttcagcaacagcaggctcagcagcccctgcaacaacagcagcagcgtaatgcgtatactcgcttctag

SEQ ID NO: 78480 - DNA, 2847 bp, Artificial Sequence
  derived and/or modified sequence
atggctagtaattcaaccaaatctttcctggcagacgcaggatatggtgaacaggagctggacgccaacagcgcattgatggaactcgacaaaggtctgcggtccggaaagctcggagaacagtgcgaagccgtcgtgcgatttcccaggctcttccaaaaataccctttccccatactcatcaacagcgcattcctgaaacttgctgatgtatttagggtggggaataattttctaagattgtgtgtactgaaagtgacacagcagtcagaaaagcacttggaaaaaatacttaacgttgatgaatttgtaaagcgtatattttccgtcatacactcaaatgaccccgtcgcacgcgctatcacgctgcgcatgttaggttcattggcttctatcatccccgagcgcaaaaatgcacaccatagcatcagacagtcgctggactctcatgataatgttgaagtggaagccgcagtgtttgctgccgcaaactttagcgcccagtctaaagacttcgcagttggaatttgtaacaaaatcagtgagatgattcaaggcctagcaacccctgtggaccttaaattgaaactaatccccatccttcagcatatgcaccatgatgctatcctagcaagctccgctcggcagctcctgcagcaactagtcacttcatacccatccaccaaaatggtaattgtttccctccatacatttaccctgttggcagcctcaagcctggtggacacgccgaaacagatccagctgttgctgcagtatctaaagaatgacccaagaaaggctgtaaagcgcctagcaattcaggatttgaaactgctggcaaataagaccccgcatacctggtcgcgtgagaatatccaagccctgtgcgagtgtgcgctgcagactccctatgacagtctgaagcttggcatgctaagcgtactctctaccctttctggtacaatagccatcaaacattacttctcaattgtccccggaaacgtatcctcatctcccagaagttcggatctcgttaaactagcccaagaatgttgctatcataacaatcggggaatcgccgcacatggagtcagggtgctgaccaatatcacggtgtcctgtcaggagaaagacctgctcgcgctcgagcaggacgctgtttttgggttggagtccctcttggtgctctgcagtcaggacgactccccaggcgctcaggcaacactgaaaattgcactcaattgcatggtaaagctcgctaaggggagaccccacttgtcccaaagtgtggtggaaacgctgctgacccaattgcattctgcccaggatgccgcaagaatactaatgtgtcattgcctggcggcaatagctatgcaactcccggtgctgggggacggcatgttgggtgaccttatggaactttacaaggtgatcggtagaagtgcaaccgataaacaacaggagctcctggtaagcctggccacggtaatatttgtggctagtcagaaagccctgagtgttgagagtaaggctgtcatcaagcagcaactagagtctgtgtccaatggatggactgtgtaccgaattgctaggcaggcctcgaggatggggaaccacgatatggctaaagagctataccaatccctgctgacgcaagttgcctctgagcacttttatttctggttaaacagcctcaaagagttttcccatgccgagcagtgcttaaccggcctgcaggaggaaaactatagtagcgcactttcttgcattgccgaatccctcaagttctatcacaaggggattgcaagcttgaccgcggcttctacccccctcaatcccctctcattccagtgcgagttcgttaaactcaggattgatctgttacaggctttcagtcaactaatctgcacctgcaactctttaaagacatcaccccctcccgctattgctactactatcgctatgaccttgggaaatgatctccaaaggtgcggcaggatcagtaaccagatgaaacagagtatggaagagtttcgttccttggctagtaggtacggagacctctaccaggcatcttttgatgcggactccgctaccttaaggaatgtggaactacaacaacagagctgtttgttgatatctcacgccatcgaggcgctgatcttggacccagaatccgcttccttccaggagtacggatcaaccggtaccgcacacgctgattcagaatacgaaaggaggatgatgagtgtctataatcacgtgcttgaggagcatacagcctgcctttgtaatgctattatcgctctcctgaaggtccctctctcctttcagcggtattttttccagaaactacagagcacttcaataaagctcgctctgagtcccagcccccgtaaccccgcagaacccattgccgtgcagaacaaccagcagctggcactgaaagtcgaaggagttgtgcaacacggttctaaacccggattgtttcgcaagatccagtccgtctgccttaacgtgtctagcactctccagagcaagtccggacaggattataagatccctatagacaatatgacaaacgaaatggaacaaagggtggaaccgcacaacgattacttttctacccagttcctgctcaacttcgcaatcctggggactcacaacataactgtagagtcgagtgtaaaggacgcgaatggcatcgtgtggaagaccgggccacgaacgacaatcttcgttaaaagtctggaggatccgtactcccaacagattcggctccaacagcagcaggcgcagcagccgcttcaacagcagcagcagcggaacgcttatacccgattctag

SEQ ID NO: 78481 - DNA, 2847 bp, Artificial Sequence
  derived and/or modified sequence
atggccagcaacagcaccaagagcttcctggccgacgccggctacggcgagcaggagctggacgccaacagcgccctgatggagctggacaagggcctgagaagcggcaagctgggcgagcagtgcgaggccgtggtgagattccccagactgttccagaagtaccccttccccatcctgatcaacagcgccttcctgaagctggccgacgtgttcagagtgggcaacaacttcctgagactgtgcgtgctgaaggtgacccagcagagcgagaagcacctggagaagatcctgaacgtggacgagttcgtgaagagaatcttcagcgtgatccacagcaacgaccccgtggccagagccatcaccctgagaatgctgggcagcctggccagcatcatccccgagagaaagaacgcccaccacagcatcagacagagcctggacagccacgacaacgtggaggtggaggccgccgtgttcgccgccgccaacttcagcgcccagagcaaggacttcgccgtgggcatctgcaacaagatcagcgagatgatccagggcctggccacccccgtggacctgaagctgaagctgatccccatcctgcagcacatgcaccacgacgccatcctggccagcagcgccagacagctgctgcagcagctggtgaccagctaccccagcaccaagatggtgatcgtgagcctgcacaccttcaccctgctggccgccagcagcctggtggacacccccaagcagatccagctgctgctgcagtacctgaagaacgaccccagaaaggccgtgaagagactggccatccaggacctgaagctgctggccaacaagaccccccacacctggagcagagagaacatccaggccctgtgcgagtgcgccctgcagaccccctacgacagcctgaagctgggcatgctgagcgtgctgagcaccctgagcggcaccatcgccatcaagcactacttcagcatcgtgcccggcaacgtgagcagcagccccagaagcagcgacctggtgaagctggcccaggagtgctgctaccacaacaacagaggcatcgccgcccacggcgtgagagtgctgaccaacatcaccgtgagctgccaggagaaggacctgctggccctggagcaggacgccgtgttcggcctggagagcctgctggtgctgtgcagccaggacgacagccccggcgcccaggccaccctgaagatcgccctgaactgcatggtgaagctggccaagggcagaccccacctgagccagagcgtggtggagaccctgctgacccagctgcacagcgcccaggacgccgccagaatcctgatgtgccactgcctggccgccatcgccatgcagctgcccgtgctgggcgacggcatgctgggcgacctgatggagctgtacaaggtgatcggcagaagcgccaccgacaagcagcaggagctgctggtgagcctggccaccgtgatcttcgtggccagccagaaggccctgagcgtggagagcaaggccgtgatcaagcagcagctggagagcgtgagcaacggctggaccgtgtacagaatcgccagacaggccagcagaatgggcaaccacgacatggccaaggagctgtaccagagcctgctgacccaggtggccagcgagcacttctacttctggctgaacagcctgaaggagttcagccacgccgagcagtgcctgaccggcctgcaggaggagaactacagcagcgccctgagctgcatcgccgagagcctgaagttctaccacaagggcatcgccagcctgaccgccgccagcacccccctgaaccccctgagcttccagtgcgagttcgtgaagctgagaatcgacctgctgcaggccttcagccagctgatctgcacctgcaacagcctgaagaccagccccccccccgccatcgccaccaccatcgccatgaccctgggcaacgacctgcagagatgcggcagaatcagcaaccagatgaagcagagcatggaggagttcagaagcctggccagcagatacggcgacctgtaccaggccagcttcgacgccgacagcgccaccctgagaaacgtggagctgcagcagcagagctgcctgctgatcagccacgccatcgaggccctgatcctggaccccgagagcgccagcttccaggagtacggcagcaccggcaccgcccacgccgacagcgagtacgagagaagaatgatgagcgtgtacaaccacgtgctggaggagcacaccgcctgcctgtgcaacgccatcatcgccctgctgaaggtgcccctgagcttccagagatacttcttccagaagctgcagagcaccagcatcaagctggccctgagccccagccccagaaaccccgccgagcccatcgccgtgcagaacaaccagcagctggccctgaaggtggagggcgtggtgcagcacggcagcaagcccggcctgttcagaaagatccagagcgtgtgcctgaacgtgagcagcaccctgcagagcaagagcggccaggactacaagatccccatcgacaacatgaccaacgagatggagcagagagtggagccccacaacgactacttcagcacccagttcctgctgaacttcgccatcctgggcacccacaacatcaccgtggagagcagcgtgaaggacgccaacggcatcgtgtggaagaccggccccagaaccaccatcttcgtgaagagcctggaggacccctacagccagcagatcagactgcagcagcagcaggcccagcagcccctgcagcagcagcagcagagaaacgcctacaccagattctag

SEQ ID NO: 78482 - protein, 942 aa, Artificial Sequence
  derived and/or modified sequence
MASNSTKSFLADAGYGEQELDANSALMELDKGLRSGKLGEQCEAVVRFPRLFQKYPFPILINSAFLKLADVFRVGNNFLRLCVLKVTQQSEKHLEKILNVDEFVKRIFSVIHSNDPVARAITLRMLGSLASIIPERKNAHHSIRQSLDSHDNVEVEAAVFAAANFSAQSKDFAVGICNKISEMIQGLATPVDLKLKLIPILQHMHHDAILASSARQLLQQLVTSYPSTKMVIVSLHTFTLLAASSLVDTPKQIQLLLQYLKNDPRKAVKRLAIQDLKLLANKTPHTWSRENIQALCECALQTPYDSLKLGMLSVLSTLSGTIAIKHYFSIVPGNVSSSPRSSDLVKLAQECCYHNNRGIAAHGVRVLTNITVSCQEKDLLALEQDAVFGLESLLVLCSQDDSPGAQATLKIALNCMVKLAKGRPHLSQSVVETLLTQLHSAQDAARILMCHCLAAIAMQLPVLGDGMLGDLMELYKVIGRSATDKQQELLVSLATVIFVASQKALSVESKAVIKQQLESVSNGWTVYRIARQASRMGNHDMAKELYQSLLTQVASEHFYFWLNSLKEFSHAEQCLTGLQEENYSSALSCIAESLKFYHKGIASLTAASTPLNPLSFQCEFVKLRIDLLQAFSQLICTCNSLKTSPPPAIATTIAMTLGNDLQRCGRISNQMKQSMEEFRSLASRYGDLYQASFDADSATLRNVELQQQSCLLISHAIEALILDPESASFQEYGSTGTAHADSEYERRMMSVYNHVLEEVESLNRKYTPVSYMRYFFQKLQSTSIKLALSPSPRNPAEPIAVQNNQQLALKVEGVVQHGSKPGLFRKIQSVCLNVSSTLQSKSGQDYKIPIDNMTNEMEQRVEPHNDYFSTQFLLNFAILGTHNITVESSVKDANGIVWKTGPRTTIFVKSLEDPYSQQIRLQQQQAQQPLQQQQQRNAYTRF

SEQ ID NO: 78483 - DNA, 3380 bp, Artificial Sequence
  derived and/or modified sequence
aagaaggcggcgggggaagatggcggtcctggggtagagtttgcaagctttctgactaggctagtcgagtaactattcgggtcatggcgtcaaactcaactaagtctttcctggcagatgccggctatggcgaacaggaactggatgccaactctgcccttatggaattggacaaaggcctaagatctggcaaacttggtgaacagtgtgaagcagttgttcgctttcccagactttttcagaagtatccattccctattcttatcaattctgcattcctaaagttagctgatgttttcagagttggaaataatttcctgaggctatgtgttcttaaagttacccaacaaagtgagaaacatttggagaagattctaaatgtggatgaatttgtgaagagaattttttctgtgattcatagtaatgatcctgtggcaagagccatcaccctccggatgttgggaagtctggcatcaataattcctgagaggaagaatgctcatcatagtattcgtcagagtttagattcacatgataatgtagaagttgaagctgctgtttttgctgctgcaaacttctctgcacagtcaaaggattttgctgtaggaatctgtaacaaaatcagtgaaatgattcaaggtttagcgacaccagtagacttgaagctaaaattgatacccattctacagcacatgcaccatgatgcaatcttggcttccagtgctcgtcagcttttacaacagctggtcacatcctatccgtccaccaaaatggtgattgtgtctttgcacactttcactctgcttgcagcgtcatctttggttgatacacctaagcagattcagcttctgttgcagtatttgaagaatgatcccaggaaggcagtaaagagacttgctattcaagatctgaaattacttgctaataaaacaccacatacttggagtagggagaatattcaggcactttgtgagtgtgccctccagactccttatgacagcttaaaactagggatgttgtctgtcctttccacactatcagggaccatcgccatcaaacattacttcagtatagttccaggaaatgtgagttcttctcccagatcttctgatttagtcaaattagcccaagagtgctgttaccataataacaggggcattgcagctcatggagttagagtcctaactaatataactgtttcttgtcaagaaaaggatcttttggcactggaacaagatgctgtctttggcctggaatccctactggtactttgtagtcaagatgatagtccaggtgctcaggccactttaaagattgctctaaactgtatggtgaagttggccaagggcaggccccatcttagccagtcagtagttgagaccttgttgactcaattgcacagtgctcaagacgctgcccggattttgatgtgccattgcctggcagccattgccatgcaactgccggtgctgggtgatgggatgcttggtgacctcatggagctgtacaaggtgattggacgatcagccacagacaagcaacaagaacttctggtgagtttggctactgtgatttttgttgcaagtcagaaggcattgtctgtggaaagtaaggcagtaattaagcagcagcttgaaagtgtctccaatggatggactgtataccgtattgccagacaggcttccagaatgggtaatcatgacatggccaaagagctttatcagagtttgctgactcaggttgcctcagaacatttctacttctggctaaatagtttgaaggagttttcacatgcagaacagtgtctcactgggttgcaagaggaaaattatagttcagcactttcttgcattgctgaatctttaaaattctatcacaaagggattgcttccttaacagcagctagtacaccactgaatcctttaagctttcagtgtgaatttgtaaaactcaggattgaccttttacaagccttctctcaacttatctgtacttgtaatagcctgaagacaagcccaccacctgcaattgccacaacaattgccatgaccttaggaaatgacctccagaggtgtggtcgcatctccaatcagatgaaacagtccatggaagaatttcgaagccttgcttctcgatatggagatctttaccaggcatcttttgatgctgactcagcaactttgaggaatgttgaactacagcagcagagctgtttactgatatctcatgcaatagaagccctgattttggatccagaatcagcaagtttccaggaatatggatctactggaacagcccatgctgatagtgaatatgaaagaagaatgatgtctgtatataatcatgtcttggaggaggtagaatcactcaatcggaaatatacccctgtttcttatatgagatattttttccagaaactacagtctaccagcatcaagcttgctctgtcaccatcgccccggaatcctgcagagcccattgctgtccagaataaccagcagctggcgctaaaggtagagggagtggttcagcacggatctaaaccaggactcttccgcaaaattcagtctgtctgtctgaatgtttcttccacactgcagagtaaatctggacaagactacaagatacccattgacaacatgaccaatgagatggagcaaagggttgaacctcataatgattacttcagtactcaatttctgttgaactttgctatccttggaacacacaacattacagtggaatcttctgtgaaagatgccaatggtatagtatggaagactggtcccagaactaccatatttgtaaaatccctggaagacccttattcccagcaaattcgcttacaacagcagcaagcccagcagccattacagcagcagcagcaacgcaatgcctacacacggttttaaccatggaatgaatgcactgcagactctcaagagatcaatcaaattgccagaaacagtttggtttttcatatggaataagtattaaagttacagtgtagttcatttattcattgatttttgtaatgtaatattctggaaaaaattttgttttcttaaaaattttgtctgacagctgggcgtggttgctcacgcctgtaatcccagcactttgggaggctgaggtgggcggctcacgaggagatcaagaccatcctggctaacacagtgaaaccccgtctccactaaaaaatacaaaaaaattagccaagcatggtggcaggcgcctgtagtcccagctacttgggaggctgaggcaggagaatggtgtgaacctgggaggcggagcttgcagtgagccgagactgtgctccagcctgggcgacagagcgagactccgtctcaaaaaaataaataaatacattttgtctg

SEQ ID NO: 78484 - DNA, 2829 bp, Artificial Sequence
  derived and/or modified sequence
atggcttccaattcaaccaagtcctttcttgccgatgccggatacggcgagcaagaacttgacgctaatagcgctctcatggaacttgataaaggcttgcgatcagggaaattgggggagcagtgcgaggctgtggtcaggtttccgcgcttattccagaaatacccctttcctatactcatcaattctgccttcctcaaattggcagacgtctttcgggtgggcaataatttcctgagattgtgtgtgttgaaagtgacccaacaatcagagaaacatctcgaaaagatactgaatgtggacgagttcgtaaagagaatcttctcggtaatccatagcaacgatcccgtggcaagggccattaccctccgtatgttgggttccctggcctctattataccagagaggaagaatgctcaccacagcattaggcaatccctcgattcgcacgataacgtggaagttgaagcagccgtcttcgccgccgcaaacttctcagcccagagcaaggacttcgctgttggcatttgtaataagatctctgaaatgattcagggtttagcgacaccagttgacttaaaactcaaactgatacccatcttgcagcacatgcaccatgatgccattctcgcatcctccgcgaggcaactgctccaacagcttgtcactagctaccctagtacaaagatggtcatcgtatctctccatacattcacactactcgcggcatccagtctcgtggataccccaaaacaaatccagctgctgctacagtacttgaagaatgatccgcggaaagccgtcaaacgactggctatccaggaccttaaactgctggctaataaaaccccccacacctggagcagggagaatatacaagctctttgtgagtgcgccctgcagactccctacgattcactcaagctcggaatgctctccgtgctatccacactctccggcaccattgctatcaaacattatttttctatcgtacctggcaacgtatctagctcccctcgcagttcagatttggtgaaattggctcaagagtgttgttatcataacaatcgtggaatcgcagcccacggcgtcagggtgctgaccaatattacagtcagttgccaagagaaggacctgctggcactcgaacaagatgctgtgtttggcctggagtcactgctggtattgtgcagccaggacgacagtcctggagcccaagctaccctaaaaatcgctcttaactgtatggttaaactggccaagggaaggccacacctgtcccagtcagtggtcgagaccctgctcacacagctccattccgcacaggatgctgccagaattctgatgtgccactgtctggccgcaatcgccatgcagctccctgtcttgggggacggaatgctgggtgacctgatggagctgtacaaggtgatcggccggtctgccaccgataagcagcaagagctcctggtgagcttggccaccgtaatattcgtggcgtctcagaaggccttgtccgtagaatcgaaggctgtaatcaagcaacagctcgaaagtgtgagtaacggctggactgtataccgcattgcccggcaggcatccaggatgggaaaccacgatatggcaaaggaactgtatcagtcgctcttgacacaagtggcaagcgaacacttttatttttggctgaactccttgaaagagttttcacatgctgagcagtgccttacgggcttgcaggaggagaattatagctcagccctatcctgcattgcagaaagtctgaagttctatcacaagggaatcgccagcctgacagccgcttctactccgttaaaccccctctctttccaatgcgagttcgttaaacttagaatcgatcttctgcaagccttttcccagctgatctgtacttgcaatagcctgaagacctcacccccacctgcgatagccacgacgatcgctatgactttggggaatgatctccagcggtgcggtaggatctctaaccaaatgaagcagtctatggaggaatttcgcagcctcgcatccaggtacggcgatttgtaccaggcttcgttcgatgctgactctgctacactgaggaacgtcgagcttcaacagcagtcctgcctactgatttcacatgccattgaagctttgatcctggatcccgagagcgcctcgtttcaggaatacggatcaaccggcactgcccacgctgattcagaatatgagagacggatgatgtccgtctacaatcacgtccttgaggaagtggagtcccttaatcgcaaatatacacccgtgtcctatatgaggtatttttttcagaagctccaaagcacttctatcaaactggctctgtccccaagtcctagaaaccccgctgaaccaatcgccgtccaaaataatcaacagctggcactgaaggttgagggggtcgtgcagcacgggtccaaaccaggtctttttaggaaaattcagtccgtgtgtctcaatgtgtctagcacactccaatcaaagagtgggcaggactataagatcccaatcgataacatgactaatgaaatggagcagcgagtagaacctcataacgattacttcagtacccagttccttctgaacttcgcaatccttgggacacataatatcactgtagagagttcagtcaaggacgcgaacggaatcgtgtggaagacagggccccggacaacaatcttcgtgaagtcactcgaggacccttactctcagcagatacgattgcagcagcagcaggcccagcagccactgcaacagcagcagcaacgcaacgcctatacccgattttag

SEQ ID NO: 78485 - DNA, 2829 bp, Artificial Sequence
  derived and/or modified sequence
atggccagcaacagcaccaagagcttcctggctgatgctggctatggagagcaggagctggatgccaacagcgccctgatggagctggacaagggcctgcggagcggcaagctgggggagcagtgtgaggccgtggtgcgcttccccaggctcttccagaagtaccccttccccatcctgatcaacagcgccttcctgaagctggctgatgtgttccgggtgggcaacaacttcctgcggctgtgtgtgctgaaggtgacccagcagagcgagaagcacctggagaagatcctgaatgtggatgaatttgtgaagaggatcttcagcgtcatccacagcaatgaccctgtggcccgggccatcaccctgaggatgctgggcagcctggccagcatcatccctgagaggaagaatgcccaccacagcatccggcagagcctggacagccatgacaacgtggaggtggaggccgctgtgtttgctgctgccaacttcagcgcccagagcaaggactttgctgtgggcatctgcaacaagatcagcgagatgatccagggcctggccacccctgtggacctgaagctgaagctgatccccatcctgcagcacatgcaccatgatgccatcctggccagcagcgcccggcagctgctgcagcagctggtgaccagctaccccagcaccaagatggtgattgtgtccctgcacaccttcaccctgctggccgccagcagcctggtggacacccccaagcagatccagctgctgctgcagtacctgaagaatgaccccaggaaggctgtgaagaggctggccatccaggacctgaagctgctggccaacaagaccccccacacctggagccgggagaacatccaggccctgtgtgaatgtgccctgcagaccccctatgacagcctgaagctgggcatgctgtctgtgctgagcaccctgagcggcaccatcgccatcaagcactacttcagcatcgtgcctggaaatgtgagcagcagccccaggagcagtgacctggtgaagctggcccaggagtgctgctaccacaacaacagaggaattgctgcccacggcgtgcgggtgctgaccaacatcaccgtgtcctgccaggagaaggacctgctggccctggagcaggatgctgtgtttggcctggagagcctgctggtgctgtgcagccaggatgacagccctggggcccaggccaccctgaagatcgccctgaactgcatggtgaagctggccaagggccggccccacctgagccagagcgtggtggagaccctgctgacccagctgcacagcgcccaggatgctgcccgcatcctgatgtgccactgcctggccgccatcgccatgcagctgcctgtgctgggagatggcatgctgggggacctgatggagctgtacaaggtgattggccgcagcgccacagacaagcagcaggagctgctggtgtccctggccaccgtcatctttgtggccagccagaaggccctgtctgtggagagcaaggctgtgatcaagcagcagctggagagcgtgtccaatggctggacagtgtacagaattgcccggcaggccagcaggatgggcaaccacgacatggccaaggagctgtaccagagcctgctgacccaggtggccagcgagcacttctacttctggctgaacagcctgaaggagttcagccatgctgagcagtgcctgaccggcctgcaggaggagaactacagcagcgccctgagctgcatcgccgagagcctgaagttctaccacaagggcatcgccagcctgacagctgccagcacccccctgaaccccctgtccttccagtgtgaatttgtgaagctgagaattgacctgctgcaggccttcagccagctgatctgcacctgcaacagcctgaagaccagccccccaccagccatcgccaccaccatcgccatgaccctgggcaatgacctgcagagatgtggccgcatcagcaaccagatgaagcagagcatggaggagttccgcagcctggccagccgctatggagacctgtaccaggccagctttgatgctgacagcgccaccctgagaaatgtggagctgcagcagcagagctgcctgctgatcagccacgccatcgaggccctgatcctggaccctgagagcgccagcttccaggagtatggcagcactggaacagcccacgccgacagtgaatatgaaagaaggatgatgtctgtgtacaaccacgtgctggaggaggtggagagcctgaacaggaagtacacccctgtgtcctacatgagatacttcttccagaagctgcagagcaccagcatcaagctggccctgagccccagccccagaaatcctgctgagcccatcgctgtgcagaacaaccagcagctggccctgaaggtggagggcgtggtgcagcacggcagcaagccaggcctcttcaggaagatccagagcgtgtgcctgaatgtgagcagcaccctgcagagcaagagcggccaggactacaagatccccatcgacaacatgaccaatgagatggagcagagggtggagccccacaatgactacttcagcacccagttcctgctgaactttgccatcctgggcacccacaacatcaccgtggagagctctgtgaaggatgccaacggcatcgtgtggaagacaggccccaggaccaccatctttgtgaagagcctggaggacccctacagccagcagatccggctgcagcagcagcaggcccagcagcccctgcagcagcagcagcagagaaatgcctacacccgcttctag

SEQ ID NO: 78486 - DNA, 2829 bp, Artificial Sequence
  derived and/or modified sequence
atggccagcaacagcaccaagagcttcctggccgacgccggctacggcgagcaggagcttgacgcgaacagcgcccttatggagttggataaggggttgagatcaggcaagttgggcgaacagtgtgaggcggtggtgcgctttccgcggctgttccagaagtatcctttccccatcctaatcaacagtgcgttccttaagctggcagacgtgtttcgtgttggaaataacttcttacggctctgcgtgttaaaagtgacccagcagtcagaaaaacacctggagaaaatcctgaacgtagacgagttcgtcaaacgtatattctccgtgatccactcaaacgacccagtggccagagccatcaccctcaggatgctgggcagcctggcaagtataatccctgagcggaagaacgcacatcatagcattcgacagagtttggattcacatgacaacgtggaagtggaagcagccgtcttcgccgctgctaatttctcagcacagagcaaggacttcgctgttggtatctgcaataagatctcagaaatgatccaggggctggcaactcccgtcgacctcaagctcaaactgatcccaatcctccaacatatgcatcacgatgctatcctggccagcagcgctaggcagttgctccagcagctggtgacgtcctatccaagtaccaaaatggtgattgtgagtcttcatacctttacacttctggccgcgagctcactggtcgatacacctaagcagatccaattgctgcttcagtacctcaagaacgacccgcggaaagcggttaaaagactggccattcaggacctgaagttactcgccaacaaaacccctcacacctggtctcgagagaacattcaggctctatgcgagtgtgccttgcagaccccctatgactctctgaaattaggaatgctgagcgtcttgagcaccctgtcagggacgatagctattaagcactatttttccatagtgcctggcaacgtgtctagctctccacggtcctcagaccttgtgaaactggcccaagagtgctgctatcacaataatcggggtatcgcggcgcatggagtacgggtgttaacaaatattactgtctcttgtcaggaaaaggacctccttgccctggagcaggacgctgtatttggactcgagtctctattagttctctgctcccaggacgatagccctggcgctcaagccaccctgaagatcgcccttaactgtatggttaaactggcaaaaggcaggcctcacctgtcccagagcgtggtagagacgctcctgactcaactacactccgcacaggacgctgcacggatcctaatgtgtcactgtttagccgccattgcaatgcagctgccagtccttggcgacggcatgcttggggacctaatggaactgtataaggtaatcggccgctccgcaacggataaacagcaggagctgctcgtatcactggccaccgtgatcttcgtggcctcccagaaggcactgagtgtagaatctaaggcagttattaagcagcaattagagagtgtgtccaatggctggaccgtgtaccggattgctcgccaagcttcaagaatggggaatcacgacatggctaaagagctctaccagtctctcctgacgcaagtcgctagcgagcacttctatttttggttgaactccctcaaagagttcagccacgccgaacagtgcttgaccggcctacaggaggaaaattatagctcagctctgtcttgcatcgccgaatccttaaaattctaccacaaaggtatcgcctctctgaccgcagcctctacacccctcaacccactgtcattccagtgcgagttcgtgaagctaaggattgacctattacaggccttctcacagttaatctgcacatgcaacagccttaagactagccccccaccagctatagccaccaccatagctatgacccttggcaatgatcttcagagatgcggccgcatctctaatcagatgaagcagtctatggaagaattcaggagtctggcgtcacggtacggggatctctatcaggctagcttcgatgcagactctgcgactcttagaaacgtggaactgcagcagcagagctgtctgctcatcagccatgcgatcgaagcccttatcctggacccggagtctgcatctttccaggagtacggaagtactggtactgcccacgctgactctgagtatgagagaagaatgatgagtgtctacaaccatgtgctggaagaagttgaatctttgaataggaagtacacccccgtttcctatatgaggtacttttttcagaagttgcagtctaccagtatcaaattggctctgagtccatccccccgcaatcctgccgaacctatcgcggtacaaaataaccagcagctcgctcttaaggttgagggagtggtgcagcatggcagcaagcccggcttattccgtaaaattcagtccgtatgcctaaacgtctcatcgaccctccagtcaaaaagcggccaagattataagatccccatcgataatatgaccaatgagatggaacagagagtggaaccgcacaacgactacttttccacccaatttttattgaattttgctatcctgggcacccataatatcaccgttgagtcatccgtgaaagacgccaatggcattgtgtggaagacagggccgaggaccacaattttcgtgaaatcgctcgaggatccatactcccagcagatccgcctccagcagcagcaagcgcagcaaccattacagcagcagcagcaacgcaacgcgtacacaagattctag

SEQ ID NO: 78487 - DNA, 2829 bp, Artificial Sequence
  derived and/or modified sequence
atggctagcaactccacaaaatcctttctggccgacgccggatacggggaacaggagcttgatgccaactccgcactgatggagctggataaagggctgcgttcaggcaagctcggcgagcagtgtgaggccgtagtcagatttccaagattattccagaagtacccctttccaatactcatcaacagtgccttcctgaagctagcagacgtgttccgagttggtaacaattttctgagactctgtgtcttgaaggtgacacagcagagcgagaaacatctcgaaaaaatactgaatgtcgatgaatttgtgaaacgtatcttctctgtgattcacagcaacgaccctgtagcgcgagctatcaccctacgaatgctgggttccctcgcatctatcatccctgagcggaaaaatgcacaccattcaatccgacagtccctcgacagccatgacaatgtcgaagtggaagctgctgtgttcgccgcagcaaatttcagcgcccagagcaaggacttcgccgttggtatctgcaataagataagcgagatgatccagggcctggcaacacccgttgatctgaagctaaaattaatccctatcctgcagcatatgcatcatgacgcaatcctggcgagctccgcccgtcagcttctacagcagcttgtgacctcttatccgtccaccaaaatggtgatcgtcagcctccatactttcaccctgctcgccgcttcctcccttgtagatacccccaaacagattcagctgctgcttcagtatttgaaaaatgatcctcgcaaagccgttaagcgccttgcgattcaggatctcaaactgctggccaataaaacacctcatacgtggtcgagggaaaacatccaggcgctatgtgaatgtgcactccagacaccgtatgatagcttgaaactgggtatgctgtccgtcctgtccaccttgtccggaacaatcgccatcaaacattatttcagcatcgtcccaggtaacgtgtcttctagcccacgctctagtgatctcgtaaagctggcccaagagtgctgctatcacaacaatcggggaatagctgcccacggcgttagagtgttaacaaacattaccgttagctgccaggaaaaggatctcctggcactggaacaggacgcggtgttcgggttggagagtctgcttgtgctctgtagtcaggacgactcacccggtgctcaggctacattgaagatcgctctgaattgcatggtcaaactggccaagggcaggccccacttaagccagtcagtggttgagactctcctaactcagctgcacagtgcacaggacgccgcacggatcctcatgtgccactgcctggcagccatagcgatgcagctgccagtactgggtgacggaatgctcggagatttaatggaactgtataaagtgatcggtcgcagcgccactgacaagcagcaggagttgctcgtctccctggccaccgtcatatttgtggcaagtcagaaggcacttagcgtcgaatccaaagccgtgataaagcagcagctggagagtgtcagcaacggctggactgtctaccgaatcgcgagacaagctagtcggatgggaaatcatgacatggccaaggagctctaccaatctctcttgacacaggttgcctccgagcatttttacttttggctgaacagtctcaaggagttctcacacgcggaacagtgccttaccgggcttcaggaagaaaattatagctctgctctctcgtgtatcgccgagtcactgaaattctaccataaaggcattgctagcctgaccgctgctagcacaccgctcaaccctttgagcttccaatgcgagtttgttaaactaagaattgatctgctccaggccttcagtcaactcatctgtacatgtaacagcttgaaaacaagccccccacctgcgatcgcaacaaccattgcaatgaccctcggaaatgatcttcaacgttgcgggaggatatccaaccagatgaagcagagcatggaggaatttagaagtctggcttcgcggtacggcgatttgtaccaagcatctttcgacgctgactcagctaccttgaggaatgtcgagctgcagcagcagagctgcctgctgatctctcacgcgattgaggccctcattctggaccccgagagcgcctcattccaggaatacggatccaccggcactgcacacgccgactctgaatacgagcgccgaatgatgtctgtgtataatcatgtgttggaagaggttgaatctttgaaccgaaagtatacgccagtgtcgtatatgaggtacttttttcagaagctccagagcacctccatcaaactcgccttgagtccaagcccacggaacccagcagagcctattgccgtgcagaataaccagcagctagcattgaaggtggagggcgttgttcagcacggcagcaagccaggcctgttccggaaaatccagtctgtctgcctgaacgtgtcaagtaccctacagtctaagagcgggcaagattataaaatccctatagacaatatgaccaacgagatggaacagcgtgtagaaccacataatgattacttttcaacgcaatttctcctgaattttgccatcctggggacacacaatattactgtggaatcttctgtgaaagacgccaatggcattgtgtggaaaacggggcctaggaccaccatctttgtgaagtccttggaggatccttactcccagcaaattagactgcagcaacagcaggctcaacaacccctgcagcagcagcaacagcgcaatgcttataccagattctag

SEQ ID NO: 78488 - DNA, 2829 bp, Artificial Sequence
  derived and/or modified sequence
atggccagcaacagcaccaagagcttcctggccgacgccggctacggcgagcaggagctggacgccaacagcgccctgatggagctggacaagggcctgagaagcggcaagctgggcgagcagtgcgaggccgtggtgagattccccagactgttccagaagtaccccttccccatcctgatcaacagcgccttcctgaagctggccgacgtgttcagagtgggcaacaacttcctgagactgtgcgtgctgaaggtgacccagcagagcgagaagcacctggagaagatcctgaacgtggacgagttcgtgaagagaatcttcagcgtgatccacagcaacgaccccgtggccagagccatcaccctgagaatgctgggcagcctggccagcatcatccccgagagaaagaacgcccaccacagcatcagacagagcctggacagccacgacaacgtggaggtggaggccgccgtgttcgccgccgccaacttcagcgcccagagcaaggacttcgccgtgggcatctgcaacaagatcagcgagatgatccagggcctggccacccccgtggacctgaagctgaagctgatccccatcctgcagcacatgcaccacgacgccatcctggccagcagcgccagacagctgctgcagcagctggtgaccagctaccccagcaccaagatggtgatcgtgagcctgcacaccttcaccctgctggccgccagcagcctggtggacacccccaagcagatccagctgctgctgcagtacctgaagaacgaccccagaaaggccgtgaagagactggccatccaggacctgaagctgctggccaacaagaccccccacacctggagcagagagaacatccaggccctgtgcgagtgcgccctgcagaccccctacgacagcctgaagctgggcatgctgagcgtgctgagcaccctgagcggcaccatcgccatcaagcactacttcagcatcgtgcccggcaacgtgagcagcagccccagaagcagcgacctggtgaagctggcccaggagtgctgctaccacaacaacagaggcatcgccgcccacggcgtgagagtgctgaccaacatcaccgtgagctgccaggagaaggacctgctggccctggagcaggacgccgtgttcggcctggagagcctgctggtgctgtgcagccaggacgacagccccggcgcccaggccaccctgaagatcgccctgaactgcatggtgaagctggccaagggcagaccccacctgagccagagcgtggtggagaccctgctgacccagctgcacagcgcccaggacgccgccagaatcctgatgtgccactgcctggccgccatcgccatgcagctgcccgtgctgggcgacggcatgctgggcgacctgatggagctgtacaaggtgatcggcagaagcgccaccgacaagcagcaggagctgctggtgagcctggccaccgtgatcttcgtggccagccagaaggccctgagcgtggagagcaaggccgtgatcaagcagcagctggagagcgtgagcaacggctggaccgtgtacagaatcgccagacaggccagcagaatgggcaaccacgacatggccaaggagctgtaccagagcctgctgacccaggtggccagcgagcacttctacttctggctgaacagcctgaaggagttcagccacgccgagcagtgcctgaccggcctgcaggaggagaactacagcagcgccctgagctgcatcgccgagagcctgaagttctaccacaagggcatcgccagcctgaccgccgccagcacccccctgaaccccctgagcttccagtgcgagttcgtgaagctgagaatcgacctgctgcaggccttcagccagctgatctgcacctgcaacagcctgaagaccagccccccccccgccatcgccaccaccatcgccatgaccctgggcaacgacctgcagagatgcggcagaatcagcaaccagatgaagcagagcatggaggagttcagaagcctggccagcagatacggcgacctgtaccaggccagcttcgacgccgacagcgccaccctgagaaacgtggagctgcagcagcagagctgcctgctgatcagccacgccatcgaggccctgatcctggaccccgagagcgccagcttccaggagtacggcagcaccggcaccgcccacgccgacagcgagtacgagagaagaatgatgagcgtgtacaaccacgtgctggaggaggtggagagcctgaacagaaagtacacccccgtgagctacatgagatacttcttccagaagctgcagagcaccagcatcaagctggccctgagccccagccccagaaaccccgccgagcccatcgccgtgcagaacaaccagcagctggccctgaaggtggagggcgtggtgcagcacggcagcaagcccggcctgttcagaaagatccagagcgtgtgcctgaacgtgagcagcaccctgcagagcaagagcggccaggactacaagatccccatcgacaacatgaccaacgagatggagcagagagtggagccccacaacgactacttcagcacccagttcctgctgaacttcgccatcctgggcacccacaacatcaccgtggagagcagcgtgaaggacgccaacggcatcgtgtggaagaccggccccagaaccaccatcttcgtgaagagcctggaggacccctacagccagcagatcagactgcagcagcagcaggcccagcagcccctgcagcagcagcagcagagaaacgcctacaccagattctag

SEQ ID NO: 78489 - protein, 166 aa, Artificial Sequence
  derived and/or modified sequence
MANSGCKDVTGPDEESFLYFAYGSNLLTERIHLRNPSAAFFCVARLQDFKLDFGNSQGKTSQTWHGGIATIFQSPGDEVWGVVWKMNKSNLNSLDEWRKKRHTAFQNQGNHPCKHKTRMWDRDPKIPVQNLSLALCWQAQSGHGTCNRLFAWVQKKMVCRWSIKRS

SEQ ID NO: 78490 - DNA, 501 bp, Artificial Sequence
  derived and/or modified sequence
atggccaactccggatgtaaagacgtaactgggccagatgaggaatccttcctgtattttgcctatgggtcgaatcttctgacagaacggatccacctcaggaacccctccgcggcatttttttgcgtggcccgcttgcaggactttaaactggattttggcaattcgcaggggaagaccagccaaacgtggcatggtggaatcgcaactatctttcagtcccctggtgacgaagtttggggcgttgtctggaagatgaataagtctaacctgaacagcttggatgaatggagaaagaagaggcacactgctttccaaaatcagggaaatcatccctgtaagcacaagacaaggatgtgggaccgcgatcctaagatcccggtgcagaacttatccctggccttatgttggcaggcgcaatcagggcatggaacttgcaatcgcttattcgcttgggtgcaaaaaaagatggtttgcagatggtctattaagcgatcctag

SEQ ID NO: 78491 - DNA, 767 bp, Artificial Sequence
  derived and/or modified sequence
cactgcgccggggtagtgggccccagtgttgcgctctctggccgttccttacactctgcttcaggctccagtgcaggggcgtagtgggatatggccaactcgggctgcaaggacgtcacgggtccagatgaggagagttttctgtactttgcctacggcagcaacctgctgacagagaggatccacctccgaaacccctcggcggcgttcttctgtgtggcccgcctgcaggattttaagcttgactttggcaattcccaaggcaaaacaagtcaaacttggcatggagggatagccaccatttttcagagtcctggcgatgaagtgtggggagtagtatggaaaatgaacaaaagcaatttaaattctctggatgagtggagaaagaaacgtcacactgcctttcagaatcagggaaatcacccttgcaagcacaagacaagaatgtgggatagagaccccaaaattcctgttcagaacctaagcttagctctctgttggcaggcccaatcaggtcatggcacctgtaatagattatttgcatgggtgcaaaagaaaatggtttgccgctggagtatcaagagaagttaaaagcaatagaaccaaatgactatacaggaaaggtctcagaagaaattgaagacatcatcaaaaagggggaaacacaaactctttagaacataacagaatatatctaagggtattctatgtgctaatataaaatatttttaacacttgagaacagggatctgggggatctccacgtt

SEQ ID NO: 78492 - DNA, 501 bp, Artificial Sequence
  derived and/or modified sequence
atggccaacagcggctgcaaggatgtgacaggcccagatgaggagagcttcctgtactttgcctacggcagcaacctgctgacagagcgcatccacctgaggaaccccagcgctgccttcttctgtgtggcccggctgcaggacttcaagctggactttggaaacagccagggcaagaccagccagacctggcatggaggcatcgccaccatcttccagagccctggagatgaggtgtggggcgtggtgtggaagatgaacaagagcaacctgaacagcctggatgagtggaggaagaagaggcacacagccttccagaaccagggcaaccacccctgcaagcacaagaccaggatgtgggaccgggaccccaagatccctgtgcagaacctgagcctggccctgtgctggcaggcccagagcggccacggcacctgcaacagactctttgcctgggtgcagaagaagatggtgtgccgctggagcatcaagaggagctag

SEQ ID NO: 78493 - DNA, 501 bp, Artificial Sequence
  derived and/or modified sequence
atggccaacagcggctgcaaggacgtgaccggccccgacgaggagtcctttctctacttcgcgtatggaagtaatctgttgacagaacgaattcatctgagaaacccaagtgccgctttcttttgcgtcgcacgtctgcaggactttaaacttgactttgggaatagccagggcaagacgtcccaaacttggcatggaggaattgccacgatctttcagtctcctggagatgaagtgtggggggttgtgtggaagatgaataaaagtaacctgaattccctagacgaatggcgtaaaaaaagacacactgccttccaaaatcaaggcaatcatccatgcaagcataagacgcggatgtgggatagagaccccaagatacccgtgcaaaatctgtcattggccctatgttggcaagcccagtcgggccacgggacctgtaaccgcctgttcgcttgggtgcagaaaaaaatggtctgcaggtggagcatcaaacgcagttag

SEQ ID NO: 78494 - DNA, 501 bp, Artificial Sequence
  derived and/or modified sequence
atggcaaacagtggctgtaaagatgtcacaggaccggatgaagaatcctttctgtacttcgcctacggttccaatctcctaactgaacgaattcacctgcgaaacccctctgccgcatttttttgtgtggccagattacaagactttaaactggacttcggcaatagtcagggaaagacaagccagacttggcatggaggcatcgccactatttttcagtccccaggagatgaagtctggggcgtagtctggaagatgaacaaatccaacctgaatagtctggatgaatggcgaaagaagagacacaccgcctttcagaatcaggggaatcatccatgtaagcataagacccggatgtgggatcgcgatcctaagatccctgtgcagaacctttctctggctctgtgctggcaggcacagagtggacatggcacatgtaaccggctgttcgcctgggtccagaagaagatggtttgccgctggtccattaaacgcagctag

SEQ ID NO: 78495 - DNA, 501 bp, Artificial Sequence
  derived and/or modified sequence
atggccaacagcggctgcaaggacgtgaccggccccgacgaggagagcttcctgtacttcgcctacggcagcaacctgctgaccgagagaatccacctgagaaaccccagcgccgccttcttctgcgtggccagactgcaggacttcaagctggacttcggcaacagccagggcaagaccagccagacctggcacggcggcatcgccaccatcttccagagccccggcgacgaggtgtggggcgtggtgtggaagatgaacaagagcaacctgaacagcctggacgagtggagaaagaagagacacaccgccttccagaaccagggcaaccacccctgcaagcacaagaccagaatgtgggacagagaccccaagatccccgtgcagaacctgagcctggccctgtgctggcaggcccagagcggccacggcacctgcaacagactgttcgcctgggtgcagaagaagatggtgtgcagatggagcatcaagagaagctag

SEQ ID NO: 78496 - protein, 114 aa, Artificial Sequence
  derived and/or modified sequence
MANSGCKDVTGPDEESFLYFAYGSNLLTERIHLRNPSAAFFCVARLQDFKLDFGNSQGKTSQTWHGGIATIFQSPGDEVWGVVWKMNKSNLNSLDELFAWVQKKMVCRWSIKRS

SEQ ID NO: 78497 - DNA, 345 bp, Artificial Sequence
  derived and/or modified sequence
atggccaatagcggctgcaaagacgtgaccggcccagacgaggaaagctttctctacttcgcctacggtagcaacctcttaacagagcgaatccatctgcgcaacccgagcgccgcgtttttttgtgtggcacgactgcaggattttaagctcgattttggtaattcccagggcaagacttcacagacttggcatggggggattgcgacaatcttccagtctcccggcgacgaggtttggggggttgtctggaagatgaacaaatccaacctgaatagtctggacgaattattcgcctgggtgcaaaaaaagatggtctgtaggtggtccatcaaaagaagttag

SEQ ID NO: 78498 - DNA, 993 bp, Artificial Sequence
  derived and/or modified sequence
ggtcactgcgccggggtagtgggccccagtgttgcgctctctggccgttccttacactctgcttcaggctccagtgcaggggcgtagtgggatatggccaactcgggctgcaaggacgtcacgggtccagatgaggagagttttctgtactttgcctacggcagcaacctgctgacagagaggatccacctccgaaacccctcggcggcgttcttctgtgtggcccgcctgcaggattttaagcttgactttggcaattcccaaggcaaaacaagtcaaacttggcatggagggatagccaccatttttcagagtcctggcgatgaagtgtggggagtagtatggaaaatgaacaaaagcaatttaaattctctggatgaattatttgcatgggtgcaaaagaaaatggtttgccgctggagtatcaagagaagttaaaagcaatagaaccaaatgactatacaggaaaggtctcagaagaaattgaagacatcatcaaaaagggggaaacacaaactctttagaacataacagaatatatctaagggtattctatgtgctaatataaaatatttttaacacttgagaacagggatctgggggatctccacgtttgatccattttcagcagtgctctgaaggagtatcttacttgggtgattccttgtttttagactataaaaagaaactgggataggagttagacaatttaaaaggggtgtatgagggcctgaaatatgtgacaaatgaatgtgagtaccccttctgtgaacactgaaagctattctcttgaattgatcttaagtgtctccttgctctggtaaaagatagatttgtagctcacttgatgatggtgctggtgaattgctctgctctgtctgagatttttaaaaatcagcttaatgagagtaatctgcagacaattgataataacattttgaaaattggaaagatggtatactgtttttagaggaataaacgtatttgtggttt

SEQ ID NO: 78499 - DNA, 345 bp, Artificial Sequence
  derived and/or modified sequence
atggccaacagcggctgcaaggatgtgacaggcccagatgaggagagcttcctgtactttgcctacggcagcaacctgctgacagagcgcatccacctgaggaaccccagcgctgccttcttctgtgtggcccggctgcaggacttcaagctggactttggaaacagccagggcaagaccagccagacctggcatggaggcatcgccaccatcttccagagccctggagatgaggtgtggggcgtggtgtggaagatgaacaagagcaacctgaacagcctggatgagctgtttgcctgggtgcagaagaagatggtgtgccgctggagcatcaagaggagctag

SEQ ID NO: 78500 - DNA, 345 bp, Artificial Sequence
  derived and/or modified sequence
atggccaacagcggctgcaaggacgtgaccggccccgacgaggagtcctttctgtactttgcgtatggcagtaatctattgacagagcgcatccatctacggaatccgtccgccgccttcttctgtgtagctagacttcaagattttaagttagattttggcaacagccaaggcaaaactagtcagacctggcacggcggaatcgcaaccattttccagtctcctggagatgaggtctggggcgtcgtgtggaagatgaacaagtctaacttgaatagcctggatgaactctttgcttgggtgcagaaaaaaatggtgtgcaggtggtccatcaagagaagctag

SEQ ID NO: 78501 - DNA, 345 bp, Artificial Sequence
  derived and/or modified sequence
atggctaattccggatgcaaagacgtaaccggacctgatgaggagtctttcctgtactttgcttatggatccaacctgctgacagagcggatccaccttaggaatcccagcgccgcttttttctgtgtcgcaaggttgcaggacttcaaactcgactttggcaacagccagggaaaaacaagccagacctggcatggcggaatagccacaatctttcagtccccgggagacgaggtgtggggtgtcgtctggaaaatgaacaaaagcaatctgaactcgttagatgaactttttgcctgggtccagaaaaagatggtgtgcaggtggagtataaaacgctcttag

SEQ ID NO: 78502 - DNA, 345 bp, Artificial Sequence
  derived and/or modified sequence
atggcaaacagcgggtgtaaggatgtaaccggtcccgatgaggagtcgttcctctatttcgcctatggcagcaatttgctgactgagaggatccatctgcgtaatccttctgccgcctttttctgtgtcgctaggttgcaggactttaaattggatttcggcaatagtcagggtaaaacttcacagacttggcacggtgggatcgccaccatattccaatcccccggagatgaagtgtggggagtggtatggaaaatgaacaaaagcaacctcaactctcttgatgaactttttgcctgggtacagaaaaaaatggtctgtcggtggagcattaaaaggagctag

SEQ ID NO: 78503 - DNA, 345 bp, Artificial Sequence
  derived and/or modified sequence
atggccaactccggatgtaaagatgtgaccggcccagatgaagaaagctttctgtactttgcttacggatcaaacctcttgaccgaacgcatccacttgcggaatccctcggctgccttcttttgcgtggcacggctccaggacttcaaactcgatttcggtaactcccaaggaaaaacatctcagacctggcatggtggcatcgctacgatctttcagagccctggagatgaggtatggggcgtcgtgtggaaaatgaataagtcaaacttgaattccctcgatgaacttttcgcctgggtacaaaagaaaatggtgtgtagatggtccataaagagatcctag

SEQ ID NO: 78504 - DNA, 345 bp, Artificial Sequence
  derived and/or modified sequence
atggccaacagcggctgcaaggacgtgaccggccccgacgaggagagcttcctgtacttcgcctacggcagcaacctgctgaccgagagaatccacctgagaaaccccagcgccgccttcttctgcgtggccagactgcaggacttcaagctggacttcggcaacagccagggcaagaccagccagacctggcacggcggcatcgccaccatcttccagagccccggcgacgaggtgtggggcgtggtgtggaagatgaacaagagcaacctgaacagcctggacgagctgttcgcctgggtgcagaagaagatggtgtgcagatggagcatcaagagaagctag

SEQ ID NO: 78505 - protein, 94 aa, Artificial Sequence
  derived and/or modified sequence
MANSGCKDVTGPDEESFLYFAYGSNLLTERIHLRNPSAAFFCVARLQIICMGAKENGLPLEYQEKLKAIEPNDYTGKVSEEIEDIIKKGETQTL

SEQ ID NO: 78506 - DNA, 285 bp, Artificial Sequence
  derived and/or modified sequence
atggccaacagcggatgtaaggacgtaacaggcccggatgaggagagctttctgtattttgcttacggctccaacctgttgaccgaacggattcaccttaggaatcccagtgctgctttcttctgcgtggcccgcttgcagatcatttgcatgggggctaaggaaaatggtctgcctcttgaatatcaggaaaaactcaaggctatagagcctaacgactataccgggaaggtatctgaggagatagaggacataatcaaaaaaggggagacccagaccctctag

SEQ ID NO: 78507 - DNA, 836 bp, Artificial Sequence
  derived and/or modified sequence
gtcactgcgccggggtagtgggccccagtgttgcgctctctggccgttccttacactctgcttcaggctccagtgcaggggcgtagtgggatatggccaactcgggctgcaaggacgtcacgggtccagatgaggagagttttctgtactttgcctacggcagcaacctgctgacagagaggatccacctccgaaacccctcggcggcgttcttctgtgtggcccgcctgcagattatttgcatgggtgcaaaagaaaatggtttgccgctggagtatcaagagaagttaaaagcaatagaaccaaatgactatacaggaaaggtctcagaagaaattgaagacatcatcaaaaagggggaaacacaaactctttagaacataacagaatatatctaagggtattctatgtgctaatataaaatatttttaacacttgagaacagggatctgggggatctccacgtttgatccattttcagcagtgctctgaaggagtatcttacttgggtgattccttgtttttagactataaaaagaaactgggataggagttagacaatttaaaaggggtgtatgagggcctgaaatatgtgacaaatgaatgtgagtaccccttctgtgaacactgaaagctattctcttgaattgatcttaagtgtctccttgctctggtaaaagatagatttgtagctcacttgatgatggtgctggtgaattgctctgctctgtctgagatttttaaaaatcagcttaatgagagtaatctgcagacaattgataataacattttgaaaattggaaagatggtatactgtttttagaggaataaacgta

SEQ ID NO: 78508 - DNA, 285 bp, Artificial Sequence
  derived and/or modified sequence
atggccaacagcggctgcaaggatgtgacaggcccagatgaggagagcttcctgtactttgcctacggcagcaacctgctgacagagcgcatccacctgaggaaccccagcgctgccttcttctgtgtggcccggctgcagatcatctgcatgggcgccaaggaaaatggcctgcccctggagtaccaggagaagctgaaggccatcgagcccaatgactacacaggcaaggtgtctgaggagattgaggacatcatcaagaagggggagacccagaccctgtag

SEQ ID NO: 78509 - DNA, 285 bp, Artificial Sequence
  derived and/or modified sequence
atggccaacagcggctgcaaggacgtgaccggccccgacgaggagagtttcctttacttcgcctacggaagtaatctcttaacagagcgcatccatctgcggaatccatccgccgctttcttttgtgtggcgcgcctacagataatctgtatgggtgccaaagaaaacggcctacccctcgaataccaggagaaactgaaagccatcgaacccaacgactatactggtaaagtgtcagaggagatcgaggacattataaagaagggagagacccaaacactttag

SEQ ID NO: 78510 - DNA, 285 bp, Artificial Sequence
  derived and/or modified sequence
atggcgaacagcggatgtaaagatgtaacagggcctgacgaggaatccttcctgtacttcgcttacggtagcaacttactgacagaacgcatacatctgcgcaatccaagtgctgcctttttctgtgtcgcaagactgcaaattatttgcatgggcgcaaaagaaaatgggcttcccctagagtatcaggagaagctcaaggccattgagcccaatgactacacgggaaaggtgagcgaagaaattgaagacattattaaaaaaggagagacacagaccctctag

SEQ ID NO: 78511 - DNA, 285 bp, Artificial Sequence
  derived and/or modified sequence
atggccaacagcggctgcaaggacgtgaccggccccgacgaggagagcttcctgtacttcgcctacggcagcaacctgctgaccgagagaatccacctgagaaaccccagcgccgccttcttctgcgtggccagactgcagatcatctgcatgggcgccaaggagaacggcctgcccctggagtaccaggagaagctgaaggccatcgagcccaacgactacaccggcaaggtgagcgaggagatcgaggacatcatcaagaagggcgagacccagaccctgtag

SEQ ID NO: 78512 - protein, 89 aa, Artificial Sequence
  derived and/or modified sequence
MNSQQQKQPCTPPPQPQQQQVKQPCQPPPQEPCIPKTKEPCHPKVPEPCHPKVPEPCQPKVPEPCQPKVPEPCPSTVTPAPAQQKTKQK

SEQ ID NO: 78513 - DNA, 270 bp, Artificial Sequence
  derived and/or modified sequence
atgaacagccagcagcagaagcagccctgcaccccccccccccagccccagcagcagcaggtgaagcagccctgccagccccccccccaggagccctgcatccccaagaccaaggagccctgccaccccaaggtgcccgagccctgccaccccaaggtgcccgagccctgccagcccaaggtgcccgagccctgccagcccaaggtgcccgagccctgccccagcaccgtgacccccgcccccgcccagcagaagaccaagcagaagtag

SEQ ID NO: 78514 - DNA, 270 bp, Artificial Sequence
  derived and/or modified sequence
atgaattcccagcagcagaagcagccctgcacacctcctccccagcctcagcaacaacaggtgaaacaaccatgccagcctccaccccaggaaccttgcatcccgaaaaccaaggaaccttgccatccaaaagttcccgaaccctgccacccaaaagtgccggaaccctgccagcctaaggtccctgaaccgtgtcaaccaaaggtacccgaaccctgcccttccaccgtcacaccagccccagcccaacagaagaccaagcagaagtag

SEQ ID NO: 78515 - DNA, 270 bp, Artificial Sequence
  derived and/or modified sequence
atgaactcacagcagcagaagcaaccgtgcacacctccccctcagccacagcaacagcaagtgaagcagccctgtcagccaccccctcaggaaccttgcatcccaaagaccaaagaaccctgccacccgaaggtgcccgagccttgccaccctaaagttccggaaccctgtcagcccaaggtccccgaaccttgtcaaccaaaggtgcctgaaccctgtcccagcactgtaaccccagcgccggcccagcagaaaactaagcaaaaatag

SEQ ID NO: 78516 - DNA, 270 bp, Artificial Sequence
  derived and/or modified sequence
atgaacagccagcagcagaagcagccctgcaccccaccaccccagccccagcagcagcaggtgaagcagccctgccagcccccaccccaggagccctgcatccccaagaccaaggagccctgccaccccaaggtgcctgagccctgccaccccaaggtgcctgagccctgccagcccaaggtgcctgagccctgccagcccaaggtgcctgagccctgccccagcacagtgaccccagccccagcccagcagaagaccaagcagaagtag

SEQ ID NO: 78517 - DNA, 270 bp, Artificial Sequence
  derived and/or modified sequence
atgaacagccagcagcagaagcagccctgcaccccccccccccagccacagcagcagcaggtgaaacagccctgccagccaccgccccaggaaccttgtatcccaaagacgaaagaaccttgtcacccaaaggtccctgaaccctgtcatccgaaggtccctgaaccgtgtcagcccaaggtcccagaaccttgccagcccaaggttcctgagccatgcccaagcactgtcacccccgcccctgctcagcaaaagaccaaacagaagtag

SEQ ID NO: 78518 - DNA, 270 bp, Artificial Sequence
  derived and/or modified sequence
atgaacagccagcagcagaagcagccctgcaccccccccccccagccacagcagcagcaggtgaaacagccatgtcagccccctccacaggagccttgcattcccaagaccaaggaaccttgtcatcctaaggttccagaaccttgccaccccaaggtgcctgaaccctgccaaccaaaggtcccagagccctgtcagccgaaggtgcccgaaccgtgcccttctactgtgacacccgctccagcacagcaaaaaaccaaacagaagtag

SEQ ID NO: 78519 - DNA, 270 bp, Artificial Sequence
  derived and/or modified sequence
atgaattcccagcagcagaagcagccatgtactccacctccacagccacaacagcaacaggttaagcagccctgtcaaccccctccccaggaaccttgtatcccaaaaacaaaagaaccatgtcatcccaaggtgcctgaaccttgccacccaaaagtacccgagccctgtcagcctaaagtgcccgagccttgccagcccaaggtacccgagccgtgtccgtcgaccgtgaccccagctcctgcccagcagaagaccaagcagaagtag

SEQ ID NO: 78520 - DNA, 270 bp, Artificial Sequence
  derived and/or modified sequence
atgaattcacaacagcaaaaacaaccatgtactccgcctccccagccacaacagcagcaggtcaagcaaccttgtcagcctccccctcaagaaccctgtatcccaaaaaccaaggagccatgtcacccgaaagttcccgaaccatgtcatcctaaggtcccagagccttgtcagccaaaggtgcccgagccatgccagcctaaagtgcctgaaccatgtccgtccacagtgacccctgctccagctcaacaaaagacgaaacagaaatag

SEQ ID NO: 78521 - DNA, 647 bp, Artificial Sequence
  derived and/or modified sequence
accaaacccaagggaccacacagcccattctgctccgtataccagaaaaaaacacatttgaagcatgaattctcagcagcagaagcagccttgcaccccaccccctcagcctcagcagcagcaggtgaaacaaccttgccagcctccaccccaggaaccatgcatccccaaaaccaaggagccctgccaccccaaggtgcctgagccctgccaccccaaagtgcctgagccctgccagcccaaggttccagagccctgccagcccaaggtgcctgagccctgcccttcaacggtcactccagcaccagcccagcagaagaccaagcagaagtaatgtggtccacagccatgcccttgaggagctggccactggatactgaacaccctactccattctgcttatgaatcccatttgcctattgaccctgcagttagcatgctgtcaccctgaatcataatcgctcctttgcacctctaaaaagatgtcccttaccctcattctggagggctcctgagcctctgcgtaaggctgaacgtctcactgactgagctagtcttcttgttgctcgggtgcatttgaggatggatttggggaaggatcaagtgaaccatccctagtcttccttcaataaataacttttaactcc

SEQ ID NO: 78522 - DNA, 270 bp, Artificial Sequence
  derived and/or modified sequence
atgaattctcagcagcagaagcagccttgcaccccaccccctcagcctcagcagcagcaggtgaaacaaccttgccagcctccaccccaggaaccatgcatccccaaaaccaaggagccctgccaccccaaggtgcctgagccctgccaccccaaagtgcctgagccctgccagcccaaggttccagagccctgccagcccaaggtgcctgagccctgcccttcaacggtcactccagcaccagcccagcagaagaccaagcagaagtaa

SEQ ID NO: 78523 - protein, 485 aa, Artificial Sequence
  derived and/or modified sequence
MLLRSKPALPPPLMLLLLGPLGPLSPGALPRPAQAQDVVDLDFFTQEPLHLVSPSFLSVTIDANLATDPRFLILLGSPKLRTLARGLSPAYLRFGGTKTDFLIFDPKKESTFEERSYWQSQVNQDICKYGSIPPDVEEKLRLEWPYQEQLLLREHYQKKFKNSTYSKPNSFLKKADIFINGSQLGEDFIQLHKLLRKSTFKNAKLYGPDVGQPRRKTAKMLKSFLKAGGEVIDSVTWHHYYLNGRTATKEDFLNPDVLDIFISSVQKVFQVVESTRPGKKVWLGETSSAYGGGAPLLSDTFAAGFMWLDKLGLSARMGIEVVMRQVFFGAGNYHLVDENFDPLPDYWLSLLFKKLVGTKVLMASVQGSKRRKLRVYLHCTNTDNPRYKEGDLTLYAINLHNVTKYLRLPYPFSNKQVDKYLLRPLGPHGLLSKSVQLNGLTLKMVDDQTLPPLMEKPLRPGSSLGLPAFSYSFFVIRNAKVAACI

SEQ ID NO: 78524 - DNA, 294 bp, Artificial Sequence
  derived and/or modified sequence
atgctgctgctgctgggccccctgggccccctgagccccggcgccctgcccagacccgcccaggcccaggacgtggtggacctggacttcttcacccaggagcccctgcacctggtgagccccagcttcctgagcgtgaccagacccggcaagaaggtgtggctgggcgagaccagcagcgcctacggcggcggcgcccccctgctgagcgacaccttcgccgccggcttcatgtggctggacaagctgggcctgagcgccagaatgggcatcgaggtggtgatgagacagtag

SEQ ID NO: 78525 - DNA, 1458 bp, Artificial Sequence
  derived and/or modified sequence
atgctgctgagaagcaagcccgccctgcccccccccctgatgctgctgctgctgggccccctgggccccctgagccccggcgccctgcccagacccgcccaggcccaggacgtggtggacctggacttcttcacccaggagcccctgcacctggtgagccccagcttcctgagcgtgaccatcgacgccaacctggccaccgaccccagattcctgatcctgctgggcagccccaagctgagaaccctggccagaggcctgagccccgcctacctgagattcggcggcaccaagaccgacttcctgatcttcgaccccaagaaggagagcaccttcgaggagagaagctactggcagagccaggtgaaccaggacatctgcaagtacggcagcatcccccccgacgtggaggagaagctgagactggagtggccctaccaggagcagctgctgctgagagagcactaccagaagaagttcaagaacagcacctacagcaagcccaacagcttcctgaagaaggccgacatcttcatcaacggcagccagctgggcgaggacttcatccagctgcacaagctgctgagaaagagcaccttcaagaacgccaagctgtacggccccgacgtgggccagcccagaagaaagaccgccaagatgctgaagagcttcctgaaggccggcggcgaggtgatcgacagcgtgacctggcaccactactacctgaacggcagaaccgccaccaaggaggacttcctgaaccccgacgtgctggacatcttcatcagcagcgtgcagaaggtgttccaggtggtggagagcaccagacccggcaagaaggtgtggctgggcgagaccagcagcgcctacggcggcggcgcccccctgctgagcgacaccttcgccgccggcttcatgtggctggacaagctgggcctgagcgccagaatgggcatcgaggtggtgatgagacaggtgttcttcggcgccggcaactaccacctggtggacgagaacttcgaccccctgcccgactactggctgagcctgctgttcaagaagctggtgggcaccaaggtgctgatggccagcgtgcagggcagcaagagaagaaagctgagagtgtacctgcactgcaccaacaccgacaaccccagatacaaggagggcgacctgaccctgtacgccatcaacctgcacaacgtgaccaagtacctgagactgccctaccccttcagcaacaagcaggtggacaagtacctgctgagacccctgggcccccacggcctgctgagcaagagcgtgcagctgaacggcctgaccctgaagatggtggacgaccagaccctgccccccctgatggagaagcccctgagacccggcagcagcctgggcctgcccgccttcagctacagcttcttcgtgatcagaaacgccaaggtggccgcctgcatctag

SEQ ID NO: 78526 - DNA, 294 bp, Artificial Sequence
  derived and/or modified sequence
atgttgctgctgctgggacctcttggccccttgtcaccaggcgccttaccaaggcccgctcaggctcaagacgtggtcgacctagacttttttacccaggagcctctgcatttagtcagtccttcgtttctgtcagtgacccgcccgggcaagaaggtgtggctaggagagacttcttcggcttatggaggtggcgctcccctcctgagtgacacctttgcagctgggttcatgtggctggacaagttgggcctgtctgcccgcatggggattgaagtcgtcatgaggcaatag

SEQ ID NO: 78527 - DNA, 1458 bp, Artificial Sequence
  derived and/or modified sequence
atgctgcttcgcagcaaaccagcactacccccccctctgatgttactcctcttgggcccacttggcccactctctcccggcgctctgcctcggccagcccaagctcaagacgtcgttgatttggactttttcacgcaggaaccactgcacctcgtgagtccctcatttctgagcgtgacaattgatgcgaacctcgcgacagaccctagattcctgatccttttaggtagtcctaagctaagaacattggcccgaggactgagcccggcatacttgagattcggcggcaccaagactgactttctgatctttgatccaaagaaggagtccacatttgaggagaggtcctactggcaatcgcaggttaaccaagatatttgcaagtatggctcaatccctcctgatgtcgaggagaaactacgcttggagtggccataccaggagcagctactcctgcgggaacattaccagaaaaaatttaaaaattctacatatagcaaacccaactcatttctaaaaaaagccgatatctttataaacgggagccagttgggcgaggactttattcagcttcataaacttctgcgaaagagtaccttcaagaatgctaaactttatgggcccgacgtcgggcagcccaggagaaaaaccgctaagatgctgaaatcattcctgaaagccggcggcgaagtcatagacagtgtgacatggcaccactactacctgaacggcagaacagccacaaaggaggactttttaaatcctgacgtgctagacattttcataagttccgtccagaaagtttttcaggtcgtagaaagcaccagacccgggaagaaagtgtggcttggagaaaccagtagcgcttacggaggcggggcccccctgttaagtgacacatttgccgcaggctttatgtggcttgacaagcttggcctgtccgccagaatgggcatcgaggtggtgatgaggcaggtcttctttggggctgggaattatcatttagtggacgagaactttgatcctctgcccgattactggctttctttgctgttcaagaagctggtcggaaccaaagtgttaatggcaagcgtgcaggggagtaagagacgaaaactcagagtctatctgcattgcaccaataccgacaatccacggtataaagaaggcgatctgaccctatacgctatcaatcttcataatgttaccaagtacctcagattaccctatccctttagtaacaagcaggtagacaagtacttgctgcgccctctgggtccccacggcctgctgagtaagagcgtgcaactaaatggccttaccttaaaaatggtcgatgaccagactctccctccactgatggagaaacctctgcgacctggctcctctctagggctgccagcttttagctactcgttttttgtgattagaaacgctaaagttgcagcatgcatttag

SEQ ID NO: 78528 - DNA, 801 bp, Artificial Sequence
  derived and/or modified sequence
atgctgctgctcctggggccgctgggtcccctctcccctggcgccctgccccgacctgcgcaagcacaggacgtcgtggacctggacttcttcacccaggagccgctgcacctggtgagcccctcgttcctgtccgtcaccaggcctggcaagaaggtctggttaggagaaacaagctctgcatatggaggcggagcgcccttgctatccgacacctttgcagctggctttatgtggctggataaattgggcctgtcagcccgaatgggaatagaagtggtgatgaggcaagtattctttggagcaggaaactaccatttagtggatgaaaacttcgatcctttacctgattattggctatctcttctgttcaagaaattggtgggcaccaaggtgttaatggcaagcgtgcaaggttcaaagagaaggaagcttcgagtataccttcattgcacaaacactgacaatccaaggtataaagaaggagatttaactctgtatgccataaacctccataatgtcaccaagtacttgcggttaccctatcctttttctaacaagcaagtggataaataccttctaagacctttgggacctcatggattactttccaaatctgtccaactcaatggtctaactctaaagatggtggatgatcaaaccttgccacctttaatggaaaaacctctccggccaggaagttcactgggcttgccagctttctcatatagtttttttgtgataagaaatgccaaagttgctgcttgcatctgaaaataaaatatactagtcctgacactg

SEQ ID NO: 78529 - DNA, 1458 bp, Artificial Sequence
  derived and/or modified sequence
atgctgctgcgctcgaagcctgcgctgccgccgccgctgatgctgctgctcctggggccgctgggtcccctctcccctggcgccctgccccgacctgcgcaagcacaggacgtcgtggacctggacttcttcacccaggagccgctgcacctggtgagcccctcgttcctgtccgtcaccattgacgccaacctggccacggacccgcggttcctcatcctcctgggttctccaaagcttcgtaccttggccagaggcttgtctcctgcgtacctgaggtttggtggcaccaagacagacttcctaattttcgatcccaagaaggaatcaacctttgaagagagaagttactggcaatctcaagtcaaccaggatatttgcaaatatggatccatccctcctgatgtggaggagaagttacggttggaatggccctaccaggagcaattgctactccgagaacactaccagaaaaagttcaagaacagcacctactcaaaacctaacagtttccttaagaaggctgatattttcatcaatgggtcgcagttaggagaagattttattcaattgcataaacttctaagaaagtccaccttcaaaaatgcaaaactctatggtcctgatgttggtcagcctcgaagaaagacggctaagatgctgaagagcttcctgaaggctggtggagaagtgattgattcagttacatggcatcactactatttgaatggacggactgctaccaaggaagattttctaaaccctgatgtattggacatttttatttcatctgtgcaaaaagttttccaggtggttgagagcaccaggcctggcaagaaggtctggttaggagaaacaagctctgcatatggaggcggagcgcccttgctatccgacacctttgcagctggctttatgtggctggataaattgggcctgtcagcccgaatgggaatagaagtggtgatgaggcaagtattctttggagcaggaaactaccatttagtggatgaaaacttcgatcctttacctgattattggctatctcttctgttcaagaaattggtgggcaccaaggtgttaatggcaagcgtgcaaggttcaaagagaaggaagcttcgagtataccttcattgcacaaacactgacaatccaaggtataaagaaggagatttaactctgtatgccataaacctccataatgtcaccaagtacttgcggttaccctatcctttttctaacaagcaagtggataaataccttctaagacctttgggacctcatggattactttccaaatctgtccaactcaatggtctaactctaaagatggtggatgatcaaaccttgccacctttaatggaaaaacctctccggccaggaagttcactgggcttgccagctttctcatatagtttttttgtgataagaaatgccaaagttgctgcttgcatctga

SEQ ID NO: 78530 - DNA, 294 bp, Artificial Sequence
  derived and/or modified sequence
atgctgctgctgctgggccccctgggccccctgagccctggggccctgcccaggcctgcccaggcccaggatgtggtggacctggacttcttcacccaggagcccctgcacctggtgagccccagcttcctgtctgtgaccaggcctgggaagaaggtgtggctgggggagaccagcagcgcctacggcggcggggcccccctgctgagtgacacctttgctgctggcttcatgtggctggacaagctgggcctgagcgccaggatgggcatcgaggtggtgatgaggcagtag

SEQ ID NO: 78531 - DNA, 1458 bp, Artificial Sequence
  derived and/or modified sequence
atgctgctgcggagcaagccagccctgcccccacccctgatgctgctgctgctgggccccctgggccccctgagccctggggccctgcccaggcctgcccaggcccaggatgtggtggacctggacttcttcacccaggagcccctgcacctggtgagccccagcttcctgtctgtgaccattgatgccaacctggccacagacccccgcttcctgatcctgctgggcagccccaagctgcggaccctggcccggggcctgagccctgcctacctgcgctttggaggcaccaagacagacttcctgatctttgaccccaagaaggagagcacctttgaggagaggagctactggcagagccaggtgaaccaggacatctgcaagtatggcagcatccccccagatgtggaggagaagctgcggctggagtggccctaccaggagcagctgctgctgcgggagcactaccagaagaagttcaagaacagcacctacagcaagcccaacagcttcctgaagaaggctgacatcttcatcaatggcagccagctgggggaggacttcatccagctgcacaagctgctgaggaagagcaccttcaagaatgccaagctgtatggcccagatgtgggccagcccaggaggaagacagccaagatgctgaagagcttcctgaaggccggcggggaggtgattgacagcgtgacctggcaccactactacctgaatggaagaacagccaccaaggaggacttcctgaacccagatgtgctggacatcttcatcagctctgtgcagaaggtgttccaggtggtggagagcaccaggcctgggaagaaggtgtggctgggggagaccagcagcgcctacggcggcggggcccccctgctgagtgacacctttgctgctggcttcatgtggctggacaagctgggcctgagcgccaggatgggcatcgaggtggtgatgaggcaggtgttcttcggggccggcaactaccacctggtggatgagaactttgaccccctgcctgactactggctgagcctgctcttcaagaagctggtgggcaccaaggtgctgatggcctctgtgcagggcagcaagaggaggaagctgcgggtgtacctgcactgcaccaacacagacaacccccgctacaaggagggggacctgaccctgtatgccatcaacctgcacaacgtgaccaagtacctgcggctgccctaccccttcagcaacaagcaggtggacaagtacctgctgcggcccctgggcccccacggcctgctgagcaagtctgtgcagctgaatggcctgaccctgaagatggtggatgaccagaccctgccccccctgatggagaagcccctgcggcccggcagcagcctgggcctgcctgccttctcctacagcttcttcgtcatcagaaatgccaaggtggccgcctgcatctag

SEQ ID NO: 78532 - DNA, 294 bp, Artificial Sequence
  derived and/or modified sequence
atgctgctgctgctgggccccctgggccccctgagccccggcgccctaccacggccagcccaggcacaggatgtggtggacctggatttcttcacacaggaacccctgcacctggtgagcccatctttcctgtcagtcacccgtccaggcaaaaaggtctggctaggtgagacatcctccgcatacggtggaggcgcccccctgttgagcgacacctttgctgcagggtttatgtggctggacaaacttggattatcagccagaatgggtattgaggtcgtcatgcggcaatag

SEQ ID NO: 78533 - DNA, 1458 bp, Artificial Sequence
  derived and/or modified sequence
atgctgctgcggagcaagcccgccctgcccccccccctgatgctgctgctgctgggtcccctaggccctctcagtcctggagctttaccgcggcccgctcaagcgcaggacgtagtcgaccttgatttcttcacacaagagccccttcacctggtgtctccctctttcctgagcgtcacgattgacgctaacctagcaaccgatcctcgctttctgattttactgggatcaccaaaactgaggacacttgcacggggtctaagcccagcgtatcttagattcggaggtacaaagaccgacttcctcatctttgatcctaagaaggaaagtacctttgaggaaagatcctattggcagtcccaagtcaatcaggacatatgcaagtatggctccatccctcctgatgtagaagagaaacttcgcttagaatggccttaccaagaacagctgctcctgagagagcattatcagaaaaagtttaagaacagcacatactccaagcctaatagcttcttaaaaaaggctgacattttcatcaacggctcacagctcggtgaagactttatacagttacacaaactcttacgcaagtctaccttcaaaaacgctaagctgtatgggcctgatgtgggtcagcccagaagaaaaactgcaaaaatgttgaagtcctttctgaaggctggcggagaggttattgatagtgtcacctggcatcattactacttaaatgggcggacagccacgaaggaagatttcctgaatcctgacgtgcttgacatctttatcagttctgtccagaaagtcttccaagtcgtggaatcaactcggcctggcaagaaggtgtggctcggggaaacctcatctgcatacgggggaggcgcacctctcttgagtgacacctttgccgctggttttatgtggttagataaattgggtctgtctgcgcggatgggcatcgaggtcgtgatgcggcaagtgttcttcggcgctggcaactatcacctagttgatgaaaactttgaccccctgcccgactattggctgtccctgttgttcaaaaaactggtgggaaccaaagtgctcatggcgagtgtccaagggagcaagagacgtaaactgagagtctacctccattgcaccaacaccgataacccgagatacaaagagggggacctcaccctctatgcaatcaacctccataatgtgacaaagtacctgaggttgccatatccgttttctaataagcaggtcgataagtacctcctgcggcccctcggtccgcatggcttactgagcaaatctgtgcagctgaacgggttaactctgaaaatggtggatgatcagaccctgcctccccttatggaaaagcctctcaggccggggagcagcctggggctgcctgccttctcgtactctttcttcgtgatcagaaacgccaaggtcgctgcttgcatttag

SEQ ID NO: 78534 - DNA, 294 bp, Artificial Sequence
  derived and/or modified sequence
atgctgctgttgctcgggcctctgggccctctatctcccggagcattgcccaggcccgctcaggcccaggacgtggtggacctggatttttttacccaggagcctttgcaccttgtgtccccttcttttctctctgtgacccgccctggtaagaaagtttggctgggcgagacaagttctgcttacggcggaggagcacctctgctcagtgacacctttgctgccggattcatgtggctggacaagctgggtctgtcagctagaatgggcatcgaggtggtaatgagacagtag

SEQ ID NO: 78535 - DNA, 1458 bp, Artificial Sequence
  derived and/or modified sequence
atgcttctgcgttcaaaacctgcactcccacccccactcatgctactcctgttaggacctctgggaccattaagccctggcgcactgccacggcctgcccaggcccaagacgtggtcgatcttgacttcttcacacaggagcctctacatttagtttccccttccttccttagcgtcacaatcgatgcaaacctggccacggacccccgtttcctcatactcctagggagtcctaagctccgcacgttagctcgcggtttatcgccagcctacttgcgtttcgggggtaccaaaaccgatttcctgatcttcgaccccaagaaggagtctacctttgaagaacgctcctattggcagtcacaggttaaccaagacatttgcaaatatggctcgatcccaccagacgtcgaggagaagctgagattagagtggccctaccaggagcagctacttcttagagagcactatcagaaaaaatttaagaactctacttactccaagccgaattcattccttaaaaaggccgatatattcattaacggatcccaattaggagaggacttcatccagttacacaagctgctacgcaaatctaccttcaaaaacgcgaagctttatgggccagatgtggggcagccgcgtcggaagactgctaaaatgctgaagtcctttttaaaggccggtggagaggttatcgactctgttacctggcaccattattatctcaacggccgaaccgcaaccaaggaggacttccttaacccggacgtgcttgacatttttatctcatccgtgcagaaggtgttccaggtggtcgagagtaccagaccaggcaagaaggtgtggctgggcgagacatcttccgcgtatggcggaggggctcccctcctatccgacacattcgccgcagggtttatgtggttagataaactgggactgagcgcaaggatgggcattgaagtcgtgatgcggcaagttttcttcggtgctgggaactaccatctcgtggacgaaaactttgaccctttaccagactactggctcagcctgctgttcaagaagctggtgggtacaaaggtgcttatggcgagcgtgcagggcagtaaacggagaaagctccgggtttacctgcattgtacaaacaccgacaatccaaggtacaaagagggagacctcacactatacgcgatcaacctgcacaatgtcaccaagtatctgcgcctgccttaccctttttccaataagcaagttgataaatatctcctccgcccactcggccctcacggcctcttgtctaagtcagttcaactgaacggcttgacgctgaaaatggtcgatgaccagaccctgccaccacttatggagaagccacttaggcccggatcttccctgggacttccagccttctcctactcgtttttcgtgatcagaaacgctaaggtggccgcttgtatctag

SEQ ID NO: 78536 - protein, 201 aa, Artificial Sequence
  derived and/or modified sequence
MFPEQQKEEFVSVWVRDPRIQKEDFWHSYIDYEICIHTNSMCFTMKTSCVRRRYREFVWLRQRLQSNALLVQLPELPSKNLFFNMNNRQHVDQRRQGLEDFLRKVLQNALLLSDSSLHLFLQSHLNSEDIEACVSGQTKYSVEEAIHKFALMNRRFPEEDEEGKKENDIDYDSESSSSGLGHSSDDSSSHGCKVNTAPQES

SEQ ID NO: 78537 - protein, 117 aa, Artificial Sequence
  derived and/or modified sequence
MNNRQHVDQRRQGLEDFLRKVLQNALLLSDSSLHLFLQSHLNSEDIEACVSGQTKYSVEEAIHKFALMNRRFPEEDEEGKKENDIDYDSESSSSGLGHSSDDSSSHGCKVNTAPQES

SEQ ID NO: 78538 - DNA, 606 bp, Artificial Sequence
  derived and/or modified sequence
atgttccccgagcagcagaaggaggagttcgtgagcgtgtgggtgagagaccccagaatccagaaggaggacttctggcacagctacatcgactacgagatctgcatccacaccaacagcatgtgcttcaccatgaagaccagctgcgtgagaagaagatacagagagttcgtgtggctgagacagagactgcagagcaacgccctgctggtgcagctgcccgagctgcccagcaagaacctgttcttcaacatgaacaacagacagcacgtggaccagagaagacagggcctggaggacttcctgagaaaggtgctgcagaacgccctgctgctgagcgacagcagcctgcacctgttcctgcagagccacctgaacagcgaggacatcgaggcctgcgtgagcggccagaccaagtacagcgtggaggaggccatccacaagttcgccctgatgaacagaagattccccgaggaggacgaggagggcaagaaggagaacgacatcgactacgacagcgagagcagcagcagcggcctgggccacagcagcgacgacagcagcagccacggctgcaaggtgaacaccgccccccaggagagctag

SEQ ID NO: 78539 - DNA, 606 bp, Artificial Sequence
  derived and/or modified sequence
atgttcccagagcagcagaaagaggagtttgtatcagtgtgggtgcgggatccaagaattcagaaagaggatttctggcacagctacatcgactacgagatttgtatccatactaatagcatgtgctttacaatgaaaacctcctgcgtcagacgacgatacagagaattcgtctggctgcgccagcggctacagtccaacgcgctgctcgttcagctgcccgagttaccatccaagaatctgttttttaatatgaacaatcggcagcacgtcgaccagagacggcagggcctggaggattttctgcggaaggttctgcagaacgcgctgctcctgtccgacagcagcctgcatctctttctgcagtcacacctcaacagcgaggacatcgaggcgtgtgtgagcggccagaccaagtactctgtcgaagaggccattcataagttcgcgctgatgaacaggaggttccctgaagaggatgaagagggcaaaaaagagaatgacatagattatgacagcgagagttccagtagcggcctgggccacagcagcgacgacagcagctcccatggatgtaaagtgaataccgctccccaggagagctag

SEQ ID NO: 78540 - DNA, 606 bp, Artificial Sequence
  derived and/or modified sequence
atgttccctgaacaacagaaagaagagtttgtcagtgtgtgggtgcgcgatcccagaatccagaaggaggatttctggcactcgtatattgattacgaaatttgcatccacacaaacagcatgtgttttaccatgaaaaccagctgcgtgagaagaaggtatcgggagtttgtctggctccggcagcgattgcagtcaaacgctcttctggttcaactgcctgaactcccttctaaaaatctgttctttaatatgaataaccggcaacatgtagaccagagaagacaaggcttggaagactttctgcggaaagtcctgcagaatgcccttctcctgagcgacagctcactgcatctgttcttgcagagccatctcaactccgaggacattgaggcctgcgtcagtggacagacaaagtacagcgtggaggaggcaatccataaattcgcgctgatgaacaggcgctttcctgaggaggacgaagaggggaaaaaggagaacgatatcgactacgacagcgaatcctcctcctccggcctcgggcactccagcgatgattcttctagtcacggttgcaaggtaaacacagccccacaagagagctag

SEQ ID NO: 78541 - DNA, 606 bp, Artificial Sequence
  derived and/or modified sequence
atgtttcctgagcagcagaaggaggagtttgtgtctgtgtgggtgcgggacccccgcatccagaaggaggacttctggcacagctacatcgactatgagatctgcatccacaccaacagcatgtgcttcaccatgaagaccagctgtgtgagaagacgctaccgggagtttgtgtggctgcggcagaggctgcagagcaatgccctgctggtgcagctgcctgagctgcccagcaagaacctcttcttcaacatgaacaaccggcagcacgtggaccagaggcggcagggcctggaggacttcctgaggaaggtgctgcagaatgccctgctgctgagtgacagcagcctgcacctgttcctgcagagccacctgaacagcgaggacatcgaggcctgtgtgtctggccagaccaagtacagcgtggaggaggccatccacaagtttgccctgatgaacagacgcttcccagaagaagatgaggagggcaagaaggaaaatgacattgattatgattctgagagcagcagcagcggcctgggccacagcagtgatgacagcagcagccacggctgcaaggtgaacacagccccccaggagagctag

SEQ ID NO: 78542 - DNA, 606 bp, Artificial Sequence
  derived and/or modified sequence
atgttccccgagcagcagaaggaggagttcgtgagcgtgtgggtgcgagatccccgaatccagaaggaagatttctggcacagctacatcgattacgaaatttgcatacataccaattccatgtgcttcaccatgaaaaccagttgtgttcggcggagatacagagagttcgtgtggctgagacagaggctccaaagtaacgccctgcttgtgcagctccccgagctgccttccaaaaaccttttctttaatatgaacaaccgtcagcacgtagaccaaagacggcaggggctggaggactttctgagaaaggtattgcagaacgccctgttactgagcgacagttcattgcatctgtttttacaatctcatctgaatagcgaggacatagaggcatgtgtctccggccagactaaatattctgtggaagaagccattcataaattcgccctgatgaatcggagattcccagaggaagacgaggaagggaaaaaagagaatgatatcgactacgattccgagtcaagcagcagtggcctcgggcactccagcgacgacagttcttcacatggttgtaaggtgaacacagctcctcaagaatcgtag

SEQ ID NO: 78543 - DNA, 606 bp, Artificial Sequence
  derived and/or modified sequence
atgttccccgagcagcagaaggaggagttcgtgagcgtgtgggtgagggatcctcgcattcagaaggaggatttctggcactcttatatcgattatgaaatttgtatccacaccaattccatgtgttttaccatgaagacatcttgcgtccgcaggaggtacagggagtttgtctggctgagacaacggctgcaatccaatgctctgcttgtacaactgcctgagttgccatctaaaaatctgtttttcaatatgaacaaccgccagcatgtcgaccagcgccggcaaggattggaagattttttaagaaaggtcttgcaaaacgcacttctgctgtccgacagctcccttcacttattcctgcagagccatcttaacagcgaggatatcgaggcctgcgtatccggacaaaccaagtactccgtagaggaggccatccacaagtttgccctgatgaataggcgcttccccgaagaggatgaggaaggcaagaaagaaaatgatatcgactatgattcagaatcttcatcctcagggctcggacatagcagcgacgatagtagcagccatggttgcaaagttaacaccgcacctcaagaaagctag

SEQ ID NO: 78544 - DNA, 606 bp, Artificial Sequence
  derived and/or modified sequence
atgttcccggagcagcaaaaagaggaattcgtgtcagtctgggtgagagatccaaggatacagaaggaggatttctggcattcctatatcgattatgagatctgtattcacaccaattcaatgtgctttaccatgaaaacttcctgcgtcagaagacgctacagagagttcgtttggctcagacagcggttacagagcaacgctttgctggtgcaattgcccgaattaccatcgaagaacctgttcttcaatatgaacaatcgccagcatgtcgaccaacgcagacaggggttggaggacttcctgaggaaagtgttacagaatgctctgctgctgtctgattcttccctacacctcttcctgcaaagtcacctgaactccgaggatatagaggcctgtgtgagtggtcagaccaagtattccgtggaagaggccattcataaatttgcgttaatgaatcggagattccccgaagaggacgaggagggaaagaaggaaaacgatattgactatgatagtgaaagctccagctctggcttaggacatagcagcgacgatagctcttcacacggctgcaaggtgaacactgcacctcaggaaagttag

SEQ ID NO: 78545 - DNA, 606 bp, Artificial Sequence
  derived and/or modified sequence
atgtttcccgaacagcagaaagaagagttcgtctctgtctgggtgagggacccgcgtatccagaaagaggatttctggcacagctacattgattacgaaatctgcatacatactaactctatgtgcttcactatgaagacatcctgcgtccggagaaggtaccgggaatttgtgtggctgaggcagagactgcagtcaaacgctctcctcgtgcagttgccagagctgccctccaagaatctcttttttaacatgaataatcgtcaacacgttgaccagaggcggcagggcctagaagacttccttagaaaggtgttgcaaaatgcacttctgctctcagatagctccctgcacctgttccttcagtcacacctcaacagtgaagacattgaggcttgcgtctcgggacagactaagtattcggttgaggaggccatacacaaattcgccctcatgaaccggagattccctgaagaggatgaggagggaaagaaggagaacgacattgattatgattcagaatcaagcagctcagggctgggacactcttctgacgactcatcatcccatgggtgcaaggtcaacactgccccacaagaatcctag

SEQ ID NO: 78546 - DNA, 2546 bp, Artificial Sequence
  derived and/or modified sequence
gcgcggggagcgcggggagcgcggggagcgcggggctgcgctcgtgtgcgctcctgggcgctcgccgccgccgctgccgccgcgcgcctttgagtcagcaaactccgcggcccgcaagcccggctcggcccggccctgctctgttctgcccggaggagccgcccattgatcgtgtcctgtgctgaagatgtttccggaacaacagaaagaggaatttgtaagtgtctgggttcgagatcctaggattcagaaggaggacttctggcattcttacattgactatgagatatgtattcatactaatagcatgtgttttacaatgaaaacatcctgtgtacgaagaagatatagagaattcgtgtggctgaggcagagactccaaagtaatgcgttgctggtacaactgccagaacttccatctaaaaacctgtttttcaacatgaacaatcgccagcacgtggatcagcgtcgccagggtctggaagatttcctcagaaaagtcctacagaatgcacttttgctttcagatagcagccttcacctcttcttacagagccatctgaattcagaagacattgaggcgtgtgtttctgggcagactaagtactctgtggaagaagcaattcacaagtttgccttaatgaatagacgtttccctgaagaagatgaagaaggaaaaaaagaaaatgatatagattatgattcagaaagttcatcctctgggcttggacacagtagtgatgacagcagttcacatggatgtaaagtaaatacagctccgcaggaatcctgaaaaataattctaatgttactatcttaggaatagcaaattatgtccagtcatagagaagaaagcttcataataatacattcttacctaaagctcactgtcatgatgttaggtatttaaattcttaaagatgttgggttgtttattagtggtatttttatgttgtcttattttaggtaagcttctgtgtaaagctaaaaatcctgtgaatacaatactatcctttacaggcagacattattggtaaacaagatcttgccctccaatgaaatgacttacatgttttaaaaaaccgagttggttttattgaatttaaaaagataggtaactaagtagcatttaaaatcaagatagagcattccttcttgtatcagtggggcagtgttaccataaacacggtgtatatgttgttaaaccctatgaagagtaacagtgtagaccagactgcctctctcagatatgtgcctgatattttgtggatacctcccctgcactggcaaaacactatgcttttgggtgttagactgaaatattttaagagtatttaacctttccagtattctgtttcacgcttagatggaaatgtatcttatgaatagagacatattaaaataatgtttacatcttagaaaaaacatagatagtgctagtaatattacttataactgtaatatatagattcagaaatacattttcattatccaaaatcagcttcaacaaatggtttctggagacaaataatttgttttcattatcattgtataatcaggttaatgatttattttttgactaaatgtgcaatttcttatcactagataactttcagtatcagtggtggttacttattacttaaatcagaggaaggattttataaagattaataaatttaattttaccaataaatattcccataatttagaaaaggatgtcgacttgctaatttcagaaataattattcatttttaaaaagccccttttaaagcatctacttgaagattggtataattttcataaaatgtctttttttttagtgtcccaaagatatcttagataaactattttgaagttcagatttcagatgaggcaacattttcttgagataattacccaagtttcatccatgttgaatggtacaaaatatttctgtgaaactaacaggaagatattttcagataactaggataacttgttgctttgttacccagcctaattgaagagtggcagaggctactacaaaaagcaaccttttcattttcactaagagtttaaaagctattgtattattaaaaagtctttacaatgcttgtttcaaagaaccaacagaaaaaaaagctaagaaaactgagaactaacattaaaaaaattaaatttagaataagaatgatttctttaatttgtcctttttttctttggtctaaaacattattaaatttttgtaaatattttgatttaatgtgtcttagatcctcattattttaatacaggaaaagaaaagatttagtaatttcttaccatgctaatatgtaaagttcatgccatccaggcatttaagagcgatcctcatcccttcagcaatatgtatttgagttcacactatttctgttttacagcagttttgaaaaacacatactatgccaccaattgtcatattatttttagatgatgtaacatagccatcaaaattaatattatgtaatgcctaatacttagtatgtaaatgtcacgagatcatttttacattaaacgtgaaaaaaaa

SEQ ID NO: 78547 - DNA, 2491 bp, Artificial Sequence
  derived and/or modified sequence
atagttgaccagcttctgcaggggctcctcagtgagagaatggaggtgaggtcagggactcctgccttgcctctgccatcacttccagtgatgcctattcctaagattgatcgtgtcctgtgctgaagatgtttccggaacaacagaaagaggaatttgtaagtgtctgggttcgagatcctaggattcagaaggaggacttctggcattcttacattgactatgagatatgtattcatactaatagcatgtgttttacaatgaaaacatcctgtgtacgaagaagatatagagaattcgtgtggctgaggcagagactccaaagtaatgcgttgctggtacaactgccagaacttccatctaaaaacctgtttttcaacatgaacaatcgccagcacgtggatcagcgtcgccagggtctggaagatttcctcagaaaagtcctacagaatgcacttttgctttcagatagcagccttcacctcttcttacagagccatctgaattcagaagacattgaggcgtgtgtttctgggcagactaagtactctgtggaagaagcaattcacaagtttgccttaatgaatagacgtttccctgaagaagatgaagaaggaaaaaaagaaaatgatatagattatgattcagaaagttcatcctctgggcttggacacagtagtgatgacagcagttcacatggatgtaaagtaaatacagctccgcaggaatcctgaaaaataattctaatgttactatcttaggaatagcaaattatgtccagtcatagagaagaaagcttcataataatacattcttacctaaagctcactgtcatgatgttaggtatttaaattcttaaagatgttgggttgtttattagtggtatttttatgttgtcttattttaggtaagcttctgtgtaaagctaaaaatcctgtgaatacaatactatcctttacaggcagacattattggtaaacaagatcttgccctccaatgaaatgacttacatgttttaaaaaaccgagttggttttattgaatttaaaaagataggtaactaagtagcatttaaaatcaagatagagcattccttcttgtatcagtggggcagtgttaccataaacacggtgtatatgttgttaaaccctatgaagagtaacagtgtagaccagactgcctctctcagatatgtgcctgatattttgtggatacctcccctgcactggcaaaacactatgcttttgggtgttagactgaaatattttaagagtatttaacctttccagtattctgtttcacgcttagatggaaatgtatcttatgaatagagacatattaaaataatgtttacatcttagaaaaaacatagatagtgctagtaatattacttataactgtaatatatagattcagaaatacattttcattatccaaaatcagcttcaacaaatggtttctggagacaaataatttgttttcattatcattgtataatcaggttaatgatttattttttgactaaatgtgcaatttcttatcactagataactttcagtatcagtggtggttacttattacttaaatcagaggaaggattttataaagattaataaatttaattttaccaataaatattcccataatttagaaaaggatgtcgacttgctaatttcagaaataattattcatttttaaaaagccccttttaaagcatctacttgaagattggtataattttcataaaatgtctttttttttagtgtcccaaagatatcttagataaactattttgaagttcagatttcagatgaggcaacattttcttgagataattacccaagtttcatccatgttgaatggtacaaaatatttctgtgaaactaacaggaagatattttcagataactaggataacttgttgctttgttacccagcctaattgaagagtggcagaggctactacaaaaagcaaccttttcattttcactaagagtttaaaagctattgtattattaaaaagtctttacaatgcttgtttcaaagaaccaacagaaaaaaaagctaagaaaactgagaactaacattaaaaaaattaaatttagaataagaatgatttctttaatttgtcctttttttctttggtctaaaacattattaaatttttgtaaatattttgatttaatgtgtcttagatcctcattattttaatacaggaaaagaaaagatttagtaatttcttaccatgctaatatgtaaagttcatgccatccaggcatttaagagcgatcctcatcccttcagcaatatgtatttgagttcacactatttctgttttacagcagttttgaaaaacacatactatgccaccaattgtcatattatttttagatgatgtaacatagccatcaaaattaatattatgtaatgcctaatacttagtatgtaaatgtcacgagatcatttttacattaaacgtgaaaaaaaatcaa

SEQ ID NO: 78548 - DNA, 944 bp, Artificial Sequence
  derived and/or modified sequence
actgcttatttccatcatcctggctgtcttcagggctgttatgttcctgggttatgtgcaagatttcagagtactggcataaatataaatatatgtttggtggtttaaatcctatttagagtgaatgttgagatcatattgtgaattatagatacaagaaatgcatttttttcctcagacaactgccagaacttccatctaaaaacctgtttttcaacatgaacaatcgccagcacgtggatcagcgtcgccagggtctggaagatttcctcagaaaagtcctacagaatgcacttttgctttcagatagcagccttcacctcttcttacagagccatctgaattcagaagacattgaggcgtgtgtttctgggcagactaagtactctgtggaagaagcaattcacaagtttgccttaatgaatagacgtttccctgaagaagatgaagaaggaaaaaaagaaaatgatatagattatgattcagaaagttcatcctctgggcttggacacagtagtgatgacagcagttcacatggatgtaaagtaaatacagctccgcaggaatcctgaaaaataattctaatgttactatcttaggaatagcaaattatgtccagtcatagagaagaaagcttcataataatacattcttacctaaagctcactgtcatgatgttaggtatttaaattcttaaagatgttgggttgtttattagtggtatttttatgttgtcttattttaggtaagcttctgtgtaaagctaaaaatcctgtgaatacaatactatcctttacaggcagacattattggtaaacaagatcttgccctccaatgaaatgacttacatgttttaaaaaaccgagttggttttattgaatttaaaaagataggtaactaagtagcatttaaaatcaagatagagcattccttcttgtatcagt

SEQ ID NO: 78549 - DNA, 354 bp, Artificial Sequence
  derived and/or modified sequence
atgaacaacagacagcacgtggaccagagaagacagggcctggaggacttcctgagaaaggtgctgcagaacgccctgctgctgagcgacagcagcctgcacctgttcctgcagagccacctgaacagcgaggacatcgaggcctgcgtgagcggccagaccaagtacagcgtggaggaggccatccacaagttcgccctgatgaacagaagattccccgaggaggacgaggagggcaagaaggagaacgacatcgactacgacagcgagagcagcagcagcggcctgggccacagcagcgacgacagcagcagccacggctgcaaggtgaacaccgccccccaggagagctag

SEQ ID NO: 78550 - DNA, 354 bp, Artificial Sequence
  derived and/or modified sequence
atgaacaatcgccagcacgttgatcaacggagacagggcctcgaagatttcttgcggaaagtgctgcagaacgctctgctgctgagcgactccagcttgcacctcttccttcagagtcatcttaatagcgaagacattgaagcttgtgttagcggtcagacaaagtactccgtcgaggaggccattcataaattcgcgcttatgaacaggagattcccggaggaggatgaggagggaaagaaggagaacgatatagactatgattcagagagttcatcaagcggcctcgggcattcatcagacgatagctccagccacggctgtaaagtaaacacagctccgcaggaatcttag

SEQ ID NO: 78551 - DNA, 354 bp, Artificial Sequence
  derived and/or modified sequence
atgaacaaccggcagcacgtggaccagaggcggcagggcctggaggacttcctgaggaaggtgctgcagaatgccctgctgctgagtgacagcagcctgcacctgttcctgcagagccacctgaacagcgaggacatcgaggcctgtgtgtctggccagaccaagtacagcgtggaggaggccatccacaagtttgccctgatgaacagacgcttcccagaagaagatgaggagggcaagaaggaaaatgacattgattatgattctgagagcagcagcagcggcctgggccacagcagtgatgacagcagcagccacggctgcaaggtgaacacagccccccaggagagctag

SEQ ID NO: 78552 - DNA, 354 bp, Artificial Sequence
  derived and/or modified sequence
atgaacaaccggcagcacgtggaccagcggcggcagggcctggaggattttttaaggaaggtgctgcaaaatgctctactcctgagtgactccagcttgcacctttttctgcaaagccacctgaacagtgaggatattgaggcttgtgtgagtgggcagactaaatacagtgtggaagaggcgatccacaagtttgccctgatgaatcgccgttttcccgaagaggacgaggagggtaagaaggagaatgacatcgactatgactccgaatcttccagcagcggactggggcattcttctgacgactccagcagtcatggctgcaaagtgaacacagcaccacaggaaagttag

SEQ ID NO: 78553 - DNA, 354 bp, Artificial Sequence
  derived and/or modified sequence
atgaataataggcagcacgttgatcagagacgccagggtctggaagatttcctccgcaaggttcttcaaaacgctctcctcttatcggatagctccctgcacctgttcttgcagtcccaccttaactccgaggatatcgaggcgtgtgtgagcggacaaacaaagtactcagtcgaggaggctatccacaagtttgctttaatgaaccgacgcttccctgaggaggatgaggaaggcaaaaaagagaatgatatcgattacgatagcgagtctagctcttcaggtctcggtcatagcagtgacgattcaagcagtcatgggtgcaaagttaacactgcgcctcaggagtcctag

SEQ ID NO: 78554 - protein, 398 aa, Artificial Sequence
  derived and/or modified sequence
MMLKGITRLISRIHKLDPGRFLHMGTQARQSIAAHLDNQVPVESPRAISRTNENDPAKHGDQHEGQHYNISPQDLETVFPHGLPPRFVMQVKTFSEACLMVRKPALELLHYLKNTSFAYPAIRYLLYGEKGTGKTLSLCHVIHFCAKQDWLILHIPDAHLWVKNCRDLLQSSYNKQRFDQPLEASTWLKNFKTTNERFLNQIKVQEKYVWNKRESTEKGSPLGEVVEQGITRVRNATDAVGIVLKELKRQSSLGMFHLLVAVDGINALWGRTTLKREDKSPIAPEELALVHNLRKMMKNDWHGGAIVSALSQTGSLFKPRKAYLPQELLGKEGFDALDPFIPILVSNYNPKEFESCIQYYLENNWLQHEKAPTEEGKKELLFLSNANPSLLERHCAYL

SEQ ID NO: 78555 - DNA, 1197 bp, Artificial Sequence
  derived and/or modified sequence
atgatgttgaagggcataactcgcctgattagtagaattcataagctcgatcctgggaggtttctgcacatggggacacaagctagacaaagcattgccgcacatttggacaaccaggttcctgtggaatcccctagagccattagccgtaccaacgagaatgatcctgctaagcacggagatcagcacgagggacaacattacaacatcagtccccaggatctcgagaccgttttcccccacggactacctcccagattcgtgatgcaggttaagacatttagcgaggcctgtctcatggttcgtaagcctgcacttgagctgcttcactacctgaaaaacacttcttttgcctaccccgctatccggtatctcctgtacggagagaagggcaccgggaaaacactgagtctgtgccacgtgatccatttctgtgcgaagcaggattggttgatcttgcacattcctgatgcgcatctgtgggttaagaattgtagagacctgctgcagagctcttacaacaagcagcgctttgatcaacctctggaggcctctacctggctcaagaactttaagacaacaaacgagcggtttctgaatcaaattaaggtgcaggagaagtatgtgtggaataaaagagagagcacagagaagggtagtcccctgggggaggttgtggagcagggcataacacgggtgcggaatgccacagatgcagtgggcatcgtgctaaaagagctgaagagacagtcctctttaggtatgtttcacttgctggttgcagtggatggaatcaatgctctatgggggcggaccacactgaagcgcgaggataaaagccctatcgcccccgaagaattagcgctcgttcataatctgaggaaaatgatgaagaacgattggcatggtggggctattgtgtccgccctcagtcaaacaggttccctgtttaagcctcgcaaggcgtacttgcctcaagagctgttaggaaaagaagggttcgatgcattagacccattcatccctatcttggtctcaaactacaatcctaaagaatttgagtcttgtatacaatactacctggaaaacaactggctccaacacgaaaaggccccaacagaagagggcaagaaggagttgttgttcctctcaaacgccaatcctagtttgcttgagagacattgcgcctatctttag

SEQ ID NO: 78556 - DNA, 1197 bp, Artificial Sequence
  derived and/or modified sequence
atgatgctgaaaggcatcactcggctgatttctcggattcataaactggaccctgggcgcttcctgcacatggggacccaagctcgacagtctattgctgcacatctggacaaccaggtgcctgtggaatcaccacgcgctatcagccgcacgaacgaaaatgaccccgcaaaacacggtgaccaacatgagggacaacactacaatatttccccacaggacctggagacagtcttcccacacgggcttcctccccggttcgtaatgcaggtcaaaacctttagtgaggcttgtcttatggtccgtaagccagcgctggagctgctccattacttgaaaaacacctcttttgcctatcccgcgattcggtaccttctatacggtgaaaaaggcaccggaaaaactctgtccctatgccatgtaatccacttctgtgcaaagcaggattggctcatcctgcacattcctgatgcgcacctctgggttaaaaattgccgcgacctcctgcagtcttcatacaataagcagcggtttgaccagccactggaggcttctacatggttgaagaacttcaaaacaaccaatgagagattcctcaatcagatcaaagtgcaggaaaaatatgtttggaacaaacgggagagcaccgagaagggttctcccctcggtgaggttgttgaacagggtattactcgcgtgcggaacgctacagacgctgtggggatcgtgctcaaggaactcaaaagacagagctctctgggcatgttccacctcctggtggccgtcgatgggattaacgccctgtggggcaggacaaccctaaagagagaggataagtccccaatcgctcccgaagagctggccctggttcacaatctgagaaagatgatgaaaaacgactggcacggaggagcaattgtgagcgctctatcccagacaggctcgcttttcaaaccgcgtaaagcctatcttccgcaagaactcttgggaaaggagggcttcgacgcattagacccgtttattcccatcctggtgtcaaactacaatccgaaggagtttgagagctgtatacagtactatttggagaacaactggttgcagcacgagaaagcacccaccgaggaaggcaagaaggagctgttattcctgagcaatgcaaacccttctctactcgaacggcactgtgcatacttgtag

SEQ ID NO: 78557 - DNA, 1197 bp, Artificial Sequence
  derived and/or modified sequence
atgatgctgaagggcatcaccaggctcatcagccgcatccacaagctggaccccggccgcttcctgcacatgggcacccaggcccggcagagcattgctgcccacctggacaaccaggtgcctgtggagagcccccgggccatcagcaggaccaatgaaaatgaccctgccaagcatggagaccagcacgagggccagcactacaacatcagcccccaggacctggagaccgtcttcccccacggcctgccccccaggtttgtgatgcaggtgaagaccttcagcgaggcctgcctgatggtgaggaagccagccctggagctgctgcactacctgaagaacaccagctttgcctacccagccatccgctacctgctgtatggagagaagggcaccgggaagaccctgagcctgtgccacgtgatccacttctgtgccaagcaggactggctgatcctgcacatcccagatgcccacctgtgggtgaagaactgccgggacctgctgcagagcagctacaacaagcagagatttgaccagcccctggaggccagcacctggctgaagaacttcaagaccaccaatgaacgcttcctgaaccagatcaaggtgcaggagaagtatgtgtggaacaagcgggagagcacagagaagggcagccccctgggggaggtggtggagcagggcatcaccagggtgagaaatgccacagatgctgtgggcatcgtgctgaaggagctgaagaggcagagcagcctgggcatgttccacctgctggtggccgtggatggcatcaatgccctgtggggccgcaccaccctgaagcgggaggacaagagccccatcgcccctgaggagctggccctggtgcacaacctgaggaagatgatgaagaatgactggcacggcggggccatcgtgtctgccctgagccagacaggcagcctcttcaagcccaggaaggcctacctgccccaggagctgctgggcaaggagggctttgatgccctggaccccttcatccccatcctggtgagcaactacaaccccaaggagtttgagagctgcatccagtactacctggagaacaactggctgcagcacgagaaggcccccacagaggagggcaagaaggagctgctcttcctgagcaatgccaaccccagcctgctggagcggcactgtgcctacctgtag

SEQ ID NO: 78558 - DNA, 1197 bp, Artificial Sequence
  derived and/or modified sequence
atgatgctgaagggcatcacccggctgatcagccggatccacaagcttgaccctgggagatttctacacatggggacgcaagcgagacaatcaattgctgcccatctggataaccaagtcccagtggagtccccccgcgccatttcccggacaaacgaaaatgacccagcaaaacacggcgatcagcatgagggccaacattataacatctcaccccaggacctggagaccgtcttcccacacggactgcctcctcggtttgtcatgcaagtgaaaacgtttagcgaggcctgcctgatggtccgaaaaccagccttggagttgctgcactacctaaagaacacctccttcgcctatcccgcaatacgctatctgctctatggagagaagggtacaggaaaaactttatccctatgccacgtgattcacttttgtgctaaacaggattggcttatcctgcacattcccgatgcacacctgtgggttaaaaactgtcgtgatctgctccagtctagctacaacaaacagcgctttgatcaacccctggaagcatccacctggctgaagaacttcaagaccaccaatgagagatttctgaaccagatcaaagtacaagaaaagtacgtgtggaataaacgcgaaagtactgagaagggaagcccacttggcgaggtcgtggagcagggaattacaagggtccggaacgctaccgatgccgtcgggattgtgctgaaagaactgaagcgccagtcatcactgggcatgttccacttgctcgttgccgtagacggaattaacgctctttgggggagaactactctgaaacgtgaggacaagtcccccatcgcacctgaggagctcgcactggtacacaacctccgaaagatgatgaaaaatgactggcacggaggcgccatcgtttcagctttatcacaaacagggtcactctttaaacctcggaaggcctatctgccacaggagctgctgggtaaagagggcttcgacgccttggaccccttcatacccattttggtgagcaactacaacccaaaggaattcgaatcgtgcatccaatactacctcgagaataattggctgcagcatgaaaaggcccccactgaggagggaaagaaagagttgctcttcttgtccaacgctaatccatctctccttgaaaggcactgcgcctatctctag

SEQ ID NO: 78559 - DNA, 1197 bp, Artificial Sequence
  derived and/or modified sequence
atgatgctgaagggcatcacccggctgatcagccggatccacaagctcgacccagggagatttcttcatatggggacacaggcacgccagtcgatcgctgctcacctcgataatcaggtgcccgtggagtcaccaagagccatctcgagaaccaatgagaatgaccccgctaagcatggggaccaacacgaaggtcagcattacaacataagcccacaagatctggaaacagtgttccctcacgggctgccgcctaggttcgtgatgcaggtcaagacgttctcagaggcatgtcttatggtacgtaagcccgcactagagctgcttcactaccttaagaacacttccttcgcctacccagccatccgatatttactgtacggagagaagggaacggggaaaaccctctcactttgccacgtaattcacttttgcgctaagcaggactggttaatcctacatattccagatgctcatctttgggtcaagaactgccgagacttgctgcaaagctcatataataagcagagattcgaccaacccttagaggcgagcacctggctgaaaaatttcaagacaacaaatgagagatttctgaaccaaataaaggtgcaggaaaagtacgtatggaacaagcgcgagtccaccgaaaaggggagcccccttggagaagtagtagaacaagggatcactcgagtccgcaacgcaaccgacgctgtggggattgtgctcaaggaattaaagcgccagagtagtctgggaatgttccacctactggttgccgtagatggcattaatgccctgtggggtagaaccacgctaaagagggaggacaaatcccctattgcaccagaggaactggcactcgttcataatctacggaagatgatgaaaaacgattggcatggtggggccatcgtgtcagcccttagccagaccggatcgctctttaagcccagaaaagcttatttgcctcaggagttactcggcaaagaaggcttcgatgcacttgatcctttcatcccaattctcgtgagtaattataatcctaaggagttcgagtcatgcattcagtactacctggagaacaattggttgcagcatgagaaggcacccaccgaggaaggtaaaaaggaacttctgttcctctccaatgctaaccccagtctcctggagcggcactgcgcctatctgtag

SEQ ID NO: 78560 - DNA, 1197 bp, Artificial Sequence
  derived and/or modified sequence
atgatgttaaaaggcattacccgccttatctctagaatccataagcttgacccgggacgattcctacatatgggcactcaggcccgacaatctattgctgcccacttggataatcaggtccccgttgaatcaccacgcgctatctcacgtactaacgaaaacgatccagcaaagcacggagaccagcacgagggtcagcactacaatatttccccgcaggaccttgagactgtctttccgcacggcctgcctcctcggtttgttatgcaggtaaagactttcagtgaggcctgtttaatggtcaggaaacctgccctggaactgctccactacctgaagaacacatcattcgcgtacccggctattcggtacctcctgtatggcgagaaaggcaccggcaagactctgtccttgtgccatgtgatacacttttgtgccaagcaagactggctgattctgcacattccagacgcgcatctatgggtgaaaaactgtagagatcttttacagtcctcatacaataaacagcggttcgatcagcctttggaagcctcaacatggttgaaaaactttaaaaccacaaacgaaagattccttaatcaaatcaaggtgcaggagaaatacgtttggaacaagcgcgagagcacagagaagggctctccgttgggagaggtggtggaacaaggaataaccagagttagaaacgccaccgacgccgtagggattgttctcaaggaacttaaaagacagtcatccctcggtatgtttcatttactggtggcagtcgacggaattaatgcgttgtggggtagaacaacgctgaagagagaggacaagtctccgatcgctcccgaagaactggcattggtccataatctcagaaagatgatgaaaaatgactggcacgggggtgcaatagtgtcagcgctgagtcagactggttccctttttaagccccgaaaagcctatttgccccaggagctactgggcaaggagggctttgacgcccttgaccctttcattccaattctggtgtctaattacaaccccaaggaattcgaatcctgcatacagtactatctggagaataattggcttcagcacgaaaaggcaccgaccgaggaaggaaagaaggagcttttgtttcttagtaatgcaaacccttccttgcttgagcggcactgcgcctacttgtag

SEQ ID NO: 78561 - DNA, 1197 bp, Artificial Sequence
  derived and/or modified sequence
atgatgctcaagggaataacaagattgatttctcgcattcacaaactggatcctggcaggttcctgcacatggggacacaggctcggcagagcatagccgcacacctcgataaccaagtgccagtggaatcaccacgggcaatatctcgaaccaacgaaaacgacccagccaagcacggggatcagcacgagggtcaacattataacatctccccccaggatctggagaccgtttttcctcatggcctcccacctcggtttgtgatgcaggttaagacattctctgaggcttgtctgatggtgcgtaagcccgcattagagctcctgcactatctaaaaaacacaagttttgcataccccgctatccgatatcttctgtacggggaaaaaggaaccggtaaaacgctgtcattgtgtcatgtaatccatttttgcgctaagcaggattggttgatcctccacattcccgacgcccacttgtgggttaagaattgcagagatctgctgcagtcgtcctataataagcagagatttgaccagcctctggaggcatccacttggctgaagaattttaagaccaccaacgagcgctttttgaatcagatcaaggtgcaagaaaagtacgtctggaataaacgcgagagtactgagaagggctcccctctgggtgaagtggttgaacaggggattactagagttcgcaatgccaccgacgcagttggaattgtccttaaagagctgaaacgccagtcctcactcggtatgttccacctcctggtagccgtagatggcatcaacgctctgtggggaaggactacactgaagcgggaagataagtcaccaatcgctccagaggaactcgctcttgtgcataatttgcgcaaaatgatgaagaacgactggcacggtggtgctatagtctctgctctctctcaaactggatccctttttaaaccaaggaaagcgtatctgcctcaggaattgctgggaaaggagggctttgacgctctagacccatttatcccgatactcgtatcgaactacaatccaaaggagttcgaatcctgcatccagtattacttggaaaataactggctgcagcatgagaaagccccaaccgaggagggcaaaaaagagttactctttcttagcaatgccaatccctccctcctggagaggcattgtgcttacctgtag

SEQ ID NO: 78562 - DNA, 1197 bp, Artificial Sequence
  derived and/or modified sequence
atgatgctgaagggcatcaccagactgatcagcagaatccacaagctggaccccggcagattcctgcacatgggcacccaggccagacagagcatcgccgcccacctggacaaccaggtgcccgtggagagccccagagccatcagcagaaccaacgagaacgaccccgccaagcacggcgaccagcacgagggccagcactacaacatcagcccccaggacctggagaccgtgttcccccacggcctgccccccagattcgtgatgcaggtgaagaccttcagcgaggcctgcctgatggtgagaaagcccgccctggagctgctgcactacctgaagaacaccagcttcgcctaccccgccatcagatacctgctgtacggcgagaagggcaccggcaagaccctgagcctgtgccacgtgatccacttctgcgccaagcaggactggctgatcctgcacatccccgacgcccacctgtgggtgaagaactgcagagacctgctgcagagcagctacaacaagcagagattcgaccagcccctggaggccagcacctggctgaagaacttcaagaccaccaacgagagattcctgaaccagatcaaggtgcaggagaagtacgtgtggaacaagagagagagcaccgagaagggcagccccctgggcgaggtggtggagcagggcatcaccagagtgagaaacgccaccgacgccgtgggcatcgtgctgaaggagctgaagagacagagcagcctgggcatgttccacctgctggtggccgtggacggcatcaacgccctgtggggcagaaccaccctgaagagagaggacaagagccccatcgcccccgaggagctggccctggtgcacaacctgagaaagatgatgaagaacgactggcacggcggcgccatcgtgagcgccctgagccagaccggcagcctgttcaagcccagaaaggcctacctgccccaggagctgctgggcaaggagggcttcgacgccctggaccccttcatccccatcctggtgagcaactacaaccccaaggagttcgagagctgcatccagtactacctggagaacaactggctgcagcacgagaaggcccccaccgaggagggcaagaaggagctgctgttcctgagcaacgccaaccccagcctgctggagagacactgcgcctacctgtag

SEQ ID NO: 78563 - DNA, 1649 bp, Artificial Sequence
  derived and/or modified sequence
ccttttttgcagtctcaggacgggcgctttggagccggccccaggcagcgtgtgtcggtcgcctagtctggagaactagtcctcgactcacggtgagggaatggaccgacacgggtattgtaccgctgagggaaaggagcgggactccggacctccaggagtgcaaggatgatgctgaaaggaataacaaggcttatctctaggatccataagttggaccctgggcgttttttacacatggggacccaggctcgccaaagcattgctgctcacctagataaccaggttccagttgagagtccgagagctatttcccgcaccaatgagaatgacccggccaagcatggggatcagcacgagggtcagcactacaacatctccccccaggatttggagactgtatttccccatggccttcctcctcgctttgtgatgcaggtgaagacattcagtgaagcttgcctgatggtaaggaaaccagccctagaacttctgcattacctgaaaaacaccagttttgcttatccagctatacgatatcttctgtatggagagaagggaacaggaaaaaccctaagtctttgccatgttattcatttctgtgcaaaacaggactggctgatactacatattccagatgctcatctttgggtgaaaaattgtcgggatcttctgcagtccagctacaacaaacagcgctttgatcaacctttagaggcttcaacctggctgaagaatttcaaaactacaaatgagcgcttcctgaaccagataaaagttcaagagaagtatgtctggaataagagagaaagcactgagaaagggagtcctctgggagaagtggttgaacagggcataacacgggtgaggaacgccacagatgcagttggaattgtgctgaaagagctaaagaggcaaagttctttgggtatgtttcacctcctagtggccgtggatggaatcaatgctctttggggaagaaccactctgaaaagagaagataaaagcccgattgcccccgaggaattagcacttgttcacaacttgaggaaaatgatgaaaaatgattggcatggaggcgccattgtgtcggctttgagccagactgggtctctctttaagccccggaaagcctatctgccccaggagttgctgggaaaggaaggatttgatgccctggatccctttattcccatcctggtttccaactataacccaaaggaatttgaaagttgtattcagtattatttggaaaacaattggcttcaacatgagaaagctcctacagaagaagggaaaaaagagctgctgttcctaagtaacgcgaacccctcgctgctggagcggcactgtgcctacctctaagccaagatcacagcatgtgaggaagacagtggacatctgctttatgctggacccagtaagatgaggaagtcgggcagtacacaggaagaggagccaggcccttgtacctatgggattggacaggactgcagttggctctggacctgcattaaaatgggtttcactgtgaatgcgtgacaataagatattcccttgttcctaaaactttatatcagtttattggatgtggtttttcacatttaagataattatggctcttttcctaaaaaataaaatatctttct

SEQ ID NO: 78564 - DNA, 2089 bp, Artificial Sequence
  derived and/or modified sequence
gtcgtttcctgccggatgacccgacccttttttgcagtctcaggacgggcgctttggagccggccccaggcagcgtgtgtcggtcgcctagtctggagaactagtcctcgactcacgtgcaaggatgatgctgaaaggaataacaaggcttatctctaggatccataagttggaccctgggcgttttttacacatggggacccaggctcgccaaagcattgctgctcacctagataaccaggttccagttgagagtccgagagctatttcccgcaccaatgagaatgacccggccaagcatggggatcagcacgagggtcagcactacaacatctccccccaggatttggagactgtatttccccatggccttcctcctcgctttgtgatgcaggtgaagacattcagtgaagcttgcctgatggtaaggaaaccagccctagaacttctgcattacctgaaaaacaccagttttgcttatccagctatacgatatcttctgtatggagagaagggaacaggaaaaaccctaagtctttgccatgttattcatttctgtgcaaaacaggactggctgatactacatattccagatgctcatctttgggtgaaaaattgtcgggatcttctgcagtccagctacaacaaacagcgctttgatcaacctttagaggcttcaacctggctgaagaatttcaaaactacaaatgagcgcttcctgaaccagataaaagttcaagagaagtatgtctggaataagagagaaagcactgagaaagggagtcctctgggagaagtggttgaacagggcataacacgggtgaggaacgccacagatgcagttggaattgtgctgaaagagctaaagaggcaaagttctttgggtatgtttcacctcctagtggccgtggatggaatcaatgctctttggggaagaaccactctgaaaagagaagataaaagcccgattgcccccgaggaattagcacttgttcacaacttgaggaaaatgatgaaaaatgattggcatggaggcgccattgtgtcggctttgagccagactgggtctctctttaagccccggaaagcctatctgccccaggagttgctgggaaaggaaggatttgatgccctggatccctttattcccatcctggtttccaactataacccaaaggaatttgaaagttgtattcagtattatttggaaaacaattggcttcaacatgagaaagctcctacagaagaagggaaaaaagagctgctgttcctaagtaacgcgaacccctcgctgctggagcggcactgtgcctacctctaagccaagatcacagcatgtgaggaagacagtggacatctgctttatgctggacccagtaagatgaggaagtcgggcagtacacaggaagaggagccaggcccttgtacctatgggattggacaggactgcagttggctctggacctgcattaaaatgggtttcactgtgaatgcgtgacaataagatattcccttgttcctaaaactttatatcagtttattggatgtggtttttcacatttaagataattatggctcttttcctaaaaaataaaatatctttctaaagtgttgtgttagattaataatatggaaggagtctttagattggccaaattgcatttctctgatattcctcttgttgcaggtcagaagagatcaattctacagaaatttccagtggttctgttgaggctttatggaattcagcatgtcaaaattcacagctggctgggcacagtggctcatgcctgtaatcccagcactttggaagcccaaggcgggcagactgcttgagttcaggagtttgcaaccagcctgggcaacatggtgaaaacctgtctctactaaaaatacaaaaattagccgggcacggtggcatgcgcctgtaatccaagctacttgggaggctgaggcaggagaattgcttcaacttgggaggcggatgttgcagtgagccaaaattgcaccactgcactccagcctgggcagcagagcaagactccgtctcaaaataaataaataaataaataaataaataaataataaa

SEQ ID NO: 78565 - protein, 187 aa, Artificial Sequence
  derived and/or modified sequence
MGASARLLRAVIMGAPGSGKGTVSSRITTHFELKHLSSGDLLRDNMLRGTGFPRTLPQAEALDRAYQIDTVINLNVPFEVIKQRLTARWIHPASGRVYNIEFNPPKTVGIDDLTGEPLIQREDDKPETVIKRLKAYEDQTKPVLEYYQKKGVLETFSGTETNKIWPYVYAFLQTKVPQRSQKASVTP

SEQ ID NO: 78566 - DNA, 564 bp, Artificial Sequence
  derived and/or modified sequence
atgggcgcttctgcccggctcctgcgagctgttatcatgggggctcccgggagcggaaagggcaccgtgtcgtcaaggatcactacccatttcgagttgaaacacttgagtagcggtgatttgctgagagacaatatgctcagaggaaccggctttcccaggaccctccctcaggccgaggctcttgatcgggcctatcagatcgacactgtgattaatttgaatgtgccatttgaagtgatcaaacagcggctgacagctaggtggatccatccggcctctggccgcgtttacaacattgagtttaatcccccgaaaactgtggggatcgatgaccttacgggtgaacccctgattcagcgggaggatgacaagcctgagacagtgatcaaacggctgaaagcttatgaggatcagaccaaaccagtgttggagtactatcagaagaagggggtgcttgagaccttcagcggtacagagacgaacaaaatatggccttacgtttatgcgtttctgcagaccaaagtaccacagagatcccagaaagcctccgtcaccccctag

SEQ ID NO: 78567 - DNA, 1171 bp, Artificial Sequence
  derived and/or modified sequence
acttccgggaacgccggggaaccgcagtagccgcctgctagtggcgctgctagccggccggcgcaggctgccgagcgggtgagcgcgcaggccaggccaaagccctggtacccgcgcggtgcgggcctcagtctgcggccatgggggcgtccgcgcggctgctgcgagcggtgatcatgggggccccgggctcgggcaagggcaccgtgtcgtcgcgcatcactacacacttcgagctgaagcacctctccagcggggacctgctccgggacaacatgctgcggggcacaggttttccaaggacacttccacaggcagaagccctagatagagcttatcagatcgacacagtgattaacctgaatgtgccctttgaggtcattaaacaacgccttactgctcgctggattcatcccgccagtggccgagtctataacattgaattcaaccctcccaaaactgtgggcattgatgacctgactggggagcctctcattcagcgtgaggatgataaaccagagacggttatcaagagactaaaggcttatgaagaccaaacaaagccagtcctggaatattaccagaaaaaaggggtgctggaaacattctccggaacagaaaccaacaagatttggccctatgtatatgctttcctacaaactaaagttccacaaagaagccagaaagcttcagttactccatgaggagaaatgtgtgtaactattaatagtaagatgggcaaacctcctagtccttgcatttagaagctgcttttcctaagacttctagtatgtatgaattctttgaaaattatattacttttatttctactgattttattttggatactaaggatgtgccaaatgattcggatactaagatgcatcgtttgaaatcatctagtgtgttgtatgcagttatcctcaaaaacatcagcgatgtctgaacctttaaaacatctgttagagcaaaattaaaagagcatttggtagtaatctaactttttgttcagttaataagtggttgataaagtttccatatttttctggaaaagttaaaaaaagttacatgtcatttggagaaaatacgtaatcagaaatttgtgcatagattgatgccaaaaaagacatttccagcattgtggaacatggtgagacactatataaaattc

SEQ ID NO: 78568 - DNA, 564 bp, Artificial Sequence
  derived and/or modified sequence
atgggcgccagcgcccggctgctgcgggccgtcatcatgggcgcccctggcagcggcaagggcaccgtgagcagccgcatcaccacccactttgagctgaagcacctgagcagcggggacctgctgcgggacaacatgctgcggggcaccggcttccccaggaccctgccccaggccgaggccctggaccgggcctaccagattgacaccgtcatcaacctgaatgtgccctttgaggtgatcaagcagaggctgacagcccgctggatccacccagccagcggccgggtgtacaacatcgagttcaacccccccaagacagtgggcattgatgacctgaccggggagcccctcatccagcgggaggatgacaagccagagaccgtcatcaagaggctgaaggcctatgaggaccagaccaagcctgtgctggagtactaccagaagaagggcgtgctggagaccttctctggaacagagaccaacaagatctggccctacgtgtatgccttcctgcagaccaaggtgccccagaggagccagaaggcctctgtgaccccctag

SEQ ID NO: 78569 - DNA, 564 bp, Artificial Sequence
  derived and/or modified sequence
atgggcgccagcgcccggctgctgcgggccgtgatcatgggcgcccctggcagtggaaaagggaccgtaagttcaagaatcaccacccacttcgagctcaagcacctttcgtctggtgatttgctgcgcgataacatgctgcgaggcacaggattcccgaggaccctgccccaggccgaggccttggatagggcgtatcagattgacactgtcataaatttgaacgtgccctttgaggttatcaagcagagactcacagctagatggatccaccctgccagcggacgcgtgtataatattgagtttaatccacctaaaaccgtggggatcgacgatctgacgggtgagccgttgattcagcgggaagatgacaagccagagacggtcatcaaacgacttaaagcttacgaagaccaaactaaaccggtactcgagtactaccagaagaagggagtcttggagacattttcaggaactgaaacgaataaaatttggccctacgtttacgcattcctgcagactaaggttcctcagcggtcacagaaggcttctgtcactccctag

SEQ ID NO: 78570 - DNA, 564 bp, Artificial Sequence
  derived and/or modified sequence
atgggggcttcagcaaggctgcttagggctgtgatcatgggggctccaggatctggcaagggcacggttagcagcaggataaccacccacttcgagctgaaacatctgagcagcggagaccttttacgtgataacatgctgcggggtaccggcttccctagaaccctcccgcaggctgaagccctcgacagggcctaccagatcgatacagtaatcaacctaaacgtacctttcgaggtaattaagcagcgcctgacggccaggtggatccatcccgcaagcgggagagtgtacaatatcgagttcaacccccctaaaactgtcggaattgatgacttgacaggggagcccctaattcagcgtgaggatgataaaccagagaccgtgatcaagcggttgaaggcttacgaggaccagaccaagcctgttctggagtactaccagaagaagggcgttctggaaacctttagtggaacagagactaataaaatttggccgtacgtgtatgcttttcttcagaccaaggtcccacagagatcccagaaagcgtcagtgactccttag

SEQ ID NO: 78571 - DNA, 564 bp, Artificial Sequence
  derived and/or modified sequence
atgggcgccagcgccagactgctgagagccgtgatcatgggcgcccccggcagcggcaagggcaccgtgagcagcagaatcaccacccacttcgagctgaagcacctgagcagcggcgacctgctgagagacaacatgctgagaggcaccggcttccccagaaccctgccccaggccgaggccctggacagagcctaccagatcgacaccgtgatcaacctgaacgtgcccttcgaggtgatcaagcagagactgaccgccagatggatccaccccgccagcggcagagtgtacaacatcgagttcaacccccccaagaccgtgggcatcgacgacctgaccggcgagcccctgatccagagagaggacgacaagcccgagaccgtgatcaagagactgaaggcctacgaggaccagaccaagcccgtgctggagtactaccagaagaagggcgtgctggagaccttcagcggcaccgagaccaacaagatctggccctacgtgtacgccttcctgcagaccaaggtgccccagagaagccagaaggccagcgtgaccccctag

SEQ ID NO: 78572 - DNA, 474 bp, Artificial Sequence
  derived and/or modified sequence
atgactaggcttgcactgcacgagcttaaaaatcttacccagtactcttggctgctcgatggctttccccggacccttccacaggcagaagcccttgacagggcataccaaatcgatacagttatcaacctcaacgttcctttcgaggtgattaagcaacgcttaactgctcgttggattcaccccgctagtgggcgagtctacaacatcgagttcaatcccccaaagactgtgggaattgacgacttgacaggcgaacccctgatccagagagaggatgacaagcctgagacagtaattaaacgcctgaaggcttacgaagatcagacgaaacctgtcctggaatattatcagaaaaaaggcgtgctcgaaacctttagtggcacggagaccaacaagatctggccgtacgtttatgcctttctgcagaccaaagtgccacaacgcagccagaaggcctccgtaactccatag

SEQ ID NO: 78573 - DNA, 474 bp, Artificial Sequence
  derived and/or modified sequence
atgacacgactggcactgcacgagctgaaaaaccttacccagtattcttggcttctagacggatttccacggacactgccccaggccgaagcattggacagggcctatcagattgacacagtgatcaacttaaacgtaccatttgaggtgatcaaacagcgacttacagcacgttggattcacccagccagcggcagagtgtacaacatcgaattcaacccaccaaagactgttggcattgacgatttgaccggcgagcccttgattcaacgcgaagacgataagcctgagaccgttatcaaaagactcaaagcatacgaggaccagaccaaacccgtgctcgaatactatcagaagaaaggtgtgcttgagacattttccggcaccgagaccaataaaatttggccctacgtgtatgccttcttacagacgaaagttccccagcgcagccagaaggcctcagttacaccatag

SEQ ID NO: 78574 - DNA, 474 bp, Artificial Sequence
  derived and/or modified sequence
atgacccggctggccctgcacgagctgaagaacctgacccagtacagctggctgctggatggcttccccaggaccctgccccaggccgaggccctggaccgggcctaccagattgacaccgtcatcaacctgaatgtgccctttgaggtgatcaagcagaggctgacagcccgctggatccacccagccagcggccgggtgtacaacatcgagttcaacccccccaagacagtgggcattgatgacctgaccggggagcccctcatccagcgggaggatgacaagccagagaccgtcatcaagaggctgaaggcctatgaggaccagaccaagcctgtgctggagtactaccagaagaagggcgtgctggagaccttctctggaacagagaccaacaagatctggccctacgtgtatgccttcctgcagaccaaggtgccccagaggagccagaaggcctctgtgaccccctag

SEQ ID NO: 78575 - DNA, 474 bp, Artificial Sequence
  derived and/or modified sequence
atgacccggctggccctgcacgagctgaagaacctgacccagtactcttggcttttagacgggttcccccggacacttccacaggccgaggccctcgaccgcgcttaccagatcgacactgtcattaatctcaacgtgccctttgaagtaattaagcagcgtcttaccgctagatggattcatcccgccagtggccgcgtgtacaacattgagtttaatcctcctaagactgtagggattgacgacctgacaggagagcccttgatccagcgggaggatgataagcctgagacagttatcaagcgacttaaggcttatgaagaccaaaccaaaccagtgctggagtactaccagaaaaaaggcgttttagaaaccttcagtggtaccgaaactaacaaaatctggccatatgtctacgctttcctgcaaacaaaagttccccagcggtctcagaaggcctccgtgactccttag

SEQ ID NO: 78576 - DNA, 474 bp, Artificial Sequence
  derived and/or modified sequence
atgacccggctggccctgcacgagctgaagaacctgacccagtacagctggctcctggacggctttccgcgaaccctgccccaagccgaggccttggatagggcctaccagatcgacaccgttatcaatctgaacgtgccgttcgaggtaattaaacagagactgaccgccagatggatacacccagctagcggacgggtgtacaacatcgagtttaacccaccaaagaccgtgggaattgatgatctgaccggcgaaccactgattcagcgggaggatgataagcccgaaacggtcatcaaacgactcaaagcgtacgaagaccagaccaagcctgtgctcgagtattaccaaaagaaaggcgtgttagaaaccttttccggcactgaaacaaataagatttggccatacgtgtatgcatttctgcaaaccaaggtgccccagcgatcacaaaaagcctcggttaccccgtag

SEQ ID NO: 78577 - DNA, 474 bp, Artificial Sequence
  derived and/or modified sequence
atgactaggctcgccctacatgaacttaagaatctcacacagtattcttggctgcttgatggctttcctcgaacgttgccgcaggctgaggccctagatagggcatatcagatagatactgtgatcaacttgaacgtgccttttgaagtaataaagcagcggctgactgcaagatggatacacccagcatccggtcgagtgtacaatattgaatttaacccccctaagactgtgggaatcgatgacctcacaggcgagcctctgatacagagagaggatgataaaccagaaaccgtaatcaagagactgaaggcgtacgaagaccaaacaaagccggtgctcgaatattaccagaaaaaaggcgttttggagaccttctctgggacggaaaccaataagatttggccgtacgtctacgccttcctgcaaacaaaagtgcctcagcgcagccagaaagctagcgtgacaccatag

SEQ ID NO: 78578 - DNA, 474 bp, Artificial Sequence
  derived and/or modified sequence
atgacccggctggcccttcacgaactgaagaacctgacccagtacagttggctgctggatggattccctcggactttacctcaagccgaggctctggacagggcttaccagatagacaccgttattaacctgaacgtcccattcgaagtcattaaacagcgtctgacggcaaggtggatccacccggcttcaggaagggtctataacattgaattcaaccccccaaaaacagtcggcatcgacgatttgactggagagccattaattcaacgtgaggatgacaagccagagaccgtgattaagcgactgaaagcttacgaagaccaaactaagccggtcctcgagtattatcagaaaaaaggtgtgttagagactttcagtggtacagaaaccaataagatctggccgtatgtctatgcttttctccagacgaaagtgccacagcgatcccaaaaagcaagtgtcaccccatag

SEQ ID NO: 78579 - DNA, 474 bp, Artificial Sequence
  derived and/or modified sequence
atgaccagactggccctgcacgagctgaagaacctgacccagtacagctggctgctggacggcttccccagaaccctgccccaggccgaggccctggacagagcctaccagatcgacaccgtgatcaacctgaacgtgcccttcgaggtgatcaagcagagactgaccgccagatggatccaccccgccagcggcagagtgtacaacatcgagttcaacccccccaagaccgtgggcatcgacgacctgaccggcgagcccctgatccagagagaggacgacaagcccgagaccgtgatcaagagactgaaggcctacgaggaccagaccaagcccgtgctggagtactaccagaagaagggcgtgctggagaccttcagcggcaccgagaccaacaagatctggccctacgtgtacgccttcctgcagaccaaggtgccccagagaagccagaaggccagcgtgaccccctag

SEQ ID NO: 78580 - protein, 497 aa, Artificial Sequence
  derived and/or modified sequence
MTVFLSFAFLAAILTHIGCSNQRRSPENSGRRYNRIQHGQCAYTFILPEHDGNCRESTTDQYNTNALQRDAPHVEPDFSSQKLQHLEHVMENYTQWLQKLENYIVENMKSEMAQIQQNAVQNHTATMLEIGTSLLSQTAEQTRKLTDVETQVLNQTSRLEIQLLENSLSTYKLEKQLLQQTNEILKIHEKNSLLEHKILEMEGKHKEELDTLKEEKENLQGLVTRQTYIIQELEKQLNRATTNNSVLQKQQLELMDTVHNLVNLCTKEVLLKGGKREEEKPFRDCADVYQAGFNKSGIYTIYINNMPEPKKVFCNMDVNGGGWTVIQHREDGSLDFQRGWKEYKMGFGNPSGEYWLGNEFIFAITSQRQYMLRIELMDWEGNRAYSQYDRFHIGNEKQNYRLYLKGHTGTAGKQSSLILHGADFSTKDADNDNCMCKCALMLTGGWWFDACGPSNLNGMFYTAGQNHGKLNGIKWHYFKGPSYSLRSTTMMIRPLDF

SEQ ID NO: 78581 - protein, 297 aa, Artificial Sequence
  derived and/or modified sequence
MEGKHKEELDTLKEEKENLQGLVTRQTYIIQELEKQLNRATTNNSVLQKQQLELMDTVHNLVNLCTKEVLLKGGKREEEKPFRDCADVYQAGFNKSGIYTIYINNMPEPKKVFCNMDVNGGGWTVIQHREDGSLDFQRGWKEYKMGFGNPSGEYWLGNEFIFAITSQRQYMLRIELMDWEGNRAYSQYDRFHIGNEKQNYRLYLKGHTGTAGKQSSLILHGADFSTKDADNDNCMCKCALMLTGGWWFDACGPSNLNGMFYTAGQNHGKLNGIKWHYFKGPSYSLRSTTMMIRPLDF

SEQ ID NO: 78582 - protein, 14 aa, Artificial Sequence
  derived and/or modified sequence
ESTTDQYNTNALQR

SEQ ID NO: 78583 - DNA, 4335 bp, Artificial Sequence
  derived and/or modified sequence
ggggcacactcatgcattcctgtcaagtcatcttgtgaaaggctgcctgcttccagcttggcttggatgtgcaaccttaataaaactcactgaggtctgggagaaaatagcagatctgcagcagatagggtagaggaaagggtctagaatatgtacacgcagctgactcaggcaggctccatgctgaacggtcacacagagaggaaacaataaatctcagctactatgcaataaatatctcaagttttaacgaagaaaaacatcattgcagtgaaataaaaaattttaaaattttagaacaaagctaacaaatggctagttttctatgattcttcttcaaacgctttctttgagggggaaagagtcaaacaaacaagcagttttacctgaaataaagaactagttttagaggtcagaagaaaggagcaagttttgcgagaggcacggaaggagtgtgctggcagtacaatgacagttttcctttcctttgctttcctcgctgccattctgactcacatagggtgcagcaatcagcgccgaagtccagaaaacagtgggagaagatataaccggattcaacatgggcaatgtgcctacactttcattcttccagaacacgatggcaactgtcgtgagagtacgacagaccagtacaacacaaacgctctgcagagagatgctccacacgtggaaccggatttctcttcccagaaacttcaacatctggaacatgtgatggaaaattatactcagtggctgcaaaaacttgagaattacattgtggaaaacatgaagtcggagatggcccagatacagcagaatgcagttcagaaccacacggctaccatgctggagataggaaccagcctcctctctcagactgcagagcagaccagaaagctgacagatgttgagacccaggtactaaatcaaacttctcgacttgagatacagctgctggagaattcattatccacctacaagctagagaagcaacttcttcaacagacaaatgaaatcttgaagatccatgaaaaaaacagtttattagaacataaaatcttagaaatggaaggaaaacacaaggaagagttggacaccttaaaggaagagaaagagaaccttcaaggcttggttactcgtcaaacatatataatccaggagctggaaaagcaattaaacagagctaccaccaacaacagtgtccttcagaagcagcaactggagctgatggacacagtccacaaccttgtcaatctttgcactaaagaagttttactaaagggaggaaaaagagaggaagagaaaccatttagagactgtgcagatgtatatcaagctggttttaataaaagtggaatctacactatttatattaataatatgccagaacccaaaaaggtgttttgcaatatggatgtcaatgggggaggttggactgtaatacaacatcgtgaagatggaagtctagatttccaaagaggctggaaggaatataaaatgggttttggaaatccctccggtgaatattggctggggaatgagtttatttttgccattaccagtcagaggcagtacatgctaagaattgagttaatggactgggaagggaaccgagcctattcacagtatgacagattccacataggaaatgaaaagcaaaactataggttgtatttaaaaggtcacactgggacagcaggaaaacagagcagcctgatcttacacggtgctgatttcagcactaaagatgctgataatgacaactgtatgtgcaaatgtgccctcatgttaacaggaggatggtggtttgatgcttgtggcccctccaatctaaatggaatgttctatactgcgggacaaaaccatggaaaactgaatgggataaagtggcactacttcaaagggcccagttactccttacgttccacaactatgatgattcgacctttagatttttgaaagcgcaatgtcagaagcgattatgaaagcaacaaagaaatccggagaagctgccaggtgagaaactgtttgaaaacttcagaagcaaacaatattgtctcccttccagcaataagtggtagttatgtgaagtcaccaaggttcttgaccgtgaatctggagccgtttgagttcacaagagtctctacttggggtgacagtgctcacgtggctcgactatagaaaactccactgactgtcgggctttaaaaagggaagaaactgctgagcttgctgtgcttcaaactactactggaccttattttggaactatggtagccagatgataaatatggttaatttcatgtaaaacagaaaaaaagagtgaaaaagagaatatacatgaagaatagaaacaagcctgccataatcctttggaaaagatgtattataccagtgaaaaggtgttatatctatgcaaacctactaacaaattatactgttgcacaattttgataaaaatttagaacagcattgtcctctgagttggttaaatgttaatggatttcagaagcctaattccagtatcatacttactagttgatttctgcttacccatcttcaaatgaaaattccatttttgtaagccataatgaactgtagtacatggacaataagtgtgtggtagaaacaaactccattactctgatttttgatacagttttcagaaaaagaaatgaacataatcaagtaaggatgtatgtggtgaaaacttaccacccccatactatggttttcatttactctaaaaactgattgaatgatatataaatatatttatagcctgagtaaagttaaaagaatgtaaaatatatcatcaagttcttaaaataatatacatgcatttaatatttcctttgatattatacaggaaagcaatattttggagtatgttaagttgaagtaaaagcaagtactctggagcagttcattttacagtatctacttgcatgtgtatacatacatgtaacttcattattttaaaaatatttttagaactccaatactcaccctgttatgtcttgctaatttaaattttgctaattaactgaaacatgcttaccagattcacactgttccagtgtctataaaagaaacactttgaagtctataaaaaataaaataattataaatatcattgtacatagcatgtttatatctgcaaaaaacctaatagctaattaatctggaatatgcaacattgtccttaattgatgcaaataacacaaatgctcaaagaaatctactatatcccttaatgaaatacatcattcttcatatatttctccttcagtccattcccttaggcaatttttaatttttaaaaattattatcaggggagaaaaattggcaaaactattatatgtaagggaaatatatacaaaaagaaaattaatcatagtcacctgactaagaaattctgactgctagttgccataaataactcaatggaaatattcctatgggataatgtattttaagtgaatttttggggtgcttgaagttactgcattattttatcaagaagtcttctctgcctgtaagtgtccaaggttatgacagtaaacagtttttattaaaacatgagtcactatgggatgagaaaattgaaataaagctactgggcctcctctcataaaagagacagttgttggcaaggtagcaataccagtttcaaacttggtgacttgatccactatgccttaatggtttcctccatttgagaaaataaagctattcacattgttaagaaaaatactttttaaagtttaccatcaagtcttttttatatttatgtgtctgtattctacccctttttgccttacaagtgatatttgcaggtattataccatttttctattcttggtggcttcttcatagcaggtaagcctctccttctaaaaacttctcaactgttttcatttaagggaaagaaaatgagtattttgtccttttgtgttcctacagacactttcttaaaccagtttttggataaagaatactatttccaaactcatattacaaaaacaaaataaaataataaaaaaagaaagcatgatatttactgttttgttgtctgggtttgagaaatgaaatattgtttccaattatttataataaatcagtataaaatgttttatgattgttatgtgtattatgtaatacgtacatgtttatggcaatttaacatgtgtattcttttaattgtttcagaataggataattaggtattcgaattttgtctttaaaattcatgtggtttctatgcaaagttcttcatatcatcacaacattatttgatttaaataaaattgaaagtaatatttgtgcaa

SEQ ID NO: 78584 - DNA, 1494 bp, Artificial Sequence
  derived and/or modified sequence
atgaccgtgtttctttcattcgcattcctggcagccatactcacccatatcggatgtagcaaccagaggcggagccccgagaactccggaaggcgctataataggattcagcatggtcagtgtgcgtatacattcatcctgccggaacacgatggcaactgtcgtgaatcgacaacagaccagtacaacacaaatgcactgcaaagagacgcgccacacgtggagccagatttcagctcccaaaagctgcaacacctcgagcacgtgatggagaactacacccaatggctacagaaattagaaaattatatcgtggagaatatgaaaagcgagatggcacagattcagcagaatgccgttcagaaccatacggcgactatgttggagatcggcacatccttgctctcacagacagccgaacagacaaggaagctcacagacgttgagacacaagtgctaaatcagacttcacgtctggagatacagctcctggagaacagtctatctacttacaaacttgaaaaacagctgctacagcagacaaatgaaatcctgaagattcacgagaagaattcgctgttggagcataagattctcgagatggaaggaaagcataaagaggagcttgacactctgaaagaagaaaaagagaatctccagggactcgtcacacgtcaaacctacataattcaagaactggaaaaacaactcaaccgggccaccaccaacaacagcgtactccagaaacagcagctggaacttatggacacagtccacaacctggttaacctgtgtaccaaggaggtcctgctaaaaggcggcaagagggaagaggagaagccttttagggactgtgccgatgtgtaccaggcaggcttcaacaagtcaggcatctacacaatctacataaataacatgcccgaacccaaaaaggtgttttgcaacatggatgtgaatgggggaggctggactgtaattcagcatcgggaagatggtagtctggattttcaaaggggttggaaggaatacaagatggggtttggcaacccgtctggtgagtactggctaggaaatgagttcattttcgctatcacaagccagcggcagtacatgctgcgcatagaactgatggactgggaggggaacagggcctactcccaatacgaccggtttcatatcgggaacgaaaaacaaaactatcgcctctatctgaaagggcatacaggaactgcgggcaaacagtctagcctgatactacatggagccgacttttctacaaaggatgccgataatgataattgcatgtgcaagtgcgccctgatgttgacgggcggatggtggtttgacgcttgtggcccttctaaccttaatggcatgttctacaccgcggggcagaatcacggtaaactcaacggaatcaaatggcattatttcaagggaccctcgtattccctgaggtctactacaatgatgatcagacctctagacttttag

SEQ ID NO: 78585 - DNA, 1494 bp, Artificial Sequence
  derived and/or modified sequence
atgaccgtcttcctgagctttgccttcctggccgccatcctgacccacatcggctgcagcaaccagaggaggagcccagaaaattctggaagacgctacaaccgcatccagcacggccagtgtgcctacaccttcatcctgcctgagcatgatggcaactgccgggagagcaccacagaccagtacaacaccaatgccctgcagagagatgcccctcatgtggagccagacttcagcagccagaagctgcagcacctggagcacgtgatggagaactacacccagtggctgcagaagctggagaactacatcgtggagaacatgaagtctgagatggcccagatccagcagaatgctgtgcagaaccacacagccaccatgctggagatcggcaccagcctgctgagccagacagctgagcagaccaggaagctgacagatgtggagacccaggtgctgaaccagaccagccggctggagatccagctgctggagaacagcctgagcacctacaagctggagaagcagctgctgcagcagaccaatgagatcctgaagatccacgagaagaacagcctgctggagcacaagatcctggagatggagggcaagcacaaggaggagctggacaccctgaaggaggagaaggagaacctgcagggcctggtgacccggcagacctacatcatccaggagctggagaagcagctgaacagagccaccaccaacaacagcgtgctgcagaagcagcagctggagctgatggacacagtgcacaacctggtgaacctgtgcaccaaggaggtgctgctgaagggcggcaagcgggaggaggagaagcccttccgggactgtgctgatgtgtaccaggccggcttcaacaagagcggcatctacaccatctacatcaacaacatgcctgagcccaagaaggtgttctgcaacatggatgtgaatggaggcggctggacagtcatccagcaccgggaggatggcagcctggacttccagaggggctggaaggagtacaagatgggctttggaaaccccagcggggagtactggctgggcaatgagttcatctttgccatcaccagccagaggcagtacatgctgcgcatcgagctgatggactgggagggcaacagagcctacagccagtatgaccgcttccacatcggaaatgagaagcagaactaccgcctgtacctgaagggccacactggaacagctgggaagcagagcagcctcatcctgcacggggctgacttcagcaccaaggatgctgacaatgacaactgcatgtgcaagtgtgccctgatgctgactggaggctggtggtttgatgcctgtggccccagcaacctgaatggcatgttctacacagctggccagaaccacggcaagctgaatggcatcaagtggcactacttcaagggccccagctacagcctgcggagcaccaccatgatgatccggcccctggacttctag

SEQ ID NO: 78586 - DNA, 1494 bp, Artificial Sequence
  derived and/or modified sequence
atgaccgtgttcctgagcttcgccttcctggccgccatcctgacccatatcggttgttccaaccagaggcgcagccctgagaattcggggaggcggtacaatagaatccagcacggccagtgtgcttatacctttattttgcccgagcacgacggtaattgcagggaaagcactacagaccagtataacaccaatgcactccagcgggacgctccccacgtcgaacccgactttagttcccagaagctgcaacacctggaacacgttatggaaaattacactcagtggctgcagaagctggaaaattacatagtcgagaacatgaagtctgagatggctcagatccagcagaacgcagtgcagaaccacaccgctacgatgctcgagatagggacaagtttgttgtctcagactgcagagcaaacaaggaaactaaccgatgtggagacccaggtgctaaatcagaccagcaggcttgagatccagcttttagagaacagtctgtcaacttacaagttggagaaacagctcctgcagcagaccaacgagatcctgaagatccacgagaaaaactctctgctagagcacaagattcttgagatggagggcaagcacaaagaggaattagacaccctgaaagaagagaaagagaatcttcagggcctggtaactagacagacttatatcatccaagagcttgaaaagcagctgaatcgagctacaacaaacaattcagttctgcaaaaacaacagctcgaactcatggatacagtccacaatttagtgaatctttgcacaaaggaggtgctcttaaagggcgggaagcgcgaggaagagaagcctttcagagattgtgctgatgtgtatcaggccggatttaataagtcaggtatctacaccatatacattaacaatatgccggagccaaaaaaggtgttctgcaacatggacgtcaacggaggcgggtggacggttatccagcaccgtgaagatgggagcctggacttccagagaggatggaaggagtataagatgggtttcggtaatccatcaggagaatactggttggggaatgaattcatcttcgctatcacgagtcagaggcagtacatgctccgcatcgagctgatggactgggaaggaaatagggcctattcccagtacgatcgttttcatatcgggaatgagaaacagaactataggctgtacttaaaaggccacaccggcacggctggcaagcagtccagtcttatcctacacggggcggatttctcaactaaggatgccgacaacgacaattgcatgtgcaagtgtgctctgatgctcactggagggtggtggttcgatgcttgcggaccatccaatctgaacggcatgttctataccgctggccaaaaccatggcaaactgaacgggattaagtggcattacttcaagggtccctcctacagcctgcgttcgaccaccatgatgattcgtcccctcgacttttag

SEQ ID NO: 78587 - DNA, 1494 bp, Artificial Sequence
  derived and/or modified sequence
atgacagtgttcttatcctttgcatttctggctgctatcttgacacatataggctgctcgaatcagaggcggtcgccagaaaacagcgggaggcgctacaatagaatccaacacggccagtgtgcctacacgtttatcctgccagagcatgacggcaactgtcgggagtccacgacagatcagtacaacacaaatgcgcttcagagggatgccccacacgttgagcccgattttagttcgcaaaagttgcagcacctggaacacgtgatggaaaattatacacagtggctccaaaagctcgaaaactacatcgttgaaaacatgaagtccgagatggctcagattcagcagaatgctgtgcagaaccacactgctaccatgcttgaaattggcacatcacttctgtcacagaccgctgagcagaccagaaaactcacagatgtggagacccaggtgctgaaccagacctcgcgattagaaattcagctcctggagaactcattgtccacttataagttggagaaacagcttctgcagcaaaccaacgagattctgaagattcatgagaagaattccttactggagcacaagatccttgaaatggagggaaaacataaggaggaactcgatacacttaaggaagaaaaggaaaacctgcagggactggtgaccaggcagacttatatcatccaagaactagaaaaacagttaaatcgggcaactaccaacaacagtgtgctgcagaaacagcagcttgagttgatggacaccgtgcataatttagtgaatttgtgcacaaaggaagtcctcctcaagggaggcaaacgagaagaagagaagccctttagggactgcgccgacgtctaccaggcgggattcaacaagtctggcatctacactatttatatcaataacatgcccgaacctaaaaaggtcttctgcaatatggatgtgaacggcggagggtggacagtgattcagcatagagaggacggctccctggatttccaacgtggctggaaggaatacaagatgggctttggcaaccccagcggcgagtactggctggggaacgagttcattttcgcaattacctcccagaggcagtatatgctgcggatcgagctgatggactgggaaggtaatagagcctacagccaatacgataggttccatatcgggaatgaaaagcaaaattacagattatacctcaaggggcacaccggcaccgctggcaagcaaagctctctgattctccacggagctgacttttccacgaaagacgccgataatgacaactgtatgtgtaaatgcgccttgatgttaacagggggatggtggttcgacgcgtgcggccctagcaacctgaatggaatgttttatacagctggccagaaccacggcaaattgaatggcatcaaatggcattacttcaagggtccaagttatagtctgcgatccactactatgatgattcgccctctggatttttag

SEQ ID NO: 78588 - DNA, 4353 bp, Artificial Sequence
  derived and/or modified sequence
gccctaagccatcagcaatccttagtataggggcacactcatgcattcctgtcaagtcatcttgtgaaaggctgcctgcttccagcttggcttggatgtgcaaccttaataaaactcactgaggtctgggagaaaatagcagatctgcagcagatagggtagaggaaagggtctagaatatgtacacgcagctgactcaggcaggctccatgctgaacggtcacacagagaggaaacaataaatctcagctactatgcaataaatatctcaagttttaacgaagaaaaacatcattgcagtgaaataaaaaattttaaaattttagaacaaagctaacaaatggctagttttctatgattcttcttcaaacgctttctttgagggggaaagagtcaaacaaacaagcagttttacctgaaataaagaactagttttagaggtcagaagaaaggagcaagttttgcgagaggcacggaaggagtgtgctggcagtacaatgacagttttcctttcctttgctttcctcgctgccattctgactcacatagggtgcagcaatcagcgccgaagtccagaaaacagtgggagaagatataaccggattcaacatgggcaatgtgcctacactttcattcttccagaacacgatggcaactgtcgtgagagtacgacagaccagtacaacacaaacgctctgcagagagatgctccacacgtggaaccggatttctcttcccagaaacttcaacatctggaacatgtgatggaaaattatactcagtggctgcaaaaacttgagaattacattgtggaaaacatgaagtcggagatggcccagatacagcagaatgcagttcagaaccacacggctaccatgctggagataggaaccagcctcctctctcagactgcagagcagaccagaaagctgacagatgttgagacccaggtactaaatcaaacttctcgacttgagatacagctgctggagaattcattatccacctacaagctagagaagcaacttcttcaacagacaaatgaaatcttgaagatccatgaaaaaaacagtttattagaacataaaatcttagaaatggaaggaaaacacaaggaagagttggacaccttaaaggaagagaaagagaaccttcaaggcttggttactcgtcaaacatatataatccaggagctggaaaagcaattaaacagagctaccaccaacaacagtgtccttcagaagcagcaactggagctgatggacacagtccacaaccttgtcaatctttgcactaaagaagttttactaaagggaggaaaaagagaggaagagaaaccatttagagactgtgcagatgtatatcaagctggttttaataaaagtggaatctacactatttatattaataatatgccagaacccaaaaaggtgttttgcaatatggatgtcaatgggggaggttggactgtaatacaacatcgtgaagatggaagtctagatttccaaagaggctggaaggaatataaaatgggttttggaaatccctccggtgaatattggctggggaatgagtttatttttgccattaccagtcagaggcagtacatgctaagaattgagttaatggactgggaagggaaccgagcctattcacagtatgacagattccacataggaaatgaaaagcaaaactataggttgtatttaaaaggtcacactgggacagcaggaaaacagagcagcctgatcttacacggtgctgatttcagcactaaagatgctgataatgacaactgtatgtgcaaatgtgccctcatgttaacaggaggatggtggtttgatgcttgtggcccctccaatctaaatggaatgttctatactgcgggacaaaaccatggaaaactgaatgggataaagtggcactacttcaaagggcccagttactccttacgttccacaactatgatgattcgacctttagatttttgaaagcgcaatgtcagaagcgattatgaaagcaacaaagaaatccggagaagctgccaggtgagaaactgtttgaaaacttcagaagcaaacaatattgtctcccttccagcaataagtggtagttatgtgaagtcaccaaggttcttgaccgtgaatctggagccgtttgagttcacaagagtctctacttggggtgacagtgctcacgtggctcgactatagaaaactccactgactgtcgggctttaaaaagggaagaaactgctgagcttgctgtgcttcaaactactactggaccttattttggaactatggtagccagatgataaatatggttaatttcatgtaaaacagaaaaaaagagtgaaaaagagaatatacatgaagaatagaaacaagcctgccataatcctttggaaaagatgtattataccagtgaaaaggtgttatatctatgcaaacctactaacaaattatactgttgcacaattttgataaaaatttagaacagcattgtcctctgagttggttaaatgttaatggatttcagaagcctaattccagtatcatacttactagttgatttctgcttacccatcttcaaatgaaaattccatttttgtaagccataatgaactgtagtacatggacaataagtgtgtggtagaaacaaactccattactctgatttttgatacagttttcagaaaaagaaatgaacataatcaagtaaggatgtatgtggtgaaaacttaccacccccatactatggttttcatttactctaaaaactgattgaatgatatataaatatatttatagcctgagtaaagttaaaagaatgtaaaatatatcatcaagttcttaaaataatatacatgcatttaatatttcctttgatattatacaggaaagcaatattttggagtatgttaagttgaagtaaaagcaagtactctggagcagttcattttacagtatctacttgcatgtgtatacatacatgtaacttcattattttaaaaatatttttagaactccaatactcaccctgttatgtcttgctaatttaaattttgctaattaactgaaacatgcttaccagattcacactgttccagtgtctataaaagaaacactttgaagtctataaaaaataaaataattataaatatcattgtacatagcatgtttatatctgcaaaaaacctaatagctaattaatctggaatatgcaacattgtccttaattgatgcaaataacacaaatgctcaaagaaatctactatatcccttaatgaaatacatcattcttcatatatttctccttcagtccattcccttaggcaatttttaatttttaaaaattattatcaggggagaaaaattggcaaaactattatatgtaagggaaatatatacaaaaagaaaattaatcatagtcacctgactaagaaattctgactgctagttgccataaataactcaatggaaatattcctatgggataatgtattttaagtgaatttttggggtgcttgaagttactgcattattttatcaagaagtcttctctgcctgtaagtgtccaaggttatgacagtaaacagtttttattaaaacatgagtcactatgggatgagaaaattgaaataaagctactgggcctcctctcataaaagagacagttgttggcaaggtagcaataccagtttcaaacttggtgacttgatccactatgccttaatggtttcctccatttgagaaaataaagctattcacattgttaagaaaaatactttttaaagtttaccatcaagtcttttttatatttatgtgtctgtattctacccctttttgccttacaagtgatatttgcaggtattataccatttttctattcttggtggcttcttcatagcaggtaagcctctccttctaaaaacttctcaactgttttcatttaagggaaagaaaatgagtattttgtccttttgtgttcctacagacactttcttaaaccagtttttggataaagaatactatttccaaactcatattacaaaaacaaaataaaataataaaaaaagaaagcatgatatttactgttttgttgtctgggtttgagaaatgaaatattgtttccaattatttataataaatcagtataaaatgttttatgattgttatgtgtattatgtaatacgtacatgtttatggcaatttaacatgtgtattcttttaattgtttcagaataggataattaggtattcgaattttgtctttaaaattcatgtggtttctatgcaaagttcttcatatcatcacaacattatttgatttaaataaaattgaaagtaa

SEQ ID NO: 78589 - DNA, 1523 bp, Artificial Sequence
  derived and/or modified sequence
cggctaagtttttgtatttttagtagagacggggtttcaccatgtttgccaggatggtctcgatctcttgacctcgtgatccacccgccttggcctcccaaagtgctgggattacaggcgtgagccactgcgcccggcggtactaaatcaaacttctcgacttgagatacagctgctggagaattcattatccacctacaagctagagaagcaacttcttcaacagacaaatgaaatcttgaagatccatgaaaaaaacagtttattagaacataaaatcttagaaatggaaggaaaacacaaggaagagttggacaccttaaaggaagagaaagagaaccttcaaggcttggttactcgtcaaacatatataatccaggagctggaaaagcaattaaacagagctaccaccaacaacagtgtccttcagaagcagcaactggagctgatggacacagtccacaaccttgtcaatctttgcactaaagaagttttactaaagggaggaaaaagagaggaagagaaaccatttagagactgtgcagatgtatatcaagctggttttaataaaagtggaatctacactatttatattaataatatgccagaacccaaaaaggtgttttgcaatatggatgtcaatgggggaggttggactgtaatacaacatcgtgaagatggaagtctagatttccaaagaggctggaaggaatataaaatgggttttggaaatccctccggtgaatattggctggggaatgagtttatttttgccattaccagtcagaggcagtacatgctaagaattgagttaatggactgggaagggaaccgagcctattcacagtatgacagattccacataggaaatgaaaagcaaaactataggttgtatttaaaaggtcacactgggacagcaggaaaacagagcagcctgatcttacacggtgctgatttcagcactaaagatgctgataatgacaactgtatgtgcaaatgtgccctcatgttaacaggaggatggtggtttgatgcttgtggcccctccaatctaaatggaatgttctatactgcgggacaaaaccatggaaaactgaatgggataaagtggcactacttcaaagggcccagttactccttacgttccacaactatgatgattcgacctttagatttttgaaagcgcaatgtcagaagcgattatgaaagcaacaaagaaatccggagaagctgccaggtgagaaactgtttgaaaacttcagaagcaaacaatattgtctcccttccagcaataagtggtagttatgtgaagtcaccaaggttcttgaccgtgaatctggagccgtttgagttcacaagagtctctacttggggtgacagtgctcacgtggctcgactatagaaaactccactgactgtcgggctttaaaaagggaagaaactgctgagcttgctgtgcttcaaactactactggaccttattttggaactatggtagccagatgataaatatggttaatttc

SEQ ID NO: 78590 - DNA, 1494 bp, Artificial Sequence
  derived and/or modified sequence
atgacagtctttctgagtttcgcctttctggctgccatcctcacacacatcggctgtagcaaccagagacggagtccggagaactctggcaggaggtacaatcgcattcagcacggtcaatgtgcttacacctttattctccccgaacacgatggcaattgtagggaatcaaccacagaccagtacaacacgaatgccttacagcgggatgcccctcatgtggagccagatttctcctcccagaagctgcagcaccttgaacatgtgatggaaaactatacacaatggttgcaaaagctggaaaattacattgtggagaatatgaaatcagaaatggcccagatccagcaaaatgccgtccagaaccacacagccacaatgctggaaattggaacttccctcttgtcacagaccgctgagcagaccagaaaactaactgacgttgaaactcaggtgctgaatcagaccagcagacttgagatccaactgctcgaaaatagcttgagtacctacaaattggaaaaacagctccttcaacagaccaatgaaatccttaagatacatgagaagaactcgctgctcgagcacaaaatcctcgagatggagggcaagcacaaagaagagttggatactttaaaagaagaaaaagagaacctgcaagggttggttacacgtcagacatacattattcaggaattggaaaaacagctaaatagggccaccacaaacaactcagtcctgcagaagcaacaactggagttaatggacactgttcataacctggtaaatctgtgcacaaaagaggtcttactgaagggaggcaaaagagaagaggagaagccttttagagactgcgctgatgtctatcaagcgggatttaacaaaagcggaatatacactatctacatcaacaacatgcccgagcctaagaaggtgttctgcaatatggacgtaaacggggggggttggacagtgattcaacacagggaggacgggtcactcgactttcagcgaggatggaaggagtacaaaatgggttttggaaatcctagcggcgaatattggctaggaaatgaatttatttttgctatcactagccaacgacagtacatgttacggatagagctgatggactgggaagggaaccgggcatactcacagtatgataggtttcatattgggaacgagaaacagaattataggctgtacctcaaaggacacacaggcacggctggaaaacaatcatctttaattctgcacggagccgatttcagcaccaaggacgccgataatgacaactgcatgtgcaaatgcgccttaatgctcactgggggctggtggttcgacgcctgcggcccatcaaatttaaacggaatgttttacacagcgggacagaaccatggcaagctgaatgggattaaatggcattatttcaagggcccttcctactccctgcgctcaactactatgatgattcggccactggacttttag

SEQ ID NO: 78591 - DNA, 1494 bp, Artificial Sequence
  derived and/or modified sequence
atgaccgtatttctctcttttgcatttttagcagccatactaacccatatcggttgtagcaatcaaagacgcagtcctgaaaattctggccgccgatataacagaattcagcacggacagtgtgcctacacctttatactgccagagcacgacggtaactgccgggagtctactacagatcagtataacaccaacgccctccagagggacgcgccccacgtggaacctgacttctcatctcagaaacttcagcatctcgaacacgtgatggagaattacacgcagtggctccagaaactggagaactatatagtcgagaatatgaagagcgaaatggcccaaatccaacaaaatgccgtgcaaaaccacacagccacgatgcttgagatcggtacttccctgcttagtcagactgcagagcaaacacgcaagctcactgatgtggaaacccaagtcctgaatcaaaccagcagacttgagattcaactccttgagaattcacttagtacttacaagcttgagaagcaattgctgcaacagaccaacgagattctaaagattcacgaaaagaattctctcctggaacataaaatattggagatggagggcaagcacaaagaagagttggatactttaaaagaagaaaaagagaacctgcaagggttggttacacgtcagacatacattattcaggaattggaaaaacagctaaatagggccaccacaaacaactcagtcctgcagaagcaacaactggagttaatggacactgttcataacctggtaaatctgtgcacaaaagaggtcttactgaagggaggcaaaagagaagaggagaagccttttagagactgcgctgatgtctatcaagcgggatttaacaaaagcggaatatacactatctatatcaataatatgcctgaacccaagaaagttttctgcaacatggatgtcaacgggggcgggtggacagtgatacaacatagggaagatggaagtctcgatttccagcggggatggaaagagtataaaatgggtttcggcaatcccagtggcgagtactggcttggcaatgaatttatcttcgcgatcacaagtcagaggcagtatatgctccggattgagctgatggattgggaaggcaacagagcgtactctcagtatgacaggtttcatatcggtaacgaaaagcagaattataggctgtacctcaaaggacacacaggcacggctggaaaacaatcatctttaattctgcacggagccgatttcagcaccaaggacgccgataatgacaactgcatgtgcaaatgcgccttaatgctcactgggggctggtggttcgacgcctgcggcccatcaaatttaaacggaatgttttacacagcgggacagaaccatggcaagctgaatgggattaaatggcattatttcaagggcccttcctactccctgcgctcaactactatgatgattcggccactggacttttag

SEQ ID NO: 78592 - DNA, 1491 bp, Artificial Sequence
  derived and/or modified sequence
atgaccgtgttcctgagcttcgccttcctggccgccatcctgacccacatcggctgcagcaaccagcgccgcagccccgagaacagcggccgccgctacaaccgcatccagcacggccagtgcgcctacaccttcatcctgcccgagcacgacggcaactgccgcgagagcaccaccgaccagtacaacaccaacgccctgcagcgcgacgccccccacgtggagcccgacttcagcagccagaagctgcagcacctggagcacgtgatggagaactacacccagtggctgcagaagctggagaactacatcgtggagaacatgaagagcgagatggcccagatccagcagaacgccgtgcagaaccacaccgccaccatgctggagatcggcaccagcctgctgagccagaccgccgagcagacccgcaagctgaccgacgtggagacccaggtgctgaaccagaccagccgcctggagatccagctgctggagaacagcctgagcacctacaagctggagaagcagctgctgcagcagaccaacgagatcctgaagatccacgagaagaacagcctgctggagcacaagatcctggagatggagggcaagcacaaggaggagctggacaccctgaaggaggagaaggagaacctgcagggcctggtgacccgccagacctacatcatccaggagctggagaagcagctgaaccgcgccaccaccaacaacagcgtgctgcagaagcagcagctggagctgatggacaccgtgcacaacctggtgaacctgtgcaccaaggaggtgctgctgaagggcggcaagcgcgaggaggagaagcccttccgcgactgcgccgacgtgtaccaggccggcttcaacaagagcggcatctacaccatctacatcaacaacatgcccgagcccaagaaggtgttctgcaacatggacgtgaacggcggcggctggaccgtgatccagcaccgcgaggacggcagcctggacttccagcgcggctggaaggagtacaagatgggcttcggcaaccccagcggcgagtactggctgggcaacgagttcatcttcgccatcaccagccagcgccagtacatgctgcgcatcgagctgatggactgggagggcaaccgcgcctacagccagtacgaccgcttccacatcggcaacgagaagcagaactaccgcctgtacctgaagggccacaccggcaccgccggcaagcagagcagcctgatcctgcacggcgccgacttcagcaccaaggacgccgacaacgacaactgcatgtgcaagtgcgccctgatgctgaccggcggctggtggttcgacgcctgcggccccagcaacctgaacggcatgttctacaccgccggccagaaccacggcaagctgaacggcatcaagtggcactacttcaagggccccagctacagcctgcgcagcaccaccatgatgatccgccccctggacttc

SEQ ID NO: 78593 - DNA, 1494 bp, Artificial Sequence
  derived and/or modified sequence
atgaccgtgttcctgagcttcgccttcctggccgccatcctgacccacatcggctgcagcaaccagagaagaagccccgagaacagcggcagaagatacaacagaatccagcacggccagtgcgcctacaccttcatcctgcccgagcacgacggcaactgcagagagagcaccaccgaccagtacaacaccaacgccctgcagagagacgccccccacgtggagcccgacttcagcagccagaagctgcagcacctggagcacgtgatggagaactacacccagtggctgcagaagctggagaactacatcgtggagaacatgaagagcgagatggcccagatccagcagaacgccgtgcagaaccacaccgccaccatgctggagatcggcaccagcctgctgagccagaccgccgagcagaccagaaagctgaccgacgtggagacccaggtgctgaaccagaccagcagactggagatccagctgctggagaacagcctgagcacctacaagctggagaagcagctgctgcagcagaccaacgagatcctgaagatccacgagaagaacagcctgctggagcacaagatcctggagatggagggcaagcacaaggaggagctggacaccctgaaggaggagaaggagaacctgcagggcctggtgaccagacagacctacatcatccaggagctggagaagcagctgaacagagccaccaccaacaacagcgtgctgcagaagcagcagctggagctgatggacaccgtgcacaacctggtgaacctgtgcaccaaggaggtgctgctgaagggcggcaagagagaggaggagaagcccttcagagactgcgccgacgtgtaccaggccggcttcaacaagagcggcatctacaccatctacatcaacaacatgcccgagcccaagaaggtgttctgcaacatggacgtgaacggcggcggctggaccgtgatccagcacagagaggacggcagcctggacttccagagaggctggaaggagtacaagatgggcttcggcaaccccagcggcgagtactggctgggcaacgagttcatcttcgccatcaccagccagagacagtacatgctgagaatcgagctgatggactgggagggcaacagagcctacagccagtacgacagattccacatcggcaacgagaagcagaactacagactgtacctgaagggccacaccggcaccgccggcaagcagagcagcctgatcctgcacggcgccgacttcagcaccaaggacgccgacaacgacaactgcatgtgcaagtgcgccctgatgctgaccggcggctggtggttcgacgcctgcggccccagcaacctgaacggcatgttctacaccgccggccagaaccacggcaagctgaacggcatcaagtggcactacttcaagggccccagctacagcctgagaagcaccaccatgatgatcagacccctggacttctag

SEQ ID NO: 78594 - RNA, 1494 nt, Artificial Sequence
  derived and/or modified sequence
augacagucuuucugaguuucgccuuucuggcugccauccucacacacaucggcuguagcaaccagagacggaguccggagaacucuggcaggagguacaaucgcauucagcacggucaaugugcuuacaccuuuauucuccccgaacacgauggcaauuguagggaaucaaccacagaccaguacaacacgaaugccuuacagcgggaugccccucauguggagccagauuucuccucccagaagcugcagcaccuugaacaugugauggaaaacuauacacaaugguugcaaaagcuggaaaauuacauuguggagaauaugaaaucagaaauggcccagauccagcaaaaugccguccagaaccacacagccacaaugcuggaaauuggaacuucccucuugucacagaccgcugagcagaccagaaaacuaacugacguugaaacucaggugcugaaucagaccagcagacuugagauccaacugcucgaaaauagcuugaguaccuacaaauuggaaaaacagcuccuucaacagaccaaugaaauccuuaagauacaugagaagaacucgcugcucgagcacaaaauccucgagauggagggcaagcacaaagaagaguuggauacuuuaaaagaagaaaaagagaaccugcaaggguugguuacacgucagacauacauuauucaggaauuggaaaaacagcuaaauagggccaccacaaacaacucaguccugcagaagcaacaacuggaguuaauggacacuguucauaaccugguaaaucugugcacaaaagaggucuuacugaagggaggcaaaagagaagaggagaagccuuuuagagacugcgcugaugucuaucaagcgggauuuaacaaaagcggaauauacacuaucuacaucaacaacaugcccgagccuaagaagguguucugcaauauggacguaaacgggggggguuggacagugauucaacacagggaggacgggucacucgacuuucagcgaggauggaaggaguacaaaauggguuuuggaaauccuagcggcgaauauuggcuaggaaaugaauuuauuuuugcuaucacuagccaacgacaguacauguuacggauagagcugauggacugggaagggaaccgggcauacucacaguaugauagguuucauauugggaacgagaaacagaauuauaggcuguaccucaaaggacacacaggcacggcuggaaaacaaucaucuuuaauucugcacggagccgauuucagcaccaaggacgccgauaaugacaacugcaugugcaaaugcgccuuaaugcucacugggggcuggugguucgacgccugcggcccaucaaauuuaaacggaauguuuuacacagcgggacagaaccauggcaagcugaaugggauuaaauggcauuauuucaagggcccuuccuacucccugcgcucaacuacuaugaugauucggccacuggacuuuuag

SEQ ID NO: 78595 - RNA, 1494 nt, Artificial Sequence
  derived and/or modified sequence
augaccguauuucucucuuuugcauuuuuagcagccauacuaacccauaucgguuguagcaaucaaagacgcaguccugaaaauucuggccgccgauauaacagaauucagcacggacagugugccuacaccuuuauacugccagagcacgacgguaacugccgggagucuacuacagaucaguauaacaccaacgcccuccagagggacgcgccccacguggaaccugacuucucaucucagaaacuucagcaucucgaacacgugauggagaauuacacgcaguggcuccagaaacuggagaacuauauagucgagaauaugaagagcgaaauggcccaaauccaacaaaaugccgugcaaaaccacacagccacgaugcuugagaucgguacuucccugcuuagucagacugcagagcaaacacgcaagcucacugauguggaaacccaaguccugaaucaaaccagcagacuugagauucaacuccuugagaauucacuuaguacuuacaagcuugagaagcaauugcugcaacagaccaacgagauucuaaagauucacgaaaagaauucucuccuggaacauaaaauauuggagauggagggcaagcacaaagaagaguuggauacuuuaaaagaagaaaaagagaaccugcaaggguugguuacacgucagacauacauuauucaggaauuggaaaaacagcuaaauagggccaccacaaacaacucaguccugcagaagcaacaacuggaguuaauggacacuguucauaaccugguaaaucugugcacaaaagaggucuuacugaagggaggcaaaagagaagaggagaagccuuuuagagacugcgcugaugucuaucaagcgggauuuaacaaaagcggaauauacacuaucuauaucaauaauaugccugaacccaagaaaguuuucugcaacauggaugucaacgggggcggguggacagugauacaacauagggaagauggaagucucgauuuccagcggggauggaaagaguauaaaauggguuucggcaaucccaguggcgaguacuggcuuggcaaugaauuuaucuucgcgaucacaagucagaggcaguauaugcuccggauugagcugauggauugggaaggcaacagagcguacucucaguaugacagguuucauaucgguaacgaaaagcagaauuauaggcuguaccucaaaggacacacaggcacggcuggaaaacaaucaucuuuaauucugcacggagccgauuucagcaccaaggacgccgauaaugacaacugcaugugcaaaugcgccuuaaugcucacugggggcuggugguucgacgccugcggcccaucaaauuuaaacggaauguuuuacacagcgggacagaaccauggcaagcugaaugggauuaaauggcauuauuucaagggcccuuccuacucccugcgcucaacuacuaugaugauucggccacuggacuuuuag

SEQ ID NO: 78596 - protein, 51 aa, Artificial Sequence
  derived and/or modified sequence
MATPASAPDTRALVADFVGYKLRQKGYVCGAGPGEGPAADPLHQAMRAAGD

SEQ ID NO: 78597 - protein, 72 aa, Artificial Sequence
  derived and/or modified sequence
MATPASAPDTRALVADFVGYKLRQKGYVCGAGPGEGPAADPLHQAMRAAGDEFETRFRRTFSDLAAQLHVTP

SEQ ID NO: 78598 - protein, 144 aa, Artificial Sequence
  derived and/or modified sequence
MATPASAPDTRALVADFVGYKLRQKGYVCGAGPGEGPAADPLHQAMRAAGDEFETRFRRTFSDLAAQLHVTPGSAQQRFTQVSDELFQGGPNWGRLVAFFVFGAALCAESVNKEMEPLVGQVQEWMVAYLETQLADWIHSSGGW

SEQ ID NO: 78599 - protein, 1392 aa, Artificial Sequence
  derived and/or modified sequence
MASVKVAVRVRPMNRREKDLEAKFIIQMEKSKTTITNLKIPEGGTGDSGRERTKTFTYDFSFYSADTKSPDYVSQEMVFKTLGTDVVKSAFEGYNACVFAYGQTGSGKSYTMMGNSGDSGLIPRICEGLFSRINETTRWDEASFRTEVSYLEIYNERVRDLLRRKSSKTFNLRVREHPKEGPYVEDLSKHLVQNYGDVEELMDAGNINRTTAATGMNDVSSRSHAIFTIKFTQAKFDSEMPCETVSKIHLVDLAGSERADATGATGVRLKEGGNINKSLVTLGNVISALADLSQDAANTLAKKKQVFVPYRDSVLTWLLKDSLGGNSKTIMIATISPADVNYGETLSTLRYANRAKNIINKPTINEDANVKLIRELRAEIARLKTLLAQGNQIALLDSPTALSMEEKLQQNEARVQELTKEWTNKWNETQNILKEQTLALRKEGIGVVLDSELPHLIGIDDDLLSTGIILYHLKEGQTYVGRDDASTEQDIVLHGLDLESEHCIFENIGGTVTLIPLSGSQCSVNGVQIVEATHLNQGAVILLGRTNMFRFNHPKEAAKLREKRKSGLLSSFSLSMTDLSKSRENLSAVMLYNPGLEFERQQREELEKLESKRKLIEEMEEKQKSDKAELERMQQEVETQRKETEIVQLQIRKQEESLKRRSFHIENKLKDLLAEKEKFEEERLREQQEIELQKKRQEEETFLRVQEELQRLKELNNNEKAEKFQIFQELDQLQKEKDEQYAKLELEKKRLEEQEKEQVMLVAHLEEQLREKQEMIQLLRRGEVQWVEEEKRDLEGIRESLLRVKEARAGGDEDGEELEKAQLRFFEFKRRQLVKLVNLEKDLVQQKDILKKEVQEEQEILECLKCEHDKESRLLEKHDESVTDVTEVPQDFEKIKPVEYRLQYKERQLQYLLQNHLPTLLEEKQRAFEILDRGPLSLDNTLYQVEKEMEEKEEQLAQYQANANQLQKLQATFEFTANIARQEEKVRKKEKEILESREKQQREALERALARLERRHSALQRHSTLGMEIEEQRQKLASLNSGSREQSGLQASLEAEQEALEKDQERLEYEIQQLKQKIYEVDGVQKDHHGTLEGKVASSSLPVSAEKSHLVPLMDARINAYIEEEVQRRLQDLHRVISEGCSTSADTMKDNEKLHNGTIQRKLKYELCRDLLCVLMPEPDAAACANHPLLQQDLVQLSLDWKTEIPDLVLPNGVQVSSKFQTTLVDMIYFLHGNMEVNVPSLAEVQLLLYTTVKVMGDSGHDQCQSLVLLNTHIALVKEDCVFYPRIRSRNIPPPGAQFDVIKCHALSEFRCVVVPEKKNVSTVELVFLQKLKPSVGSRNSPPEHLQEAPNVQLFTTPLYLQGSQNVAPEVWKLTFNSQDEALWLISHLTRL

SEQ ID NO: 78600 - DNA, 3486 bp, Artificial Sequence
  derived and/or modified sequence
atggccagcgtgaaggtggccgtgagagtgagacccatgaacagaagagagaaggacctggaggccaagttcatcatccagatggagaagagcaagaccaccatcaccaacctgaagatccccgagggcggcaccggcgacagcggcagagagagaaccaagaccttcacctacgacttcagcttctacagcgccgacaccaagagccccgactacgtgagccaggagatggtgttcaagaccctgggcaccgacgtggtgaagagcgccttcgagggctacaacgcctgcgtgttcgcctacggccagaccggcagcggcaagagctacaccatgatgggcaacagcggcgacagcggcctgatccccagaatctgcgagggcctgttcagcagaatcaacgagaccaccagatgggacgaggccagcttcagaaccgaggtgagctacctggagatctacaacgagagagtgagagacctgctgagaagaaagagcagcaagaccttcaacctgagagtgagagagcaccccaaggagggcccctacgtggaggacctgagcaagcacctggtgcagaactacggcgacgtggaggagctgatggacgccggcaacatcaacagaaccaccgccgccaccggcatgaacgacgtgagcagcagaagccacgccatcttcaccatcaagttcacccaggccaagttcgacagcgagatgccctgcgagaccgtgagcaagatccacctggtggacctggccggcagcgagagagccgacgccaccggcgccaccggcgtgagactgaaggagggcggcaacatcaacaagagcctggtgaccctgggcaacgtgatcagcgccctggccgacctgagccaggacgccgccaacaccctggccaagaagaagcaggtgttcgtgccctacagagacagcgtgctgacctggctgctgaaggacagcctgggcggcaacagcaagaccatcatgatcgccaccatcagccccgccgacgtgaactacggcgagaccctgagcaccctgagatacgccaacagagccaagaacatcatcaacaagcccaccatcaacgaggacgccaacgtgaagctgatcagagagctgagagccgagatcgccagactgaagaccctgctggcccagggcaaccagatcgccctgctggacagccccaccgccctgagcatggaggagaagctgcagcagaacgaggccagagtgcaggagctgaccaaggagtggaccaacaagtggaacgagacccagaacatcctgaaggagcagaccctggccctgagaaaggagggcatcggcgtggtgctggacagcgagctgccccacctgatcggcatcgacgacgacctgctgagcaccggcatcatcctgtaccacctgaaggagggccagacctacgtgggcagagacgacgccagcaccgagcaggacatcgtgctgcacggcctggacctggagagcgagcactgcatcttcgagaacatcggcggcaccgtgaccctgatccccctgagcggcagccagtgcagcgtgaacggcgtgcagatcgtggaggccacccacctgaaccagggcgccgtgatcctgctgggcagaaccaacatgttcagattcaaccaccccaaggaggccgccaagctgagagagaagagaaagagcggcctgctgagcagcttcagcctgagcatgaccgacctgagcaagagcagagagaacctgagcgccgtgatgctgtacaaccccggcctggagttcgagagacagcagagagaggagctggagaagctggagagcaagagaaagctgatcgaggagatggaggagaagcagaagagcgacaaggccgagctggagagaatgcagcaggaggtggagacccagagaaaggagaccgagatcgtgcagctgcagatcagaaagcaggaggagagcctgaagagaagaagcttccacatcgagaacaagctgaaggacctgctggccgagaaggagaagttcgaggaggagagactgaaggacctggtgcagcagaaggacatcctgaagaaggaggtgcaggaggagcaggagatcctggagtgcctgaagtgcgagcacgacaaggagagcagactgctggagaagcacgacgagagcgtgaccgacgtgaccgaggtgccccaggacttcgagaagatcaagcccgtggagtacagactgcagtacaaggagagacagctgcagtacctgctgcagaaccacctgcccaccctgctggaggagaagcagagagccttcgagatcctggacagaggccccctgagcctggacaacaccctgtaccaggtggagaaggagatggaggagaaggaggagcagctggcccagtaccaggccaacgccaaccagctgcagaagctgcaggccaccttcgagttcaccgccaacatcgccagacaggaggagaaggtgagaaagaaggagaaggagatcctggagagcagagagaagcagcagagagaggccctggagagagccctggccagactggagagaagacacagcgccctgcagagacacagcaccctgggcatggagatcgaggagcagagacagaagctggccagcctgaacagcggcagcagagagcagagcggcctgcaggccagcctggaggccgagcaggaggccctggagaaggaccaggagagactggagtacgagatccagcagctgaagcagaagatctacgaggtggacggcgtgcagaaggaccaccacggcaccctggagggcaaggtggccagcagcagcctgcccgtgagcgccgagaagagccacctggtgcccctgatggacgccagaatcaacgcctacatcgaggaggaggtgcagagaagactgcaggacctgcacagagtgatcagcgagggctgcagcaccagcgccgacaccatgaaggacaacgagaagctgcacaacggcaccatccagagaaagctgaagtacgagagaatggtgagcagaagcctgggcgccaaccccgacgacctgaaggaccccatcaagatcagcatccccagatacgtgctgtgcggccagggcaaggacgcccacttcgagttcgaggtgaagatcaccgtgctggacgagacctggaccgtgttcagaagatacagcagattcagagagatgcacaagaccctgaagctgaagtacgccgagctggccgccctggagttcccccccaagaagctgttcggcaacaaggacgagagagtgatcgccgagagaagaagccacctggagaagtacctgagagacttcttcagcgtgatgctgcagagcgccaccagccccctgcacatcaacaaggtgggcctgaccctgagcaagcacaccatctgcgagttcagccccttcttcaagaagggcgtgttcgactacagcagccacggcaccggctag

SEQ ID NO: 78601 - DNA, 4179 bp, Artificial Sequence
  derived and/or modified sequence
atggccagcgtgaaggtggccgtgagagtgagacccatgaacagaagagagaaggacctggaggccaagttcatcatccagatggagaagagcaagaccaccatcaccaacctgaagatccccgagggcggcaccggcgacagcggcagagagagaaccaagaccttcacctacgacttcagcttctacagcgccgacaccaagagccccgactacgtgagccaggagatggtgttcaagaccctgggcaccgacgtggtgaagagcgccttcgagggctacaacgcctgcgtgttcgcctacggccagaccggcagcggcaagagctacaccatgatgggcaacagcggcgacagcggcctgatccccagaatctgcgagggcctgttcagcagaatcaacgagaccaccagatgggacgaggccagcttcagaaccgaggtgagctacctggagatctacaacgagagagtgagagacctgctgagaagaaagagcagcaagaccttcaacctgagagtgagagagcaccccaaggagggcccctacgtggaggacctgagcaagcacctggtgcagaactacggcgacgtggaggagctgatggacgccggcaacatcaacagaaccaccgccgccaccggcatgaacgacgtgagcagcagaagccacgccatcttcaccatcaagttcacccaggccaagttcgacagcgagatgccctgcgagaccgtgagcaagatccacctggtggacctggccggcagcgagagagccgacgccaccggcgccaccggcgtgagactgaaggagggcggcaacatcaacaagagcctggtgaccctgggcaacgtgatcagcgccctggccgacctgagccaggacgccgccaacaccctggccaagaagaagcaggtgttcgtgccctacagagacagcgtgctgacctggctgctgaaggacagcctgggcggcaacagcaagaccatcatgatcgccaccatcagccccgccgacgtgaactacggcgagaccctgagcaccctgagatacgccaacagagccaagaacatcatcaacaagcccaccatcaacgaggacgccaacgtgaagctgatcagagagctgagagccgagatcgccagactgaagaccctgctggcccagggcaaccagatcgccctgctggacagccccaccgccctgagcatggaggagaagctgcagcagaacgaggccagagtgcaggagctgaccaaggagtggaccaacaagtggaacgagacccagaacatcctgaaggagcagaccctggccctgagaaaggagggcatcggcgtggtgctggacagcgagctgccccacctgatcggcatcgacgacgacctgctgagcaccggcatcatcctgtaccacctgaaggagggccagacctacgtgggcagagacgacgccagcaccgagcaggacatcgtgctgcacggcctggacctggagagcgagcactgcatcttcgagaacatcggcggcaccgtgaccctgatccccctgagcggcagccagtgcagcgtgaacggcgtgcagatcgtggaggccacccacctgaaccagggcgccgtgatcctgctgggcagaaccaacatgttcagattcaaccaccccaaggaggccgccaagctgagagagaagagaaagagcggcctgctgagcagcttcagcctgagcatgaccgacctgagcaagagcagagagaacctgagcgccgtgatgctgtacaaccccggcctggagttcgagagacagcagagagaggagctggagaagctggagagcaagagaaagctgatcgaggagatggaggagaagcagaagagcgacaaggccgagctggagagaatgcagcaggaggtggagacccagagaaaggagaccgagatcgtgcagctgcagatcagaaagcaggaggagagcctgaagagaagaagcttccacatcgagaacaagctgaaggacctgctggccgagaaggagaagttcgaggaggagagactgagagagcagcaggagatcgagctgcagaagaagagacaggaggaggagaccttcctgagagtgcaggaggagctgcagagactgaaggagctgaacaacaacgagaaggccgagaagttccagatcttccaggagctggaccagctgcagaaggagaaggacgagcagtacgccaagctggagctggagaagaagagactggaggagcaggagaaggagcaggtgatgctggtggcccacctggaggagcagctgagagagaagcaggagatgatccagctgctgagaagaggcgaggtgcagtgggtggaggaggagaagagagacctggagggcatcagagagagcctgctgagagtgaaggaggccagagccggcggcgacgaggacggcgaggagctggagaaggcccagctgagattcttcgagttcaagagaagacagctggtgaagctggtgaacctggagaaggacctggtgcagcagaaggacatcctgaagaaggaggtgcaggaggagcaggagatcctggagtgcctgaagtgcgagcacgacaaggagagcagactgctggagaagcacgacgagagcgtgaccgacgtgaccgaggtgccccaggacttcgagaagatcaagcccgtggagtacagactgcagtacaaggagagacagctgcagtacctgctgcagaaccacctgcccaccctgctggaggagaagcagagagccttcgagatcctggacagaggccccctgagcctggacaacaccctgtaccaggtggagaaggagatggaggagaaggaggagcagctggcccagtaccaggccaacgccaaccagctgcagaagctgcaggccaccttcgagttcaccgccaacatcgccagacaggaggagaaggtgagaaagaaggagaaggagatcctggagagcagagagaagcagcagagagaggccctggagagagccctggccagactggagagaagacacagcgccctgcagagacacagcaccctgggcatggagatcgaggagcagagacagaagctggccagcctgaacagcggcagcagagagcagagcggcctgcaggccagcctggaggccgagcaggaggccctggagaaggaccaggagagactggagtacgagatccagcagctgaagcagaagatctacgaggtggacggcgtgcagaaggaccaccacggcaccctggagggcaaggtggccagcagcagcctgcccgtgagcgccgagaagagccacctggtgcccctgatggacgccagaatcaacgcctacatcgaggaggaggtgcagagaagactgcaggacctgcacagagtgatcagcgagggctgcagcaccagcgccgacaccatgaaggacaacgagaagctgcacaacggcaccatccagagaaagctgaagtacgagctgtgcagagacctgctgtgcgtgctgatgcccgagcccgacgccgccgcctgcgccaaccaccccctgctgcagcaggacctggtgcagctgagcctggactggaagaccgagatccccgacctggtgctgcccaacggcgtgcaggtgagcagcaagttccagaccaccctggtggacatgatctacttcctgcacggcaacatggaggtgaacgtgcccagcctggccgaggtgcagctgctgctgtacaccaccgtgaaggtgatgggcgacagcggccacgaccagtgccagagcctggtgctgctgaacacccacatcgccctggtgaaggaggactgcgtgttctaccccagaatcagaagcagaaacatccccccccccggcgcccagttcgacgtgatcaagtgccacgccctgagcgagttcagatgcgtggtggtgcccgagaagaagaacgtgagcaccgtggagctggtgttcctgcagaagctgaagcccagcgtgggcagcagaaacagcccccccgagcacctgcaggaggcccccaacgtgcagctgttcaccacccccctgtacctgcagggcagccagaacgtggcccccgaggtgtggaagctgaccttcaacagccaggacgaggccctgtggctgatcagccacctgaccagactgtag

SEQ ID NO: 78602 - DNA, 3486 bp, Artificial Sequence
  derived and/or modified sequence
atggcttccgttaaggtcgctgttcgcgttagacccatgaatagacgagagaaggacttggaagcgaagtttatcatccaaatggagaagagtaagactacgattacaaatctgaagattcctgagggcggaaccggagatagtggccgcgagcgtaccaaaaccttcacgtacgattttagcttctactcagcggataccaaaagtccagattatgtgtcccaggagatggtcttcaagaccctgggcacagatgtagtcaaaagtgcttttgaaggctacaatgcttgtgtgttcgcatacggccagacgggctcaggaaagagttataccatgatgggtaacagcggcgattccggtttgattcctagaatttgtgagggactattctccagaattaacgagaccaccagatgggacgaggcatcctttcgaaccgaggtgagctacctcgaaatttataatgaacgcgtaagggatctcttgagacgaaagtcctccaagaccttcaatcttcgcgtgcgggagcatcctaaagaagggccttacgtagaggacctgtcgaaacacctggtccagaactacggcgatgtagaagaactgatggacgccgggaatatcaatcggacgaccgccgctaccggtatgaatgatgtgtccagccgctcccatgcgatttttaccattaagtttactcaagccaagtttgatagcgagatgccatgcgaaacagtgtcaaagattcacctagttgatctcgcaggatctgagcgcgccgatgccaccggcgccactggcgtgcgactgaaagagggcggaaatatcaataagtccctggttacactcggtaacgtcatcagtgccttggcggacctgtcccaagatgctgccaatacgttggccaagaagaaacaggtgtttgtcccctatcgtgattccgtgttaacgtggttactcaaagattctctcggtgggaactctaagactataatgattgcgaccattagtcctgcggatgtcaattatggcgaaacccttagtaccctgcgctacgctaaccgggcgaaaaatatcatcaataagcctactattaacgaggacgccaacgtcaagttgatcagagaactgcgggcggagatcgcgcgactgaaaaccctcctcgcccagggcaaccagatcgccttgctagattcacccaccgcactctccatggaggaaaagttgcaacagaacgaagcaagggtgcaggagctgaccaaagaatggactaacaaatggaatgagacacagaacatcttgaaggaacagacacttgccctgcgcaaagaggggattggggtggttctcgatagtgagctcccccacctcattgggatcgatgacgatctgctgtcaaccggaataattttataccacctcaaggaaggccagacctacgtggggagagacgacgcatcaaccgagcaggacatcgtactgcacggacttgacctggagagcgagcattgtatctttgagaacatcggaggtacagtgactttgatacctctgtccggctcccagtgcagtgtcaacggcgtgcagatagtcgaagcaacccatttaaatcagggcgccgttattctgctgggacgcactaacatgtttagattcaaccatccgaaggaggccgccaagttgcgggagaaacgaaaatccggtcttctctcctctttcagcctgtccatgaccgacctgtcaaaatcccgagagaatctctccgccgtaatgctctataacccaggcctggaattcgaacgccagcagcgtgaggaactcgagaaactcgaaagtaagcgtaagctgattgaggagatggaagagaaacaaaagagcgataaggctgagctggaacggatgcagcaggaggtggagacccaacgcaaggaaaccgaaattgtgcagctgcaaatacgaaaacaggaagagtcactcaagagaaggagctttcatatcgagaacaaactcaaagacttgctcgctgaaaaggaaaaatttgaggaagagcgcctgaaggacctggtgcagcagaaagatatcctgaagaaagaggtgcaggaagagcaggagattctggaatgtttgaagtgcgaacacgacaaggagagcagactgctcgaaaagcatgatgagtcagtgacagacgtaactgaagttccgcaggactttgaaaagattaaaccagtggaatatagattacaatacaaggaacgccaactccagtatctcttgcagaatcatctacccaccctcctggaggagaagcagcgggcatttgaaatccttgatcgggggcccctaagtctcgataatacattgtaccaggtcgagaaagagatggaagagaaggaggaacagttggctcaataccaggccaatgcgaatcagttacagaaattgcaggcaaccttcgaatttacagccaatatcgctaggcaagaggagaaggtccgcaagaaagaaaaggaaattctggaatcccgggaaaagcaacaacgggaagccctggagagagccttggccaggctcgagaggcggcactccgccctgcagcggcactcgacgctgggtatggagattgaagagcagcgacaaaagctggccagcctgaatagcggctccagggaacaatccggccttcaggcaagtctagaagccgagcaggaggctcttgagaaggaccaggaacgcctcgaatatgaaattcagcagctcaagcagaagatttatgaggtcgacggggtgcagaaggatcaccatggaaccctggagggcaaggtagccagctcctcactccctgtctccgctgagaagagtcacctggtcccactcatggacgctcggatcaatgcatatattgaggaggaagtacagcgccgactgcaggacctacatcgtgtcatctccgaagggtgttcaacgtctgcagacactatgaaagacaatgagaaattacacaatggaaccatacagaggaaactgaagtatgaaaggatggtgagtcgcagcctgggcgcaaacccggatgacctcaaggaccctattaagatctcaattcctagatatgtgctctgtggacaaggcaaggatgcacatttcgagttcgaggtgaaaatcacagtgttagatgaaacttggacggtgtttagaaggtatagcagattcagagagatgcataaaacactgaagttgaaatacgcggaactcgctgccctggaattccctccaaagaagttattcgggaataaggatgagagagtgatcgcggagcgtcgctctcacctggagaaatatctgcgggacttcttctctgttatgctgcagtcagcaactagccccctccatatcaataaggtcggccttacactgtctaagcacacaatctgtgaattctccccgttctttaagaagggcgtgttcgattattcaagccatggaacaggatag

SEQ ID NO: 78603 - DNA, 4179 bp, Artificial Sequence
  derived and/or modified sequence
atggcgagtgtgaaggtggccgtacgggtcagaccaatgaacagacgtgaaaaagatcttgaagcaaaattcataatacaaatggaaaagtctaagacaacaattacaaacctgaagatcccggagggcggtacaggggactctggacgagaaaggaccaagacctttacctacgatttctccttttactctgccgatacaaaatccccggattacgtgtcccaagagatggtattcaaaacattggggacagacgtcgtgaagagcgccttcgagggctacaatgcctgcgtgttcgcatatggtcagacgggaagtgggaaatcctacaccatgatggggaattccggagactctggtttgattccccgcatatgtgagggcctgttcagtcgaatcaatgaaacgaccagatgggatgaggccagctttcgaacagaggttagctatctcgagatttacaatgaaagggtccgcgatctgcttcgcaggaaaagttccaagacatttaatctcagagtgcgcgaacaccctaaggaaggaccctacgttgaagatctttccaagcacctggtgcagaactatggcgacgttgaggagttaatggacgcggggaatatcaaccggaccaccgccgccacgggcatgaacgacgtctctagtaggtcccacgctattttcaccattaagttcacccaggctaaattcgactccgaaatgccatgcgagaccgtgagcaagattcacttggtggatctggccggctctgaaagagcggacgctactggggccaccggagtgcggttgaaggaagggggcaatatcaataagagtctggtaaccctcggaaatgttattagtgccttagccgatctgtcacaagacgcggcgaataccctggctaaaaagaagcaagtcttcgtgccctatcgggactctgtgctgacctggttgcttaaggattccctaggggggaattcgaagactattatgatcgccacaatcagtcccgcagacgtgaattacggcgaaactctgtcgaccctgaggtacgcgaaccgagccaagaatatcatcaacaagccaacaatcaacgaagacgccaacgtcaagctgataagggagcttagagcagagatcgcacggctaaagactctgcttgcccagggcaaccagatcgccctgcttgacagccccaccgcattatctatggaggagaagctgcagcagaatgaggcacgggtgcaagaattgacaaaggagtggacgaacaagtggaatgagactcagaacatcttgaaggagcagactctcgcgctacgtaaggagggaattggagttgtactcgatagcgaactgccgcatctgattggcattgacgatgacctcctcagcacaggaattattctctatcacctaaaagagggtcaaacatatgtgggcagggacgacgcctcaacagagcaagatatcgtactccatggcttggatctggagagcgagcactgcatcttcgaaaacatcggcggcacagttacgctgattcccctgagcggaagtcagtgctctgtcaacggcgttcagattgttgaagctacgcacttgaaccagggggctgtgattttactaggacgcaccaatatgttcagattcaaccatcccaaagaagccgcaaagctgagggagaagagaaagtcagggcttctgagttctttcagcctttctatgaccgatttatcaaaatcccgcgagaatttaagtgccgtcatgttgtacaatccgggtctagagtttgagaggcagcaaagagaggagttggaaaaactcgagtccaagcgcaagctgattgaagagatggaagagaagcagaagagcgacaaagctgagctggagaggatgcagcaggaggttgagacgcagcggaaagagactgagatagttcagctgcaaatccgcaagcaagaggagagcctcaagcgccgatctttccatatcgaaaataagctgaaagacctgctggccgagaaagaaaagtttgaagaagagagattgagggagcagcaggagatagagcttcagaagaaacggcaggaggaggagacttttttgcgggttcaggaagagttacagagacttaaggagctgaacaacaatgaaaaagccgagaagtttcagatcttccaggagctagatcagctccagaaagagaaagatgaacagtacgctaaactcgagctggaaaagaagcggctggaggagcaggaaaaggagcaggttatgctggtagcacacctggaagagcagttgcgcgaaaaacaggaaatgatccaactgctcagacggggcgaagtgcaatgggtagaagaggagaagagagacctagaggggattagagaatctctcctacgcgtcaaagaggcaagagccggcggggacgaggatggagaggaactggagaaggcccagctgagattcttcgaattcaaaagacgccaacttgtgaagctcgtgaacctggagaaagatttggtgcaacagaaggatattctgaagaaggaggtacaagaagagcaagagattctcgagtgcctcaaatgcgagcacgacaaggagtctaggcttttggagaaacatgacgagtctgtgactgatgttacagaggtcccacaggacttcgaaaagattaagccagtagaatataggttacagtacaaggagcggcagctccagtatcttcttcagaaccacctgcccacgcttcttgaggagaagcaaagggctttcgagattcttgaccggggccccttgtccctggacaatacactgtaccaagtcgagaaggagatggaagagaaggaagagcagctggctcagtaccaggcgaacgcaaatcagctgcaaaaactacaggccacctttgaattcactgctaatattgccaggcaggaggaaaaagttagaaagaaggaaaaagagatcctcgagtccagggagaagcaacaacgggaggctttagaaagagctcttgcgcgactggaaaggagacatagtgccctgcaaagacacagcacactgggaatggaaatcgaggagcagagacagaagttggcgtccttgaacagcgggagccgggaacaaagtggattgcaggctagcctggaagcagagcaggaagccctggaaaaggaccaagagagactggaatatgagattcagcagctgaagcaaaagatatatgaagtggacggggtgcagaaggatcaccatgggacacttgagggaaaggtggccagcagctcactgcctgtgagcgctgagaaaagccacctcgtcccacttatggacgctcgcataaacgcctatatagaggaagaagtacaacgaaggcttcaagatctccatcgggtaatctcagagggttgcagtacctctgctgacaccatgaaggacaacgaaaagctccataacgggacaattcagaggaaacttaagtacgagttatgcagagacctattgtgtgttcttatgcctgagccggatgctgccgcctgcgcaaatcacccattactgcagcaggatctggtgcagctcagtctcgactggaaaactgagattcccgatctcgtgctgcccaacggtgtccaggtaagtagcaagtttcagacgaccttggttgacatgatctatttcctgcatggtaatatggaggtgaacgtcccgagtctcgccgaagttcagttactactttacacaactgtgaaggtcatgggcgattctggtcacgaccagtgtcagagtctggttctgctcaatactcatatcgccctggtgaaagaagactgcgttttttacccgcgaatccggtctcgcaatataccaccaccaggtgcgcaatttgatgtgatcaaatgccatgccctgagcgagttccgctgtgtggtggttcccgagaaaaaaaatgtgtcaaccgtggaactggtgttcttgcagaagctgaagcccagcgttgggtcacgtaattctccaccggagcatctccaagaggcaccaaacgtacagttgtttaccaccccattgtacctgcaggggagtcaaaacgtcgcccctgaggtgtggaaactgacttttaatagtcaggatgaggctttgtggctgatttctcacctaacccgtctttag

SEQ ID NO: 78604 - DNA, 4792 bp, Artificial Sequence
  derived and/or modified sequence
gcaggtggggctgccgcggaactccaggtccggccgggagcagaggggcgggggcgagagggaagtgggcgggagccgcgatctgagtagccagcgtcgccggcgaccgcggagttctgggctagtgggaccccgcgcgggctggttcgggatgagcgatggcatcggtcaaggtggccgtgagggtccggcccatgaatcgcagggaaaaggacttggaggccaagttcattattcagatggagaaaagcaaaacgacaatcacaaacttaaagataccagaaggaggcactggggactcaggaagagaacggaccaagaccttcacctatgacttttctttttattctgctgatacaaaaagcccagattacgtttcacaagaaatggttttcaaaaccctcggcacagatgtcgtgaagtctgcatttgaaggttataatgcttgtgtctttgcatatgggcaaactggatctggaaagtcatacactatgatgggaaattctggagattctggcttaatacctcggatctgtgaaggactcttcagtcggataaatgaaaccaccagatgggatgaagcttcttttcgaactgaagtcagctacttagaaatttataacgaacgtgtgagagatctacttcggcggaagtcatctaaaaccttcaatttgagagtccgtgagcatcccaaagaaggcccttatgttgaggatttatccaaacatttagtacagaattatggtgacgtagaagaacttatggatgcgggcaatatcaaccggaccaccgcagcgactgggatgaacgacgtcagtagcaggtctcatgccatcttcaccatcaagttcactcaggctaaatttgattctgaaatgccatgtgaaaccgtcagtaagatccacttggttgatcttgccggaagtgagcgtgcagatgccaccggagccaccggggttaggctaaaggaagggggaaatattaacaagtccctcgtgactctggggaacgtcatttctgccttagctgatttatctcaggatgctgcaaatactcttgcaaagaagaagcaagttttcgtgccttacagggattctgtgttgacttggttgttaaaagatagccttggaggaaactctaaaactatcatgattgccaccatttcacctgctgatgtcaattatggagaaaccctaagtactcttcgctatgcaaatagagccaaaaacatcatcaacaagcctaccattaatgaggatgccaacgtcaaacttatccgtgagctgcgagctgaaatagccagactgaaaacgctgcttgctcaagggaatcagattgccctcttagactcccccacagctttaagtatggaggaaaaacttcagcagaatgaagcaagagttcaagaattgaccaaggaatggacaaataagtggaatgaaacccaaaatattttgaaagaacaaactctagccctcaggaaagaagggattggagttgttttggattctgaactgcctcatttgattggcatcgatgatgaccttttgagtactggaatcatcttatatcatttaaaggaaggtcagacatacgttggtagagacgatgcttccacggagcaagatattgttcttcatggccttgacttggagagtgagcattgcatctttgaaaatatcggggggacagtgactctgatacccctgagtgggtcccagtgctctgtgaatggtgttcagatcgtggaggccacacatctaaatcaaggtgctgtgattctcttgggaagaaccaatatgtttcgctttaaccatccaaaggaagccgccaagctcagggagaagaggaagagtggccttctgtcctccttcagcttgtccatgaccgacctctcgaagtcccgtgagaacctgtctgcagtcatgttgtataaccccggacttgaatttgagaggcaacagcgtgaagaacttgaaaaattagaaagtaaaaggaaactcatagaagaaatggaggaaaagcagaaatcagacaaggctgaactggagcggatgcagcaggaggtggagacccagcgcaaggagacagaaatcgtgcagctccagattcgcaagcaggaggagagcctcaaacgccgcagcttccacatcgagaacaagctaaaggatttacttgcggagaaggaaaaatttgaagaggagaggctgaaggacctggttcagcagaaagacatcctgaaaaaagaagtccaagaagaacaggagatcctagagtgtttaaaatgtgaacatgacaaagaatctagattgttggaaaaacatgatgagagtgtcacagatgtcacggaagtgcctcaagatttcgagaaaataaagccagtggagtacaggctgcaatataaagaacgccagctacagtacctcctgcagaatcacttgccaactctgttggaagaaaagcagagagcatttgaaattcttgacagaggccctctcagcttagacaacactctttatcaagtagaaaaggaaatggaagaaaaagaagaacagcttgcacagtaccaggccaatgcaaaccagctgcaaaagctccaagccacctttgaattcactgccaacattgcacgtcaggaggaaaaagtgaggaaaaaggaaaaggagattttggagtccagagagaagcagcagagagaggcgctggagcgggccctggccaggctggagaggagacattctgcgctgcagaggcactccaccctgggcatggagattgaagagcagaggcagaaacttgccagtctgaacagtggcagcagagagcagtcagggctccaggctagcctggaggctgagcaggaagccctggagaaggaccaggagaggttagaatatgaaatccagcagctgaaacagaagatttatgaggtcgatggtgttcaaaaagatcatcatgggaccctggaagggaaggtggcttcttccagcttgccagtcagtgctgaaaaatcacacctggttcccctcatggatgccaggatcaatgcttacattgaagaagaagtccaaagacgccttcaggatttgcatcgtgtgattagtgaaggctgcagtacatctgcagacacgatgaaggataatgagaaacttcacaatggcaccattcaacgtaaactaaaatatgagcggatggtttctcgctctttgggcgcaaatccagatgacctgaaggacccaattaaaattagtatcccacgctacgtcctctgcgggcaaggaaaggatgcacacttcgagtttgaggtcaagattactgtcctagatgagacatggactgtattcaggcgttacagtcgttttcgagaaatgcataaaacattgaagttaaagtatgcagagcttgctgcccttgaatttcctccaaagaaactatttggaaataaggatgaacgtgtgattgctgagagacgaagtcacttagagaaatacctcagggactttttcagcgtgatgctccagtccgcaacatctcccctccacatcaacaaagtgggactgactctctcgaaacataccatttgtgagttttcaccattcttcaagaaaggagtctttgactacagcagccacgggacggggtagagccaggggtgatggaggaaccaccacagcagtgccttctcgtcgaagcgggctccgatgcagggcagctcccccatgcgaggatccgggtctgcctcctcctgctgaagacagacatgcagcagcgggcccgggccacctcacgtttccatacctagtgcctgagtttggggatgggatgctctgcctgctgatgtggccctgacaggcagccgttaccgttccattgcggttgaacgtggccttttcccacagtgcttccttctcactgcgcagcaaagttcgtcccctgtggcaagatagatgtggttgggccatcgtgggttccctgagcccagccagcctgggacctcccaaagtgggtggcttaccagaccacccttaaatgactttcatctggtttcctctttcaccaaaatatactcgtattttttatatttcttccatgtggctggctatattccaagaaaagcattttaaattatttcattgtatttttttctttttttccctcatttgaatcagaacttttatataaaacccaaacactgatgtttacacagaatttcatattctgcaaaagggattttttgatccaatcatgactgtagtcttccatgcttgacaaattggatgtagacaacattacttaaaacttctataaatccctacaattaggatatttatttaaccttgaatattcaagaacattctcccaaatctaaatggctactgtgcattcttgagctttttctgctaagcacaaaatgaacgcaaagctaaatgcatatttttaagtattattcacattttttgttacagaatctattggatctttggctggaaaactagaatttatagcagtttattaatgataccttaaattactcaggacttaatgtagcattgcacttctgtgtacagtaaaactgctttgttttactaaagagaaaaatgtgagtggaaaaaatatgtatgtggtatatactcaaatgtatataattctatctatagatttatatatgtatacattctgtacagtagttccatcaaaatatgtaataattcacaccaattttattaaatgtatttgctttttcaaaatttaaattgagctgctatcaatattaaatgaagttatggcatct

SEQ ID NO: 78605 - DNA, 4640 bp, Artificial Sequence
  derived and/or modified sequence
gcaggtggggctgccgcggaactccaggtccggccgggagcagaggggcgggggcgagagggaagtgggcgggagccgcgatctgagtagccagcgtcgccggcgaccgcggagttctgggctagtgggaccccgcgcgggctggttcgggatgagcgatggcatcggtcaaggtggccgtgagggtccggcccatgaatcgcagggaaaaggacttggaggccaagttcattattcagatggagaaaagcaaaacgacaatcacaaacttaaagataccagaaggaggcactggggactcaggaagagaacggaccaagaccttcacctatgacttttctttttattctgctgatacaaaaagcccagattacgtttcacaagaaatggttttcaaaaccctcggcacagatgtcgtgaagtctgcatttgaaggttataatgcttgtgtctttgcatatgggcaaactggatctggaaagtcatacactatgatgggaaattctggagattctggcttaatacctcggatctgtgaaggactcttcagtcggataaatgaaaccaccagatgggatgaagcttcttttcgaactgaagtcagctacttagaaatttataacgaacgtgtgagagatctacttcggcggaagtcatctaaaaccttcaatttgagagtccgtgagcatcccaaagaaggcccttatgttgaggatttatccaaacatttagtacagaattatggtgacgtagaagaacttatggatgcgggcaatatcaaccggaccaccgcagcgactgggatgaacgacgtcagtagcaggtctcatgccatcttcaccatcaagttcactcaggctaaatttgattctgaaatgccatgtgaaaccgtcagtaagatccacttggttgatcttgccggaagtgagcgtgcagatgccaccggagccaccggggttaggctaaaggaagggggaaatattaacaagtccctcgtgactctggggaacgtcatttctgccttagctgatttatctcaggatgctgcaaatactcttgcaaagaagaagcaagttttcgtgccttacagggattctgtgttgacttggttgttaaaagatagccttggaggaaactctaaaactatcatgattgccaccatttcacctgctgatgtcaattatggagaaaccctaagtactcttcgctatgcaaatagagccaaaaacatcatcaacaagcctaccattaatgaggatgccaacgtcaaacttatccgtgagctgcgagctgaaatagccagactgaaaacgctgcttgctcaagggaatcagattgccctcttagactcccccacagctttaagtatggaggaaaaacttcagcagaatgaagcaagagttcaagaattgaccaaggaatggacaaataagtggaatgaaacccaaaatattttgaaagaacaaactctagccctcaggaaagaagggattggagttgttttggattctgaactgcctcatttgattggcatcgatgatgaccttttgagtactggaatcatcttatatcatttaaaggaaggtcagacatacgttggtagagacgatgcttccacggagcaagatattgttcttcatggccttgacttggagagtgagcattgcatctttgaaaatatcggggggacagtgactctgatacccctgagtgggtcccagtgctctgtgaatggtgttcagatcgtggaggccacacatctaaatcaaggtgctgtgattctcttgggaagaaccaatatgtttcgctttaaccatccaaaggaagccgccaagctcagggagaagaggaagagtggccttctgtcctccttcagcttgtccatgaccgacctctcgaagtcccgtgagaacctgtctgcagtcatgttgtataaccccggacttgaatttgagaggcaacagcgtgaagaacttgaaaaattagaaagtaaaaggaaactcatagaagaaatggaggaaaagcagaaatcagacaaggctgaactggagcggatgcagcaggaggtggagacccagcgcaaggagacagaaatcgtgcagctccagattcgcaagcaggaggagagcctcaaacgccgcagcttccacatcgagaacaagctaaaggatttacttgcggagaaggaaaaatttgaagaggagaggctgagggaacagcaggaaatcgagctgcagaagaagagacaagaagaagagacctttctccgcgtccaagaagaactccaacgactcaaagaactcaacaacaacgagaaggctgagaagtttcagatatttcaagaactggaccagctccaaaaggaaaaagatgaacagtatgccaagcttgaactggaaaaaaagagactagaggagcaggagaaggagcaggtcatgctcgtggcccatctggaagagcagctccgagagaagcaggagatgatccagctcctgcggcgtggggaggtacagtgggtggaagaggagaagagggacctggaaggcattcgggaatccctcctgcgggtgaaggaggctcgtgccggaggggatgaagatggcgaggagttagaaaaggctcaactgcgtttcttcgaattcaagagaaggcagcttgtcaagctagtgaacttggagaaggacctggttcagcagaaagacatcctgaaaaaagaagtccaagaagaacaggagatcctagagtgtttaaaatgtgaacatgacaaagaatctagattgttggaaaaacatgatgagagtgtcacagatgtcacggaagtgcctcaagatttcgagaaaataaagccagtggagtacaggctgcaatataaagaacgccagctacagtacctcctgcagaatcacttgccaactctgttggaagaaaagcagagagcatttgaaattcttgacagaggccctctcagcttagacaacactctttatcaagtagaaaaggaaatggaagaaaaagaagaacagcttgcacagtaccaggccaatgcaaaccagctgcaaaagctccaagccacctttgaattcactgccaacattgcacgtcaggaggaaaaagtgaggaaaaaggaaaaggagattttggagtccagagagaagcagcagagagaggcgctggagcgggccctggccaggctggagaggagacattctgcgctgcagaggcactccaccctgggcatggagattgaagagcagaggcagaaacttgccagtctgaacagtggcagcagagagcagtcagggctccaggctagcctggaggctgagcaggaagccctggagaaggaccaggagaggttagaatatgaaatccagcagctgaaacagaagatttatgaggtcgatggtgttcaaaaagatcatcatgggaccctggaagggaaggtggcttcttccagcttgccagtcagtgctgaaaaatcacacctggttcccctcatggatgccaggatcaatgcttacattgaagaagaagtccaaagacgccttcaggatttgcatcgtgtgattagtgaaggctgcagtacatctgcagacacgatgaaggataatgagaaacttcacaatggcaccattcaacgtaaactaaaatatgagctgtgtcgtgacctcctgtgtgtcctgatgccagagcctgatgccgctgcctgcgctaatcatcccttgctccagcaagatctggttcagctttctcttgattggaaaacagaaatccctgatttagttttgccaaatggagttcaggtgtcatccaaattccagactaccttggttgacatgatttactttcttcatggaaatatggaagtcaatgtcccttccctggcagaagttcagttactgctctacacaacagtgaaagtcatgggtgactctggccatgaccagtgccagtcgctagtccttctgaacacccacattgcactggtgaaggaagactgtgttttttatccacgcattcgatctcgaaacatacctcctccgggtgcacaatttgatgtgatcaaatgccatgctttaagtgaattcaggtgtgttgttgttccagaaaagaaaaatgtgtcaacagtagaactagtcttcttacagaaactcaaaccttcagtgggttccagaaatagtccacctgagcaccttcaggaagccccaaatgtccagttgttcaccaccccattgtatcttcaaggcagtcagaatgtcgcacctgaggtctggaaacttactttcaattctcaagatgaggctctttggctaatctcacatttgacaagactctaaggaggagacttttaaagatgcactacatgttttttgagatcattaataaaataagcattgtgaaaacagtcaaggcaatatgaatatctccgtgtagctaattgaattggaactggaaaaatgcagacctctaaaattgaaaatgtaaatattttaaatatctacaataaaataaaaacagctaatagcagagccccaataaaatatctttatcatcaccttgcttcattttcttgaaactcaggcttgtaaatttgtgcctgcttcattatttgtgaggtgattaaagcatttctgattgtt

SEQ ID NO: 78606 - DNA, 3486 bp, Artificial Sequence
  derived and/or modified sequence
atggcctctgtgaaggtggccgtgcgggtgcggcccatgaacagaagagagaaggacctggaggccaagttcatcatccagatggagaagagcaagaccaccatcaccaacctgaagatccctgagggcggcactggagacagcggccgggagaggaccaagaccttcacctatgacttctccttctacagcgctgacaccaagagcccagactatgtgtcccaggagatggtgttcaagaccctgggcacagatgtggtgaagagcgcctttgagggctacaatgcctgtgtgtttgcctacggccagacaggcagcggcaagagctacaccatgatgggcaacagcggggacagcggcctcatcccccgcatctgtgagggcctcttcagccgcatcaatgagaccacccgctgggatgaggccagcttcagaacagaggtgtcctacctggagatctacaatgaaagagtgcgggacctgctgcggaggaagagcagcaagaccttcaacctgcgggtgcgggagcaccccaaggagggcccctacgtggaggacctgagcaagcacctggtgcagaactatggagatgtggaggagctgatggatgctggcaacatcaacagaaccacagctgccaccggcatgaatgatgtgagcagccgcagccacgccatcttcaccatcaagttcacccaggccaagtttgacagcgagatgccctgtgagaccgtgtccaagatccacctggtggacctggccggcagcgagcgggcagatgccaccggggccactggagtgcggctgaaggagggcggcaacatcaacaagagcctggtgaccctgggcaatgtcatcagcgccctggccgacctgagccaggatgctgccaacaccctggccaagaagaagcaggtgtttgtgccctacagagattctgtgctgacctggctgctgaaggacagcctgggcggcaacagcaagaccatcatgattgccaccatcagccctgcagatgtgaactacggggagaccctgagcaccctgcgctatgccaacagagccaagaacatcatcaacaagcccaccatcaatgaagatgccaacgtgaagctgatccgggagctgcgggcagagatcgcccggctgaagaccctgctggcccagggcaaccagatcgccctgctggacagccccacagccctgtccatggaggagaagctgcagcagaatgaggcccgggtgcaggagctgaccaaggagtggaccaacaagtggaatgagacccagaacatcctgaaggagcagaccctggccctgaggaaggagggcattggagtggtgctggacagcgagctgccccacctgattggaattgatgatgacctgctgagcacaggcatcatcctgtaccacctgaaggagggccagacctacgtgggcagagatgatgccagcacagagcaggacatcgtgctgcacggcctggacctggagagcgagcactgcatctttgagaacatcggcggcaccgtgaccctcatccccctgagcggcagccagtgcagcgtgaatggagtgcagatcgtggaggccacccacctgaaccagggcgctgtgatcctgctgggccgcaccaacatgttccgcttcaaccaccccaaggaggccgccaagctgcgggagaagaggaagagcggcctgctgagcagcttcagcctgtccatgacagacctgagcaagagccgggagaacctgtctgctgtgatgctgtacaaccctggcctggagtttgagcggcagcagcgggaggagctggagaagctggagagcaagaggaagctgattgaggagatggaggagaagcagaagagtgacaaggccgagctggagaggatgcagcaggaggtggagacccagaggaaggagacagagatcgtgcagctgcagatcaggaagcaggaggagagcctgaagaggaggagcttccacatcgagaacaagctgaaggacctgctggccgagaaggagaagtttgaggaggagcggctgaaggacctggtgcagcagaaggacatcctgaagaaggaggtgcaggaggagcaggagatcctggagtgcctgaagtgtgaacatgacaaggagagccggctgctggagaagcatgatgaatctgtgacagatgtgacagaggtgccccaggactttgagaagatcaagcctgtggagtaccgcctgcagtacaaggagcggcagctgcagtacctgctgcagaaccacctgcccaccctgctggaggagaagcagagggcctttgagatcctggaccggggccccctgagcctggacaacaccctgtaccaggtggagaaggagatggaggagaaggaggagcagctggcccagtaccaggccaatgccaaccagctgcagaagctgcaggccacctttgagttcaccgccaacatcgcccggcaggaggagaaggtgaggaagaaggagaaggagatcctggagagccgggagaagcagcagcgggaggccctggagcgggccctggcccggctggagcggcggcacagcgccctgcagaggcacagcaccctgggcatggagattgaggagcagaggcagaagctggccagcctgaacagcggcagccgggagcagagcggcctgcaggccagcctggaggccgagcaggaggccctggagaaggaccaggagcggctggagtatgagatccagcagctgaagcagaagatctatgaggtggatggagtgcagaaggaccaccacggcaccctggagggcaaggtggccagcagcagcctgcctgtgtctgctgagaagagccacctggtgcccctgatggatgcccgcatcaatgcctacatcgaggaggaggtgcagaggcggctgcaggacctgcacagggtcatcagcgagggctgcagcaccagcgctgacaccatgaaggacaatgagaagctgcacaacggcaccatccagaggaagctgaagtatgaaagaatggtgagccgcagcctgggcgccaacccagatgacctgaaggaccccatcaagatcagcatccccaggtatgtgctgtgtggccagggcaaggatgcccactttgaatttgaggtgaagatcaccgtgctggatgagacctggacagtgttccgccgctacagccgcttccgggagatgcacaagaccctgaagctgaagtatgcagagctggccgccctggagttcccccccaagaagctgtttggaaacaaggatgagcgggtgattgctgagcggcgcagccacctggagaagtacctgcgggacttcttctctgtgatgctgcagagcgccaccagccccctgcacatcaacaaggtgggcctgaccctgagcaagcacaccatctgtgagttcagccccttcttcaagaagggcgtgtttgactacagcagccacggcaccggctag

SEQ ID NO: 78607 - DNA, 4179 bp, Artificial Sequence
  derived and/or modified sequence
atggcctctgtgaaggtggccgtgcgggtgcggcccatgaacagaagagagaaggacctggaggccaagttcatcatccagatggagaagagcaagaccaccatcaccaacctgaagatccctgagggcggcactggagacagcggccgggagaggaccaagaccttcacctatgacttctccttctacagcgctgacaccaagagcccagactatgtgtcccaggagatggtgttcaagaccctgggcacagatgtggtgaagagcgcctttgagggctacaatgcctgtgtgtttgcctacggccagacaggcagcggcaagagctacaccatgatgggcaacagcggggacagcggcctcatcccccgcatctgtgagggcctcttcagccgcatcaatgagaccacccgctgggatgaggccagcttcagaacagaggtgtcctacctggagatctacaatgaaagagtgcgggacctgctgcggaggaagagcagcaagaccttcaacctgcgggtgcgggagcaccccaaggagggcccctacgtggaggacctgagcaagcacctggtgcagaactatggagatgtggaggagctgatggatgctggcaacatcaacagaaccacagctgccaccggcatgaatgatgtgagcagccgcagccacgccatcttcaccatcaagttcacccaggccaagtttgacagcgagatgccctgtgagaccgtgtccaagatccacctggtggacctggccggcagcgagcgggcagatgccaccggggccactggagtgcggctgaaggagggcggcaacatcaacaagagcctggtgaccctgggcaatgtcatcagcgccctggccgacctgagccaggatgctgccaacaccctggccaagaagaagcaggtgtttgtgccctacagagattctgtgctgacctggctgctgaaggacagcctgggcggcaacagcaagaccatcatgattgccaccatcagccctgcagatgtgaactacggggagaccctgagcaccctgcgctatgccaacagagccaagaacatcatcaacaagcccaccatcaatgaagatgccaacgtgaagctgatccgggagctgcgggcagagatcgcccggctgaagaccctgctggcccagggcaaccagatcgccctgctggacagccccacagccctgtccatggaggagaagctgcagcagaatgaggcccgggtgcaggagctgaccaaggagtggaccaacaagtggaatgagacccagaacatcctgaaggagcagaccctggccctgaggaaggagggcattggagtggtgctggacagcgagctgccccacctgattggaattgatgatgacctgctgagcacaggcatcatcctgtaccacctgaaggagggccagacctacgtgggcagagatgatgccagcacagagcaggacatcgtgctgcacggcctggacctggagagcgagcactgcatctttgagaacatcggcggcaccgtgaccctcatccccctgagcggcagccagtgcagcgtgaatggagtgcagatcgtggaggccacccacctgaaccagggcgctgtgatcctgctgggccgcaccaacatgttccgcttcaaccaccccaaggaggccgccaagctgcgggagaagaggaagagcggcctgctgagcagcttcagcctgtccatgacagacctgagcaagagccgggagaacctgtctgctgtgatgctgtacaaccctggcctggagtttgagcggcagcagcgggaggagctggagaagctggagagcaagaggaagctgattgaggagatggaggagaagcagaagagtgacaaggccgagctggagaggatgcagcaggaggtggagacccagaggaaggagacagagatcgtgcagctgcagatcaggaagcaggaggagagcctgaagaggaggagcttccacatcgagaacaagctgaaggacctgctggccgagaaggagaagtttgaggaggagcggctgcgggagcagcaggagattgagctgcagaagaagaggcaggaggaggagaccttcctgcgggtgcaggaggagctgcagaggctgaaggagctgaacaacaatgagaaggccgagaagttccagatcttccaggagctggaccagctgcagaaggagaaggatgagcagtatgccaagctggagctggagaagaagaggctggaggagcaggagaaggagcaggtgatgctggtggcccacctggaggagcagctgcgggagaagcaggagatgatccagctgctgcggcggggggaggtgcagtgggtggaggaggagaagagggacctggagggcatccgggagagcctgctgcgggtgaaggaggcccgggctggaggagatgaagatggagaggagctggagaaggcccagctgcgcttctttgagttcaagaggcggcagctggtgaagctggtgaacctggagaaggacctggtgcagcagaaggacatcctgaagaaggaggtgcaggaggagcaggagatcctggagtgcctgaagtgtgaacatgacaaggagagccggctgctggagaagcatgatgaatctgtgacagatgtgacagaggtgccccaggactttgagaagatcaagcctgtggagtaccgcctgcagtacaaggagcggcagctgcagtacctgctgcagaaccacctgcccaccctgctggaggagaagcagagggcctttgagatcctggaccggggccccctgagcctggacaacaccctgtaccaggtggagaaggagatggaggagaaggaggagcagctggcccagtaccaggccaatgccaaccagctgcagaagctgcaggccacctttgagttcaccgccaacatcgcccggcaggaggagaaggtgaggaagaaggagaaggagatcctggagagccgggagaagcagcagcgggaggccctggagcgggccctggcccggctggagcggcggcacagcgccctgcagaggcacagcaccctgggcatggagattgaggagcagaggcagaagctggccagcctgaacagcggcagccgggagcagagcggcctgcaggccagcctggaggccgagcaggaggccctggagaaggaccaggagcggctggagtatgagatccagcagctgaagcagaagatctatgaggtggatggagtgcagaaggaccaccacggcaccctggagggcaaggtggccagcagcagcctgcctgtgtctgctgagaagagccacctggtgcccctgatggatgcccgcatcaatgcctacatcgaggaggaggtgcagaggcggctgcaggacctgcacagggtcatcagcgagggctgcagcaccagcgctgacaccatgaaggacaatgagaagctgcacaacggcaccatccagaggaagctgaagtatgagctgtgccgggacctgctgtgtgtgctgatgcctgagccagatgctgctgcctgtgccaaccaccccctgctgcagcaggacctggtgcagctgagcctggactggaagacagagatcccagacctggtgctgcccaacggggtgcaggtgagcagcaagttccagaccaccctggtggacatgatctacttcctgcacggcaacatggaggtgaatgtgcccagcctggccgaggtgcagctgctgctgtacaccaccgtgaaggtgatgggagacagcggccatgaccagtgccagagcctggtgctgctgaacacccacatcgccctggtgaaggaggactgtgtgttctacccccgcatccgcagcaggaacatccccccacctggggcccagtttgatgtgatcaagtgccacgccctgtctgagttccgctgtgtggtggtgcctgagaagaagaatgtgtccacagtggagctggtgttcctgcagaagctgaagcccagcgtgggcagcaggaacagccccccagagcacctgcaggaggccccaaatgtgcagctgttcaccacccccctgtacctgcagggcagccagaatgtggcccctgaggtgtggaagctgaccttcaacagccaggatgaggccctgtggctgatcagccacctgacccggctgtag

SEQ ID NO: 78608 - DNA, 3486 bp, Artificial Sequence
  derived and/or modified sequence
atggccagcgtgaaggtggccgtgcgggtgcggcccatgaaccggagggagaaggatctggaggcaaagttcattatccagatggagaagtcaaaaaccacaatcacaaatctgaagattcctgaggggggcaccggagattcaggccgggaaaggaccaagacatttacctacgactttagcttctacagtgccgacaccaagagccccgattatgtctcacaagagatggtttttaaaactctcggcactgacgtggtcaagtccgccttcgagggctacaatgcttgcgtttttgcatacgggcagacaggctctggcaaatcctacaccatgatgggcaactctggggacagcggattgatcccacggatctgcgagggtttgttttccagaataaacgagacaacaagatgggatgaggcctcattccggacagaagtctcctacctcgaaatctataatgaacgcgtaagagacttactacggagaaaatcttccaaaacctttaacttacgcgtgcgtgagcaccctaaagagggaccatatgtggaagacctgtcaaagcatctcgtccaaaactacggggacgtggaagagctaatggatgccggaaacattaacagaactaccgctgcgacagggatgaatgacgtttccagcaggagccatgctattttcacaatcaagttcacccaggctaagttcgactcggagatgccatgtgagacggttagtaaaatccatctggtcgacctggcaggcagcgaaagagcagatgctacaggagcgacaggagtaagattgaaggaaggcggaaacattaacaagagtttagtcaccctcggtaacgttatctccgctttggccgacctgtctcaggatgctgctaacaccctcgccaagaagaaacaggtgttcgtgccgtacagggatagcgtcctcacatggttgttaaaagattcactgggtgggaactccaaaactatcatgatcgcaacaatttctcccgctgatgtgaattacggggaaactttgagcacattgaggtacgcaaaccgcgcaaaaaacataatcaataagcctaccatcaatgaggacgctaatgtaaaattaattagagagctgagggccgagatagctagactcaagacactcctcgctcagggaaaccagatcgcacttctggacagccctacagcattgtccatggaggaaaagctccaacagaatgaggcgcgcgttcaggagctgacaaaggaatggacaaataaatggaacgaaacccagaacattcttaaagaacagacactggccctacgcaaggaaggaatcggagtggtcttagactccgaactccctcacctaattggaattgacgacgacttgctgtccacaggtattatcctttatcaccttaaggaaggccagacatatgttggtagagatgacgcctccaccgagcaagatattgtccttcatggcctggatctcgagagtgagcactgcatcttcgagaatattggagggacagtcactttgatacctctatcgggctctcaatgctccgtaaatggagtgcaaatcgtcgaagctacccatctgaatcaaggcgcagtaatcctcctgggaagaaccaacatgttccggtttaatcaccctaaggaggccgccaagctgagagagaagcgcaagtccggactgctctcctctttcagcttgagtatgacggacctgtcaaaaagccgggagaatctgagtgctgttatgttgtacaatcccgggctcgagttcgagaggcagcagcgagaggagctggaaaagctggagagcaaaaggaagctgatcgaggaaatggaggaaaaacagaaaagcgacaaagccgaattggagagaatgcaacaggaagtagaaacccagcggaaagagacagagattgtgcagctgcagatccgcaagcaggaagagtccctgaaacggcggagcttccacatcgaaaataagttgaaagaccttcttgccgaaaaggagaagtttgaggaagagcgcttgaaggatctggtgcaacaaaaggatatactgaaaaaggaagtgcaggaggagcaggagattttggaatgcctgaaatgtgaacacgacaaggagtccagactcctcgagaagcacgatgagtctgtgacagatgtgactgaggttccacaagacttcgagaaaattaagcccgtggagtacaggttgcagtacaaagaaaggcagttgcaatatctgctgcagaaccaccttcctacccttctcgaggagaagcagcgggccttcgaaatcctcgatagaggaccgctgagtctggataatacgctgtaccaagtcgagaaggaaatggaggagaaagaggagcagctggcacagtaccaggccaacgcaaaccagctccaaaagttgcaggccacattcgagttcactgccaatatcgccagacaagaggaaaaagtccggaagaaagaaaaggagatccttgagagccgcgagaagcagcaaagggaagcactggaacgggccttggctcgtctggagagacgacacagtgcccttcaacggcactccaccttgggaatggagatcgaagagcagcgacaaaaactcgcgagccttaatagtggatccagagagcagagtgggctgcaagccagcctggaagccgagcaggaggctctcgaaaaggaccaggagagactggagtacgagattcagcagcttaagcagaagatttatgaagtcgacggtgttcagaaagatcaccatggaacgcttgaaggcaaggtggccagctcttcgctccccgtctctgcagaaaaatcccaccttgtcccacttatggatgctcgaatcaacgcgtacatcgaagaagaagtccagaggcgccttcaagatctgcaccgggttatatctgagggttgtagtacatccgcagacaccatgaaagataatgagaagttgcataatgggacgatccagcgcaaactaaagtacgaacgcatggtaagcaggtctttgggagcgaacccggatgatttgaaggatcctatcaaaatctccataccaagatacgtgctttgcgggcagggcaaggatgctcacttcgaattcgaagtgaagatcaccgtgcttgatgaaacatggacggtcttccggcgttacagtcgcttccgcgagatgcacaagaccctaaagctgaaatacgcagaactggccgccctcgagtttccccccaagaagctgtttggcaacaaagacgagagagtgattgccgaaaggcgctctcacctggaaaagtacttaagggacttcttcagcgttatgcttcagagtgctacttctccactgcacattaataaggttggccttactctttccaaacacacgatttgtgagttttctccattcttcaagaagggggtctttgactattcgtcacatggaaccggctag

SEQ ID NO: 78609 - DNA, 4179 bp, Artificial Sequence
  derived and/or modified sequence
atggccagcgtgaaggtggccgtgcgggtgcggcccatgaaccggagggagaaggatcttgaggccaagttcattatccagatggaaaaaagtaaaacgaccatcacaaatcttaagatccctgaaggtggaaccggggactctggtcgagaacgcactaagactttcacttacgacttcagcttttattctgccgatactaagtctcctgactacgtgtcccaagaaatggtctttaaaacacttggtaccgatgtcgtcaaatctgcctttgaagggtacaatgcttgtgtgttcgcctacggacagacaggcagtgggaagagttacactatgatgggcaattccggagacagcggactgataccccgcatttgtgagggcctatttagcaggattaacgaaaccacccgttgggatgaggcttcattcagaaccgaggtgtcatatctggaaatttacaacgagagagtgcgcgatttgcttagacgaaagagttctaagacattcaacttgcgagttagagaacacccaaaagaagggccttacgtagaggacctgagcaaacacctggtccaaaactatggtgacgtggaggaactgatggacgcgggaaatatcaatagaactacagcagccactggcatgaatgatgtgtcatcaaggagtcacgccatctttaccataaaatttactcaggccaagttcgattcagagatgccgtgcgagacagtgtccaagattcacctcgtggacctggcaggctccgaaagagctgacgccactggcgccacaggcgtccgccttaaggaaggtggcaacattaacaagtcgctggtgactcttggtaacgttatctcagccctagctgatctgtctcaggacgccgcaaatactttagcaaaaaagaagcaggtttttgtcccttacagagatagcgtactgacatggctgctcaaggacagtctgggcggcaactccaagactattatgattgccaccattagccctgctgacgtcaattatggcgaaacactgagtactctgaggtatgccaatcgggccaaaaacattattaacaaacccaccatcaatgaggatgccaatgtgaagctgattcgcgagctgcgcgccgagatcgctcgactgaaaacactgttggcgcagggtaatcagattgccctgctggattcccctacagctttatccatggaagaaaaattacagcagaacgaagcacgtgtgcaggaactgacaaaggaatggaccaacaagtggaacgagacccagaacattctcaaggaacaaacattggcccttagaaaggagggtatcggggttgtattggatagtgaactcccccacctgatcggcatagatgatgatctactgagcaccggtatcattctataccaccttaaagagggacagacatatgtggggcgggacgacgcctccaccgaacaggatattgtgctgcatgggctcgacctggaatcggagcactgcatcttcgaaaacatcggcggcacggtaactctgataccccttagcggatcccagtgtagcgtgaacggagtgcaaatcgtagaggccactcacctgaatcagggcgctgtgatcctcttgggccgtaccaacatgttcaggttcaatcaccctaaggaagcagcaaagctgcgggagaagcgtaagagtggacttctctcttctttctccctttccatgacagacctgtcaaaatcccgtgaaaatctctctgccgtgatgctgtataatcccggtttggagtttgagcgccagcagcgagaggaactggagaagctcgagagtaagagaaagctcatcgaggaaatggaggaaaagcagaagtctgacaaggctgagctcgaaagaatgcagcaggaagtcgaaacgcagagaaaggaaaccgagatagttcagctgcagattcggaaacaggaggagagtctaaagcggcgatccttccatattgagaacaagcttaaagatctcttagccgagaaggagaagttcgaagaggagcggctgagagaacagcaggagattgaattacagaaaaagagacaagaagaggagactttcctgagggtgcaggaggaactgcagcggctcaaagagctcaacaataacgagaaggccgaaaagtttcagatcttccaggaactagatcagctgcagaaggagaaggacgagcagtacgcgaaactcgagctcgagaagaagcgcctggaggaacaggaaaaagagcaggttatgttggtggcacatctggaagagcaactgagggagaaacaggagatgattcagcttttgaggcggggggaagtccagtgggtagaggaggaaaagagggatttggaggggatccgagagtcactgctgcgcgtgaaagaggccagggccggaggagacgaagatggggaggagttggaaaaggcccagttgcggttcttcgaatttaagcggaggcagctggtcaagctggtcaaccttgagaaagacctagtgcagcagaaggacatcctgaagaaggaggttcaagaggaacaggaaattctggagtgcttaaagtgcgaacacgataaagaaagccgtttgttggagaaacatgacgagtcagtgacggacgtgacagaggtgccccaagactttgagaagatcaagcccgtggagtatcggctccagtataaagagcgccagcttcagtacctgcttcagaaccatctgccaacactgctggaggagaaacagagagcattcgaaatcctggatcgcgggcccctgtctctggataatacactgtaccaagtagagaaagagatggaagaaaaggaagaacagctggctcagtatcaggctaacgctaaccagctacagaaactccaggccacattcgagttcaccgccaacatcgcaagacaggaggagaaggtgcggaagaaggaaaaagagatcctggagagccgcgaaaaacaacaaagggaagccctcgagcgggccctggctagacttgagaggcggcattctgcccttcagcggcactcaaccctgggaatggagatcgaggaacagcgccaaaaactggcttcactgaacagtgggtcaagagagcagtctggcttgcaggccagcctcgaagctgagcaggaggccctggagaaggatcaggagcgtttggaatatgaaatacagcagctgaaacagaaaatctacgaagtcgatggcgtgcaaaaggatcatcacggaacactggagggcaaggtagcgagtagcagcctccctgtgtcagcagagaagtcccacctcgttcccctgatggacgcccggattaacgcgtacattgaggaggaagttcagcgcaggttacaagacctccatcgggtcattagcgaagggtgttctacatctgctgacactatgaaggataatgagaaactgcacaacggtaccatccagcgaaaactcaagtatgagctgtgccgggacctgctctgcgtgctgatgcctgagcctgacgctgccgcatgcgctaaccacccacttctgcagcaggatctggtgcagctgtccttagactggaagactgagatacctgacttggttctcccaaacggggtgcaggtgtcttcgaaatttcagaccaccctcgtagatatgatctattttctacacggcaacatggaggtcaacgtgcctagtctggctgaagtgcaacttttactgtatacaaccgttaaagtcatgggcgactccggtcacgaccaatgccagtccctggtgttgctgaacacgcacattgcgttggtcaaggaggactgtgtgttttatcctcgcattcgctccagaaatattccgcctcccggagctcagttcgatgtgattaaatgtcacgccctttccgaatttcgatgtgtcgtggtgcctgaaaaaaaaaatgtgtctacagttgagcttgtcttcctgcagaaactaaaaccatctgttggaagccgcaatagcccccctgaacatctgcaggaggcacccaatgtgcagctcttcactacccccctgtacctgcagggtagccagaacgtcgccccagaggtctggaaactgaccttcaacagccaagatgaagccctatggttgataagtcatctgacccgcttgtag

SEQ ID NO: 78610 - DNA, 3486 bp, Artificial Sequence
  derived and/or modified sequence
atggcctctgtgaaggtggccgtacgcgtgcggcctatgaatcggcgtgagaaggatctggaggccaagtttataatccagatggagaaatctaagacaacgattacgaacctgaagatcccagaggggggaaccggggacagtggcagagaacgcacaaagacattcacatatgatttttctttttattctgccgatacaaaatcccccgattacgtgagccaggagatggtgttcaaaactctgggcaccgacgttgtgaaaagtgcattcgaaggatataacgcctgcgtgtttgcttatgggcagacgggctcagggaaaagctatactatgatgggcaatagtggcgattctggcttaataccgaggatttgcgaggggttgttcagtaggatcaacgaaactacacgctgggacgaagcgagcttccgtaccgaggtatcctatctagaaatctataacgaaagggttagggatcttctccgtagaaaaagttcaaagacttttaacctcagggtccgtgaacatcctaaggagggaccttacgtggaggacctgtctaagcacctggttcagaactacggagatgtggaggaattaatggatgccggtaacattaaccgcacaaccgcagcaacagggatgaatgacgtatccagcaggtcgcacgctattttcacaattaagttcacgcaggccaagttcgactcagagatgccttgcgaaacagtgtcgaagatacacctggttgacctcgccggtagcgagagagcagacgccaccggggctaccggagtccggctaaaggaggggggaaacatcaacaaatcccttgttacattaggcaacgttatctctgcgcttgccgatctgtctcaagacgcggcaaatacacttgccaagaagaaacaggtttttgtgccataccgcgatagcgtgctcacttggctgctgaaagactctttgggcggtaactcgaagaccattatgattgcaactatatctcctgccgacgttaattacggagagacactgtcaaccctgcgatatgcaaacagggcaaagaacattatcaacaagcctacaattaatgaggacgctaacgtcaaattgatcagagaactgcgggctgaaattgcgcgactgaagacattactcgcgcagggcaaccaaattgccctgctcgatagtcccaccgccttaagtatggaggaaaagttgcagcagaatgaagccagagttcaggaactcaccaaagaatggaccaacaagtggaatgagacacagaacattctcaaggagcaaaccttggcgcttaggaaggaggggattggcgtcgtactcgactcggagctgcctcacctgatcggcatcgacgacgatctgctgagcaccgggatcattctttatcaccttaaggaaggccagacctacgtcgggagggacgatgcatcaacagagcaggacatcgtgctccacgggttagatctcgagtctgaacactgcatattcgaaaacattggtggtacagtgaccctgatccccttgagcggatcccagtgtagcgttaatggggtgcagatagtggaagcgacccatctgaaccaaggcgcagtgattctgctgggcaggacaaacatgtttcgttttaatcacccaaaagaggcggctaaactacgcgaaaagaggaagtcgggcctcctgagctcattttcgttatctatgactgacctgtcaaagagccgagagaatctaagtgctgtgatgctctacaaccccggattggagttcgagcggcagcagagggaggagctggaaaaattagaaagcaaaaggaagctgatcgaggaaatggaagaaaagcaaaaaagcgataaggctgagctagagcggatgcagcaggaggtggaaacgcaaaggaaggagaccgaaatcgtccagctgcagatccggaagcaagaggaatccctgaagaggaggtcatttcacatcgagaacaaattgaaagatctgctcgccgagaaagagaaatttgaggaggaaagacttaaagatctagtccagcagaaagacatcctgaaaaaggaggtgcaggaggaacaggaaattcttgagtgtctgaagtgcgagcatgacaaagagagccggctgctggagaaacatgacgaatccgtcaccgatgtgaccgaagtgccccaggatttcgagaagatcaaacccgtagagtaccggttgcaatataaggaaaggcagctccaatatctattgcagaatcaccttccaacactgctagaggagaaacagagagcctttgaaattctcgacaggggacccctatcgctggataacaccctttaccaggtggagaaggaaatggaagagaaggaggagcaattggctcagtatcaggcaaatgcaaaccaactacagaagctgcaagccacctttgagtttaccgcaaatatagcaagacaagaagaaaaagttcgcaagaaagagaaggagatcctggaaagtagggaaaagcagcagcgcgaagcactggagcgcgcactcgctaggctcgagcgcagacattcggctctgcagcgtcacagcaccctcgggatggagatagaggagcagcggcaaaagctggcctctctgaattccgggtcacgggagcagagcgggctccaggcctcattggaggcagagcaggaagctttagaaaaggaccaggagagactcgagtatgagatccagcagctgaagcagaagatttatgaggtggatggtgtgcagaaagatcaccacgggaccctggagggcaaggtggcttctagcagcctaccagtcagcgccgagaaatcccacctggtcccactgatggacgctagaataaatgcctatatcgaggaagaagtgcaacgcagactgcaggacttacacagggtcatcagcgagggatgctcaacgtccgcagacacaatgaaggataacgaaaaattgcacaatggaactatacagcgcaaattgaaatatgaacgtatggtgtctagatccctgggtgccaaccctgatgacctgaaggaccctattaaaattagcatcccgaggtatgtattatgcggtcagggaaaagacgctcactttgagtttgaggtgaaaattactgtactcgatgagacttggacggtatttcgcaggtatagcaggttcagggaaatgcacaaaaccctgaaactcaaatacgccgagttggccgcactagagttccctcctaagaaattgtttgggaacaaggacgagagggttattgctgagagaaggtctcacttggagaaatatcttcgagatttcttctccgtaatgcttcagtctgcaacttcacccctgcacattaacaaggtcggcttgacattatcgaagcacactatctgcgagtttagtccattctttaaaaaaggcgtctttgattactctagccatggtaccggatag

SEQ ID NO: 78611 - DNA, 4179 bp, Artificial Sequence
  derived and/or modified sequence
atggcttcggttaaagtcgccgtccgtgtgcgaccaatgaatcgacgtgaaaaagacctggaggccaaattcataatccagatggagaaatcaaaaacaactataacaaatttaaaaatcccggaaggtggcactggcgacagtggaagagagaggactaaaacctttacctatgacttttctttctatagcgctgataccaagagtcccgactacgttagtcaggagatggtgttcaaaactctgggaactgatgtagttaaatcagcatttgagggctataacgcatgtgtttttgcctatgggcagaccggctccggaaagtcttacaccatgatgggaaattctggcgacagtggcctgatcccaagaatatgtgaaggattattttcacgcattaacgagacgactcggtgggacgaagcgtctttccggaccgaagtatcctatctcgaaatatataatgagcgcgtgagagacctgctcaggagaaagagctccaagacctttaacctcagagtacgggagcatccaaaagaaggcccttatgtggaggatctcagcaagcatctcgtgcagaattacggcgatgtcgaagagctgatggacgctggaaacatcaatagaaccactgccgctactggtatgaacgacgtgtcttcacgatcacatgccatcttcactatcaagttcactcaggccaaatttgactccgagatgccctgtgagaccgtgtcaaaaattcatttagtcgatctggccggttccgaacgtgccgacgccactggtgctaccggcgtcaggctgaaggagggcggtaacatcaataaatccctcgtgacccttgggaatgtgatcagtgcactggccgatctgtcccaagatgccgcaaataccctggcgaagaagaaacaggtcttcgtgccctaccgggatagtgtgctcacttggcttttaaaggactcactcggagggaacagcaagaccataatgatcgctaccatctctccagccgacgtcaactacggggagaccctgtctacccttcgatacgctaacagagccaagaacattatcaataaaccaaccattaacgaggacgccaatgtgaagctgatccgggaactacgcgctgaaattgctcgcttgaaaactctactggcccagggcaatcagattgccctgctagacagtcccaccgccttgtccatggaggaaaagttacaacaaaatgaggcccgtgtgcaggagttgactaaagaatggactaataagtggaatgaaacccagaatattctgaaggagcagactctggccctcagaaaagagggcatcggggtggtgttggatagtgaattgccacaccttatcggcattgatgacgatctcctgtccacaggtattatcctctatcatctgaaagaagggcagacatatgtgggacgggatgatgcctccaccgagcaggacattgtcttgcacggcttagacctggaatcagagcactgtattttcgaaaatatcggaggaactgtcacactgatccccctttcagggtcgcagtgtagcgtgaatggcgtgcagattgtggaggccacccatctcaatcaaggggcagttatcctgctcggtcgtacaaatatgttccgattcaaccatccaaaggaagctgccaaactccgagagaaaaggaagagcgggttactgagctcattctctcttagcatgacagacctgtcaaaatctcgggagaacctttcagccgttatgctctataatcccggtctagagttcgagcggcagcaacgcgaagaactggaaaagctggagtccaaacgcaaattgatcgaagagatggaagagaaacagaaaagcgataaggccgagctcgagcggatgcaacaggaggtggagacgcagcggaaggagacagaaatcgttcagctgcagattcgaaaacaagaagagtctctgaaacgccgaagctttcatattgagaacaagctaaaagatttactggctgagaaggagaagtttgaagaggaacgccttcgtgagcaacaggaaatcgagcttcagaaaaaaagacaggaagaagagacctttctgagagttcaggaagagcttcagcggctaaaagagttgaacaacaacgaaaaagctgagaagtttcagatcttccaggagctggaccagctgcagaaggagaaagatgagcagtacgcgaagctggagctggagaaaaagcgcttggaagaacaggagaaggaacaagtgatgttagtggctcacctagaagaacagcttcgcgagaaacaggagatgatccaactgctccgtcgcggtgaggtacagtgggtggaagaggaaaagcgtgatctagaggggataagggagagccttctgcgggtcaaggaggccagggccggaggagacgaggacggcgaagaactggaaaaagcccagctgaggttttttgaatttaaacgccgacagctcgttaagctggttaatctagagaaggacctcgtgcaacagaaggatatcctcaagaaggaagtacaggaggagcaggaaattctggagtgccttaaatgcgaacacgacaaagagtctcggttgcttgaaaagcacgacgagagcgtgactgatgtgaccgaggtccctcaagactttgagaagatcaaacccgtagagtaccgtctccagtacaaagagcgccaacttcagtacctgctgcagaaccatctgccgacattactcgaggagaagcagagggcctttgaaattctcgaccggggaccactgtcgctcgacaataccctctatcaggtggagaaggagatggaggagaaagaggagcagctcgcgcagtatcaggcaaacgccaatcaattacaaaagctgcaggctacattcgaatttaccgctaatattgccaggcaggaagagaaggtcagaaagaaggagaaggaaatcttggagtctagggaaaaacagcagcgagaggctttggagagagctctcgccagactggaaaggcggcatagcgccctgcaaaggcactcaaccctgggaatggagattgaagaacaaaggcagaagctggccagtctgaactcggggtctagggaacaaagcggtctccaggccagcttagaagccgaacaagaagccttggagaaagaccaagagcgcctggagtacgagattcagcaactaaaacagaaaatttacgaggttgacggcgtgcagaaagaccaccacggtaccctggaagggaaggtggccagctccagcctcccagtatccgccgaaaagagccatctggtcccacttatggatgcgcgtatcaacgcttatattgaggaagaagtgcagcgtcgcttgcaagaccttcacagggtgatcagtgaaggttgcagcacatctgccgacacaatgaaggacaacgagaagctgcacaatggcactattcagcgaaaactgaaatatgagctgtgtcgagacctgttatgtgtcctgatgcctgagcctgacgccgcagcgtgcgctaatcacccactcctgcagcaggatctggtgcagctgtctttggattggaagactgagatccctgatcttgtgctgccaaatggagtgcaggtaagctcaaaattccaaaccacactcgtggacatgatatacttccttcatgggaatatggaggtgaacgttccctccctcgcagaggtgcagctgctgctctataccactgttaaggtgatgggtgacagcggacacgaccagtgccagtcactcgtgctgcttaatacccacatcgctctcgtgaaagaagactgcgttttttatcctagaattcgctcacgaaacattccccctccaggtgcgcaattcgatgttattaagtgccacgccctctcagagtttaggtgtgtagtggttcccgaaaagaaaaatgtctcgacggtagaactcgtctttttgcaaaagctcaagccatcagttggaagcaggaatagccctccagagcacttgcaggaggcccctaatgtccagctcttcactaccccactgtacctgcagggttcccaaaatgtggcccctgaggtgtggaaactgactttcaactcccaggatgaagcgttatggctgatttcacatctaacacgcctttag

SEQ ID NO: 78612 - protein, 752 aa, Artificial Sequence
  derived and/or modified sequence
MSSRTVLAPGNDRNSDTHGTLGSGRSSDKGPSWSSRSLGARCRNSIASCPEEQPHVGNYRLLRTIGKGNFAKVKLARHILTGREVAIKIIDKTQLNPSSLQKLFREVRIMKGLNHPNIVKLFEVIETEKTLYLVMEYASAGEVFDYLVSHGRMKEKEARAKFRQIVSAVHYCHQKNIVHRDLKAENLLLDAEANIKIADFGFSNEFTLGSKLDTFCGSPPYAAPELFQGKKYDGPEVDIWSLGVILYTLVSGSLPFDGHNLKELRERVLRGKYRVPFYMSTDCESILRRFLVLNPAKRCTLEQIMKDKWINIGYEGEELKPYTEPEEDFGDTKRIEVMVGMGYTREEIKESLTSQKYNEVTATYLLLGRKTEEGGDRGAPGLALARVRAPSDTTNGTSSSKGTSHSKGQRSSSSTYHRQRRHSDFCGPSPAPLHPKRSPTSTGEAELKEERLPGRKASCSTAGSGSRGLPPSSPMVSSAHNPNKAEIPERRKDSTSTPNNLPPSMMTRRNTYVCTERPGAERPSLLPNGKENSSGTPRVPPASPSSHSLAPPSGERSRLARGSTIRSTFHGGQVRDRRAGGGGGGGVQNGPPASPTLAHEAAPLPAGRPRPTTNLFTKLTSKLTRRVADEPERIGGPEVTSCHLPWDQTETAPRLLRFPWSVKLTSSRPPEALMAALRQATAAARCRCRQPQPFLLACLHGGAGGPEPLSHFEVEVCQLPRPGLRGVLFRRVAGTALAFRTLVTRISNDLEL

SEQ ID NO: 78613 - DNA, 2259 bp, Artificial Sequence
  derived and/or modified sequence
atgtcctcccggacggtgctagctccaggcaatgacaggaactcagacacccacggaactctcgggtccggcagatctagcgacaagggaccttcatggagcagcagatcattgggcgcgcggtgccgaaattcaattgccagctgtccagaggaacagccgcacgttgggaattacagactgctgcgaactattgggaagggtaactttgcgaaagtgaaattagcccgtcacatcctgacaggcagggaggtcgcaattaagatcatagataaaactcagctgaatcccagcagcttgcagaagctttttcgtgaggtgcggattatgaaagggctgaatcacccaaatatagtgaagctgttcgaagtcatcgagacggagaagacactctacctggtgatggagtacgcgtcagccggagaggtatttgattacctagtgtcccacggtcgcatgaaagaaaaggaggccagggccaaattccgccaaattgtgtcagccgtacactattgccaccagaagaatattgtccatagggacctaaaagccgaaaacttattgttggacgccgaggctaatattaagattgctgattttggtttttccaatgagtttactctcgggtccaaactggatacattttgcgggtctccaccatatgcagctcctgaattattccagggaaaaaaatatgatgggccagaggtggacatctggagtctgggtgtaattctgtatacactggtgagcggctctctgcccttcgacgggcacaacctgaaggagctcagggaaagggtgcttcgtggtaagtacagggtgccattttacatgagcaccgactgcgagtctatcctgaggaggtttctggtgctcaatcctgccaagaggtgcacactggagcagattatgaaggataaatggataaacatagggtacgaaggggaagagctgaaaccttacaccgagccagaggaagattttggagataccaaacgaatagaggtgatggttggaatgggttatacacgcgaagagatcaaagagtccctgacaagtcagaagtacaacgaggtgaccgctacttatctcctcctgggacgaaaaactgaagagggtggtgacagaggggcccctggcctagcgctggctcgggtcagggctccaagcgacacaaccaacggcacttctagcagtaaggggacatcccatagcaaaggccagagaagctcctctagtacctatcaccgtcagagacggcattctgatttctgcggcccatcccctgcgcctctccatcctaaaaggagccccaccagtaccggcgaagctgagcttaaggaggaacgtctcccggggcggaaggctagctgctcaaccgccgggtccggttcaaggggactccccccttcttctccaatggtgtcctcagcacataacccaaacaaagcagagatccccgagcgccgaaaagactctaccagtacgcctaataatttaccaccttctatgatgacaaggagaaacacttacgtatgcactgaacgcccaggagcagaaagaccctctttattacctaatggtaaggagaattcaagcggcacaccccgtgtgcccccggctagcccttcatcacacagcctggcccctcctagtggagaacgatcccgactagccaggggctctaccatccgctctactttccatggtgggcaggtgagggacaggcgggccgggggcggtgggggcggtggggtccagaatggccctccagcttctccgacgcttgcccacgaggcagctccactcccggccgggcgccctagacctaccaccaacctgttcaccaagcttacctccaaactgacacggcgcgtggcggatgaaccagaacgcatcggcggcccagaagttacctcatgccacctcccttgggatcagacagagactgctccccggctactcagattcccatggagcgtgaaactgacaagttccagaccccctgaagctttaatggctgctctccgtcaggctacggcggccgctagatgtaggtgtcggcagccacagcctttcctgctggcatgcctgcatggcggtgcagggggtcccgaaccactgagccatttcgaagttgaagtctgccagctgccacggccggggctgagaggcgtactgttccgaagagtagccggaacagcgttggctttccgtactctggtgactaggattagcaatgacttggaactatag

SEQ ID NO: 78614 - DNA, 2259 bp, Artificial Sequence
  derived and/or modified sequence
atgagcagcaggacagtgctggcccctggaaatgacaggaacagcgacacccacggcaccctgggcagcggccgcagcagtgacaagggccccagctggagcagccgcagcctgggcgcccgctgcagaaattccatcgccagctgcccagaggagcagccccacgtgggcaactaccgcctgctgcggaccatcggcaaaggaaactttgccaaggtgaagctggcccggcacatcctgaccggccgggaggtggccatcaagatcatcgacaagacccagctgaaccccagcagcctgcagaagctgttccgggaggtgcgcatcatgaagggcctgaaccaccccaacatcgtgaagctgtttgaggtgattgaaacagagaagaccctgtacctggtgatggagtatgccagcgctggggaggtgtttgactacctggtgagccacggccgcatgaaggagaaggaggcccgggccaagttccggcagatcgtgtctgctgtgcactactgccaccagaagaacatcgtgcaccgggacctgaaggccgagaacctgctgctggatgctgaggccaacatcaagattgctgactttggcttcagcaatgagttcaccctgggcagcaagctggacaccttctgtggcagccccccctatgctgcccctgagctgttccagggcaagaagtatgatggccctgaggtggacatctggagcctgggcgtcatcctgtacaccctggtgtctggcagcctgccctttgatggccacaacctgaaggagctgcgggagcgggtgctgcggggcaagtacagagtgcccttctacatgagcacagactgtgagagcatcctgcggcgcttcctggtgctgaacccagccaagcgctgcaccctggagcagatcatgaaggacaagtggatcaacatcggctatgaaggagaggagctgaagccctacacagagccagaagaagattttggagacaccaagagaattgaggtgatggtgggcatgggctacacccgggaggagatcaaggagagcctgaccagccagaagtacaatgaggtgacagccacctacctgctgctgggcaggaagacagaggagggcggggacagaggagcccctggcctggccctggcccgggtgcgggcccccagcgacaccaccaacggcaccagcagcagcaagggcaccagccacagcaagggccagaggagcagcagcagcacctaccaccggcagaggaggcacagcgacttctgtggccccagccctgcccccctgcaccccaagaggagccccaccagcactggagaggccgagctgaaggaggagcggctgcccggcaggaaggccagctgcagcacagctggcagcggcagccggggcctgccccccagcagccccatggtgagcagcgcccacaaccccaacaaggccgagatccctgagaggaggaaggacagcaccagcacccccaacaacctgccccccagcatgatgaccaggaggaacacctacgtgtgcacagagaggcctggagctgagcggcccagcctgctgcccaacgggaaggagaacagcagcggcaccccccgggtgcccccagccagccccagcagccacagcctggcccctccttctggagagaggagccggctggcccggggcagcaccatccgcagcaccttccacggcggccaggtgcgggacagaagagctgggggcggcggcggcggcggcgtgcagaatggacctccagccagccccaccctggcccatgaagctgcccccctgcctgctggccggccccggcccaccaccaacctcttcaccaagctgaccagcaagctgaccaggagagtggctgatgagcctgagcgcatcggcggccctgaggtgaccagctgccacctgccctgggaccagacagaaacagccccccggctgctgcgcttcccctggagcgtgaagctgaccagcagcaggcctcctgaggccctgatggccgccctgcggcaggccacagctgctgcccgctgccgctgccggcagccccagcccttcctgctggcctgcctgcacggcggggccggcggccctgagcccctgagccactttgaggtggaggtgtgccagctgccccggcccggcctgcggggcgtgctcttccggcgggtggccggcacagccctggccttccgcaccctggtgacccgcatcagcaatgacctggagctgtag

SEQ ID NO: 78615 - DNA, 4837 bp, Artificial Sequence
  derived and/or modified sequence
agaagatgtcttcgcggacggtgctggccccgggcaacgatcggaactcggacacgcatggcaccttgggcagtggccgctcctcggacaaaggcccgtcctggtccagccgctcactgggtgcccgttgccggaactccatcgcctcctgtcccgaggagcagccccacgtgggcaactaccgcctgctgaggaccattgggaagggcaactttgccaaagtcaagctggctcggcacatcctcactggtcgggaggttgccatcaagattatcgacaaaacccagctgaatcccagcagcctgcagaagctgttccgagaagtccgcatcatgaagggcctaaaccaccccaacatcgtgaagctctttgaggtgattgagactgagaagacgctgtacctggtgatggagtacgcaagtgctggagaagtgtttgactacctcgtgtcgcatggccgcatgaaggagaaggaagctcgagccaagttccgacagattgtttcggctgtgcactattgtcaccagaaaaatattgtacacagggacctgaaggctgagaacctcttgctggatgccgaggccaacatcaagattgctgactttggcttcagcaacgagttcacgctgggatcgaagctggacacgttctgcgggagccccccatatgccgccccggagctgtttcagggcaagaagtacgacgggccggaggtggacatctggagcctgggagtcatcctgtacaccctcgtcagcggctccctgcccttcgacgggcacaacctcaaggagctgcgggagcgagtactcagagggaagtaccgggtccctttctacatgtcaacagactgtgagagcatcctgcggagatttttggtgctgaacccagctaaacgctgtactctcgagcaaatcatgaaagacaaatggatcaacatcggctatgagggtgaggagttgaagccatacacagagcccgaggaggacttcggggacaccaagagaattgaggtgatggtgggtatgggctacacacgggaagaaatcaaagagtccttgaccagccagaagtacaacgaagtgaccgccacctacctcctgctgggcaggaagactgaggagggtggggaccggggcgccccagggctggccctggcacgggtgcgggcgcccagcgacaccaccaacggaacaagttccagcaaaggcaccagccacagcaaagggcagcggagttcctcttccacctaccaccgccagcgcaggcatagcgatttctgtggcccatcccctgcacccctgcaccccaaacgcagcccgacgagcacgggggaggcggagctgaaggaggagcggctgccaggccggaaggcgagctgcagcaccgcggggagtgggagtcgagggctgcccccctccagccccatggtcagcagcgcccacaaccccaacaaggcagagatcccagagcggcggaaggacagcacgagcacccccaacaacctccctcctagcatgatgacccgcagaaacacctacgtttgcacagaacgcccgggggctgagcgcccgtcactgttgccaaatgggaaagaaaacagctcaggcaccccacgggtgccccctgcctccccctccagtcacagcctggcacccccatcaggggagcggagccgcctggcacgtggttccaccatccgcagcaccttccatggtggccaggtccgggaccggcgggcagggggtgggggtggtgggggtgtgcagaatgggccccctgcctctcccacactggcccatgaggctgcacccctgcccgccgggcggccccgccccaccaccaacctcttcaccaagctgacctccaaactgacccgaagggtcgcagacgaacctgagagaatcgggggacctgaggtcacaagttgccatctaccttgggatcaaacggaaaccgccccccggctgctccgattcccctggagtgtgaagctgaccagctcgcgccctcctgaggccctgatggcagctctgcgccaggccacagcagccgcccgctgccgctgccgccagccacagccgttcctgctggcctgcctgcacgggggtgcgggcgggcccgagcccctgtcccacttcgaagtggaggtctgccagctgccccggccaggcttgcggggagttctcttccgccgtgtggcgggcaccgccctggccttccgcaccctcgtcacccgcatctccaacgacctcgagctctgagccaccacggtcccagggcccttactcttcctctcccttgtcgccttcacttctacaggaggggaaggggccagggaggggattctccctttatcatcacctcagtttccctgaattatatttgggggcaaagattgtcccctctgctgttctctggggccgctcagcacagaagaaggatgagggggctcagcggggggagctggcaccttcctggagcctccagccagtcctgtcctccctcgccctaccaagagggcacctgaggagactttggggacagggcaggggcagggagggaaactgaggaaatcttccattcctcccaacagctcaaaattaggccttgggcaggggcagggagagctgctgagcctaaagactggagaatctgggggactgggagtgggggtcagagaggcagattccttcccctcccgtcccctcacgctcaaacccccacttcctgccccaggctggcgcggggcactttgtacaaatccttgtaaataccccacaccctcccctctgcaaaggtctcttgaggagctgccgctgtcacctacggtttttaagttattacaccccgaccctcctcctgtcagccccctcacctgcagcctgttgcccaataaatttaagagagtccccccctccccaatgctgaccctaggattttccttccctgccctcacctgcaaatgagttaaagaagaggcgtgggaatccaggcagtggtttttcctttcggagcctcggttttctcatctgcagaatgggagcggtgggggtgggaaggtaaggatggtcgtggaagaaggcaggatggaactcggcctcatccccgaggccccagttcctatatcgggccccccattcatccactcacactcccagccaccatgttacactggactctaagccacttcttactccagtagtaaatttattcaataaacaatcattgacccatgcctactccatgccaggcccagtgctggacacagagacatgaagctctgtctgtgggagacagggattctgacacagacaccggacaaaccattgtcttggggagcccagaagagaaagtgggcagggtggggtcattggggaagatgctctagaggaattaatgctggaatggggtgttgaaggatgagtaggagttagttaggcattgagtttgccctgggcaaaagcccagaagtgggagtatgtggtatatcttcagagaactgggtaatttcagtgtggctgctgtgttgggcatggatggagaatcagcaagagaaatgctgtattaggactaataatccatctacgctgcttaagcaaaaaggtatttgttggtttatgttacttaatagtccaggggcacctggcttcaggtaggtttgatccaggcatcaggccattgcatctattttttcagtgtaagttgaattctagtaatttttatcaagtaagggctcctttcctggtggcacagatgacttcagcagttagaagtttctatccctccagctttctgcagcagaaagaccctcattgtcagtttcccagcaaaagtcccagggcagactctcattggcccaaatgggccatgtgattttctctaaaccaatcactgtgactctagagtggccagactcagagctgcacttagtaggggttcctcaaaggaaggtcaagtgtcatgagcaggagaaaaggcatgggagctggacagattatagtggttgaagtctgtgcagtacagaagggcggagcttattcacacagcacctttggggccaaaatgaataagctggactttctccccatggcactggggaaccatggaagttcagggaacttcagggaagaggcttggtcaattcctgagagcatcctctgtgctggggacacagtggtaatcaagacagccccaacactgccctcatagagctcacagtccaatggaggaggcagatgtgtcctcaggcagcgactgggcagggctggtataggggagtccagaggtgatgcctgcctcagccagggagggcttcctggaggagaaggagccagctagacatggataggagtgcgttttaggcacagcaaatggcacatacaagggccagggagcaagagagaggacaggtcctcaacaaatggcatgtgactttgtaagtgtagaattgctgtgaggtatggggctaggggcgtcagtagggccttgaaggttatggacaggggcctgggctttcttccaagggcactgggggagccatggcaaggttgtaggtagggtagagatgggcgggtttgtgctatgtgcagggtggaagggagggaagttgacaggtcagaagatcaggaaagaggtcggggctggacagatggggagagcgcagatagatttaagagagtcctgtgaggcaaagtgggcaggacctggtaacaggtgtctggactgtggctttggctggctcagaaggtccccactggcgtgtgtggtctatgtagcctctgggtgtggagctgggatcttcaactggggacagtacagtaaagaacatcacagc

SEQ ID NO: 78616 - DNA, 2259 bp, Artificial Sequence
  derived and/or modified sequence
atgagcagccggaccgtgctggcccccggcaacgaccggaacagcgatacacatggcactctcggttcaggccgcagcagtgacaaagggccttcatggagttctaggagcttaggggccagatgccgtaactctatcgcatcctgtcctgaggaacaaccccacgtaggtaattacaggcttctccgcactatcgggaagggcaacttcgccaaggtgaaactcgcgcggcacatcctcacaggtcgggaggtggcaatcaaaataatagataagacacaactgaatcctagcagcctgcaaaagctgtttcgggaagtgagaatcatgaaaggcctcaatcaccctaacatagtcaaactatttgaggtcatagaaaccgagaagactctgtacttagttatggagtatgcttccgccggcgaggtctttgactacctcgtgagtcacggtcggatgaaggagaaagaggcaagggcgaaatttcggcagatcgttagtgccgtgcactattgtcatcaaaaaaatatcgtccacagagacttaaaggccgagaatctgctgcttgatgctgaagccaacatcaaaattgccgatttcggcttctctaacgagtttaccctgggttccaaactcgatactttttgtggcagccctccatacgcagcacccgagctctttcaaggtaagaagtacgatggaccagaagttgacatttggagtctgggagtgatcctgtataccctggtatcagggagcctgcccttcgatggtcacaatctgaaggaactgcgggaaagggtgctgcggggtaaatatcgggtccctttctacatgagcacagactgtgagtcaatcctacgcaggtttctagtgctcaatccagctaaacgttgcacgctggaacagataatgaaggacaagtggatcaacataggctatgaaggcgaggagctgaaaccttacaccgaacctgaggaagattttggagataccaagagaattgaggtcatggtcgggatgggttacacccgcgaggagattaaagaatccctgacctcccagaagtacaatgaggtgaccgcaacatacctgctgctcggccggaaaacagaggaggggggcgaccgcggagcgccaggcctggccctagctcgagtgagggctccatctgacacaactaatgggacgagcagtagcaagggcacaagtcatagtaaaggacaacggagttcaagtagcacgtaccaccgccagcgtcggcactctgacttttgtggcccgtcccccgctcctctgcaccctaaacggtcacctacctccacaggtgaagctgaactgaaggaggagaggctccctgggcgaaaggccagctgctctacagctgggagtgggtcaagggggctgccccccagcagccctatggtgtcctccgcccataacccgaacaaggccgaaattccggaacgtcgtaaggatagcacaagcacgccaaacaatctacctccgtctatgatgacgcgccgcaatacatatgtgtgcaccgagagaccaggggctgagagaccgtccctgctgccgaacgggaaagagaactcctcaggaactcctagggtgccgccggcttctccaagctcgcattctctggccccgcccagcggcgagcgaagccgtctggcacgaggcagtacgattaggagtaccttccacggcggccaagttagggaccggcgggccggtggaggaggcggcggaggagttcagaatggacctcccgctagcccaaccctggcccatgaggcagctccactaccagcagggcggccccgacctacgaccaatctgtttacaaagctgacttcaaagcttacacggcgtgtcgccgatgagcctgaacgcataggaggccccgaggtgacctcttgccacttgccatgggaccagactgagacagcccctaggctgctccgattcccttggagcgtgaaactgacatcctccagacctcccgaagcacttatggccgccctccgccaggccactgcggccgctcggtgcaggtgcagacagccccaaccctttttgctggcttgtttacacggcggtgctggggggcccgagccgctgtcccactttgaggtagaagtctgtcaattgccccggcctggcctgcggggggtgttgttcaggagggtggcggggactgccctggcttttagaaccctcgtaactcggatatctaatgatctggaactctag

SEQ ID NO: 78617 - DNA, 2259 bp, Artificial Sequence
  derived and/or modified sequence
atgtcgagtcggactgtcctggctccgggaaatgacaggaatagcgatacgcacggtactcttgggtctggacggtcctcagacaaaggaccaagttggtcttccagatcccttggggcacgctgtcggaattcaattgcatcctgcccagaggagcaaccacacgttgggaactatcggctgctacgtacaatagggaaggggaatttcgctaaggtgaagctcgcacggcatatactgacaggacgcgaggttgctatcaagatcatagataagactcagctcaacccttctagcctgcaaaaactttttcgcgaggttagaatcatgaaaggactcaaccatcccaacatcgtcaaacttttcgaagtgattgagaccgagaaaaccctgtatcttgtgatggagtatgcttcagccggtgaggtgttcgactatctcgtgagccacgggaggatgaaggaaaaggaggctcgagccaagttccgccagattgtttccgcggtgcactattgccaccagaagaacattgttcaccgtgatctgaaggcagagaacctgctgctcgacgccgaagccaacattaagattgccgactttggcttctctaacgagttcaccctgggtagcaagctagacaccttttgcgggagtccaccctatgcagcacctgagctatttcaaggcaagaaatatgacggtcccgaggtcgatatctggtcactgggagtcatactgtacaccctggttagcgggagcctccctttcgatgggcataacctgaaggagttacgcgagagggtcctgagaggcaaatacagggttccattttacatgtccaccgattgcgaaagtatacttaggcgtttcctagtgcttaatccagctaagcgctgcacgctcgagcagattatgaaagacaagtggatcaatatcggttacgaaggggaggagttaaagccttacacagaacctgaagaggactttggcgacaccaagcggatcgaagtaatggtcggcatgggttacactcgcgaggagatcaaggagagtctaacctcacagaaatacaacgaggtaaccgcaacttatctattattagggcgtaagacagaagagggtggagaccggggtgctccagggctcgcgttggctcgggttagagcgccttcagacactaccaacgggacaagctcgtccaagggaacctcccactctaaggggcaaaggtctagcagctcaacgtaccatcgccagcgaagacattccgatttttgtggaccgtcccctgcacccctgcaccccaaaaggagtcctactagtacaggcgaagcagaactgaaggaggagcggctcccaggaaggaaagcctcgtgtagtaccgctgggagtggctcccgcggactgccaccttcgagcccgatggtgtcgtcagcccacaacccgaacaaggccgaaatccccgagcgcagaaaggactccacatcgacgcctaacaatcttccgccttcgatgatgacgcgacgaaatacatacgtgtgcactgaacgccctggggcagagaggccttcccttctccccaatggcaaggagaacagttcaggcaccccaagggtgccacccgcatccccaagcagccacagtttagcccctccgagtggcgagcgcagccgcctcgccagaggatccacaattcgcagcacattccatgggggacaggtgcgcgatcgcagggctgggggaggcggaggcggtggcgtgcagaatggccctcccgctagccctacgcttgctcatgaggctgctcctctgccggctggtcgccctcgcccaaccaccaacctgttcaccaagttgacctcgaagttaacccggagggttgcggacgagcctgagcgcattggcggtcccgaggtgacctcttgtcacctaccctgggatcagaccgagactgcccctcgtctgctcaggttcccttggtcagtgaagctgacttctagccggccacccgaagccctgatggccgctttgcggcaggcaactgccgcagctagatgtcgctgccgacagcctcagcccttcttgctggcctgtctgcatgggggtgcaggaggcccagagcctctcagccacttcgaggtcgaggtttgtcagctacctcgcccaggtttgaggggtgtgcttttcagacgtgtggccggaactgcactcgcttttaggacattggtcacgagaatctcaaatgacctggaattgtag

SEQ ID NO: 78618 - DNA, 2259 bp, Artificial Sequence
  derived and/or modified sequence
atgagcagcagaaccgtgctggcccccggcaacgacagaaacagcgacacccacggcaccctgggcagcggcagaagcagcgacaagggccccagctggagcagcagaagcctgggcgccagatgcagaaacagcatcgccagctgccccgaggagcagccccacgtgggcaactacagactgctgagaaccatcggcaagggcaacttcgccaaggtgaagctggccagacacatcctgaccggcagagaggtggccatcaagatcatcgacaagacccagctgaaccccagcagcctgcagaagctgttcagagaggtgagaatcatgaagggcctgaaccaccccaacatcgtgaagctgttcgaggtgatcgagaccgagaagaccctgtacctggtgatggagtacgccagcgccggcgaggtgttcgactacctggtgagccacggcagaatgaaggagaaggaggccagagccaagttcagacagatcgtgagcgccgtgcactactgccaccagaagaacatcgtgcacagagacctgaaggccgagaacctgctgctggacgccgaggccaacatcaagatcgccgacttcggcttcagcaacgagttcaccctgggcagcaagctggacaccttctgcggcagccccccctacgccgcccccgagctgttccagggcaagaagtacgacggccccgaggtggacatctggagcctgggcgtgatcctgtacaccctggtgagcggcagcctgcccttcgacggccacaacctgaaggagctgagagagagagtgctgagaggcaagtacagagtgcccttctacatgagcaccgactgcgagagcatcctgagaagattcctggtgctgaaccccgccaagagatgcaccctggagcagatcatgaaggacaagtggatcaacatcggctacgagggcgaggagctgaagccctacaccgagcccgaggaggacttcggcgacaccaagagaatcgaggtgatggtgggcatgggctacaccagagaggagatcaaggagagcctgaccagccagaagtacaacgaggtgaccgccacctacctgctgctgggcagaaagaccgaggagggcggcgacagaggcgcccccggcctggccctggccagagtgagagcccccagcgacaccaccaacggcaccagcagcagcaagggcaccagccacagcaagggccagagaagcagcagcagcacctaccacagacagagaagacacagcgacttctgcggccccagccccgcccccctgcaccccaagagaagccccaccagcaccggcgaggccgagctgaaggaggagagactgcccggcagaaaggccagctgcagcaccgccggcagcggcagcagaggcctgccccccagcagccccatggtgagcagcgcccacaaccccaacaaggccgagatccccgagagaagaaaggacagcaccagcacccccaacaacctgccccccagcatgatgaccagaagaaacacctacgtgtgcaccgagagacccggcgccgagagacccagcctgctgcccaacggcaaggagaacagcagcggcacccccagagtgccccccgccagccccagcagccacagcctggccccccccagcggcgagagaagcagactggccagaggcagcaccatcagaagcaccttccacggcggccaggtgagagacagaagagccggcggcggcggcggcggcggcgtgcagaacggcccccccgccagccccaccctggcccacgaggccgcccccctgcccgccggcagacccagacccaccaccaacctgttcaccaagctgaccagcaagctgaccagaagagtggccgacgagcccgagagaatcggcggccccgaggtgaccagctgccacctgccctgggaccagaccgagaccgcccccagactgctgagattcccctggagcgtgaagctgaccagcagcagaccccccgaggccctgatggccgccctgagacaggccaccgccgccgccagatgcagatgcagacagccccagcccttcctgctggcctgcctgcacggcggcgccggcggccccgagcccctgagccacttcgaggtggaggtgtgccagctgcccagacccggcctgagaggcgtgctgttcagaagagtggccggcaccgccctggccttcagaaccctggtgaccagaatcagcaacgacctggagctgtag

SEQ ID NO: 78619 - DNA, 687 bp, Artificial Sequence
  derived and/or modified sequence
atggacatcggcctgaccaacgagaagcccaaccccgagctgagctacagcggcagcttccagcccgcccccggcaacaagaccgtgaccatgatccccgactacaacctgtaccaccaccccaacgacatgggcagcatccccgagcacaagcccttccagggcatggaccccatcagagtgaaccccccccccatcacccccctggagaccatcaaggccttcaaggacaagcagatccaccccggcttcggcagcctgccccagccccccctgaccctgaagcccatcagacccagaaagtaccccaacagacccagcaagacccccctgcacgagagaccccacgcctgccccgccgagggctgcgacagaagattcagcagaagcgacgagctgaccagacacctgagaatccacaccggccacaagcccttccagtgcagaatctgcatgagaagcttcagcagaagcgaccacctgaccacccacatcagaacccacaccggcgagaagcccttcgcctgcgagttctgcggcagaaagttcgccagaagcgacgagagaaagagacacgccaagatccacctgaagcagaaggagaagaaggccgagaagggcggcgcccccagcgccagcagcgccccccccgtgagcctggcccccgtggtgaccacctgcgcctag

SEQ ID NO: 78620 - DNA, 1095 bp, Artificial Sequence
  derived and/or modified sequence
gatcgagaaggctaggttggcgacgccacggtagaggcttcggttctcccgggtgggggcagccgccgaccggagggagagaatgtaatggacatcggtctgaccaacgagaagcccaacccggaactctcttactccggctccttccagccagcccccggcaacaagaccgtgaccatgattcctgactacaacctctaccaccaccccaacgacatgggctccattccggagcacaagcccttccagggcatggaccccatccgggtcaacccgccccctattacccctctggagaccatcaaggcattcaaagacaagcagatccacccgggctttggcagcctgccccagccgccgctcaccctcaagcccatccggccccgcaagtaccccaaccggcctagcaagacaccgctccacgaacggccccacgcgtgcccggccgagggctgcgaccgccgtttcagccgttcggacgagctgacccggcacctgcgcatccacacgggccacaagcccttccagtgccggatctgcatgcggagcttcagccgcagcgaccacctcaccactcacatccgcactcatacgggcgagaagccctttgcctgcgagttctgcgggcgcaagtttgcgcgcagcgacgagcgcaagcgccacgccaagatccacctcaagcaaaaggagaagaaggcggagaagggcggtgcaccctctgcatcctcggcgccccccgtgtcgctggcccccgtggtcaccacctgcgcctgaggatcgggcccccagatccccacttttcccctccagtgcctcccggctgctagcctgaaagcagcgggaaagccagccacggaggcgtaggggccgcgccctggcctctccatggacgtgcggccccttgcttccccttcgatgcccccggttcccaacctttcacgccggccagcggtcaggggccagggctggaggcgccttcccctcgcggtcccccacttagccaaggcgtgggggcggaaaggtggcgtctagcccgctttgttcagttcggatcgccttgatccaggggccgccgggccgcgccaaggacctgca

SEQ ID NO: 78621 - DNA, 687 bp, Artificial Sequence
  derived and/or modified sequence
atggacattggtcttactaacgaaaagcctaatccggaactttcttacagtggatcctttcagcccgctccgggcaacaagaccgttacaatgatcccagattataatttgtaccatcaccctaacgatatgggatcaatccccgagcacaaaccgtttcagggcatggatcccattcgggttaaccccccaccaataactccccttgagaccatcaaagcttttaaggacaagcagatacaccctggtttcggaagccttcctcagccaccactgacacttaaacccattcgtcctagaaaataccctaatcggccctcgaaaacccctctgcatgaacgaccccatgcttgccccgccgaagggtgcgacaggcgattcagccgcagtgacgaactcaccaggcacctacgcatccacaccggacacaagccctttcagtgtagaatttgtatgcggtcattctcccgctccgaccacctgaccactcatatccgcactcataccggtgaaaagccgtttgcctgtgagttttgtgggcggaaattcgctagaagcgacgagcgcaagcgtcacgcaaaaatccatctgaaacagaaagaaaaaaaggctgagaaagggggggcaccttccgcctcttctgccccaccggtgagcctggctcccgtggtcacaacctgcgcatag

SEQ ID NO: 78622 - DNA, 687 bp, Artificial Sequence
  derived and/or modified sequence
atggacatcggcctgaccaatgagaagcccaaccctgagctgagctacagcggcagcttccagcctgcccctggcaacaagacagtgaccatgatcccagactacaacctgtaccaccaccccaatgacatgggcagcatccctgagcacaagcccttccagggcatggaccccatccgggtgaaccccccacccatcacccccctggagaccatcaaggccttcaaggacaagcagatccaccctggcttcggcagcctgccccagccccccctgaccctgaagcccatccggcccaggaagtaccccaaccggcccagcaagacccccctgcacgagcggccccacgcctgcccagctgagggctgtgaccggcgcttcagcagaagtgatgagctgaccaggcacctgcgcatccacacaggccacaagcccttccagtgccgcatctgcatgaggagcttcagcagaagtgaccacctgaccacccacatccgcacccacactggagagaagccctttgcctgtgagttctgtggcaggaagtttgcccggagtgatgagaggaagagacatgccaagatccacctgaagcagaaggagaagaaggccgagaagggcggggcccccagcgccagcagcgcccctcctgtgtccctggcccctgtggtgaccacctgtgcctag

SEQ ID NO: 78623 - DNA, 687 bp, Artificial Sequence
  derived and/or modified sequence
atggacatcggcctgaccaacgagaagcccaaccccgagctgagctacagcgggtcttttcagccggcccctggtaataagacagtgacaatgatccctgattacaatctgtaccaccaccctaatgatatgggatctatcccagaacataagccatttcaggggatggaccccattcgtgtgaatccccctccgataactccgctggagaccattaaggcgttcaaggacaagcagattcaccctggcttcggaagcctcccgcagccccctctaacgctcaaaccaatacgcccaaggaagtaccccaatagaccctccaaaacacctctacatgaaagaccacacgcttgtccagccgaagggtgtgaccggaggttctctcgttcggacgagctaacacgccaccttcggattcacaccggacacaaaccgtttcagtgcagaatttgcatgcgatctttcagccgcagcgatcatttgacaacccacatcaggactcacactggcgagaaaccgtttgcttgcgaattctgcggcagaaaatttgcgcgcagtgatgagcgaaagcggcacgcgaaaattcacctgaagcagaaagagaaaaaagctgagaaaggcggagcacctagcgcaagttccgcccccccagtgtccctcgcacctgtcgtaactacatgtgcctag

SEQ ID NO: 78624 - DNA, 687 bp, Artificial Sequence
  derived and/or modified sequence
atggacatcggacttaccaacgaaaagcctaaccccgaacttagttattcaggaagtttccagccagccccagggaataagactgtcactatgatccccgattacaacttgtaccaccatccaaacgacatgggcagcattccagaacacaagccctttcagggaatggatcctatccgcgtgaaccctccaccaatcacacctcttgaaacgatcaaggctttcaaagataagcagattcatcccggatttgggtctcttccacagcccccactgaccttgaaacctattaggcccaggaagtaccccaatcgtccctccaagactcccctgcacgagcgtccccacgcttgcccagctgagggctgcgatagacggttctcccgctcagatgagctgactcgccatctgcgcattcatacagggcataaacccttccagtgtaggatttgcatgcgcagcttctccaggtctgatcatctgaccacgcacatcaggacccacaccggggagaaaccatttgcctgcgagttctgcgggaggaaattcgcccgatcagacgaacgtaagaggcatgcaaaaatacacctgaagcaaaaggagaagaaggcggagaaaggcggtgctccctccgcttctagcgctcctcctgtgagtttggcacccgttgttacaacctgtgcctag

SEQ ID NO: 78625 - protein, 130 aa, Artificial Sequence
  derived and/or modified sequence
VSFRYIFGLPPLILVLLPVASSDCDIEGKDGKQYESVLMVSIDQLLDSMKEIGSNCLNNEFNFFKRHICDANKVKGRKPAALGEAQPTKSLEENKSLKEQKKLNDLCFLKRLLQEIKTCWNKILMGTKEH

SEQ ID NO: 78626 - protein, 133 aa, Artificial Sequence
  derived and/or modified sequence
MFHVSFRYIFGLPPLILVLLPVASSDCDIEGKDGKQYESVLMVSIDQLLDSMKEIGSNCLNNEFNFFKRHICDANKVKGRKPAALGEAQPTKSLEENKSLKEQKKLNDLCFLKRLLQEIKTCWNKILMGTKEH

SEQ ID NO: 78627 - DNA, 399 bp, Artificial Sequence
  derived and/or modified sequence
atgttccacgtgagcttccgctacatcttcggcctgccccccctgatcctggtgctgctgcccgtggccagcagcgactgcgacatcgagggcaaggacggcaagcagtacgagagcgtgctgatggtgagcatcgaccagctgctggacagcatgaaggagatcggcagcaactgcctgaacaacgagttcaacttcttcaagcgccacatctgcgacgccaacaaggtgaagggccgcaagcccgccgccctgggcgaggcccagcccaccaagagcctggaggagaacaagagcctgaaggagcagaagaagctgaacgacctgtgcttcctgaagcgcctgctgcaggagatcaagacctgctggaacaagatcctgatgggcaccaaggagcac

SEQ ID NO: 78628 - DNA, 393 bp, Artificial Sequence
  derived and/or modified sequence
gtgagcttcagatacatcttcggcctgccccccctgatcctggtgctgctgcccgtggccagcagcgactgcgacatcgagggcaaggacggcaagcagtacgagagcgtgctgatggtgagcatcgaccagctgctggacagcatgaaggagatcggcagcaactgcctgaacaacgagttcaacttcttcaagagacacatctgcgacgccaacaaggtgaagggcagaaagcccgccgccctgggcgaggcccagcccaccaagagcctggaggagaacaagagcctgaaggagcagaagaagctgaacgacctgtgcttcctgaagagactgctgcaggagatcaagacctgctggaacaagatcctgatgggcaccaaggagcactag

SEQ ID NO: 78629 - DNA, 402 bp, Artificial Sequence
  derived and/or modified sequence
atgttccacgtgagcttcagatacatcttcggcctgccccccctgatcctggtgctgctgcccgtggccagcagcgactgcgacatcgagggcaaggacggcaagcagtacgagagcgtgctgatggtgagcatcgaccagctgctggacagcatgaaggagatcggcagcaactgcctgaacaacgagttcaacttcttcaagagacacatctgcgacgccaacaaggtgaagggcagaaagcccgccgccctgggcgaggcccagcccaccaagagcctggaggagaacaagagcctgaaggagcagaagaagctgaacgacctgtgcttcctgaagagactgctgcaggagatcaagacctgctggaacaagatcctgatgggcaccaaggagcactag

SEQ ID NO: 78630 - DNA, 393 bp, Artificial Sequence
  derived and/or modified sequence
gtgtcctttaggtacatctttggccttccccctctgatccttgttctgctgccggtggcgtcttcagactgcgatattgaaggcaaggacggcaagcaatacgaatcagtgctgatggtgagcatcgatcagctgctggactctatgaaggaaattgggtccaattgcttaaataacgagtttaacttctttaagaggcacatctgtgacgctaacaaggtaaagggcagaaaacctgctgccttgggcgaggcccaaccaaccaagtctcttgaggagaataagtctctgaaggaacaaaagaaactgaatgatttatgttttctgaaacggctcctgcaagagatcaagacctgttggaacaaaatcctcatgggtaccaaagaacactag

SEQ ID NO: 78631 - DNA, 402 bp, Artificial Sequence
  derived and/or modified sequence
atgtttcacgtaagcttcaggtatatcttcggactgccacctttaatattggtgctgctcccagtcgcaagctcagattgcgatatcgagggaaaggatgggaagcagtacgaaagcgtgctgatggtctccatcgatcagcttctggattctatgaaggagattggtagcaactgtctgaacaatgagtttaactttttcaagcggcatatatgcgatgccaacaaggtgaagggtaggaagcctgctgctctgggggaagctcagccgaccaaatctctggaggagaacaagtcgctgaaagaacagaagaagctgaacgacctttgtttcctcaagaggctattgcaggagattaagacatgttggaacaagattctcatgggcacgaaggagcattag

SEQ ID NO: 78632 - DNA, 393 bp, Artificial Sequence
  derived and/or modified sequence
gtgtccttccgctacatcttcggcctgcccccactcatcctggtgctgctgcctgtggccagcagtgactgtgacatcgagggcaaggatggcaagcagtatgagagcgtgctgatggtgtccattgaccagctgctggacagcatgaaggagatcggcagcaactgcctgaacaatgagttcaacttcttcaagaggcacatctgtgatgccaacaaggtgaagggcaggaagccagctgccctgggggaggcccagcccaccaagagcctggaggagaacaagagcctgaaggagcagaagaagctgaatgacctgtgcttcctgaagaggctgctgcaggagatcaagacctgctggaacaagatcctgatgggcaccaaggagcactag

SEQ ID NO: 78633 - DNA, 402 bp, Artificial Sequence
  derived and/or modified sequence
atgtttcatgtgtccttccgctacatcttcggcctgcccccactcatcctggtgctgctgcctgtggccagcagtgactgtgacatcgagggcaaggatggcaagcagtatgaatctgtgctgatggtgtccattgaccagctgctggacagcatgaaggagatcggcagcaactgcctgaacaatgagttcaacttcttcaagaggcacatctgtgatgccaacaaggtgaagggcaggaagccagctgccctgggggaggcccagcccaccaagagcctggaggagaacaagagcctgaaggagcagaagaagctgaatgacctgtgcttcctgaagaggctgctgcaggagatcaagacctgctggaacaagatcctgatgggcaccaaggagcactag

SEQ ID NO: 78634 - DNA, 393 bp, Artificial Sequence
  derived and/or modified sequence
gtgagcttccggtacatcttcggcctgccccccctgatcctggtgttactgcccgtggcatctagtgactgtgatatcgaggggaaagacggaaagcagtacgaaagcgtgctcatggtgtctattgatcagctgctagactcgatgaaggagataggatctaactgcctcaacaacgagtttaatttctttaagcgacacatctgtgatgccaacaaagtgaaaggtcgaaagccggcggcgctcggagaggcacagcctactaaatcactcgaagaaaataaatcattgaaagaacagaaaaagcttaacgacctctgtttcctgaagcggctcctccaagaaataaaaacctgctggaacaagatcctgatggggaccaaggagcactag

SEQ ID NO: 78635 - DNA, 402 bp, Artificial Sequence
  derived and/or modified sequence
atgttccacgtgagcttccggtacatcttcggcctgccccccctgatcctggttcttctgcccgttgccagtagtgattgtgatatcgagggcaaggacggcaagcagtacgagagcgtgttgatggtaagtattgaccagctcctggatagtatgaaggaaattggctcaaactgtcttaacaacgagttcaacttctttaagaggcacatttgtgacgcgaataaggtaaagggacgcaagccagccgccttgggtgaggctcagcctaccaaatcgttggaggaaaataaaagcctgaaggagcagaagaaactgaatgacctgtgttttcttaagcggcttctacaggaaattaagacctgttggaacaaaatcctgatggggacgaaggaacattag

SEQ ID NO: 78636 - DNA, 393 bp, Artificial Sequence
  derived and/or modified sequence
gttagcttccgatacatctttggtcttcctccactgatcctggtgctattaccagtggcttcgagtgactgtgacattgaggggaaggatggaaaacagtatgagagcgttcttatggtcagtattgaccaattattagactcaatgaaagagatcggctctaactgtctgaacaatgaatttaatttctttaaacggcatatttgcgatgcaaataaagtgaaggggaggaagcccgcagctctcggcgaggcccagccaactaagtctttagaagagaacaagtctctgaaggagcagaagaaactgaatgacctttgcttcctcaaacgtttgctacaggagataaaaacctgctggaataaaatcctcatgggcactaaggaacactag

SEQ ID NO: 78637 - DNA, 402 bp, Artificial Sequence
  derived and/or modified sequence
atgttccatgtttcgttcagatatatcttcggcctccctcccctcatcttagttctactgccggtggcctcttccgactgtgacattgaaggaaaggatggaaaacagtatgagtcagtcctcatggtgagcatagatcagctgctcgacagcatgaaagaaatcggcagtaactgcttgaataacgaattcaatttctttaagcggcatatttgtgatgctaataaggtgaagggccgaaaacctgctgcgctaggcgaggctcagccaaccaagtcacttgaggagaataaatctcttaaggagcagaaaaaactgaatgatctgtgctttctgaaaagacttctccaggagataaaaacttgctggaacaagatactaatgggcactaaggaacactag

SEQ ID NO: 78638 - DNA, 393 bp, Artificial Sequence
  derived and/or modified sequence
gtttcttttaggtatatctttggacttcctcccctgatccttgttctgttgccagtagcatcatctgattgtgatattgaaggtaaagatggcaaacaatatgagagtgttctaatggtcagcatcgatcaattattggacagcatgaaagaaattggtagcaattgcctgaataatgaatttaacttttttaaaagacatatctgtgatgctaataaggttaaaggaagaaaaccagctgccctgggtgaagcccaaccaacaaagagtttggaagaaaataaatctttaaaggaacagaaaaaactgaatgacttgtgtttcctaaagagactattacaagagataaaaacttgttggaataaaattttgatgggcactaaagaacactga

SEQ ID NO: 78639 - DNA, 400 bp, Artificial Sequence
  derived and/or modified sequence
cagaccatgttccatgtttcttttaggtatatctttggacttcctcccctgatccttgttctgttgccagtagcatcatctgattgtgatattgaaggacagcatgaaagaaattggtagcaattgcctgaataatgaatttaacttttttaaaagacatatctgtgatgctaataaggttaaaggaagaaaaccagctgccctgggtgaagcccaaccaacaaagagtttggaagaaaataaatctttaaaggaacagaaaaaactgaatgacttgtgtttcctaaagagactattacaagagataaaaacttgttggaataaaattttgatgggcactaaagaacactgaaaaatatggagtggcaatatagaaacacgaactttagctgcatcctcc

SEQ ID NO: 78640 - DNA, 456 bp, Artificial Sequence
  derived and/or modified sequence
cagaccatgttccatgtttcttttaggtatatctttggacttcctcccctgatccttgttctgttgccagtagcatcatctgattgtgatattgaaggtaaagatggcaaacaatatgagagtgttctaatggtcagcatcgatcaattattggacagcatgaaagaaattggtagcaattgcctgaataatgaatttaacttttttaaaagacatatctgtgatgctaataaggttaaaggaagaaaaccagctgccctgggtgaagcccaaccaacaaagagtttggaagaaaataaatctttaaaggaacagaaaaaactgaatgacttgtgtttcctaaagagactattacaagagataaaaacttgttggaataaaattttgatgggcactaaagaacactgaaaaatatggagtggcaatatagaaacacgaactttagctgcatcctcc

SEQ ID NO: 78641 - DNA, 393 bp, Artificial Sequence
  derived and/or modified sequence
gtgagcttcaggtatattttcggattaccccccctgatccttgtcctactgcccgtggcttcctccgactgcgacattgaaggcaaagacggcaaacagtatgaatccgttctaatggtaagtatcgaccagctgctcgacagtatgaaggagataggttcaaattgtctgaataatgagttcaattttttcaagaggcatatttgtgacgccaacaaggtcaaggggcggaaacctgctgcactaggtgaagcccagccgaccaaaagcttagaggaaaataaatcactcaaggagcaaaagaaactcaacgacctgtgtttcctcaagcgactgcttcaagagattaaaacttgctggaacaagatcctaatgggcaccaaggaacactag

SEQ ID NO: 78642 - DNA, 402 bp, Artificial Sequence
  derived and/or modified sequence
atgttccacgtctcgtttcgctacatttttgggctgcctcctctcatcctggtcctgctgcccgtggcatcttccgattgtgacatcgaaggcaaggacggcaaacaatacgaaagcgtactgatggtaagcatagaccagctgctcgatagcatgaaagaaattggctccaactgtcttaataatgaattcaacttctttaaacgtcacatttgcgacgctaacaaggtgaaggggagaaaaccagccgccttgggggaggctcaacctactaagtctcttgaggagaacaaatccctaaaagaacagaaaaaacttaatgatctctgcttcttgaagcggctacttcaggagatcaaaacctgctggaataaaattctgatgggcaccaaagagcactag

SEQ ID NO: 78643 - DNA, 393 bp, Artificial Sequence
  derived and/or modified sequence
gtcagttttcggtacatttttgggcttccgcccctcattctggtcttgcttccagtggccagtagtgattgtgacatcgaagggaaggacggcaaacaatacgaatctgtacttatggttagtatcgatcagttgttagactccatgaaagaaatcggcagcaactgtctcaacaatgagtttaatttctttaaacggcacatctgcgacgctaacaaggtcaaaggccgaaaaccagctgctctaggcgaggctcaaccaacaaagtcactggaagaaaataagtcccttaaggaacagaaaaagctgaacgatctttgctttctcaaacggctgcttcaggagattaaaacatgttggaataagatactaatgggaacaaaagaacactag

SEQ ID NO: 78644 - DNA, 402 bp, Artificial Sequence
  derived and/or modified sequence
atgttccacgtctcgtttcgctacatttttgggctgcctcctctcatcctggtcctgctgcccgtggcatcttccgattgtgacatcgaaggcaaggacggcaaacaatacgaaagcgtactgatggtaagcatagaccagctgctcgatagcatgaaagaaattggctccaactgtcttaataatgaattcaacttctttaaacgtcacatttgcgacgctaacaaggtgaaggggagaaaaccagccgccttgggggaggctcaacctactaagtctcttgaggagaacaaatccctaaaggaacagaagaaattaaatgacctctgcttcctcaagagattactgcaagagattaagacatgctggaacaagatccttatgggcaccaaggaacattag

SEQ ID NO: 78645 - RNA, 393 nt, Artificial Sequence
  derived and/or modified sequence
gugagcuucagguauauuuucggauuacccccccugauccuuguccuacugcccguggcuuccuccgacugcgacauugaaggcaaagacggcaaacaguaugaauccguucuaaugguaaguaucgaccagcugcucgacaguaugaaggagauagguucaaauugucugaauaaugaguucaauuuuuucaagaggcauauuugugacgccaacaaggucaaggggcggaaaccugcugcacuaggugaagcccagccgaccaaaagcuuagaggaaaauaaaucacucaaggagcaaaagaaacucaacgaccuguguuuccucaagcgacugcuucaagagauuaaaacuugcuggaacaagauccuaaugggcaccaaggaacacuag

SEQ ID NO: 78646 - RNA, 402 nt, Artificial Sequence
  derived and/or modified sequence
auguuccacgucucguuucgcuacauuuuugggcugccuccucucauccugguccugcugcccguggcaucuuccgauugugacaucgaaggcaaggacggcaaacaauacgaaagcguacugaugguaagcauagaccagcugcucgauagcaugaaagaaauuggcuccaacugucuuaauaaugaauucaacuucuuuaaacgucacauuugcgacgcuaacaaggugaaggggagaaaaccagccgccuugggggaggcucaaccuacuaagucucuugaggagaacaaaucccuaaaagaacagaaaaaacuuaaugaucucugcuucuugaagcggcuacuucaggagaucaaaaccugcuggaauaaaauucugaugggcaccaaagagcacuag

SEQ ID NO: 78647 - RNA, 393 nt, Artificial Sequence
  derived and/or modified sequence
gucaguuuucgguacauuuuugggcuuccgccccucauucuggucuugcuuccaguggccaguagugauugugacaucgaagggaaggacggcaaacaauacgaaucuguacuuaugguuaguaucgaucaguuguuagacuccaugaaagaaaucggcagcaacugucucaacaaugaguuuaauuucuuuaaacggcacaucugcgacgcuaacaaggucaaaggccgaaaaccagcugcucuaggcgaggcucaaccaacaaagucacuggaagaaaauaagucccuuaaggaacagaaaaagcugaacgaucuuugcuuucucaaacggcugcuucaggagauuaaaacauguuggaauaagauacuaaugggaacaaaagaacacuag

SEQ ID NO: 78648 - RNA, 402 nt, Artificial Sequence
  derived and/or modified sequence
auguuccacgucucguuucgcuacauuuuugggcugccuccucucauccugguccugcugcccguggcaucuuccgauugugacaucgaaggcaaggacggcaaacaauacgaaagcguacugaugguaagcauagaccagcugcucgauagcaugaaagaaauuggcuccaacugucuuaauaaugaauucaacuucuuuaaacgucacauuugcgacgcuaacaaggugaaggggagaaaaccagccgccuugggggaggcucaaccuacuaagucucuugaggagaacaaaucccuaaaggaacagaagaaauuaaaugaccucugcuuccucaagagauuacugcaagagauuaagacaugcuggaacaagauccuuaugggcaccaaggaacauuag

SEQ ID NO: 78649 - protein, 64 aa, Artificial Sequence
  derived and/or modified sequence
MKEIGSNCLNNEFNFFKRHICDANKEENKSLKEQKKLNDLCFLKRLLQEIKTCWNKILMGTKEH

SEQ ID NO: 78650 - DNA, 213 bp, Artificial Sequence
  derived and/or modified sequence
atgttccacgtgagcttccgctacatcttcggcctgccccccctgatcctggtgctgctgcccgtggccagcagcgactgcgacatcgagggcaaggacggcaagcagtacgagagcgtgctgatggtgagcatcgaccagctgctgaaccagccctacaagaagaaggagaagcgcaccgagcgcaagcagcagagcgccatgagcaacaac

SEQ ID NO: 78651 - DNA, 111 bp, Artificial Sequence
  derived and/or modified sequence
atgttccacgtgagcttccgctacatcttcggcctgccccccctgatcctggtgctgctgcccgtggccagcagcgactgcgacatcgagggccagcacgagcgcaactgg

SEQ ID NO: 78652 - DNA, 192 bp, Artificial Sequence
  derived and/or modified sequence
atgaaggagatcggcagcaactgcctgaacaacgagttcaacttcttcaagcgccacatctgcgacgccaacaaggaggagaacaagagcctgaaggagcagaagaagctgaacgacctgtgcttcctgaagcgcctgctgcaggagatcaagacctgctggaacaagatcctgatgggcaccaaggagcac

SEQ ID NO: 78653 - DNA, 216 bp, Artificial Sequence
  derived and/or modified sequence
atgttccacgtgagcttcagatacatcttcggcctgccccccctgatcctggtgctgctgcccgtggccagcagcgactgcgacatcgagggcaaggacggcaagcagtacgagagcgtgctgatggtgagcatcgaccagctgctgaaccagccctacaagaagaaggagaagagaaccgagagaaagcagcagagcgccatgagcaacaactag

SEQ ID NO: 78654 - DNA, 114 bp, Artificial Sequence
  derived and/or modified sequence
atgttccacgtgagcttcagatacatcttcggcctgccccccctgatcctggtgctgctgcccgtggccagcagcgactgcgacatcgagggccagcacgagagaaactggtag

SEQ ID NO: 78655 - DNA, 195 bp, Artificial Sequence
  derived and/or modified sequence
atgaaggagatcggcagcaactgcctgaacaacgagttcaacttcttcaagagacacatctgcgacgccaacaaggaggagaacaagagcctgaaggagcagaagaagctgaacgacctgtgcttcctgaagagactgctgcaggagatcaagacctgctggaacaagatcctgatgggcaccaaggagcactag

SEQ ID NO: 78656 - DNA, 216 bp, Artificial Sequence
  derived and/or modified sequence
atgttccatgtgtcctttcggtacatttttgggttaccaccactgatccttgtgctgttgccagtggccagtagtgactgcgacatcgagggcaaggatggcaaacagtatgagagcgttctcatggtcagcatagaccagttactgaaccaaccctataagaaaaaagagaaaaggaccgagagaaagcagcagtcagccatgagtaataattag

SEQ ID NO: 78657 - DNA, 216 bp, Artificial Sequence
  derived and/or modified sequence
atgttccacgtttcattccgctacatttttggactgccccctctgattctggtgctcttgccagtggcatcatcggattgtgacatcgaaggaaaagatggcaagcagtacgaatccgtattaatggtctcaatcgatcagctgctcaaccaaccatacaagaagaaagagaagcgaacagagcgcaagcaacagtccgccatgtctaacaactag

SEQ ID NO: 78658 - DNA, 114 bp, Artificial Sequence
  derived and/or modified sequence
atgttccatgtctctttccgctatatctttggacttccccccctgatactggttctgctgcctgtcgcgtcctctgactgcgacatagaaggccaacacgaaaggaattggtag

SEQ ID NO: 78659 - DNA, 114 bp, Artificial Sequence
  derived and/or modified sequence
atgtttcatgtgtcctttcggtatatcttcggcctgccacctctgatactagtgctgctacccgtggcctctagtgattgtgacatagaagggcaacatgaacggaactggtag

SEQ ID NO: 78660 - DNA, 195 bp, Artificial Sequence
  derived and/or modified sequence
atgaaagagataggctccaattgtctgaacaacgagtttaacttctttaaaagacatatctgcgacgctaacaaggaagagaacaaatcactgaaggagcagaaaaagctgaatgatctctgttttctgaaacgattgctccaggaaatcaaaacatgttggaataaaatccttatggggacaaaggagcattag

SEQ ID NO: 78661 - DNA, 216 bp, Artificial Sequence
  derived and/or modified sequence
atgtttcatgtgtccttccgctacatcttcggcctgcccccactcatcctggtgctgctgcctgtggccagcagtgactgtgacatcgagggcaaggatggcaagcagtatgaatctgtgctgatggtgtccattgaccagctgctgaaccagccctacaagaagaaggagaagaggacagagaggaagcagcagagcgccatgagcaacaactag

SEQ ID NO: 78662 - DNA, 114 bp, Artificial Sequence
  derived and/or modified sequence
atgtttcatgtgtccttccgctacatcttcggcctgcccccactcatcctggtgctgctgcctgtggccagcagtgactgtgacatcgagggccagcatgaaagaaactggtag

SEQ ID NO: 78663 - DNA, 195 bp, Artificial Sequence
  derived and/or modified sequence
atgaaggagatcggcagcaactgcctgaacaatgagttcaacttcttcaagaggcacatctgtgatgccaacaaggaggagaacaagagcctgaaggagcagaagaagctgaatgacctgtgcttcctgaagaggctgctgcaggagatcaagacctgctggaacaagatcctgatgggcaccaaggagcactag

SEQ ID NO: 78664 - DNA, 216 bp, Artificial Sequence
  derived and/or modified sequence
atgttccacgtgagcttccggtacatcttcggcctgccccccctgatccttgtgctcctgcccgtcgcttcgagcgattgcgacattgaaggcaaagacgggaagcaatatgaatcagtgctaatggtttccattgatcagctcctgaaccaaccgtataagaagaaagagaaaaggaccgaaagaaagcaacagtctgctatgtccaataattag

SEQ ID NO: 78665 - DNA, 216 bp, Artificial Sequence
  derived and/or modified sequence
atgttccacgtgagcttccggtacatcttcggcctgccccccctgatcttggtgctgctccctgtggcttcctccgattgcgatatcgaaggaaaggatggcaagcaatatgaaagtgtgctgatggtctctattgatcagctgttaaaccaaccatacaagaagaaggagaagcgcacagagagaaagcagcaatccgcaatgtccaacaactag

SEQ ID NO: 78666 - DNA, 114 bp, Artificial Sequence
  derived and/or modified sequence
atgttccacgtgagcttccggtacatcttcggcctgccccccctgatcctggttcttctccccgtggctagcagtgattgtgatatcgaaggacaacacgagcgaaactggtag

SEQ ID NO: 78667 - DNA, 114 bp, Artificial Sequence
  derived and/or modified sequence
atgttccacgtgagcttccggtacatcttcggcctgccccccctgattttagtactactccctgttgcgagcagcgactgcgacattgagggtcaacacgaacgtaactggtag

SEQ ID NO: 78668 - DNA, 195 bp, Artificial Sequence
  derived and/or modified sequence
atgaaggagatcggcagcaactgcctgaacaacgagttcaacttctttaaaaggcacatttgtgacgctaacaaggaagaaaacaaaagcctcaaagagcagaagaagcttaacgacctgtgtttcctgaaaagactgctgcaagagatcaaaacctgctggaacaagatcctgatgggcacaaaagagcactag

SEQ ID NO: 78669 - DNA, 216 bp, Artificial Sequence
  derived and/or modified sequence
atgttccatgtgagtttccgctacattttcggcctgccacctctcattttggtgctgctccctgtggcaagcagcgactgtgacattgaaggtaaggacggaaagcagtacgaaagtgtgctcatggtgagcatcgatcagctcttaaatcaaccttataagaaaaaagagaaacgcacagaacgcaagcaacagtcagccatgtccaacaactag

SEQ ID NO: 78670 - DNA, 216 bp, Artificial Sequence
  derived and/or modified sequence
atgttccatgtgtcatttcgatatatcttcggcctaccacctttaatactggttctgctacccgtagccagttctgactgtgacatcgaaggcaaagacggaaaacaatatgaatccgtattgatggtgagcatcgaccaattactgaaccaaccatataaaaagaaagaaaagaggactgaacgcaaacagcagtcagcgatgtccaacaactag

SEQ ID NO: 78671 - DNA, 114 bp, Artificial Sequence
  derived and/or modified sequence
atgtttcatgtctccttccgctacatcttcggcctgccaccgctgatcctggtgctcttgcctgtagccagcagcgactgtgacatcgaagggcagcacgaaaggaattggtag

SEQ ID NO: 78672 - DNA, 114 bp, Artificial Sequence
  derived and/or modified sequence
atgtttcatgttagctttaggtatattttcgggcttccacctctgatcctggtccttctcccagtggcttcatctgattgcgacattgaggggcaacacgaaagaaattggtag

SEQ ID NO: 78673 - DNA, 195 bp, Artificial Sequence
  derived and/or modified sequence
atgaaagaaattggttcgaactgcctgaataacgagttcaacttttttaaaagacacatatgtgatgctaataaggaggaaaacaagagcctgaaagagcagaagaaattgaatgatctgtgcttcctgaagcggctgctgcaggagatcaaaacttgttggaacaagatcctgatgggcacaaaggagcattag

SEQ ID NO: 78674 - DNA, 817 bp, Artificial Sequence
  derived and/or modified sequence
acatccgcggcaacgcctccttggtgtcgtccgcttccaataacccagcttgcgtcctgcacacttgtggcttccgtgcacacattaacaactcatggttctagctcccagtcgccaagcgttgccaaggcgttgagagatcatctgggaagtcttttacccagaattgctttgattcaggccagctggtttttcctgcggtgattcggaaattcgcgaattcctctggtcctcatccaggtgcgcgggaagcaggtgcccaggagagaggggataatgaagattccatgctgatgatcccaaagattgaacctgcagaccaagcgcaaagtagaaactgaaagtacactgctggcggatcctacggaagttatggaaaaggcaaagcgcagagccacgccgtagtgtgtgccgccccccttgggatggatgaaactgcagtcgcggcgtgggtaagaggaaccagctgcagagatcaccctgcccaacacagactcggcaactccgcggaagaccagggtcctgggagtgactatgggcggtgagagcttgctcctgctccagttgcggtcatcatgactacgcccgcctcccgcagaccatgttccatgtttcttttaggtatatctttggacttcctcccctgatccttgttctgttgccagtagcatcatctgattgtgatattgaaggtaaagatggcaaacaatatgagagtgttctaatggtcagcatcgatcaattattgaatcagccctacaaaaagaaagaaaaaagaacagaaaggaagcagcaatcagctatgagcaataattag

SEQ ID NO: 78675 - DNA, 195 bp, Artificial Sequence
  derived and/or modified sequence
atgaaagaaattggtagcaattgcctgaataatgaatttaacttttttaaaagacatatctgtgatgctaataaggaagaaaataaatctttaaaggaacagaaaaaactgaatgacttgtgtttcctaaagagactattacaagagataaaaacttgttggaataaaattttgatgggcactaaagaacactga

SEQ ID NO: 78676 - DNA, 216 bp, Artificial Sequence
  derived and/or modified sequence
atgtttcacgtcagtttccgttatattttcgggctgccccccttaatcctcgtgctcctacctgtggcttcatctgactgcgacattgaaggaaaagacggtaaacagtacgaaagcgtacttatggtaagtatcgaccagctcttgaaccagccctacaagaagaaagaaaaaaggaccgaacggaaacaacagtcggcaatgtccaacaactag

SEQ ID NO: 78677 - DNA, 216 bp, Artificial Sequence
  derived and/or modified sequence
atgtttcatgtaagtttccgctacatattcgggcttccccctttgattttggtgttgttgcctgtcgcctccagcgactgcgacattgagggaaaggatggcaaacaatacgaaagcgtgctcatggtgtccatagaccagctgctgaatcagccctataaaaagaaagaaaagagaacagagagaaaacaacagtcagctatgtcaaataattag

SEQ ID NO: 78678 - DNA, 114 bp, Artificial Sequence
  derived and/or modified sequence
atgtttcatgtttctttcaggtacatcttcgggctcccgccgttaattcttgtccttctccccgtagcaagcagtgattgtgatatcgaaggccaacacgagcgtaactggtag

SEQ ID NO: 78679 - DNA, 114 bp, Artificial Sequence
  derived and/or modified sequence
atgttccacgtctcctttagatacattttcggcctgccccctctgattttggtgctgttacccgtggcaagctcagattgcgacattgagggccaacatgagcgaaattggtag

SEQ ID NO: 78680 - DNA, 195 bp, Artificial Sequence
  derived and/or modified sequence
atgaaggagatcgggtctaattgtctaaataatgaattcaattttttcaagaggcatatttgtgacgcaaacaaagaagaaaataaatctcttaaggagcagaaaaaactgaacgatctttgttttctgaaaagacttttgcaggaaatcaaaacatgttggaataagatcctcatgggcaccaaagagcattag

SEQ ID NO: 78681 - RNA, 216 nt, Artificial Sequence
  derived and/or modified sequence
auguuucacgucaguuuccguuauauuuucgggcugccccccuuaauccucgugcuccuaccuguggcuucaucugacugcgacauugaaggaaaagacgguaaacaguacgaaagcguacuuaugguaaguaucgaccagcucuugaaccagcccuacaagaagaaagaaaaaaggaccgaacggaaacaacagucggcaauguccaacaacuag

SEQ ID NO: 78682 - RNA, 216 nt, Artificial Sequence
  derived and/or modified sequence
auguuucauguaaguuuccgcuacauauucgggcuucccccuuugauuuugguguuguugccugucgccuccagcgacugcgacauugagggaaaggauggcaaacaauacgaaagcgugcucaugguguccauagaccagcugcugaaucagcccuauaaaaagaaagaaaagagaacagagagaaaacaacagucagcuaugucaaauaauuag

SEQ ID NO: 78683 - RNA, 114 nt, Artificial Sequence
  derived and/or modified sequence
auguuucauguuucuuucagguacaucuucgggcucccgccguuaauucuuguccuucuccccguagcaagcagugauugugauaucgaaggccaacacgagcguaacugguag

SEQ ID NO: 78684 - RNA, 114 nt, Artificial Sequence
  derived and/or modified sequence
auguuccacgucuccuuuagauacauuuucggccugcccccucugauuuuggugcuguuacccguggcaagcucagauugcgacauugagggccaacaugagcgaaauugguag

SEQ ID NO: 78685 - RNA, 195 nt, Artificial Sequence
  derived and/or modified sequence
augaaggagaucgggucuaauugucuaaauaaugaauucaauuuuuucaagaggcauauuugugacgcaaacaaagaagaaaauaaaucucuuaaggagcagaaaaaacugaacgaucuuuguuuucugaaaagacuuuugcaggaaaucaaaacauguuggaauaagauccucaugggcaccaaagagcauuag

SEQ ID NO: 78686 - protein, 333 aa, Artificial Sequence
  derived and/or modified sequence
MCEEETTALVCDNGSGLCKAGFAGDDAPRAVFPSIVGRPRHQIWHHSFYNELRVAPEEHPTLLTEAPLNPKANREKMTQIMFETFNVPAMYVAIQAVLSLYASGRTTGIVLDSGDGVTHNVPIYEGYALPHAIMRLDLAGRDLTDYLMKILTERGYSFVTTAEREIVRDIKEKLCYVALDFENEMATAASSSSLEKSYELPDGQVITIGNERFRCPETLFQPSFIGMESAGIHETTYNSIMKCDIDIRKDLYANNVLSGGTTMYPGIADRMQKEITALAPSTMKIKIIAPPERKYSVWIGGSILASLSTFQQMWISKPEYDEAGPSIVHRKCF

SEQ ID NO: 78687 - DNA, 1002 bp, Artificial Sequence
  derived and/or modified sequence
atgtgtgaggaagaaacgaccgccctggtgtgtgacaatggctctggtctgtgcaaggcaggctttgcgggagatgatgctcctcgggcggtctttcctagtatcgtgggccgcccgcgacaccagatctggcatcattccttctacaacgaattgagagtcgcccctgaggaacaccccacattattgaccgaggctcctctgaatccaaaggccaaccgcgaaaagatgacccagataatgtttgagacttttaatgtccccgctatgtatgttgctatccaggcagtcctttccttatatgcaagcggacgcacaacgggtatagtcctcgatagcggcgatggcgtgactcacaacgtgccgatctatgagggatacgcgctgccacatgctatcatgcggctcgatctcgcggggcgggatcttaccgattatctgatgaaaatcttgacagagagagggtactccttcgtgacaacagccgaacgcgagattgtgcgcgacatcaaagaaaagttgtgctacgttgcgctggactttgaaaatgagatggcgacagcagcgtcctcctccagtctggagaaaagctatgagttgccagacggccaggtgatcactatcgggaatgagcgttttcgctgtcctgagacactgtttcagccctcgtttataggtatggagtccgcgggaatccacgaaacaacatataacagcatcatgaaatgtgacattgacataagaaaagatttgtacgccaataatgtactgagcggtggaactacaatgtatccgggtatcgccgaccggatgcagaaggaaattacagctctagccccaagcacaatgaagataaaaataatcgcccctccagagaggaaatattcagtctggattgggggctctatcctggcctccctttctacgttccagcaaatgtggatttccaaacccgaatacgacgaagcaggtccatctatagtacacagaaagtgcttctag

SEQ ID NO: 78688 - DNA, 1002 bp, Artificial Sequence
  derived and/or modified sequence
atgtgtgaggaggagaccacagccctggtgtgtgacaatggaagtggcctgtgcaaggccggctttgctggagatgatgcccccagggctgtgttccccagcatcgtgggccggcccaggcaccagatctggcaccacagcttctacaatgagctgcgggtggcccctgaggagcaccccaccctgctgacagaggcccccctgaaccccaaggccaaccgggagaagatgacccagatcatgtttgagaccttcaacgtgcctgccatgtatgtggccatccaggccgtgctgagcctgtatgccagcggccgcaccactggaattgtgctggacagcggagatggagtgacccacaacgtgcccatctatgagggctacgccctgccccacgccatcatgaggctggacctggccggccgggacctgacagactacctgatgaagatcctgacagagcggggctacagctttgtgaccacagctgagcgggagatcgtgcgggacatcaaggagaagctgtgctacgtggccctggactttgaaaatgagatggccacagctgccagcagcagcagcctggagaagagctatgagctgcctgatggccaggtgatcaccatcggaaatgaacgcttccgctgcccagagaccctcttccagcccagcttcatcggcatggagagcgctggcatccacgagaccacctacaacagcatcatgaagtgtgacatcgacatcaggaaggacctgtatgccaacaacgtgctgagcggcggcaccaccatgtacccaggcattgctgacaggatgcagaaggagatcacagccctggcccccagcaccatgaagatcaagatcatcgcccctcctgagaggaagtacagcgtgtggattggaggcagcatcctggccagcctgagcaccttccagcagatgtggatcagcaagccagaatatgatgaagctggccccagcatcgtgcacaggaagtgcttctag

SEQ ID NO: 78689 - DNA, 1002 bp, Artificial Sequence
  derived and/or modified sequence
atgtgcgaggaggagaccaccgccctggtgtgcgacaacggcagcgggctgtgcaaggctggtttcgctggggatgacgcccctcgtgccgtttttcctagcattgtcgggagaccccggcatcagatctggcaccactcattctacaacgagctacgcgtggcccccgaagagcaccctacacttcttaccgaagctcctttgaaccctaaggcaaatcgcgagaagatgacacagatcatgttcgagacgtttaatgtgccagctatgtacgtggcaatacaggcagttctctccctttatgcctcaggtcgtacaacaggtatcgtgctggattctggggacggggtgactcacaatgtgcctatctacgaaggatacgccttgccgcacgctataatgcgccttgacctcgctggaagggatctgactgattatctcatgaagatcctcacggaacgtgggtactcctttgtgacgactgctgaacgggaaattgtccgtgatatcaaagagaagctgtgctatgtggccctggacttcgaaaacgaaatggcaacagccgcttctagcagctctcttgagaagagctatgaactccctgatggtcaggtgatcactattgggaacgagaggttcaggtgtcccgagaccctgttccagcccagcttcattggcatggaatcggccggaatccacgagacaacttacaacagcatcatgaaatgtgacatcgatatcagaaaggatctatatgccaacaacgtactgtctggcgggactaccatgtatccaggaattgccgatcggatgcagaaagagatcacggcgcttgcgccaagcactatgaagattaagatcattgcaccacccgaacggaagtacagtgtttggatcgggggatctattctggcgtctttaagcacttttcagcagatgtggatttctaaaccagaatatgacgaggccggcccctccatcgtccatcgcaagtgtttttag

SEQ ID NO: 78690 - DNA, 1002 bp, Artificial Sequence
  derived and/or modified sequence
atgtgtgaagaggagacgacggccttggtttgcgacaacggctctggattatgcaaggcaggattcgccggtgacgatgccccacgagctgtgttcccttctatcgtcggacgaccccgacatcagatttggcaccattctttctacaatgagctgcgagtggctcccgaggaacacccaactctcttgaccgaagcccctctgaaccctaaggccaatcgcgagaaaatgacccagattatgttcgagacatttaacgtgcccgctatgtacgttgccatccaagcagtcttaagcctatacgccagtggcagaacaacaggtatcgtcctcgactccggagatggtgtaacccataatgtccccatctatgaaggctacgcgctgccacatgcgattatgaggctggatctggccggtcgggatctgacggactacctaatgaaaattctgacagaacgcggatattccttcgttaccacagcagaacgggagattgtgagagacataaaagagaaattatgctacgttgctttggatttcgagaatgaaatggccaccgccgcaagtagcagtagcctggaaaagtcttacgagctgccagacggacaggtgattaccattggtaatgaacgatttcgatgccccgagacgctgttccaaccctctttcattggtatggagtctgctgggattcatgagactacgtataattctatcatgaagtgcgatatcgatattcgtaaagatttatacgcaaacaacgtgctgtctggaggaacaaccatgtaccccggaattgctgacagaatgcaaaaggaaataaccgccttagcgccttccactatgaagatcaaaatcattgccccaccagaacgcaaatactctgtttggataggtggctctatcctggcatctctgagcacatttcagcaaatgtggatatctaaacctgagtatgatgaggccggaccctcaatcgtccatagaaaatgcttttag

SEQ ID NO: 78691 - DNA, 1413 bp, Artificial Sequence
  derived and/or modified sequence
cctctggggttttatattgctctggtattcatgccaaagacacaccagccctcagtcactgggagaagaacctctcataccctcggtgctccagtccccagctcactcagccacacacaccatgtgtgaagaggagaccaccgcgctcgtgtgtgacaatggctctggcctgtgcaaggcaggcttcgcaggagatgatgccccccgggctgtcttcccctccattgtgggccgccctcgccaccagatctggcaccactccttctacaatgagctgcgtgtagcacctgaagagcaccccaccctgctcacagaggctcccctaaatcccaaggccaacagggaaaagatgacccagatcatgtttgaaaccttcaatgtccctgccatgtacgtcgccattcaagctgtgctctccctctatgcctctggccgcacgacaggcatcgtcctggattcaggtgatggcgtcacccacaatgtccccatctatgaaggctatgccctgccccatgccatcatgcgcctggacttggctggccgtgacctcacggactacctcatgaagatcctcacagagagaggctattcctttgtgaccacagctgagagagaaattgtgcgagacatcaaggagaagctgtgctatgtggccctggattttgagaatgagatggccacagcagcttcctcttcctccctggagaagagctatgagctgccagatgggcaggttatcaccattggcaatgagcgcttccgctgccctgagaccctcttccagccttcctttattggcatggagtccgctggaattcatgagacaacctacaattccatcatgaagtgtgacattgacatccgtaaggacttatatgccaacaatgtcctctctgggggcaccaccatgtaccctggcattgctgacaggatgcagaaggagatcacagccctggcccccagcaccatgaagatcaagattattgctcccccagagcggaagtactcagtctggatcgggggctctatcctggcctctctctccaccttccagcagatgtggatcagcaagcctgagtatgatgaggcagggccctccattgtccacaggaagtgcttctaaagtcagaacaggttctccaaggatcccctcgagactactctgttaccagtcatgaaacattaaaacctacaagccttacttctctgtgtggggctcttttttcctgggctatgtctcatacacagtgctaaggacttttcacacattacttttaatccatgcaatagtgctgtaaggtaggtgctatcattatacccatattacagatgaggaaattgaggctcagagaagtcaaggacttgcgaagatcacacagattccagattaaaattcaagtatctgactgcaaa

SEQ ID NO: 78692 - DNA, 1002 bp, Artificial Sequence
  derived and/or modified sequence
atgtgcgaggaggagaccaccgccctggtgtgcgacaacggcagcggcctgtgcaaggccggcttcgccggcgacgacgcccccagagccgtgttccccagcatcgtgggcagacccagacaccagatctggcaccacagcttctacaacgagctgagagtggcccccgaggagcaccccaccctgctgaccgaggcccccctgaaccccaaggccaacagagagaagatgacccagatcatgttcgagaccttcaacgtgcccgccatgtacgtggccatccaggccgtgctgagcctgtacgccagcggcagaaccaccggcatcgtgctggacagcggcgacggcgtgacccacaacgtgcccatctacgagggctacgccctgccccacgccatcatgagactggacctggccggcagagacctgaccgactacctgatgaagatcctgaccgagagaggctacagcttcgtgaccaccgccgagagagagatcgtgagagacatcaaggagaagctgtgctacgtggccctggacttcgagaacgagatggccaccgccgccagcagcagcagcctggagaagagctacgagctgcccgacggccaggtgatcaccatcggcaacgagagattcagatgccccgagaccctgttccagcccagcttcatcggcatggagagcgccggcatccacgagaccacctacaacagcatcatgaagtgcgacatcgacatcagaaaggacctgtacgccaacaacgtgctgagcggcggcaccaccatgtaccccggcatcgccgacagaatgcagaaggagatcaccgccctggcccccagcaccatgaagatcaagatcatcgccccccccgagagaaagtacagcgtgtggatcggcggcagcatcctggccagcctgagcaccttccagcagatgtggatcagcaagcccgagtacgacgaggccggccccagcatcgtgcacagaaagtgcttctag

SEQ ID NO: 78693 - DNA, 1032 bp, Artificial Sequence
  derived and/or modified sequence
atgaaggagatcaacctgctgcccgacagagtgctgagcacccccagcgtgcagctggtgcagagctggtacgtgcagagcctgctggacatcatggagttcctggacaaggaccccgaggaccacagaaccctgagccagttcaccgacgccctggtgaccatcagaaacagacacaacgacgtggtgcccaccatggcccagggcgtgctggagtacaaggacacctacggcgacgaccccgtgagcaaccagaacatccagtacttcctggacagattctacctgagcagaatcagcatcagaatgctgatcaaccagcacaccctgatcttcgacggcagcaccaaccccgcccaccccaagcacatcggcagcatcgaccccaactgcaacgtgagcgaggtggtgaaggacgcctacgacatggccaagctgctgtgcgacaagtactacatggccagccccgacctggagatccaggagatcaacgccgccaacagcaagcagcccatccacatggtgtacgtgcccagccacctgtaccacatgctgttcgagctgttcaagaacgccatgagagccaccgtggagagccacgagagcagcctgatcctgccccccatcaaggtgatggtggccctgggcgaggaggacctgagcatcaagatgagcgacagaggcggcggcgtgcccctgagaaagatcgagagactgttcagctacatgtacagcaccgcccccaccccccagcccggcaccggcggcacccccctggccggcttcggctacggcctgcccatcagcagactgtacgccaagtacttccagggcgacctgcagctgttcagcatggagggcttcggcaccgacgccgtgatctacctgaaggccctgagcaccgacagcgtggagagactgcccgtgtacaacaagagcgcctggagacactaccagaccatccaggaggccggcgactggtgcgtgcccagcaccgagcccaagaacaccagcacctacagagtgagctag

SEQ ID NO: 78694 - DNA, 1032 bp, Artificial Sequence
  derived and/or modified sequence
atgaaggaaattaacttgctcccagaccgtgtcttgagtacacccagcgtgcagctcgtgcaaagctggtatgttcagagcctcctggacatcatggaattccttgacaaggacccagaagaccacagaactttgagccagtttacagatgcgttagtcacgatccgtaatcggcacaatgatgttgtcccaactatggcccaaggtgtgctggaatataaggatacgtacggagacgacccagtcagcaatcagaatatccaatactttttggataggttctacctttcaagaattagtattcggatgctgattaaccaacacactcttatcttcgacggtagcacaaaccccgcccacccaaagcacatcgggtctatcgacccaaattgcaacgtgtccgaggtggtgaaagatgcatatgatatggcaaaactcctgtgtgataagtattacatggccagtccagatttagagattcaggaaataaacgcagccaacagtaagcagccaattcacatggtgtacgtaccatctcacctgtaccatatgctgttcgaactattcaagaatgccatgcgagccaccgtggagtcgcacgaaagcagtctgatattgccccctatcaaggttatggtcgccctgggcgaggaggacttatctatcaagatgagtgaccgcggcggaggggtcccactgcggaagattgagcgcctgtttagttacatgtactcaacggctccaaccccacagccaggaacaggcggaacaccactcgctggtttcggctacggcctccctatttcacgcctgtatgccaagtatttccagggagacctgcagctattttcaatggaaggtttcggaacagatgccgtgatttacctgaaagccctaagcaccgattcagtagagaggttgcctgtttataataaaagcgcctggcggcactatcagaccattcaggaagccggcgactggtgtgtaccttctaccgagccaaagaacacttcaacatacagggtttcgtag

SEQ ID NO: 78695 - DNA, 1032 bp, Artificial Sequence
  derived and/or modified sequence
atgaaggagatcaacctgctgcctgacagagtgctgagcacccccagcgtgcagctggtgcagagctggtacgtgcagagcctgctggacatcatggagttcctggacaaggaccctgaggaccacaggaccctgagccagttcacagatgccctggtgaccatccggaacagacacaatgatgtggtgcccaccatggcccagggcgtgctggagtacaaggacacctatggagatgatcctgtgagcaaccagaacatccagtacttcctggaccgcttctacctgagccgcatcagcatccgcatgctgatcaaccagcacaccctcatctttgatggcagcaccaacccagcccaccccaagcacatcggcagcattgaccccaactgcaatgtgtctgaggtggtgaaggatgcctatgacatggccaagctgctgtgtgacaagtactacatggccagcccagacctggagatccaggagatcaatgctgccaacagcaagcagcccatccacatggtgtatgtgcccagccacctgtaccacatgctgtttgagctgttcaagaatgccatgagggccaccgtggagagccatgagagcagcctcatcctgccccccatcaaggtgatggtggccctgggggaggaggacctgagcatcaagatgtctgaccggggcggcggcgtgcccctgaggaagattgaaagactcttctcctacatgtacagcacagcccccaccccccagcccggcaccggcggcacccccctggccggcttcggctacggcctgcccatcagccggctgtatgccaagtacttccagggcgacctgcagctgttctccatggagggcttcggcacagatgctgtgatctacctgaaggccctgagcacagattctgtggagcggctgcctgtgtacaacaagagcgcctggaggcactaccagaccatccaggaggccggggactggtgtgtgcccagcacagagcccaagaacaccagcacctacagagtgtcctag

SEQ ID NO: 78696 - DNA, 1032 bp, Artificial Sequence
  derived and/or modified sequence
atgaaggagatcaacctgctgcccgaccgggtgctgagcacccccagcgtccagctcgtgcagtcctggtacgtgcagtcactcctcgacattatggagtttctggacaaagaccccgaggaccatcggacgctttcacagttcacggacgccctagtgactatccggaatcgacacaatgacgtcgtgcccacgatggcacagggggttcttgagtacaaggatacatacggggatgatcccgtgtccaaccagaacatacaatacttcttagacaggttctatctcagccggatttctataaggatgctcattaaccagcacacactgatctttgacggatctacaaatcccgctcaccccaagcacatcgggagtattgaccctaattgtaacgtatcagaggtggtcaaagacgcgtatgatatggccaagttactgtgcgataagtattatatggcttcacctgatctcgagatccaggagatcaacgccgccaactccaagcaacccatacatatggtgtacgtgcctagccatctgtaccatatgctgtttgagctcttcaagaatgccatgcgagctacagtcgagtcccatgagtctagcttaatcctgcccccaatcaaagtgatggtggctctgggtgaggaagatctgtcaataaagatgtctgatcggggaggcggcgtgcctcttaggaagattgagaggcttttttcatacatgtactccaccgcgcccacccctcagcctggcactggtggtactcccctagccggcttcgggtatggattgccgatatccaggctgtacgctaagtattttcagggtgatttgcagcttttttcgatggagggattcggcaccgatgccgtgatttatctcaaagcactctccacggattcagtggaacggttacctgtctacaataagagcgcctggagacattaccaaaccatacaggaggctggcgactggtgcgtgccgagtacagagccgaagaacacatccacgtaccgggtgtcgtag

SEQ ID NO: 78697 - DNA, 1032 bp, Artificial Sequence
  derived and/or modified sequence
atgaaagagatcaatcttctccccgaccgggtgctcagcactcctagcgtgcaacttgtacaatcctggtatgttcagtcattgttggatattatggagttcctggataaggaccctgaggaccaccgcactttaagccagttcacggatgctctcgttaccatccgtaataggcacaatgacgtggtgccaaccatggcccaaggggtccttgagtacaaagacacctacggagatgatcctgtaagtaaccaaaacatccagtatttcttagaccggttttatctgtctagaattagtatcaggatgctcataaaccagcataccctcatatttgacgggtctacgaacccagcacaccccaagcacatcggttccatcgaccccaattgtaacgtctcagaagtagtaaaagacgcttatgatatggccaagctcctgtgtgataaatattatatggcttctccagatctggagatacaggaaatcaatgccgcaaactctaaacagcccatccacatggtgtatgttcccagccatctctaccatatgctgttcgagttgttcaagaacgccatgcgcgctaccgtcgagtcacacgagtccagccttatactcccaccaatcaaggtaatggtcgccctgggcgaagaagatctgagcattaaaatgtccgacaggggagggggagtgcccctcaggaaaatagagcgtctgtttagttatatgtactcaaccgcccctactccacaaccagggactgggggaactcccctcgctggctttggctacggcctgccaatcagccgtctgtacgcgaagtactttcagggagacctgcagctcttctctatggaaggtttcggcacagatgcagtcatttatttgaaggctctcagcaccgacagcgttgagcgtctgcccgtctataataaaagcgcctggaggcattaccagacaattcaggaagccggagattggtgtgtgcccagtacagagcccaagaatactagcacctatcgggtctcttag

SEQ ID NO: 78698 - DNA, 1032 bp, Artificial Sequence
  derived and/or modified sequence
atgaaagagatcaacctgttgccggatcgtgtgttatctactccttcagttcagctggtacagtcttggtacgtgcagagcctcctcgacattatggagttcctagataaagatccagaggaccatcgaaccctctcgcagtttaccgatgcactggttaccatacggaatcgccacaatgatgttgtgccgactatggctcagggggtgctagagtacaaggatacatacggcgatgatccagtgtccaatcagaatatccaatacttccttgaccgcttctacctgagtagaatcagcatcaggatgctcatcaatcagcataccctcatcttcgacggctcaacaaatcctgctcaccccaagcatattggttctatcgatcccaactgtaacgtaagtgaagttgttaaagacgcctatgacatggccaagctgctctgcgataaatactacatggctagccccgacctggaaattcaggagatcaacgcagcaaacagcaaacagccaattcatatggtttacgtgccctcgcatctataccacatgttgttcgaactattcaagaatgcaatgcgggcgaccgtggagtcgcacgaatcctctttaatactcccccccatcaaggttatggtcgcccttggcgaagaagatttgagcataaaaatgtctgatcgagggggaggtgtcccactgcggaagatagagagactgttctcatacatgtacagcactgcacccacgcctcaaccaggaaccggaggcacacccctcgctggttttggatacggcctccctatttccagactctacgccaaatatttccaaggggacctgcagctgttcagcatggagggttttgggaccgacgccgtgatctacctaaaggccttaagcacggactctgtggaaagattgccagtgtacaacaagagcgcttggcgccactatcaaacaattcaggaagccggagactggtgcgtcccgtcaactgagccgaagaacacaagcacatacagagtgtcctag

SEQ ID NO: 78699 - DNA, 1032 bp, Artificial Sequence
  derived and/or modified sequence
atgaaagagatcaacctgttgccggatcgtgtgttatctactccttcagttcagctggtacagtcttggtacgtgcagagcctcctcgacattatggagttcctagataaagatccagaggaccatcgaaccctctcgcagtttaccgatgcactggttaccatacggaatcgccacaatgatgttgtgccgactatggctcagggggtgctagagtacaaggatacatacggcgatgatccagtgtccaatcagaatatccaatacttccttgaccgcttctacctgagtagaatcagcatacgtatgctcatcaatcagcacactctaatcttcgatggatccaccaatcccgcacacccaaaacacatcggctctattgacccaaactgtaatgtgtcagaggtggtgaaagatgcatatgatatggcaaagctgctgtgcgacaaatactatatggctagtccagatttagagatacaggagatcaacgccgccaattctaaacaaccaattcatatggtgtatgtgccaagtcatctttatcacatgctgttcgagttgtttaagaacgctatgagagccacagtcgagagtcatgagagtagcctgattcttcctccaatcaaggttatggtggcacttggcgaagaagacctcagcattaaaatgagcgatagaggaggaggcgtcccgctgagaaaaatcgagcggctgttttcctatatgtattcgacagcccctacaccacagccaggcacaggaggtacccctttggcaggcttcggttatggccttcccatcagcagactgtacgcaaaatatttccagggagacctgcagttattcagtatggaagggttcggcacagacgccgtaatttacctaaaagccctgagcaccgatagcgtcgagaggctgcctgtctacaataaatccgcctggcggcactaccagactatccaggaagccggagattggtgcgtcccatcgactgaacccaaaaatacttccacctatagagtgtcatag

SEQ ID NO: 78700 - RNA, 1032 nt, Artificial Sequence
  derived and/or modified sequence
augaaagagaucaaccuguugccggaucguguguuaucuacuccuucaguucagcugguacagucuugguacgugcagagccuccucgacauuauggaguuccuagauaaagauccagaggaccaucgaacccucucgcaguuuaccgaugcacugguuaccauacggaaucgccacaaugauguugugccgacuauggcucagggggugcuagaguacaaggauacauacggcgaugauccaguguccaaucagaauauccaauacuuccuugaccgcuucuaccugaguagaaucagcaucaggaugcucaucaaucagcauacccucaucuucgacggcucaacaaauccugcucaccccaagcauauugguucuaucgaucccaacuguaacguaagugaaguuguuaaagacgccuaugacauggccaagcugcucugcgauaaauacuacauggcuagccccgaccuggaaauucaggagaucaacgcagcaaacagcaaacagccaauucauaugguuuacgugcccucgcaucuauaccacauguuguucgaacuauucaagaaugcaaugcgggcgaccguggagucgcacgaauccucuuuaauacucccccccaucaagguuauggucgcccuuggcgaagaagauuugagcauaaaaaugucugaucgagggggaggugucccacugcggaagauagagagacuguucucauacauguacagcacugcacccacgccucaaccaggaaccggaggcacaccccucgcugguuuuggauacggccucccuauuuccagacucuacgccaaauauuuccaaggggaccugcagcuguucagcauggaggguuuugggaccgacgccgugaucuaccuaaaggccuuaagcacggacucuguggaaagauugccaguguacaacaagagcgcuuggcgccacuaucaaacaauucaggaagccggagacuggugcgucccgucaacugagccgaagaacacaagcacauacagaguguccuag

SEQ ID NO: 78701 - RNA, 1032 nt, Artificial Sequence
  derived and/or modified sequence
augaaagagaucaaccuguugccggaucguguguuaucuacuccuucaguucagcugguacagucuugguacgugcagagccuccucgacauuauggaguuccuagauaaagauccagaggaccaucgaacccucucgcaguuuaccgaugcacugguuaccauacggaaucgccacaaugauguugugccgacuauggcucagggggugcuagaguacaaggauacauacggcgaugauccaguguccaaucagaauauccaauacuuccuugaccgcuucuaccugaguagaaucagcauacguaugcucaucaaucagcacacucuaaucuucgauggauccaccaaucccgcacacccaaaacacaucggcucuauugacccaaacuguaaugugucagagguggugaaagaugcauaugauauggcaaagcugcugugcgacaaauacuauauggcuaguccagauuuagagauacaggagaucaacgccgccaauucuaaacaaccaauucauaugguguaugugccaagucaucuuuaucacaugcuguucgaguuguuuaagaacgcuaugagagccacagucgagagucaugagaguagccugauucuuccuccaaucaagguuaugguggcacuuggcgaagaagaccucagcauuaaaaugagcgauagaggaggaggcgucccgcugagaaaaaucgagcggcuguuuuccuauauguauucgacagccccuacaccacagccaggcacaggagguaccccuuuggcaggcuucgguuauggccuucccaucagcagacuguacgcaaaauauuuccagggagaccugcaguuauucaguauggaaggguucggcacagacgccguaauuuaccuaaaagcccugagcaccgauagcgucgagaggcugccugucuacaauaaauccgccuggcggcacuaccagacuauccaggaagccggagauuggugcgucccaucgacugaacccaaaaauacuuccaccuauagagugucauag

SEQ ID NO: 78702 - protein, 147 aa, Artificial Sequence
  derived and/or modified sequence
MDLGAITKYSALHAKPNGLILQYGTAGFRTKAEHLDHVMFRMGLLAVLRSKQTKSTIGVMVTASHNPEEDNGVKLVDPLGEMLAPSWEEHATCLANAEEQDMQRVLIDISEKEAVNLQQDAFVVIGRDTRPSSEKLSQSVIDGVTVL

SEQ ID NO: 78703 - protein, 566 aa, Artificial Sequence
  derived and/or modified sequence
MDLGAITKYSALHAKPNGLILQYGTAGFRTKAEHLDHVMFRMGLLAVLRSKQTKSTIGVMVTASHNPEEDNGVKLVDPLGEMLAPSWEEHATCLANAEEQDMQRVLIDISEKEAVNLQQDAFVVIGRDTRPSSEKLSQSVIDGVTVLGGQFHDYGLLTTPQLHYMVYCRNTGGRYGKATIEGYYQKLSKAFVELTKQASCSGDEYRSLKVDCANGIGALKLREMEHYFSQGLSVQLFNDGSKGKLNHLCGADFVKSHQKPPQGMEIKSNERCCSFDGDADRIVYYYHDADGHFHLIDGDKIATLISSFLKELLVEIGESLNIGVVQTAYANGSSTRYLEEVMKVPVYCTKTGVKHLHHKAQEFDIGVYFEANGHGTALFSTAVEMKIKQSAEQLEDKKRKAAKMLENIIDLFNQAAGDAISDMLVIEAILALKGLTVQQWDALYTDLPNRQLKVQVADRRVISTTDAERQAVTPPGLQEAINDLVKKYKLSRAFVRPSGTEDVVRVYAEADSQESADHLAHEVSLAVFQLAGGIGERPQPGYKAAETTHNINNAFGPGTANEHTVP

SEQ ID NO: 78704 - DNA, 1701 bp, Artificial Sequence
  derived and/or modified sequence
atggatcttggggccatcactaaatactccgccctgcacgccaaacccaacggacttatcctgcagtacggcacggccggtttcaggacaaaggccgaacatttggaccatgtaatgttcaggatggggctactggccgtattacggagtaaacaaaccaaaagcactatcggggtcatggtgaccgcaagccataatcccgaggaggataacggagtgaaattagttgatcccttgggcgaaatgctggctccgagttgggaggagcacgcaacttgccttgctaacgcggaggaacaggacatgcaacgagtgctaattgacatatccgagaaggaggcagtgaacctgcagcaggacgcattcgtggttattgggcgcgacacacgaccatccagcgaaaaactgtctcagagcgtgatcgatggagtgacagttttaggtggacaattccatgattacgggctgctaacaactccccaattgcactacatggtgtactgcaggaacaccggaggacggtatggaaaagccacgatcgagggttactaccagaagctttccaaggcgtttgtcgagctgaccaaacaggcaagctgtagtggtgatgaataccgtagtttaaaagtggactgtgctaatggcatcggtgccctgaaactccgcgagatggagcactatttctcacagggactgtctgttcagctcttcaatgatggctctaagggaaagttaaatcacctctgcggtgccgatttcgtgaagtctcaccagaagccaccacagggcatggagataaagtcaaacgagcggtgttgcagttttgacggggacgccgataggatcgtgtactattatcatgacgcagacggacatttccatttgatcgatggcgacaaaattgcgaccctgatcagcagcttcttgaaggaactcctggtggaaatcggagaatcgctgaatatcggcgtagtccagaccgcttacgctaatggaagctcaacgagatacctcgaagaggtcatgaaagtccctgtatattgcaccaaaacaggggtaaaacatctgcaccacaaggctcaagaattcgatatcggggtatactttgaagccaatggacacggaaccgccctcttttcgacagccgtggagatgaagatcaagcagtccgcagaacaactggaagataaaaagcgtaaggctgctaagatgctggagaacatcatcgaccttttcaatcaggcagcaggggacgcaatctccgatatgctcgtcatcgaggcaatccttgctctgaagggcctgactgtgcaacagtgggacgctctgtatacagacttgccgaaccgtcaactaaaagttcaggtggcggatcgacgtgtgatctctacgacagacgctgaaagacaggcagtcaccccgcctggattgcaagaggcaataaatgacctcgtgaagaagtataagctctccagagcattcgtcaggccgtccggaaccgaggacgtggtgagggtttatgcagaagctgactcacaggagtcggccgatcatctagcccatgaggtgagcctggctgtcttccagctggccggtgggatcggggagcggccacagccaggctataaagctgctgagaccactcacaatataaacaacgcttttggacctggaaccgctaatgaacacaccgtaccttag

SEQ ID NO: 78705 - DNA, 1701 bp, Artificial Sequence
  derived and/or modified sequence
atggacctgggcgccatcaccaagtacagcgccctgcacgccaagcccaacggcctcatcctgcagtatggaacagctggcttccgcaccaaggccgagcacctggaccacgtgatgttcaggatgggcctgctggccgtgctgcggagcaagcagaccaagagcaccatcggcgtgatggtgacagccagccacaacccagaagaagataatggagtgaagctggtggaccccctgggggagatgctggcccccagctgggaggagcacgccacctgcctggccaatgctgaggagcaggacatgcagagggtgctgattgacatcagcgagaaggaggccgtgaacctgcagcaggatgcctttgtggtgattggccgggacacccggcccagcagcgagaagctgagccagagcgtgattgatggagtgacagtgctgggcggccagttccatgactatggcctgctgaccaccccccagctgcactacatggtgtactgcagaaatactggaggccgctatggcaaggccaccatcgagggctactaccagaagctgagcaaggcctttgtggagctgaccaagcaggccagctgcagcggagatgagtaccgcagcctgaaggtggactgtgccaacggcatcggggccctgaagctgcgggagatggagcactacttcagccagggcctgtctgtgcagctgttcaatgatggcagcaagggcaagctgaaccacctgtgtggggctgactttgtgaagagccaccagaagccaccccagggcatggagatcaagagcaatgaacgctgctgcagctttgatggagatgctgaccgcatcgtgtactactaccatgatgctgatggccacttccacctgattgatggagacaagatcgccaccctcatcagcagcttcctgaaggagctgctggtggagatcggggagagcctgaacatcggcgtggtgcagacagcctatgccaacggcagcagcacccgctacctggaggaggtgatgaaggtgcctgtgtactgcaccaagacaggagtgaagcacctgcaccacaaggcccaggagtttgatattggagtgtactttgaggccaacggccacggcacagccctcttcagcacagctgtggagatgaagatcaagcagagcgctgagcagctggaggacaagaagaggaaggccgccaagatgctggagaacatcatcgacctcttcaaccaggccgctggagatgccatcagtgacatgctggtgattgaggccatcctggccctgaagggcctgactgtgcagcagtgggatgccctgtacacagacctgcccaaccggcagctgaaggtgcaggtggccgacagaagagtcatcagcaccacagatgctgagcggcaggccgtgaccccacctggcctgcaggaggccatcaatgacctggtgaagaagtacaagctgagccgggcctttgtgcggcccagcggcacagaagatgtggtgcgggtgtatgcagaggccgacagccaggagagcgctgaccacctggcccacgaggtgtccctggccgtgttccagctggccggcggcatcggggagcggccccagcccggctacaaggctgctgagaccacccacaacatcaacaatgcctttggacctggaacagccaatgagcacacagtgccctag

SEQ ID NO: 78706 - DNA, 1701 bp, Artificial Sequence
  derived and/or modified sequence
atggacctgggcgccatcaccaagtacagcgccctgcacgccaagcccaatggacttatacttcagtatggcaccgccgggttccggaccaaggccgaacatctcgatcacgtaatgttccgtatggggctcctcgccgttctacggagcaaacagacgaaaagcaccataggggttatggtaaccgcgagccataatcccgaggaggataatggggtcaagctggtcgaccccctcggggagatgctggcccctagctgggaagagcacgccacctgtctggcgaatgctgaggaacaggatatgcaacgtgtgttgatcgacatttctgagaaggaggccgtcaatcttcagcaggacgctttcgttgttattggcagggacaccaggccctccagcgaaaagctctctcagtccgtcattgacggcgtgacagtcctgggcggacagtttcacgactacggcctactgacaaccccacaactgcactatatggtttattgccgcaacacaggcggaaggtatggaaaagccacaatagagggctactaccagaagctgtcaaaggcattcgtcgaattaactaagcaggcaagttgctcgggcgacgagtaccgatcacttaaagtcgactgcgcgaatggaataggcgctctaaaattgcgcgagatggaacactacttttctcaaggcttatcggtgcaattattcaacgatggatccaaaggcaaactgaatcacctgtgtggcgcagactttgtgaagtcccatcagaagccccctcagggcatggaaatcaagtcaaatgaacgatgctgtagtttcgatggcgacgctgaccgcatagtgtattattaccacgacgccgatgggcattttcacctaattgacggtgacaagatcgccactctcattagcagctttttaaaagagctgctggtggagatcggggaatctctgaatatcggagtagtgcaaactgcttacgcaaacgggagttctacacggtatctggaagaagttatgaaggttcctgtctactgtactaaaacaggagtcaagcaccttcaccacaaggcacaggagtttgatatcggagtctacttcgaagcaaacggtcacggcaccgcattgttttctaccgctgttgaaatgaagatcaaacagtccgccgaacagttagaagataaaaaaaggaaggcagccaaaatgttggagaatatcattgacctattcaaccaggcagccggggacgcaatctccgatatgctggttatcgaggcaatcttagctcttaaaggtttaacagtccagcagtgggatgccttgtacaccgatttgccaaataggcagttgaaggtgcaggtcgccgacaggagggttatcagtaccacggacgctgagcgacaggccgtcactccccccgggttgcaagaagctattaatgatctggtgaagaagtacaaattatcccgagcctttgtaaggccatcaggcacagaagacgttgtgagggtatatgcagaagctgactcccaggagtcagcagaccatctcgcacatgaagtttcacttgcagtctttcaactggcaggcggcatcggcgagcgccctcaacccgggtacaaagcggccgaaaccacccacaacataaacaacgcctttggaccagggaccgcaaatgagcataccgtcccttag

SEQ ID NO: 78707 - DNA, 2013 bp, Artificial Sequence
  derived and/or modified sequence
gttgcttgggcgcttctccgctgcgtgtaggtgaagggggcttcctgaccgagacatggatttaggtgctattacaaaatactcagcattacacgccaagcccaatggactgatccttcaatacgggactgctggatttcgaacgaaggcagaacatcttgatcatgtcatgtttcgcatgggattattagctgtcctgaggtcaaaacagacaaaatccactataggagtcatggtaacagcgtcccacaatcctgaggaagacaatggtgtaaaattggttgatcctttgggtgaaatgttggcaccatcctgggaggaacatgccacctgtttagcaaatgctgaggaacaagatatgcagagagtgcttattgacatcagcgagaaagaagctgtgaatctgcaacaagatgcctttgtagttattggtagagataccaggcccagcagtgagaaactttcacaatctgtaatagatggtgtgactgttctaggaggtcaattccatgattatggcttgttaacaacaccccagctgcactacatggtgtattgtcgaaacacgggtggccgatatggaaaggcaactatagaaggttactaccagaaactctctaaggcttttgtggaactcaccaaacaggcttcttgcagtggagatgaatacagatcacttaaggttgactgtgcaaatggcataggggccctgaagctaagggaaatggaacactacttctcacagggcctgtcagttcagctgtttaatgatgggtccaagggcaaactcaatcatttatgtggagctgactttgtgaaaagtcatcagaaacctccacagggaatggaaattaagtccaatgaaagatgctgttcttttgatggagatgcagacagaattgtttattactaccatgatgcagatggccactttcatctcatagatggagacaagatagcaacgttaattagcagtttccttaaagagctcctggtggagattggagaaagtttgaatattggtgttgtacaaactgcatatgcaaatggaagttcaacacggtatcttgaagaagttatgaaggtacctgtctattgcactaagactggtgtaaaacatttgcaccacaaggctcaagagtttgacattggagtttattttgaagcaaatgggcatggcactgcactgtttagtacagctgttgaaatgaagataaaacaatcagcagaacaactggaagataagaaaagaaaagctgctaagatgcttgaaaacattattgacttgtttaaccaggcagctggtgatgctatttctgacatgctggtgattgaagcaatcttggctctgaagggcttgactgtacaacagtgggatgctctctatacagatcttccaaacagacaacttaaagttcaggttgcagacaggagagttattagcactaccgatgctgaaagacaagcagttacacccccaggattacaggaggcaatcaatgacctggtgaagaagtacaagctttctcgagcttttgtccggccctctggtacagaagatgtcgtccgagtatatgcagaagcagactcacaagaaagtgcagatcaccttgcacatgaagtgagcttggcagtatttcagctggctggaggaattggagaaaggccccaaccaggttataaagcagcagagacaacacacaacatcaacaatgcatttggcccaggaactgctaatgaacatacagtgccgtgatggctcaagaagttttgcaaaggagactagagccttgaagatgaggagtgcagtggccagtcatcggaaattgataatgaccaattgagaacatcatcgaagctgatcctcttacaactataagagagctgcccaagaactcaatgttgaccattttatggtcgttcggcatttgaagcaaattgaaaaggtgaaaaagctcaataaatgggtgcctcatgagctgagtgaaaaataaaaaaattcgttgttttgaa

SEQ ID NO: 78708 - DNA, 1701 bp, Artificial Sequence
  derived and/or modified sequence
atggacctcggggctattaccaagtattcagcactacacgccaaacctaacggtctgatattgcaatatgggacagctgggttccggaccaaggccgagcacttggatcacgtgatgtttagaatggggctgcttgcggttttgcggtcaaagcagacaaaatccaccattggtgtgatggtgaccgcttcacataatccagaagaggacaatggtgttaagctagtggatccactcggcgaaatgttggcaccctcttgggaagagcatgccacatgtctagccaatgccgaggagcaggatatgcagagggttctcattgatatttccgagaaggaagctgtgaacctgcagcaggacgcctttgtggtcattggtagggacacgcgtccctcatctgagaagctgtcccagtctgtcatcgacggtgtgaccgtgctggggggtcaatttcacgactatggattgctgaccacccctcaacttcactacatggtttactgtaggaacaccggtgggcgttacggtaaggccaccatcgaggggtactatcaaaagttaagtaaggcctttgttgagcttacaaagcaggcatcttgcagtggagacgaatacaggtctctgaaggtggattgtgccaatggcatcggagccctgaaactgagagagatggaacactatttctcccaaggactgtcggtccagctcttcaacgacgggtcgaagggcaagctgaaccacctctgcggggctgattttgtgaaatcccatcagaagccaccacaagggatggaaattaagagcaatgagagatgttgtagcttcgacggcgacgctgacaggatcgtatactactaccatgacgcagatgggcattttcacctaatcgatggcgataaaatcgccaccctgatttcctcatttcttaaggagctgcttgttgaaattggagaatcactgaatatcggtgttgtgcagaccgcatatgcgaacgggtcatctacacgttacctggaggaggtgatgaaggtgccagtgtattgcaccaagactggcgtaaaacacctgcatcacaaggcacaggagttcgatattggggtctatttcgaagcaaacggccacggcaccgctctgttcagcaccgcggtagaaatgaaaattaagcagtctgcggagcaactggaggacaaaaaacggaaggctgccaaaatgctggagaatataatcgatctgtttaaccaggccgctggcgatgccattagtgatatgctcgtgatcgaagcaattctagccctgaaaggactgaccgtacagcagtgggatgcactctatacagacctgcccaatcgtcagctgaaggtgcaagtagcagaccgaagggtaattagcacaacagacgctgagcggcaggccgtcacgcctcctgggcttcaggaagccatcaatgatctggttaaaaagtacaaactctcccgcgcattcgtccggccttccggcacggaagacgtggtgcgcgtgtacgccgaggccgatagtcaggaatcagccgaccacctggcacacgaagtgtcgctggctgtcttccagctggccggaggcattggcgagagaccccagccagggtataaggcagccgaaaccactcataatatcaataacgccttcgggccagggaccgctaacgaacatactgtcccttag

SEQ ID NO: 78709 - DNA, 1701 bp, Artificial Sequence
  derived and/or modified sequence
atggacctgggcgccatcaccaagtacagcgccctgcacgccaagcccaacggcctgatcctgcagtacggcaccgccggcttcagaaccaaggccgagcacctggaccacgtgatgttcagaatgggcctgctggccgtgctgagaagcaagcagaccaagagcaccatcggcgtgatggtgaccgccagccacaaccccgaggaggacaacggcgtgaagctggtggaccccctgggcgagatgctggcccccagctgggaggagcacgccacctgcctggccaacgccgaggagcaggacatgcagagagtgctgatcgacatcagcgagaaggaggccgtgaacctgcagcaggacgccttcgtggtgatcggcagagacaccagacccagcagcgagaagctgagccagagcgtgatcgacggcgtgaccgtgctgggcggccagttccacgactacggcctgctgaccaccccccagctgcactacatggtgtactgcagaaacaccggcggcagatacggcaaggccaccatcgagggctactaccagaagctgagcaaggccttcgtggagctgaccaagcaggccagctgcagcggcgacgagtacagaagcctgaaggtggactgcgccaacggcatcggcgccctgaagctgagagagatggagcactacttcagccagggcctgagcgtgcagctgttcaacgacggcagcaagggcaagctgaaccacctgtgcggcgccgacttcgtgaagagccaccagaagcccccccagggcatggagatcaagagcaacgagagatgctgcagcttcgacggcgacgccgacagaatcgtgtactactaccacgacgccgacggccacttccacctgatcgacggcgacaagatcgccaccctgatcagcagcttcctgaaggagctgctggtggagatcggcgagagcctgaacatcggcgtggtgcagaccgcctacgccaacggcagcagcaccagatacctggaggaggtgatgaaggtgcccgtgtactgcaccaagaccggcgtgaagcacctgcaccacaaggcccaggagttcgacatcggcgtgtacttcgaggccaacggccacggcaccgccctgttcagcaccgccgtggagatgaagatcaagcagagcgccgagcagctggaggacaagaagagaaaggccgccaagatgctggagaacatcatcgacctgttcaaccaggccgccggcgacgccatcagcgacatgctggtgatcgaggccatcctggccctgaagggcctgaccgtgcagcagtgggacgccctgtacaccgacctgcccaacagacagctgaaggtgcaggtggccgacagaagagtgatcagcaccaccgacgccgagagacaggccgtgaccccccccggcctgcaggaggccatcaacgacctggtgaagaagtacaagctgagcagagccttcgtgagacccagcggcaccgaggacgtggtgagagtgtacgccgaggccgacagccaggagagcgccgaccacctggcccacgaggtgagcctggccgtgttccagctggccggcggcatcggcgagagaccccagcccggctacaaggccgccgagaccacccacaacatcaacaacgccttcggccccggcaccgccaacgagcacaccgtgccctag

SEQ ID NO: 78710 - DNA, 1467 bp, Artificial Sequence
  derived and/or modified sequence
atggtactgcagaaagaacctgcaggtgcagtgatctgggggttcgggacgccaggcgctacagtcaccgtgaccctcagacagggccaggagaccattatgaagaaagtgacctctgtgaaggcccactcagatacctggatggtggtgctggaccccatgaagcccgggggtcctttcgaggtcatggcccagcagactcttgagaagatcaatttcaccctgagggtgcatgatgtgttgtttggcgatgtgtggctgtgctctggacaatcaaacatgcagatgacagtgctgcaaattttcaacgccaccagagaactgagcaacacagcagcgtatcagagcgtgaggattctctcagtgagccctatccaggccgagcaggagctggaagatctagttgctgtcgatctgcagtggtcgaaacccaccagcgaaaacctgggacatgggtactttaaatatatgagcgccgtctgctggttgtttggccggcacctgtacgatactctgcagtatccaattggtctaattgcttccagctggggcgggactcccatcgaggcttggtcttcagggaggagcctaaaggcttgtggagtccctaagcagggttccatcccatacgacagtgtgacagggccctcaaagcattccgttctctggaatgctatgatccatcccctgtgcaacatgaccttgaagggggtggtatggtatcagggcgagtcgaacatcaattataacaccgacctgtacaattgcaccttcccggcgctaatcgaggattggcgcgagacctttcacagagggtcccagggtcagactgaaagattttttccattcggcctagtgcagctgagcagtgatctatccaaaaagtcttccgatgatggcttccctcagattagatggcatcaaaccgccgatttcggctacgtgcccaatcctaaaatgccaaacacctttatggccgtcgccatggatctatgtgatcgggattcacccttcggctctatccacccccgcgataagcagactgtcgcctaccggctgcacctgggtgcacgcgccctggcctacggggaaaaaaatttaacttttgagggccctctcccagaaaagatcgagctgctggcacacaaagggctgttgaacttaacttattaccagcagatccaggtgcaaaagaaggataacaaaattttcgaaatctcttgttgttccgatcaccgctgcaaatggctgcccgcttcgatgaacacagtgtccacacagtccctcaccctggctatcgactcatgtcatggtactgtagtggccctgcggtatgcgtggaccacatggccttgcgagtataagcagtgcccattataccacccttcatccgcacttcctgctcccccattcatcgcttttatcactgatcaggggccgggacatcaatctaatgtggcaaagtag

SEQ ID NO: 78711 - DNA, 1467 bp, Artificial Sequence
  derived and/or modified sequence
atggtgctgcagaaggagcctgctggggccgtcatctggggcttcggcacccctggggccaccgtgacagtgaccctgcggcagggccaggagaccatcatgaagaaggtgacctctgtgaaggcccacagcgacacctggatggtggtgctggaccccatgaagccaggcggcccctttgaggtgatggcccagcagaccctggagaagatcaacttcaccctgcgggtgcatgatgtgctgtttggagatgtgtggctgtgcagcggccagagcaacatgcagatgacagtgctgcagatcttcaatgccacccgggagctgagcaacacagctgcctaccagagcgtgcgcatcctgtctgtgagccccatccaggccgagcaggagctggaggacctggtggccgtggacctgcagtggagcaagcccaccagcgagaacctgggccacggctacttcaagtacatgtctgctgtgtgctggctgtttggccgccacctgtatgacaccctgcagtaccccatcggcctgattgccagctcctggggcggcacccccatcgaggcctggagcagcggccgcagcctgaaggcctgtggggtgcccaagcagggcagcatcccctatgacagcgtgacaggccccagcaagcacagcgtgctgtggaatgccatgatccaccccctgtgcaacatgaccctgaagggcgtggtgtggtaccagggcgagagcaacatcaactacaacacagacctgtacaactgcaccttccctgccctgattgaggactggagggagaccttccaccggggcagccagggccagacagagcgcttcttccccttcggcctggtgcagctgagcagtgacctgagcaagaagagcagtgatgatggcttcccccagatccgctggcaccagacagctgactttggctacgtgcccaaccccaagatgcccaacaccttcatggctgtggccatggacctgtgtgaccgggacagccccttcggcagcatccacccccgggacaagcagacagtggcctaccgcctgcacctgggcgcccgggccctggcctacggggagaagaacctgacctttgagggccccctgcctgagaagattgagctgctggcccacaagggcctgctgaacctgacctactaccagcagatccaggtgcagaagaaggacaacaagatctttgagatcagctgctgcagcgaccaccgctgcaagtggctgcctgcctccatgaacacagtgtccacccagagcctgaccctggccatcgacagctgccacggcaccgtggtggccctgcgctatgcctggaccacctggccctgtgagtacaagcagtgccccctgtaccaccccagcagcgccctgcctgccccacccttcatcgccttcatcacagaccagggccctggccaccagagcaatgtggccaagtag

SEQ ID NO: 78712 - DNA, 1467 bp, Artificial Sequence
  derived and/or modified sequence
atggtgctgcagaaggagcccgccggcgccgtgatctggggcttcgggacgccaggagctacagtgacagtaacactgcggcagggccaagagacaatcatgaagaaggtcacatcggtcaaggcacactccgatacatggatggttgtgctggacccaatgaaacccggggggccgtttgaggtgatggcccagcagacacttgaaaagattaatttcacgctgcgtgtgcacgatgtcctcttcggagacgtgtggctgtgttccggacagtcaaatatgcagatgactgtgctgcagatatttaacgcaacccgagaactgagcaataccgccgcatatcaaagcgtccggattctgtccgtctcgcccatccaagccgaacaggaattagaagatcttgtagctgtcgaccttcagtggtcaaaacccaccagcgaaaacctaggccacggatatttcaagtatatgagtgcagtctgctggctgttcggcaggcatctctacgacacactccagtacccaattggccttatcgctagctcttggggtggtacgcctatagaggcctggagctctgggaggtccttaaaggcctgtggagtacctaagcaagggagtatcccgtacgactcagtcacaggcccctccaagcactccgtgttgtggaacgcgatgattcatcccttgtgtaatatgacactgaagggcgtcgtatggtatcagggtgagagtaacattaattataacaccgatctatataattgtacctttcctgcactgatagaggattggcgggagaccttccaccggggctcccaagggcagacagagagattttttcccttcggcctggtgcagttgagttctgatctgtctaaaaagtcaagtgacgacgggtttccccagatcaggtggcatcagaccgccgattttggctacgtccccaatcctaagatgcctaatacctttatggctgtggccatggacctgtgtgacagagattctcccttcggcagcattcaccctcgggataagcagactgttgcctacagactgcatctgggagctagagcgctggcatacggggagaagaatctgaccttcgagggtcccttgccagaaaaaatcgagctactggctcacaagggccttctcaatttgacgtattatcagcaaatccaggttcagaagaaggataataagatcttcgaaatcagctgttgtagtgaccaccggtgtaaatggctgcccgctagtatgaacaccgttagcacgcaatcgctcacacttgcgattgacagctgtcatgggactgttgtggcgctccggtatgcttggactacatggccctgtgagtataagcaatgtccgctgtaccacccaagctctgcactcccagcgcctccctttattgcttttatcaccgatcaaggcccaggccatcagtccaacgtggcgaagtag

SEQ ID NO: 78713 - DNA, 1467 bp, Artificial Sequence
  derived and/or modified sequence
atggttctacagaaggaacctgcaggagctgtcatttggggctttgggacgcccggagcaaccgtgaccgttactttgcgtcaaggccaagagacaattatgaaaaaagttacctccgtcaaggcccactccgacacatggatggtggtgctggatcccatgaagcccggaggcccattcgaagtgatggctcagcaaactctagagaagatcaactttactctgcgtgttcatgacgtgctgttcggcgacgtgtggttatgctcggggcagtccaacatgcaaatgactgtgctgcagatcttcaatgctacaagggagctgtccaacactgcagcctaccagagcgtgcgtatactcagtgtctctccaatacaggccgagcaagagctggaggacctggtggctgtggatctgcaatggtcaaagcccacgtccgagaacctaggccacggctattttaaatatatgagtgccgtctgttggctgttcggtagacatctctacgacacacttcagtatcccatcgggttgatagcttcctcctgggggggaaccccaatcgaagcttggagtagcggccgatctctaaaagcatgtggcgttcctaagcaggggtctatcccctacgattcagtcaccgggcctagcaagcacagtgtgttatggaatgccatgatccatcccctgtgtaacatgaccttgaagggggtggtctggtaccaaggcgagagcaatattaactacaatacagacctgtataattgcactttccctgccttgatcgaagactggcgggaaacctttcaccgcggatcacaggggcagacagaacgcttctttccattcggcctggtccagttgtcttccgacctgtccaagaagtcgagcgatgatggatttcctcagattagatggcaccagaccgcagactttggatatgtccctaatcctaagatgcctaatactttcatggcagtggctatggatctctgcgatagagacagcccctttgggtctatccaccccagagacaaacagaccgtggcttacaggttgcatctgggtgctagggccttagcatacggcgagaagaacctgaccttcgagggtccactgccagagaagattgagctgctggcccataaaggcctgcttaacctgacgtactaccagcagattcaggtccaaaagaaagataacaaaatatttgagatatcttgctgcagtgatcaccggtgcaagtggctgcccgcatccatgaataccgtgtcaactcagagtttgaccctggccatagattcatgccatgggacagtcgttgccttgcgatatgcctggaccacttggccttgtgaatacaaacagtgccccttgtatcatccgtcgagtgccttacctgcccctcctttcatagccttcatcaccgaccagggtccaggccaccaatctaatgtggctaaatag

SEQ ID NO: 78714 - DNA, 1467 bp, Artificial Sequence
  derived and/or modified sequence
atggtgctgcagaaggagcccgccggcgccgtgatctggggcttcggcacccccggcgccaccgtgaccgtgaccctgagacagggccaggagaccatcatgaagaaggtgaccagcgtgaaggcccacagcgacacctggatggtggtgctggaccccatgaagcccggcggccccttcgaggtgatggcccagcagaccctggagaagatcaacttcaccctgagagtgcacgacgtgctgttcggcgacgtgtggctgtgcagcggccagagcaacatgcagatgaccgtgctgcagatcttcaacgccaccagagagctgagcaacaccgccgcctaccagagcgtgagaatcctgagcgtgagccccatccaggccgagcaggagctggaggacctggtggccgtggacctgcagtggagcaagcccaccagcgagaacctgggccacggctacttcaagtacatgagcgccgtgtgctggctgttcggcagacacctgtacgacaccctgcagtaccccatcggcctgatcgccagcagctggggcggcacccccatcgaggcctggagcagcggcagaagcctgaaggcctgcggcgtgcccaagcagggcagcatcccctacgacagcgtgaccggccccagcaagcacagcgtgctgtggaacgccatgatccaccccctgtgcaacatgaccctgaagggcgtggtgtggtaccagggcgagagcaacatcaactacaacaccgacctgtacaactgcaccttccccgccctgatcgaggactggagagagaccttccacagaggcagccagggccagaccgagagattcttccccttcggcctggtgcagctgagcagcgacctgagcaagaagagcagcgacgacggcttcccccagatcagatggcaccagaccgccgacttcggctacgtgcccaaccccaagatgcccaacaccttcatggccgtggccatggacctgtgcgacagagacagccccttcggcagcatccaccccagagacaagcagaccgtggcctacagactgcacctgggcgccagagccctggcctacggcgagaagaacctgaccttcgagggccccctgcccgagaagatcgagctgctggcccacaagggcctgctgaacctgacctactaccagcagatccaggtgcagaagaaggacaacaagatcttcgagatcagctgctgcagcgaccacagatgcaagtggctgcccgccagcatgaacaccgtgagcacccagagcctgaccctggccatcgacagctgccacggcaccgtggtggccctgagatacgcctggaccacctggccctgcgagtacaagcagtgccccctgtaccaccccagcagcgccctgcccgccccccccttcatcgccttcatcaccgaccagggccccggccaccagagcaacgtggccaagtag

SEQ ID NO: 78715 - protein, 492 aa, Artificial Sequence
  derived and/or modified sequence
MRLAAAANEAYTAPLAVSGLLGCKQCGGGRDQDEELGIRIPRPLGQGPSRFIPEKEILQVGSEDAQMHALFADSFAALGRLDNITLVMVFHPQYLESFLKTQHYLLQMDGPLPLHYRHYIGIMAAARHQCSYLVNLHVNDFLHVGGDPKWLNGLENAPQKLQNLGELNKVLAHRPWLITKEHIEGLLKAEEHSWSLAELVHAVVLLTHYHSLASFTFGCGISPEIHCDGGHTFRPPSVSNYCICDITNGNHSVDEMPVNSAENVSVSDSFFEVEALMEKMRQLQECRDEEEASQEEMASRFEIEKRESMFVFSSDDEEVTPARAVSRHFEDTSYGYKDFSRHGMHVPTFRVQDYCWEDHGYSLVNRLYPDVGQLIDEKFHIAYNLTYNTMAMHKDVDTSMLRRAIWNYIHCMFGIRYDDYDYGEINQLLDRSFKVYIKTVVCTPEKVTKRMYDSFWRQFKHSEKVHVNLLLIEARMQAELLYALRAITRYMT

SEQ ID NO: 78716 - DNA, 1479 bp, Artificial Sequence
  derived and/or modified sequence
atgcgactggctgcagcagccaacgaggcttatacagcacctctcgctgtttccggattgctgggttgcaaacagtgcgggggaggtcgggatcaggacgaggagcttggaattcgaatccccagacccttgggccagggcccttcgagatttatccccgagaaggagatactccaggtaggctctgaagatgcacagatgcacgctctgtttgccgacagcttcgccgccttagggcggctggacaacatcacgttggttatggtgtttcatcctcaataccttgagagctttcttaagacacagcactatctgctccagatggacggacccctgcccctccactatcgccactatatcggcattatggctgctgcgagacaccagtgtagttatctcgtgaatttgcacgtgaacgacttcctgcacgtgggaggcgaccctaaatggctgaacggactggagaacgccccacagaaacttcaaaacctgggagagctgaataaagtcttggctcatcgcccctggctgattaccaaggagcatatcgagggcctgttaaaggcagaggaacactcatggtccctggccgaactcgttcatgccgtagtgctattgacccactatcacagcctcgcttctttcaccttcgggtgcggtattagccctgagatccattgcgatggcggccacacattccgaccaccctctgtctccaactactgtatttgtgacataaccaacggaaaccatagcgtagatgagatgcctgtgaactccgctgaaaatgtctccgtgagcgactctttcttcgaagtggaagccctgatggagaagatgcggcagctacaggaatgcagagatgaggaggaagccagccaggaagagatggcttcccggtttgagatagagaaaagagaaagtatgtttgtgtttagcagtgacgatgaagaggtgacaccagcccgggctgtctctaggcactttgaagatacatcctatggatacaaagacttttctcgccatggcatgcacgtgccaacttttagagtgcaggattattgctgggaagatcacgggtactctttggtcaatcgcttgtatcccgatgtaggccagcttattgacgagaagtttcacatcgcctacaacctaacttataataccatggcgatgcacaaagatgtggatacttctatgctacgaagagccatctggaactacatccattgtatgtttgggattcggtatgatgattatgactatggcgagatcaatcagctgcttgacaggtctttcaaagtctacattaaaacagtggtctgtactccagaaaaagtgacgaaacgcatgtacgattccttttggagacagtttaaacattccgaaaaggtacatgttaatcttctgttaatagaagctcggatgcaggcagagctcctctacgccttgcgggccataacacggtatatgacttag

SEQ ID NO: 78717 - DNA, 1479 bp, Artificial Sequence
  derived and/or modified sequence
atgaggctggccgccgccgccaatgaggcctacacagcccccctggccgtgtctggcctgctgggctgcaagcagtgtggcggcggccgggaccaggatgaggagctgggcatccgcatcccccggcccctgggccagggccccagccgcttcatccctgagaaggagatcctgcaggtgggctctgaagatgcccagatgcacgccctgtttgctgacagctttgctgccctgggccgcctggacaacatcaccctggtgatggtgttccacccccagtacctggagagcttcctgaagacccagcactacctgctgcagatggatggccccctgcccctgcactaccgccactacatcggcatcatggctgctgcccggcaccagtgcagctacctggtgaacctgcacgtgaatgacttcctgcacgtgggcggggaccccaagtggctgaatggcctggagaatgccccccagaagctgcagaacctgggggagctgaacaaggtgctggcccaccggccctggctgatcaccaaggagcacatcgagggcctgctgaaggccgaggagcacagctggagcctggccgagctggtgcatgctgtggtgctgctgacccactaccacagcctggccagcttcaccttcggctgcggcatcagccctgagatccactgtgatggcggccacaccttccggcccccatctgtgagcaactactgcatctgtgacatcaccaacggcaaccacagcgtggatgagatgcctgtgaacagcgcagaaaatgtgtctgtgtctgacagcttctttgaggtggaggccctgatggagaagatgaggcagctgcaggagtgcagagatgaggaggaggccagccaggaggagatggccagcagatttgaaattgagaagcgggagagcatgtttgtgttcagcagtgatgatgaggaggtgaccccagcccgggctgtgagccgccactttgaggacaccagctatggctacaaggacttcagccgccacggcatgcacgtgcccaccttccgggtgcaggactactgctgggaggaccacggctacagcctggtgaacagactctacccagatgtgggccagctgattgatgagaagttccacatcgcctacaacctgacctacaacaccatggccatgcacaaggatgtggacacctccatgctgcggcgggccatctggaactacatccactgcatgtttggcatccgctatgatgattatgactatggagagatcaaccagctgctggacaggagcttcaaggtgtacatcaagacagtggtgtgcaccccagagaaggtgaccaagaggatgtatgacagcttctggaggcagttcaagcacagcgagaaggtgcacgtgaacctgctgctgattgaggccaggatgcaggccgagctgctgtatgccctgcgggccatcacccgctacatgacctag

SEQ ID NO: 78718 - DNA, 1479 bp, Artificial Sequence
  derived and/or modified sequence
atgcggctggccgccgccgccaacgaggcctacaccgcccccctggctgtcagcggactcctgggctgcaagcaatgtggaggaggccgggaccaagacgaggaactggggatccggattccccgcccactcggacagggcccctcacgtttcatccctgaaaaagagatcttacaggtagggagcgaggatgcacagatgcatgctctgtttgctgacagttttgcggccctcggtcgcttggacaacatcaccctggtgatggtatttcacccacagtacttggaatcttttcttaagacccagcattatctgctgcagatggatggcccacttcccttacattatcgccactatataggcattatggccgcagccaggcatcagtgctcatacctcgtgaatttgcacgtgaacgatttcctccacgttgggggcgatcccaagtggctaaacgggctcgaaaacgctccccagaagcttcagaacctaggagagctaaataaggtattagcccatagaccctggttgatcacaaaggagcatattgagggcctcctaaaagctgaagagcactcgtggtcactggctgaactagtacatgccgtcgtactcctcacacactatcacagtctggcaagcttcacatttggatgtggtatctccccagagatccattgtgacggcggtcacacatttcggcctccatcagtatccaactattgtatttgcgatatcaccaatggtaatcattcagtggacgagatgcccgtcaatagcgctgagaatgtatcagtgagcgacagtttctttgaagtggaggctctaatggaaaaaatgagacaactgcaggagtgccgcgacgaagaggaggccagtcaggaagagatggcctctagattcgaaattgagaaacgggagagcatgttcgtgttcagcagcgacgacgaagaagtgacccccgctcgagccgtgagccggcacttcgaagacacctcctatggctacaaagacttcagccggcatggtatgcatgtacccacattccgcgtacaggattactgttgggaggatcatggatatagccttgtaaacaggctgtacccagatgtggggcaattgattgacgagaaatttcacatcgcctataatctcacttacaatactatggccatgcacaaggacgtggacacaagtatgctgaggcgcgccatatggaattatatccactgcatgtttggtatacggtatgacgactacgattacggtgagattaaccaacttttggaccgctcatttaaagtgtacattaaaaccgtagtttgtacacctgagaaagttacgaagcgtatgtacgactccttttggcggcaattcaagcacagcgagaaggttcacgtcaatttgctgctgattgaggcccgcatgcaagccgagctcctctatgccctgagagccattacccggtacatgacctag

SEQ ID NO: 78719 - DNA, 1479 bp, Artificial Sequence
  derived and/or modified sequence
atgaggctggccgctgcggcaaacgaagcatatacagccccactggccgtgagcggactgctgggttgcaagcagtgcggcggtggtagggatcaagatgaggagcttggcatacgcatccctagaccactgggacagggccctagtaggtttatcccggaaaaagagattctacaggtggggtctgaggacgcccagatgcacgctttgttcgccgacagttttgctgccctcggccgattagataacatcacattggttatggtattccacccacagtatctcgaatcattcctgaaaacccaacactacctcctgcagatggatggccctctacccctgcactaccgtcattatataggtatcatggcggcagcaagacaccaatgttcataccttgtgaaccttcatgtgaacgattttttgcacgtgggcggagatccaaagtggcttaacggactcgagaatgccccacaaaaactgcagaacctaggcgagctgaataaggtgctagctcataggccatggttgatcactaaagaacacatcgaaggattactgaaggcggaggagcatagctggagcttagcagaactggttcatgccgtcgtccttttgacacactatcattctctggcatcctttacttttggctgcggaattagcccggagattcattgtgatggcggacacacattcagaccaccatctgtgtccaattactgtatttgcgacatcaccaacgggaaccattccgtggatgagatgccagtgaactctgcagagaacgtatctgtatctgactcattctttgaggtagaggcattgatggaaaaaatgcggcagttgcaagagtgtagagatgaggaggaggcgagccaggaagagatggcatccagatttgaaatcgagaaacgagaatccatgttcgtgttctccagtgatgacgaggaggtgactccggctagggcagtcagccggcattttgaagacactagttatggttataaagacttcagtaggcacggcatgcatgtgcccaccttcagagtccaggattactgctgggaggaccacggatattctctggtgaaccgactctatcctgacgtcggccaattgatagacgaaaagttccacatagcctataatctgacctacaacacaatggctatgcataaggatgtcgacacatccatgcttaggcgagccatctggaactatatccactgcatgtttggcattagatacgacgattatgactatggggagatcaaccagcttttggatcggagtttcaaggtctacatcaaaacagtggtgtgcacccccgagaaggtgaccaagcgtatgtacgacagcttctggagacagtttaagcattctgagaaggtccacgtgaatcttctcctgattgaggctagaatgcaagccgaactgctgtatgcactgcgtgccattacaagatatatgacatag

SEQ ID NO: 78720 - DNA, 2718 bp, Artificial Sequence
  derived and/or modified sequence
tgaaacagcctgtggatatgccccctcgattgtcttgtcttgtgaaaacagattatttagccaccttcatcccctttgcctcctacttaaaagagagagaaagaaaaaaaacacatttgactcagggaagagatgatgttgcctggaataagtgtgtcctgcaagctctatgacgttatgcacagcgtttactcttgcgtattaagccatcccttttctgaattgtcctttagaaagaggaacttggcattagaattcctcgaccactaggacagggaccaagcagattcatcccagaaaaggagatcctccaagtggggagtgaagacgcacagatgcatgctttatttgcagattcttttgctgctttgggccgtttggataacattacgttagtgatggttttccacccacaatatttagaaagtttcttaaaaactcagcactatctactgcaaatggatgggccgttacccctacattatcgtcactacattggaataatggctgcggcaagacatcagtgctcctacttagtgaacctgcatgtaaatgatttccttcatgttggtggggaccccaagtggctcaatggtttagagaatgctcctcaaaaactacagaatttaggagaacttaacaaagtgttagcccatagaccttggcttattaccaaagaacacattgagggacttttaaaagctgaagagcacagctggtcccttgcggaattggtacatgcagtagttttactcacacactatcattctcttgcctcattcacattcggctgtggaatcagtccagaaattcattgtgatggtggccacacattcagacctccttctgttagcaactactgcatctgtgacattacaaatggcaatcacagtgtggatgagatgccggtcaactcagcagaaaatgtttctgtaagtgattctttctttgaggttgaagccctcatggaaaagatgaggcagttacaggaatgtcgagatgaagaagaggcaagtcaggaagagatggcttcacgttttgaaatagaaaaaagagagagtatgtttgtcttctcttcagatgatgaagaagttacaccagcaagagctgtatctcgtcattttgaggatactagttatggctataaagatttctctagacatgggatgcatgttccaacatttcgtgtccaggactattgctgggaagatcatggttattctttggtaaatcgcctttatccagatgtgggacagttgattgatgaaaaatttcacattgcttacaatcttacttataatacaatggcaatgcacaaagatgttgatacctcaatgcttagacgggcaatttggaactatattcactgcatgtttggaataagatatgatgattatgactatggtgaaattaaccagctattggatcgtagctttaaagtttatatcaaaactgttgtttgcactcctgaaaaggttaccaaaagaatgtatgatagcttctggaggcagttcaagcactctgagaaggttcatgttaatctgcttcttatagaagctaggatgcaagcagaactcctttatgctctgagagccattacccgctatatgacctgatgcctttccttcattaaagatgattctggaatgatcagcagatatagtctacaagggggaaggtactaagccccaggaccaatggtagacaaaataattcagaaatccattgtgccatgattcctttagtttctgctatttttctgtggaaaaccactgctggcacaagcagtgactgtttggcagcttcaagtttagagctgtgaagacaggctgccattcacagtattttgctttttgacagtacaagatgctgtgtaactgttttaatacagcaaatagtaactctccaaatcctgttgcttttatgttaaataagataacaagaattggagcatgcaaagaatgggacttggataatgacttaagctttatatgtaaagaattttagaagatcttggtgctgctattcctgctggaggaatgaatagatggctgtttcagttaagctattagtaataaaagtgaacattgctactatctgagcctacatacataacttgtgtgatttcaaattaaacttgcattatgtgttaattttcttgcatctaaaaaagcatagaattcctactcacacagctcagcaacaaccattttgatggtaacagttaatttctttcattagttttttaaattcagggttctggatattaaattaaaatggcattcttaaagattttcttcaaaaagcaatcctaaatgaaagtgtgtaaattataagaagctggcgatcttttgatatgctgtttcacaggatcctgacactggagggcagctgtcttgtgcattacttgtgtttccagcaccaaagttgtgggacatgttgctgtagactgctgcgcagtcctgggtgcattcagtctctctgcctctgcctgcctcctggtccccactttaaaggctgtgcagctccttaaataataaagctggaaaatatttttagtcgggttatcaaatttgatttacaaaaacgctaactttgtttgaaatgcaaacaggtttgaaaatatgtattaagtactttgtattctggaagcgtgaattgcttttgaagtctgtcagtattactggtatttttaaataaagaagaatttttctccaa

SEQ ID NO: 78721 - DNA, 2676 bp, Artificial Sequence
  derived and/or modified sequence
gccgtccgtgctgactgaggcgctgcagccaggagccgcggccggctgcccagcgctcgccgcctccgcgcgtccgcagccgtccccgcgccgacatgcgcttggccgccgccgcgaacgaggcgtacacggcccctttggcggtctcggggctgctgggctgcaagcagtgcggcgggggccgcgaccaggacgaggaacttggcattagaattcctcgaccactaggacagggaccaagcagattcatcccagaaaaggagatcctccaagtggggagtgaagacgcacagatgcatgctttatttgcagattcttttgctgctttgggccgtttggataacattacgttagtgatggttttccacccacaatatttagaaagtttcttaaaaactcagcactatctactgcaaatggatgggccgttacccctacattatcgtcactacattggaataatggctgcggcaagacatcagtgctcctacttagtgaacctgcatgtaaatgatttccttcatgttggtggggaccccaagtggctcaatggtttagagaatgctcctcaaaaactacagaatttaggagaacttaacaaagtgttagcccatagaccttggcttattaccaaagaacacattgagggacttttaaaagctgaagagcacagctggtcccttgcggaattggtacatgcagtagttttactcacacactatcattctcttgcctcattcacattcggctgtggaatcagtccagaaattcattgtgatggtggccacacattcagacctccttctgttagcaactactgcatctgtgacattacaaatggcaatcacagtgtggatgagatgccggtcaactcagcagaaaatgtttctgtaagtgattctttctttgaggttgaagccctcatggaaaagatgaggcagttacaggaatgtcgagatgaagaagaggcaagtcaggaagagatggcttcacgttttgaaatagaaaaaagagagagtatgtttgtcttctcttcagatgatgaagaagttacaccagcaagagctgtatctcgtcattttgaggatactagttatggctataaagatttctctagacatgggatgcatgttccaacatttcgtgtccaggactattgctgggaagatcatggttattctttggtaaatcgcctttatccagatgtgggacagttgattgatgaaaaatttcacattgcttacaatcttacttataatacaatggcaatgcacaaagatgttgatacctcaatgcttagacgggcaatttggaactatattcactgcatgtttggaataagatatgatgattatgactatggtgaaattaaccagctattggatcgtagctttaaagtttatatcaaaactgttgtttgcactcctgaaaaggttaccaaaagaatgtatgatagcttctggaggcagttcaagcactctgagaaggttcatgttaatctgcttcttatagaagctaggatgcaagcagaactcctttatgctctgagagccattacccgctatatgacctgatgcctttccttcattaaagatgattctggaatgatcagcagatatagtctacaagggggaaggtactaagccccaggaccaatggtagacaaaataattcagaaatccattgtgccatgattcctttagtttctgctatttttctgtggaaaaccactgctggcacaagcagtgactgtttggcagcttcaagtttagagctgtgaagacaggctgccattcacagtattttgctttttgacagtacaagatgctgtgtaactgttttaatacagcaaatagtaactctccaaatcctgttgcttttatgttaaataagataacaagaattggagcatgcaaagaatgggacttggataatgacttaagctttatatgtaaagaattttagaagatcttggtgctgctattcctgctggaggaatgaatagatggctgtttcagttaagctattagtaataaaagtgaacattgctactatctgagcctacatacataacttgtgtgatttcaaattaaacttgcattatgtgttaattttcttgcatctaaaaaagcatagaattcctactcacacagctcagcaacaaccattttgatggtaacagttaatttctttcattagttttttaaattcagggttctggatattaaattaaaatggcattcttaaagattttcttcaaaaagcaatcctaaatgaaagtgtgtaaattataagaagctggcgatcttttgatatgctgtttcacaggatcctgacactggagggcagctgtcttgtgcattacttgtgtttccagcaccaaagttgtgggacatgttgctgtagactgctgcgcagtcctgggtgcattcagtctctctgcctctgcctgcctcctggtccccactttaaaggctgtgcagctccttaaataataaagctggaaaatatttttagtcgggttatcaaatttgatttacaaaaacgctaactttgtttgaaatgcaaacaggtttgaaaatatgtattaagtactttgtattctggaagcgtgaattgcttttgaagtctgtcagtattactggtatttttaaataaagaagaatttttctccaa

SEQ ID NO: 78722 - DNA, 1479 bp, Artificial Sequence
  derived and/or modified sequence
atgagactggccgccgccgccaacgaggcctacaccgcccccctggccgtgagcggcctgctgggctgcaagcagtgcggcggcggcagagaccaggacgaggagctgggcatcagaatccccagacccctgggccagggccccagcagattcatccccgagaaggagatcctgcaggtgggcagcgaggacgcccagatgcacgccctgttcgccgacagcttcgccgccctgggcagactggacaacatcaccctggtgatggtgttccacccccagtacctggagagcttcctgaagacccagcactacctgctgcagatggacggccccctgcccctgcactacagacactacatcggcatcatggccgccgccagacaccagtgcagctacctggtgaacctgcacgtgaacgacttcctgcacgtgggcggcgaccccaagtggctgaacggcctggagaacgccccccagaagctgcagaacctgggcgagctgaacaaggtgctggcccacagaccctggctgatcaccaaggagcacatcgagggcctgctgaaggccgaggagcacagctggagcctggccgagctggtgcacgccgtggtgctgctgacccactaccacagcctggccagcttcaccttcggctgcggcatcagccccgagatccactgcgacggcggccacaccttcagaccccccagcgtgagcaactactgcatctgcgacatcaccaacggcaaccacagcgtggacgagatgcccgtgaacagcgccgagaacgtgagcgtgagcgacagcttcttcgaggtggaggccctgatggagaagatgagacagctgcaggagtgcagagacgaggaggaggccagccaggaggagatggccagcagattcgagatcgagaagagagagagcatgttcgtgttcagcagcgacgacgaggaggtgacccccgccagagccgtgagcagacacttcgaggacaccagctacggctacaaggacttcagcagacacggcatgcacgtgcccaccttcagagtgcaggactactgctgggaggaccacggctacagcctggtgaacagactgtaccccgacgtgggccagctgatcgacgagaagttccacatcgcctacaacctgacctacaacaccatggccatgcacaaggacgtggacaccagcatgctgagaagagccatctggaactacatccactgcatgttcggcatcagatacgacgactacgactacggcgagatcaaccagctgctggacagaagcttcaaggtgtacatcaagaccgtggtgtgcacccccgagaaggtgaccaagagaatgtacgacagcttctggagacagttcaagcacagcgagaaggtgcacgtgaacctgctgctgatcgaggccagaatgcaggccgagctgctgtacgccctgagagccatcaccagatacatgacctag

SEQ ID NO: 78723 - DNA, 1281 bp, Artificial Sequence
  derived and/or modified sequence
atgcatgctctcttcgcagactcatttgcagcgttaggcagattggataatatcacgttagtgatggtctttcacccacagtatctggaatcgttcctcaagacgcagcactacttgttacagatggatgggcccctccctctgcactacaggcattatatcggtatcatggctgcagcacgtcaccaatgttcctatctggtcaatctacacgtgaacgactttctacacgtgggcggagaccccaaatggcttaacgggctggagaatgcaccgcagaaactccagaatctcggggagttaaacaaggtgctggcccatcggccttggcttatcacaaaggagcatatcgaaggattgcttaaggcagaagaacacagctggtcactggccgagctagtccacgctgtcgtgttgctaacacattatcacagcttggcctccttcacctttggctgtggcatctccccagagatccattgcgatggggggcacacttttcggccacccagtgtttctaactactgcatttgtgacattacaaatgggaaccacagtgtcgacgaaatgcccgttaactctgccgagaatgtttctgtgagcgattctttcttcgaggttgaagccctgatggagaaaatgagacagttgcaagagtgccgcgatgaggaagaagccagccaagaagaaatggcctcccgatttgaaattgaaaaacgggagagcatgttcgtgttcagctcagacgacgaagaggtcacccccgcacgcgcggtcagccggcatttcgaggatactagttacggatacaaggacttttctagacacggaatgcatgtgccaaccttccgggttcaggactactgctgggaagatcatggctactctcttgtgaaccgcctgtaccccgacgtgggccaacttatcgacgagaagttccacatcgcctataacctgacctacaacacaatggcaatgcacaaggacgtcgacacatcaatgctcagacgcgccatatggaattacatacactgtatgtttggtattcggtatgatgactatgactatggggaaatcaaccagcttctggaccggtcttttaaagtgtacattaagacagtggtgtgcacccccgaaaaggtgactaaaaggatgtacgacagcttttggaggcagtttaagcactcagagaaggttcacgtcaatcttcttcttattgaagcgaggatgcaggccgagttgctttatgccctgcgggctattacaaggtacatgacctag

SEQ ID NO: 78724 - DNA, 1281 bp, Artificial Sequence
  derived and/or modified sequence
atgcacgccctgtttgctgacagctttgctgccctgggccgcctggacaacatcaccctggtgatggtgttccacccccagtacctggagagcttcctgaagacccagcactacctgctgcagatggatggccccctgcccctgcactaccgccactacatcggcatcatggctgctgcccggcaccagtgcagctacctggtgaacctgcacgtgaatgacttcctgcacgtgggcggggaccccaagtggctgaatggcctggagaatgccccccagaagctgcagaacctgggggagctgaacaaggtgctggcccaccggccctggctgatcaccaaggagcacatcgagggcctgctgaaggccgaggagcacagctggagcctggccgagctggtgcatgctgtggtgctgctgacccactaccacagcctggccagcttcaccttcggctgcggcatcagccctgagatccactgtgatggcggccacaccttccggcccccatctgtgagcaactactgcatctgtgacatcaccaacggcaaccacagcgtggatgagatgcctgtgaacagcgcagaaaatgtgtctgtgtctgacagcttctttgaggtggaggccctgatggagaagatgaggcagctgcaggagtgcagagatgaggaggaggccagccaggaggagatggccagcagatttgaaattgagaagcgggagagcatgtttgtgttcagcagtgatgatgaggaggtgaccccagcccgggctgtgagccgccactttgaggacaccagctatggctacaaggacttcagccgccacggcatgcacgtgcccaccttccgggtgcaggactactgctgggaggaccacggctacagcctggtgaacagactctacccagatgtgggccagctgattgatgagaagttccacatcgcctacaacctgacctacaacaccatggccatgcacaaggatgtggacacctccatgctgcggcgggccatctggaactacatccactgcatgtttggcatccgctatgatgattatgactatggagagatcaaccagctgctggacaggagcttcaaggtgtacatcaagacagtggtgtgcaccccagagaaggtgaccaagaggatgtatgacagcttctggaggcagttcaagcacagcgagaaggtgcacgtgaacctgctgctgattgaggccaggatgcaggccgagctgctgtatgccctgcgggccatcacccgctacatgacctag

SEQ ID NO: 78725 - DNA, 1281 bp, Artificial Sequence
  derived and/or modified sequence
atgcacgccctgttcgccgacagcttcgccgccctgggccggctggacaacattaccctcgtcatggtgtttcatccacaatacctcgagagcttcctaaaaactcagcactatctccttcaaatggatgggcccctcccactgcattaccggcactatattgggataatggctgccgcacgacatcagtgtagctatctggtcaacctgcacgttaatgatttcctgcacgtggggggtgatccaaagtggctgaacggtctcgagaacgcaccacaaaagcttcagaatctcggcgagctaaacaaagtcttggcccaccgtccatggcttatcaccaaggaacacattgagggattactaaaggcggaggagcactcttggagcctcgccgagctggtccacgccgtcgttttgctgactcattatcatagcctggcatctttcactttcgggtgcggaatctccccggaaattcactgtgacggggggcacacctttcggcccccgtcagtgtcaaactattgcatttgtgacattaccaatggcaaccattcagtcgatgagatgccagtcaattctgctgagaatgtgtctgtcagcgatagctttttcgaagtggaggctctcatggaaaaaatgaggcagctccaggagtgtcgcgatgaagaggaggccagccaggaagaaatggcttctcgattcgagatcgaaaaacgtgagtctatgtttgtcttcagtagcgatgacgaggaagtaactcccgcccgcgcagtctcccggcacttcgaggacacatcctatggatacaaagacttttctcgtcacgggatgcacgtacctactttccgcgtgcaggactattgttgggaggaccacggttatagcctggtgaatagactctatccggacgtgggacagctgatcgacgagaagtttcacatcgcctacaacctgacctacaatacaatggccatgcacaaagatgtagatacatcgatgcttcggagagctatctggaattatatccactgtatgtttgggattagatatgacgattatgattatggagagattaatcagctgctggacagatctttcaaggtgtatatcaaaacggtggtatgtactcccgagaaagtgaccaaacgcatgtacgactccttttggcgtcagtttaagcattctgaaaaggtgcacgtgaatctcctattgattgaagcacgcatgcaagcagaactactttacgcactgcgcgcaatcacccggtatatgacatag

SEQ ID NO: 78726 - DNA, 1281 bp, Artificial Sequence
  derived and/or modified sequence
atgcatgctctttttgcagactctttcgcggcacttggcaggctggataacattacactggtcatggtcttccacccccagtatctggagtccttcctcaaaacacaacattaccttttgcagatggatgggcctttgccactccactatcggcactacataggaatcatggccgctgctcggcaccagtgctcttatctggtcaatttgcacgttaacgatttcctgcacgtgggaggggacccaaaatggctgaacggtctggagaatgctccccaaaagttgcagaacctgggtgagttaaacaaagtacttgctcacagaccatggctcatcaccaaggagcatattgagggcttgctgaaggctgaggagcattcatggagcctcgccgagctggtgcatgcagttgtgctgctgacacactaccatagtctcgccagctttacatttgggtgcggaatttcccctgaaatacactgtgacggtggacacacctttcggccaccatccgtgagtaattactgcatttgcgacataactaacggaaatcatagcgtggatgagatgccggtaaattcagcagagaacgtgtccgtatctgattctttctttgaagtggaggccttaatggagaagatgagacagctccaggagtgccgggatgaggaagaagcctcgcaagaagagatggcttctaggttcgagattgagaaacgcgaaagcatgttcgtcttcagttccgatgacgaggaagtcactcccgcacgggctgttagtagacacttcgaggacacgtcatatggctacaaggatttttcaaggcacggcatgcatgttcctaccttccgcgtccaggattactgttgggaagatcacggctacagtctggtaaatcgcctgtatcccgatgtgggacaactgattgacgagaaattccatatagcttataacctaacttacaataccatggccatgcacaaggacgttgacacttcaatgctgcggagagcaatttggaactacatccattgtatgttcgggataagatatgacgattacgattacggtgagatcaatcagttgctagaccgctcctttaaagtgtatatcaagacagtggtttgtaccccagagaaggtgacgaaacggatgtacgattcgttttggcggcaattcaagcacagcgaaaaagtgcacgttaacctactcttgattgaggccagaatgcaggctgaactcctctatgcactccgcgctatcaccagatacatgacctag

SEQ ID NO: 78727 - DNA, 1281 bp, Artificial Sequence
  derived and/or modified sequence
atgcacgccctgttcgccgacagcttcgccgccctgggcagactggacaacatcaccctggtgatggtgttccacccccagtacctggagagcttcctgaagacccagcactacctgctgcagatggacggccccctgcccctgcactacagacactacatcggcatcatggccgccgccagacaccagtgcagctacctggtgaacctgcacgtgaacgacttcctgcacgtgggcggcgaccccaagtggctgaacggcctggagaacgccccccagaagctgcagaacctgggcgagctgaacaaggtgctggcccacagaccctggctgatcaccaaggagcacatcgagggcctgctgaaggccgaggagcacagctggagcctggccgagctggtgcacgccgtggtgctgctgacccactaccacagcctggccagcttcaccttcggctgcggcatcagccccgagatccactgcgacggcggccacaccttcagaccccccagcgtgagcaactactgcatctgcgacatcaccaacggcaaccacagcgtggacgagatgcccgtgaacagcgccgagaacgtgagcgtgagcgacagcttcttcgaggtggaggccctgatggagaagatgagacagctgcaggagtgcagagacgaggaggaggccagccaggaggagatggccagcagattcgagatcgagaagagagagagcatgttcgtgttcagcagcgacgacgaggaggtgacccccgccagagccgtgagcagacacttcgaggacaccagctacggctacaaggacttcagcagacacggcatgcacgtgcccaccttcagagtgcaggactactgctgggaggaccacggctacagcctggtgaacagactgtaccccgacgtgggccagctgatcgacgagaagttccacatcgcctacaacctgacctacaacaccatggccatgcacaaggacgtggacaccagcatgctgagaagagccatctggaactacatccactgcatgttcggcatcagatacgacgactacgactacggcgagatcaaccagctgctggacagaagcttcaaggtgtacatcaagaccgtggtgtgcacccccgagaaggtgaccaagagaatgtacgacagcttctggagacagttcaagcacagcgagaaggtgcacgtgaacctgctgctgatcgaggccagaatgcaggccgagctgctgtacgccctgagagccatcaccagatacatgacctag

SEQ ID NO: 78728 - protein, 320 aa, Artificial Sequence
  derived and/or modified sequence
MSVAGLKKQFYKASQLVSEKVGGAEGTKLDDDFKEMEKKVDVTSKAVTEVLARTIEYLQPNPGDALLDAGESMKRLAEVKDSLDIEVKQNFIDPLQNLCEKDLKEIQHHLKKLEGRRLDFDYKKKRQGKIPDEELRQALEKFEESKEVAETSMHNLLETDIEQVSQLSALVDAQLDYHRQAVQILDELAEKLKRRMREASSRPKREYKPKPREPFDLGEPEQSNGGFPCTTAPKIAASSSFRSSDKPIRTPSRSMPPLDQPSCKALYDFEPENDGELGFHEGDVITLTNQIDENWYEGMLDGQSGFFPLSYVEVLVPLPQ

SEQ ID NO: 78729 - DNA, 963 bp, Artificial Sequence
  derived and/or modified sequence
atgagcgtcgccggcctcaaaaagcaattctacaaggccagtcagctggtgagtgaaaaagtcggcggggccgagggaacaaagctggatgacgatttcaaagaaatggagaaaaaagtggatgtgacttctaaagccgtgactgaagtgctggcgagaactatcgagtacttgcagccgaatccaggtgatgccctcctggatgccggagagtctatgaagaggttggccgaggttaaggactcattagatatcgaagttaaacagaacttcatcgacccactccagaatttatgtgagaaggatctgaaggagatccagcaccacctcaaaaaacttgagggacgacgtctagattttgactacaaaaagaaacgacagggcaaaatccctgatgaagagctaaggcaggcactcgagaagttcgaagagtcaaaagaagtagctgaaaccagcatgcacaacttactggagaccgatatcgaacaagtgtcccagctctctgcacttgtggacgcgcagctggactaccacaggcaggctgtgcaaatcctcgatgagctggccgaaaagcttaaaagacggatgcgcgaggcctcatcacgcccaaaacgggagtacaagcctaaacctcgtgaacccttcgatttaggcgagccggaacagtctaatggcggcttcccctgcacaacagcccccaaaatagcagcatctagcagctttcgtagctccgataagccaatcaggactccctcacgttcaatgcccccactagatcaacctagctgcaaggccctctacgatttcgagcccgaaaacgatggggagctgggctttcatgaaggcgacgtgatcacactgactaaccagatagacgagaactggtatgaaggaatgctggacgggcagtcgggcttcttcccactgagttatgtggaagtgctggtgcccttaccacagtag

SEQ ID NO: 78730 - DNA, 963 bp, Artificial Sequence
  derived and/or modified sequence
atgtctgtggccggcctgaagaagcagttctacaaggccagccagctggtgtctgagaaggtgggcggcgctgagggcaccaagctggatgatgacttcaaggagatggagaagaaggtggatgtgaccagcaaggctgtgacagaggtgctggcccggaccatcgagtacctgcagcccaaccctggagatgccctgctggatgctggggagagcatgaagaggctggccgaggtgaaggacagcctggacatcgaggtgaagcagaacttcatcgaccccctgcagaacctgtgtgagaaggacctgaaggagatccagcaccacctgaagaagctggagggccggcggctggactttgactacaagaagaagaggcagggcaagatcccagatgaggagctgcggcaggccctggagaagtttgaggagagcaaggaggtggccgagacctccatgcacaacctgctggagacagacatcgagcaggtgtcccagctgagcgccctggtggatgcccagctggactaccaccggcaggccgtgcagatcctggatgagctggccgagaagctgaagaggaggatgagggaggccagcagccggcccaagcgggagtacaagcccaagccccgggagccctttgacctgggggagcctgagcagagcaatggaggcttcccctgcaccacagcccccaagattgctgccagcagcagcttccgcagcagtgacaagcccatccgcacccccagccgctccatgccacccctggaccagcccagctgcaaggccctgtatgactttgagccagaaaatgatggagagctgggcttccacgagggagatgtgatcaccctgaccaaccagattgatgagaactggtatgagggcatgctggatggccagagcggcttcttccccctgtcctatgtggaggtgctggtgcccctgccccagtag

SEQ ID NO: 78731 - DNA, 963 bp, Artificial Sequence
  derived and/or modified sequence
atgagcgtggccggcctgaagaagcagttctacaaggccagccagctggtctcagaaaaggtggggggtgctgaaggcacaaaactggacgatgacttcaaggagatggagaaaaaagtcgatgtgacctccaaagccgtgaccgaggttctggcgagaacaatagaatacttgcagccaaaccctggggatgcactattggatgcaggcgaatccatgaagagactggccgaggttaaagatagcctggacatcgaagtcaagcagaattttatcgaccctcttcagaatttatgcgagaaggacctgaaagaaattcagcaccatctaaagaagttggaaggacgccgtctcgattttgactataagaagaaaagacagggcaaaattcccgatgaagaacttagacaggcactggaaaaatttgaggagtccaaagaagtggccgaaacatcaatgcacaacctgttggagacagacatcgagcaggtgtcacagttatcggctctcgttgatgcgcaattggattaccacagacaagcggtgcagattcttgatgaactggccgaaaagttaaagaggcgaatgcgtgaggcctcatctcgccctaaacgcgagtataagccgaaaccacgagaaccctttgacctgggcgaacccgagcagtcgaacgggggtttcccctgtactaccgcccccaagatcgcggcttcctcctcatttagatcttcggacaaacctatacggaccccatcaaggtctatgcccccactggatcaaccctcctgcaaagcattgtatgatttcgaacccgagaacgacggcgaactcgggtttcacgagggtgacgtcatcacccttaccaatcagatcgacgaaaattggtatgagggcatgctggacggccaatcgggattttttcccctcagctacgtggaagtgcttgtccctctccctcagtag

SEQ ID NO: 78732 - DNA, 963 bp, Artificial Sequence
  derived and/or modified sequence
atgagtgtggctggccttaagaaacaattttacaaagcgagtcaattagtgagcgagaaagtcgggggagccgagggaactaagctggatgacgactttaaagagatggaaaaaaaggtggatgttacttctaaggccgtcacggaggtgcttgcacggactatcgagtatctccaacccaacccaggagatgcactgcttgacgccggagagtctatgaagcggctggctgaggtgaaggatagtctggatattgaggtgaaacagaacttcatagaccctctgcagaacttgtgtgaaaaggacctgaaagaaatccagcatcatctaaaaaagcttgaaggtcgtaggttggacttcgattacaaaaagaagaggcagggtaagattcctgatgaagaactgcggcaggctctggaaaaatttgaagagtccaaggaagttgccgaaacttctatgcataacctactggagaccgacattgaacaggtctctcagttgtctgcgcttgtggatgcccagctcgattaccatagacaggctgtccagattcttgatgagctggccgagaagttgaagagacgaatgcgggaggcatcctcaaggccaaagcgcgagtataagccgaaaccacgtgaacccttcgacctgggcgaaccagagcagagcaacggcggattcccctgcacaaccgcacccaagatcgctgcgagcagcagcttccgaagcagcgataagccaatcaggacccccagcaggagtatgcctcctttggatcaaccctcatgcaaagccctctacgacttcgagcctgagaacgacggcgagctcggatttcacgagggagacgtgatcacactgactaatcagatagatgagaactggtatgaaggaatgcttgacggacagagcggcttttttccactgagttacgtagaagtcctggtgccgctacctcagtag

SEQ ID NO: 78733 - DNA, 1404 bp, Artificial Sequence
  derived and/or modified sequence
gcgagcggctgaggcggcgccggggcgggcgcggagctggcaagcgggtggcggaggcggcgccgacggggactgctgaggcgcgcagagggtcggcggcgcccgggagcctgtcgctggcgcggtccgggcgggaggctcggcggcgggcggcagcatgtcggtggcggggctgaagaagcagttctacaaggcgagccagctggtcagtgagaaggtcggaggggccgaggggaccaagctggatgatgacttcaaagagatggagaagaaggtggatgtcaccagcaaggcggtgacagaagtgctggccaggaccatcgagtacctgcagcccaacccaggtgacgcattgctggatgccggcgagtccatgaagcgcctggcagaggtgaaggactccctggacatcgaggtcaagcagaacttcattgaccccctccagaacctgtgcgagaaagacctgaaggagatccagcaccacctgaagaaactggagggccgccgcctggactttgactacaagaagaagcggcagggcaagatccccgatgaggagctacgccaggcgctggagaagttcgaggagtccaaggaggtggcagaaaccagcatgcacaacctcctggagactgacatcgagcaggtgagtcagctctcggccctggtggatgcacagctggactaccaccggcaggccgtgcagatcctggacgagctggcggagaagctcaagcgcaggatgcgggaagcttcctcacgccctaagcgggagtataagcccaagccccgggagccctttgaccttggagagcctgagcagtccaacgggggcttcccctgcaccacagcccccaagatcgcagcttcatcgtctttccgatcttccgacaagcccatccggacccctagccggagcatgccgcccctggaccagccgagctgcaaggcgctgtacgacttcgagcccgagaacgacggggagctgggcttccatgagggcgacgtcatcacgctgaccaaccagatcgatgagaactggtacgagggcatgctggacggccagtcgggcttcttcccgctcagctacgtggaggtgcttgtgcccctgccgcagtgactcacccgtgtccccgccccgcccctccgtccacactggccggcaccccctgctgggtctcctgcattccacggagcccctgctgccagggcggtgtctgagcctgccggcgccacctgggccccggcccttgaggtactccctgagcaggaccccacacttgggtgggggggcttatctgggtgggtggggatgcctgtttacactagcgctgactcccaacggtgacggctcccttccccactccatggcgccagcctcctcccccgctccccaacttctcg

SEQ ID NO: 78734 - DNA, 963 bp, Artificial Sequence
  derived and/or modified sequence
atgagcgtggccggcctgaagaagcagttctacaaggccagccagctggtgagcgagaaggtgggcggcgccgagggcaccaagctggacgacgacttcaaggagatggagaagaaggtggacgtgaccagcaaggccgtgaccgaggtgctggccagaaccatcgagtacctgcagcccaaccccggcgacgccctgctggacgccggcgagagcatgaagagactggccgaggtgaaggacagcctggacatcgaggtgaagcagaacttcatcgaccccctgcagaacctgtgcgagaaggacctgaaggagatccagcaccacctgaagaagctggagggcagaagactggacttcgactacaagaagaagagacagggcaagatccccgacgaggagctgagacaggccctggagaagttcgaggagagcaaggaggtggccgagaccagcatgcacaacctgctggagaccgacatcgagcaggtgagccagctgagcgccctggtggacgcccagctggactaccacagacaggccgtgcagatcctggacgagctggccgagaagctgaagagaagaatgagagaggccagcagcagacccaagagagagtacaagcccaagcccagagagcccttcgacctgggcgagcccgagcagagcaacggcggcttcccctgcaccaccgcccccaagatcgccgccagcagcagcttcagaagcagcgacaagcccatcagaacccccagcagaagcatgccccccctggaccagcccagctgcaaggccctgtacgacttcgagcccgagaacgacggcgagctgggcttccacgagggcgacgtgatcaccctgaccaaccagatcgacgagaactggtacgagggcatgctggacggccagagcggcttcttccccctgagctacgtggaggtgctggtgcccctgccccagtag

SEQ ID NO: 78735 - protein, 304 aa, Artificial Sequence
  derived and/or modified sequence
MSVAGLKKQFYKASQLVSEKVGGAEGTKLDDDFKEMEKKVDVTSKAVTEVLARTIEYLQPNPASRAKLTMLNTVSKIRGQNLCEKDLKEIQHHLKKLEGRRLDFDYKKKRQGKIPDEELRQALEKFEESKEVAETSMHNLLETDIEQVSQLSALVDAQLDYHRQAVQILDELAEKLKRRMREASSRPKREYKPKPREPFDLGEPEQSNGGFPCTTAPKIAASSSFRSSDKPIRTPSRSMPPLDQPSCKALYDFEPENDGELGFHEGDVITLTNQIDENWYEGMLDGQSGFFPLSYVEVLVPLPQ

SEQ ID NO: 78736 - DNA, 915 bp, Artificial Sequence
  derived and/or modified sequence
atgtccgttgcaggactcaaaaagcagttttacaaggccagtcagctcgtctccgagaaagtggggggagctgagggaacaaagctcgatgacgatttcaaggagatggaaaagaaggtcgatgtgacatcgaaagccgtcacagaggtgctggcacgcaccatcgaatacctgcaaccaaaccccgcatcccgggctaaattgaccatgctgaacaccgtaagtaagatccgcggccaaaatttgtgtgagaaagatctgaaggagatccagcaccatctcaaaaagctggaggggcggcggctggattttgattacaagaagaagcggcaaggcaaaattccagatgaggaacttagacaggcactcgagaagttcgaagaatctaaggaagtggcagagaccagcatgcataaccttttggaaaccgacatagaacaggtatcccagctgagtgccttggtagacgcacagttggattatcaccgccaggctgtgcagatcctggacgagctggctgaaaagcttaagaggcgcatgagggaggcatctagtcggccaaaacgagagtacaagcccaaaccccgggagccctttgaccttggggagcccgagcagtccaacggcggatttccctgcacaacagccccaaagatagctgccagctcgagcttccgatcttccgataagccaattcgcacaccgtcaaggagtatgccacctctggatcagccctcttgtaaggccctgtatgattttgagcctgagaacgatggcgaattggggttccacgaaggagatgtgattacactcaccaaccagatcgatgagaactggtatgagggtatgctggacggccagagcggcttttttcccctgtcttatgtcgaagtgctagtcccactgccccagtag

SEQ ID NO: 78737 - DNA, 915 bp, Artificial Sequence
  derived and/or modified sequence
atgtctgtggccggcctgaagaagcagttctacaaggccagccagctggtgtctgagaaggtgggcggcgctgagggcaccaagctggatgatgacttcaaggagatggagaagaaggtggatgtgaccagcaaggctgtgacagaggtgctggcccggaccatcgagtacctgcagcccaacccagccagccgggccaagctgaccatgctgaacacagtgtccaagatccggggccagaacctgtgtgagaaggacctgaaggagatccagcaccacctgaagaagctggagggccggcggctggactttgactacaagaagaagaggcagggcaagatcccagatgaggagctgcggcaggccctggagaagtttgaggagagcaaggaggtggccgagacctccatgcacaacctgctggagacagacatcgagcaggtgtcccagctgagcgccctggtggatgcccagctggactaccaccggcaggccgtgcagatcctggatgagctggccgagaagctgaagaggaggatgagggaggccagcagccggcccaagcgggagtacaagcccaagccccgggagccctttgacctgggggagcctgagcagagcaatggaggcttcccctgcaccacagcccccaagattgctgccagcagcagcttccgcagcagtgacaagcccatccgcacccccagccgctccatgccacccctggaccagcccagctgcaaggccctgtatgactttgagccagaaaatgatggagagctgggcttccacgagggagatgtgatcaccctgaccaaccagattgatgagaactggtatgagggcatgctggatggccagagcggcttcttccccctgtcctatgtggaggtgctggtgcccctgccccagtag

SEQ ID NO: 78738 - DNA, 915 bp, Artificial Sequence
  derived and/or modified sequence
atgagcgtggccggcctgaagaagcagttctacaaggccagccagctggtttccgagaaggtgggcggagcagagggcacaaagctcgatgacgactttaaggagatggagaaaaaagtggatgttacttccaaggctgtcaccgaggtgttagctcgtacaattgagtacctccagccaaacccagcaagcagggctaagctgaccatgctgaacactgtgagcaaaattcgaggacagaacttatgcgagaaagaccttaaggagattcagcatcatctgaagaagttggaagggcgacgactggacttcgactacaagaagaagcgccagggtaaaatacctgacgaagaactgcgccaggcattggagaaattcgaagagtcgaaagaagtagccgagaccagcatgcataacttactggagacagacatcgaacaggtttcgcagctcagcgcacttgtcgatgcccagctcgactaccaccggcaagctgtgcagattctggatgagcttgcagagaaacttaaacggaggatgcgggaagcatcctctaggcccaaacgcgaatataagccaaaacctagagaaccttttgacctgggagaacctgaacagagtaacgggggcttcccgtgtacaactgcacccaaaattgccgcgagctcttcgtttcggtcttcagacaagcccatccggaccccttccagatctatgcccccccttgaccaaccgtcatgcaaagccttatatgactttgaacccgaaaacgatggggaacttggctttcatgagggagatgtgattactttaaccaatcagattgatgagaattggtacgaaggtatgctggacggacagtcaggatttttccccctgtcatacgtcgaagtgcttgtgccactgcctcagtag

SEQ ID NO: 78739 - DNA, 915 bp, Artificial Sequence
  derived and/or modified sequence
atgagcgtggctggccttaaaaagcagttttataaagcttctcagttagtctcagaaaaggtgggcggtgccgagggaaccaagcttgatgatgactttaaggagatggagaaaaaagtcgacgtgacgtctaaagcagtgacagaggtcctggccagaacaatagagtatctgcagccaaatcctgcttcccgcgcaaaacttaccatgctgaataccgtgtctaaaattcggggacagaatctgtgcgagaaagaccttaaagaaatacagcaccatcttaagaaactggaaggacgtagactggactttgactacaagaaaaagaggcagggcaaaatccctgatgaggagctgcgacaagctctagagaaattcgaagaatctaaggaggttgccgagacttccatgcacaacctgctcgaaacagatatcgagcaggtgagccaactgtctgcattagtagatgctcagctggactaccaccggcaagcagtacagatcctagacgaactggcggaaaagcttaaaaggcgcatgagagaagccagttctcggccaaagagggagtacaagcctaagcccagagaaccattcgatctcggagagccagagcagagcaacggcggtttcccatgcacaactgctcctaagatcgctgcaagttcatccttcagatctagcgacaaaccaatcagaactccaagccgcagtatgccccctctggatcagccttcttgtaaagccctgtacgatttcgaacctgagaatgatggggagctgggctttcacgagggtgacgtgattacactaaccaaccagatcgacgagaattggtacgagggcatgctggatggtcagagcggcttctttccattgtcttacgtagaagtgttggtgcctcttccccagtag

SEQ ID NO: 78740 - DNA, 2194 bp, Artificial Sequence
  derived and/or modified sequence
agcctgtcgctggcgcggtccgggcgggaggctcggcggcgggcggcagcatgtcggtggcggggctgaagaagcagttctacaaggcgagccagctggtcagtgagaaggtcggaggggccgaggggaccaagctggatgatgacttcaaagagatggagaagaaggtggatgtcaccagcaaggcggtgacagaagtgctggccaggaccatcgagtacctgcagcccaacccagcctcgcgggctaagctgaccatgctcaacacggtgtccaagatccggggccagaacctgtgcgagaaagacctgaaggagatccagcaccacctgaagaaactggagggccgccgcctggactttgactacaagaagaagcggcagggcaagatccccgatgaggagctacgccaggcgctggagaagttcgaggagtccaaggaggtggcagaaaccagcatgcacaacctcctggagactgacatcgagcaggtgagtcagctctcggccctggtggatgcacagctggactaccaccggcaggccgtgcagatcctggacgagctggcggagaagctcaagcgcaggatgcgggaagcttcctcacgccctaagcgggagtataagcccaagccccgggagccctttgaccttggagagcctgagcagtccaacgggggcttcccctgcaccacagcccccaagatcgcagcttcatcgtctttccgatcttccgacaagcccatccggacccctagccggagcatgccgcccctggaccagccgagctgcaaggcgctgtacgacttcgagcccgagaacgacggggagctgggcttccatgagggcgacgtcatcacgctgaccaaccagatcgatgagaactggtacgagggcatgctggacggccagtcgggcttcttcccgctcagctacgtggaggtgcttgtgcccctgccgcagtgactcacccgtgtccccgccccgcccctccgtccacactggccggcaccccctgctgggtctcctgcattccacggagcccctgctgccagggcggtgtctgagcctgccggcgccacctgggccccggcccttgaggtactccctgagcaggaccccacacttgggtgggggggcttatctgggtgggtggggatgcctgtttacactagcgctgactcccaacggtgacggctcccttccccactccatggcgccagcctcctcccccgctccccaacttctcgcccagctggccgaggcggggcaacactaaggtgctcttagaaacactaatgttcctctggggcagcccccacctccgtcctgacccgacgggggcccggcccactgcctaccctcgagtcccgcagccttaacaggatgggatcgagggtccccatggggtggctcagagataggaccctggttttaaatccctcccagcctggtgctggtgatgggccctggccctactccagggccaatgcacccccgcctcacacacgcactccttctcctcaaggccagggcagagggcctcaccgcctcccgggcctgctgtcagcttgcagcccggggacagaggccagctgggatctgcctgaggacagagaacatggtctcctgcagggccctgcctcccaagccccgccctcagaaagccaagtaccttttcagctttttaactgcccccatcccaacccagggaggcctgtgtcactctggcacaagctgccaccaccagccacccacacccaccccagcacacctcacacgggaccacagccgcgctgccgagggccaagcacaaaggttccagtgagcgcatgtcccagcccctggtggccaggctccccttgctgagccgctgccacttcaccctgtgggaagtggccccagccatctcctctagaccaaggcaggcagccccgacatctgcttcctctatcgcccaatgcaaaatcgatgaaatggggagttctctgggccaggccacattcacattcccctccccctgtggtccagtgaagcctccggaccccaggctctgctctgccctgccctgcacccccctcgtcagaagtacatgaggggcgcagagatgagcacacagctttgggcacggtccagggcaaactgaaatgtacgcctgaattttgtaaacagaagtattaaatgtctctttctac

SEQ ID NO: 78741 - DNA, 915 bp, Artificial Sequence
  derived and/or modified sequence
atgagcgtggccggcctgaagaagcagttctacaaggccagccagctggtgagcgagaaggtgggcggcgccgagggcaccaagctggacgacgacttcaaggagatggagaagaaggtggacgtgaccagcaaggccgtgaccgaggtgctggccagaaccatcgagtacctgcagcccaaccccgccagcagagccaagctgaccatgctgaacaccgtgagcaagatcagaggccagaacctgtgcgagaaggacctgaaggagatccagcaccacctgaagaagctggagggcagaagactggacttcgactacaagaagaagagacagggcaagatccccgacgaggagctgagacaggccctggagaagttcgaggagagcaaggaggtggccgagaccagcatgcacaacctgctggagaccgacatcgagcaggtgagccagctgagcgccctggtggacgcccagctggactaccacagacaggccgtgcagatcctggacgagctggccgagaagctgaagagaagaatgagagaggccagcagcagacccaagagagagtacaagcccaagcccagagagcccttcgacctgggcgagcccgagcagagcaacggcggcttcccctgcaccaccgcccccaagatcgccgccagcagcagcttcagaagcagcgacaagcccatcagaacccccagcagaagcatgccccccctggaccagcccagctgcaaggccctgtacgacttcgagcccgagaacgacggcgagctgggcttccacgagggcgacgtgatcaccctgaccaaccagatcgacgagaactggtacgagggcatgctggacggccagagcggcttcttccccctgagctacgtggaggtgctggtgcccctgccccagtag

SEQ ID NO: 78742 - protein, 148 aa, Artificial Sequence
  derived and/or modified sequence
MTKALLIYLVSSFLALNQASLISRCDLAQVLQLEDLDGFEGYSLSDWLCLAFVESKFNISKINENADGSFDYGLFQINSHYWCNDYKSYSENLCHVDCQDLLNPNLLAGIHCAKRIVSGARGMNNWVEWRLHCSGRPLFYWLTGCRLR

SEQ ID NO: 78743 - DNA, 447 bp, Artificial Sequence
  derived and/or modified sequence
atgaccaaagctttactgatatatttagtatcatctttcctcgctctcaatcaagccagtttaatctctcgctgcgatttagcccaagtattgcaactggaggatctggacggattcgagggatatagcctgtcagattggttatgtctcgccttcgtggagagcaagttcaacattagcaagatcaatgagaacgccgatggttctttcgactatggcctgtttcaaattaattcacattactggtgcaacgactataaatcatactctgagaatctgtgccacgtggactgtcaggaccttctgaaccccaatttattggcaggtatacactgtgcaaaacgaattgtaagcggtgcccgggggatgaataattgggtggaatggaggcttcactgctcaggccgacctctgttttattggctgacgggatgccggttgagatag

SEQ ID NO: 78744 - DNA, 447 bp, Artificial Sequence
  derived and/or modified sequence
atgactaaagccctacttatctacctggtttcgtcttttctggctctcaatcaggcatctttaattagtcgatgcgacctggcccaggtgctccagctcgaggatcttgacggattcgagggctattccctatctgactggctgtgcctagcctttgtggaatccaaattcaatattagcaagatcaatgagaacgctgatgggtcctttgactatgggctgttccagatcaactcacattattggtgtaatgactataaatcctactctgaaaatttatgccacgtcgactgccaagacctcctcaatccaaatctgctggccgggattcattgtgctaagaggattgttagtggggccagaggtatgaacaactgggtagaatggcgcctgcattgttctggacggccgcttttttactggctcaccggatgcagattgcggtag

SEQ ID NO: 78745 - DNA, 447 bp, Artificial Sequence
  derived and/or modified sequence
atgacaaaggctcttctcatatacttggtcagctctttccttgcactgaatcaggcgtctctgatctcccgctgcgacctcgcccaggtacttcagctcgaggacctcgacggatttgaagggtactctctctctgactggttgtgtctggccttcgtggaatccaagtttaatatttctaaaattaatgaaaacgccgatggatcgttcgactacgggttgtttcaaatcaattcacattattggtgtaatgattacaagtcttactcagagaacttatgtcacgtcgactgccaggatctgttaaatcctaatttgcttgccggaattcattgtgccaaacggatcgttagcggcgcaagaggaatgaacaattgggtcgaatggagacttcactgtagtggccgacccttgttctactggttgaccggctgcagattacggtag

SEQ ID NO: 78746 - DNA, 447 bp, Artificial Sequence
  derived and/or modified sequence
atgaccaaggccctgctgatctacctggtgagcagcttcctggccctgaaccaggccagcctcatcagccgctgtgacctggcccaggtgctgcagctggaggacctggatggctttgagggctacagcctgagtgactggctgtgcctggcctttgtggagagcaagttcaacatcagcaagatcaatgaaaatgctgatggcagctttgattatggcctcttccagatcaacagccactactggtgcaatgactacaagagctacagcgagaacctgtgccacgtggactgccaggacctgctgaaccccaacctgctggccggcatccactgtgccaagagaattgtgtctggggcccggggcatgaacaactgggtggagtggaggctgcactgcagcggccggcccctcttctactggctgaccggctgccgcctgaggtag

SEQ ID NO: 78747 - DNA, 891 bp, Artificial Sequence
  derived and/or modified sequence
ggtgaggaagaagaggctcctactgtagacagccttgttctacagatcctcccagaaatctctgggccaggtggaacccagggtcagagagggatgggagagagattccccaggctctcagagaagatcagcagaaagtctgcaagaccctaagaaccatcagccctcagctgcacctcctcccctccaaggatgacaaaggcgctactcatctatttggtcagcagctttcttgccctaaatcaggccagcctcatcagtcgctgtgacttggcccaggtgctgcagctggaggacttggatgggtttgagggttactccctgagtgactggctgtgcctggcttttgtggaaagcaagttcaacatatcaaagataaatgaaaatgcagatggaagctttgactatggcctcttccagatcaacagccactactggtgcaacgattataagagttactcggaaaacctttgccacgtagactgtcaagatctgctgaatcccaaccttcttgcaggcatccactgcgcaaaaaggattgtgtccggagcacgggggatgaacaactgggtagaatggaggttgcactgttcaggccggccactcttctactggctgacaggatgccgcctgagatgaaacagggtgcgggtgcaccgtggagtcattccaagactcctgtcctcactcagggattcttcatttcttcttcctactgcctccacttcatgttattttcttcccttcccatttacaactaaaactgaccagagccccaggaataaatggttttcttggcttcctccttactcccatctggacccagtcccctggttcctgtctgttatttgtaaactgaggaccacaataaagaaatctttatatttatcg

SEQ ID NO: 78748 - DNA, 899 bp, Artificial Sequence
  derived and/or modified sequence
ttaattttccatgataaataaaaatctataaaataataaacaagagaaaagagattggaaacagccaggttggagcagtgagtgagtaaggaaacctggctgccctctccagattccccaggctctcagagaagatcagcagaaagtctgcaagaccctaagaaccatcagccctcagctgcacctcctcccctccaaggatgacaaaggcgctactcatctatttggtcagcagctttcttgccctaaatcaggccagcctcatcagtcgctgtgacttggcccaggtgctgcagctggaggacttggatgggtttgagggttactccctgagtgactggctgtgcctggcttttgtggaaagcaagttcaacatatcaaagataaatgaaaatgcagatggaagctttgactatggcctcttccagatcaacagccactactggtgcaacgattataagagttactcggaaaacctttgccacgtagactgtcaagatctgctgaatcccaaccttcttgcaggcatccactgcgcaaaaaggattgtgtccggagcacgggggatgaacaactgggtagaatggaggttgcactgttcaggccggccactcttctactggctgacaggatgccgcctgagatgaaacagggtgcgggtgcaccgtggagtcattccaagactcctgtcctcactcagggattcttcatttcttcttcctactgcctccacttcatgttattttcttcccttcccatttacaactaaaactgaccagagccccaggaataaatggttttcttggcttcctccttactcccatctggacccagtcccctggttcctgtctgttatttgtaaactgaggaccacaataaagaaatctttatatttatcg

SEQ ID NO: 78749 - DNA, 1047 bp, Artificial Sequence
  derived and/or modified sequence
tgttagttgggcagggctgaagtgtatgtggtgaggaagaagaggctcctactgtagacagccttgttctacagatcctcccagaaatctctgggccaggtggaacccagggtcagagagggatgggagagaggtttaattttccatgataaataaaaatctataaaataataaacaagagaaaagagattggaaacagccaggttggagcagtgagtgagtaaggaaacctggctgccctctccagattccccaggctctcagagaagatcagcagaaagtctgcaagaccctaagaaccatcagccctcagctgcacctcctcccctccaaggatgacaaaggcgctactcatctatttggtcagcagctttcttgccctaaatcaggccagcctcatcagtcgctgtgacttggcccaggtgctgcagctggaggacttggatgggtttgagggttactccctgagtgactggctgtgcctggcttttgtggaaagcaagttcaacatatcaaagataaatgaaaatgcagatggaagctttgactatggcctcttccagatcaacagccactactggtgcaacgattataagagttactcggaaaacctttgccacgtagactgtcaagatctgctgaatcccaaccttcttgcaggcatccactgcgcaaaaaggattgtgtccggagcacgggggatgaacaactgggtagaatggaggttgcactgttcaggccggccactcttctactggctgacaggatgccgcctgagatgaaacagggtgcgggtgcaccgtggagtcattccaagactcctgtcctcactcagggattcttcatttcttcttcctactgcctccacttcatgttattttcttcccttcccatttacaactaaaactgaccagagccccaggaataaatggttttcttggcttcctccttactcccatctggacccagtcccctggttcctgtctgttatttgtaaactgaggaccacaataaagaaatctttatatttatcgaaatattaaagca

SEQ ID NO: 78750 - DNA, 447 bp, Artificial Sequence
  derived and/or modified sequence
atgaccaaggccctgctgatctacctggtgagcagcttcctggccctcaatcaggcttcgctaatttctcggtgcgatttggcccaagttttgcagctggaagatctggacggcttcgagggatatagtttgagtgattggctctgtctcgctttcgtggaaagcaaatttaacattagtaaaattaatgagaacgcagacggaagtttcgactacggcctgttccaaataaattcgcactattggtgtaatgattataaatcttacagcgagaacctatgtcacgtggattgccaagacctcctgaacccaaacctccttgcagggatccactgcgccaaacgaattgtgagcggcgccaggggtatgaataactgggttgaatggcgacttcactgtagtggacgccctctgttttactggcttaccggctgtcggctccgctag

SEQ ID NO: 78751 - DNA, 447 bp, Artificial Sequence
  derived and/or modified sequence
atgaccaaggccctgctgatctacctggtgagcagcttcctggcccttaatcaagcgtctctgattagtcgctgcgacctggcccaggtgctccagctggaggatctcgacgggttcgagggctacagcctttccgattggctgtgtctcgcgtttgtggagagtaaatttaacatctccaagatcaatgaaaatgcagacgggagtttcgattatggcctgtttcagattaactcgcattactggtgtaatgactataagtcctatagcgaaaatttgtgccacgttgattgccaggacctcctgaacccaaacctgctggccggcattcattgcgccaagcgtatcgtgtctggtgctcgaggcatgaataactgggtagagtggcgccttcattgcagtgggcgacccctattctactggctgacgggctgtaggctgaggtag

SEQ ID NO: 78752 - DNA, 447 bp, Artificial Sequence
  derived and/or modified sequence
atgaccaaggccctgctgatctacctggtgagcagcttcctggccttgaatcaggcctccttaatcagtagatgcgatctggcacaggttctacagttggaagatttggacggctttgagggatatagcctgtctgactggctctgtctcgcgttcgtcgagtcaaaatttaatatcagcaagatcaatgagaatgccgatgggtcattcgactacgggttgttccagatcaatagccactactggtgcaacgactataaaagctactcagagaatctgtgccatgttgactgccaggatctgttgaacccaaacctgctggcgggaattcattgtgcgaagaggatagtgtccggtgcaagaggtatgaataactgggtggaatggcgattgcattgctcggggagacccctattctactggttgaccggctgtagacttcgatag

SEQ ID NO: 78753 - DNA, 447 bp, Artificial Sequence
  derived and/or modified sequence
atgacaaaggctcttctgatatacttggtttcatctttcctagccctaaatcaggctagtctgattagcaggtgtgatcttgcacaggtcctgcagctggaggacttagatggatttgaaggctatagcctgagtgactggttgtgtctcgcttttgtggagtctaagttcaacattagtaagatcaacgaaaacgcagacggatccttcgactacggtttgtttcagatcaactcacactactggtgcaatgattacaagtcatactctgagaacttgtgtcacgtggactgtcaagacctcctgaaccctaatttacttgcgggtatccattgcgccaagaggatcgtgtcaggagccaggggtatgaacaactgggtggaatggcgcctgcattgctccgggaggcccctgttttattggctgacggggtgccgcctgcgctag

SEQ ID NO: 78754 - DNA, 447 bp, Artificial Sequence
  derived and/or modified sequence
atgacgaaagctttactcatatacctcgttagctcgttccttgccttaaaccaggcttccctgatctccaggtgcgatcttgcccaggtgttgcagctggaagacttagatggatttgaaggatacagcctcagcgattggctgtgcctagcttttgttgaatctaaattcaacatctcaaagattaatgaaaacgccgacgggagttttgactacggcctcttccaaataaatagccattactggtgcaatgactacaagagttattctgagaatttgtgccatgtcgactgccaagacctgctaaacccgaacctgcttgccggaatacattgtgcgaagcggattgtgtcaggagcaagaggaatgaataactgggtggagtggagattgcactgctctggaagaccgctcttttactggctcactggctgtaggctgaggtag

SEQ ID NO: 78755 - DNA, 447 bp, Artificial Sequence
  derived and/or modified sequence
atgaccaaggctcttttgatatacctcgtgagttcctttcttgctttaaatcaggcgagcctcatttccaggtgtgacttagctcaggtattgcagctggaagatcttgatggctttgagggttatagcctctcagactggctttgcctggcctttgtggaaagcaaatttaacatcagcaagattaacgagaacgctgatggctcatttgactatgggctgtttcagataaatagccattactggtgcaacgactacaaatcttatagcgaaaacctttgtcacgtcgactgccaagatctccttaatcccaacctcctggctggaattcactgcgctaaaagaatagtgtccggagcgagaggcatgaataattgggtagaatggcggctacactgtagcggtcggccacttttctattggctgaccggatgtcggctcagatag

SEQ ID NO: 78756 - DNA, 447 bp, Artificial Sequence
  derived and/or modified sequence
atgaccaaggccctgctgatctacctggtgagcagcttcctggccctgaaccaggccagcctgatcagcagatgcgacctggcccaggtgctgcagctggaggacctggacggcttcgagggctacagcctgagcgactggctgtgcctggccttcgtggagagcaagttcaacatcagcaagatcaacgagaacgccgacggcagcttcgactacggcctgttccagatcaacagccactactggtgcaacgactacaagagctacagcgagaacctgtgccacgtggactgccaggacctgctgaaccccaacctgctggccggcatccactgcgccaagagaatcgtgagcggcgccagaggcatgaacaactgggtggagtggagactgcactgcagcggcagacccctgttctactggctgaccggctgcagactgagatag

SEQ ID NO: 78757 - protein, 137 aa, Artificial Sequence
  derived and/or modified sequence
MAAMSLLRRVSVTAVAALSGRPLGTRLGFGGFLTRGFPKAAGQAELAEIPEGYVPEHWEYYKHPISRWIARNFYDSPEKIYERTMAVLQIEAEKAELRVKELEVRKLMHVRGDGPWYYYETIDKELIDHSPKATPDN

SEQ ID NO: 78758 - DNA, 414 bp, Artificial Sequence
  derived and/or modified sequence
atggccgccatgagcctgctgagaagagtgagcgtgaccgccgtggccgccctgagcggcagacccctgggcaccagactgggcttcggcggcttcctgaccagaggcttccccaaggccgccggccaggccgagctggccgagatccccgagggctacgtgcccgagcactgggagtactacaagcaccccatcagcagatggatcgccagaaacttctacgacagccccgagaagatctacgagagaaccatggccgtgctgcagatcgaggccgagaaggccgagctgagagtgaaggagctggaggtgagaaagctgatgcacgtgagaggcgacggcccctggtactactacgagaccatcgacaaggagctgatcgaccacagccccaaggccacccccgacaactag

SEQ ID NO: 78759 - DNA, 414 bp, Artificial Sequence
  derived and/or modified sequence
atggctgcaatgagcctgttacggagagtgagcgtgaccgctgtggccgccctaagcggtaggcccctggggacgagactgggcttcggaggatttcttacaagaggcttcccgaaggcagccggccaagccgagttggctgagatccccgaaggctatgtgcctgagcactgggaatattataaacatcctatatcccggtggatcgctcggaacttttacgactcgcccgaaaaaatctacgagagaacaatggccgtgctgcaaattgaagcagaaaaggctgaactgcgggtgaaagagctggaggtgcgcaagctgatgcatgtgcgaggagacggtccttggtactactatgaaacaatcgacaaggagctgatcgatcatagccccaaggcaactcctgacaactag

SEQ ID NO: 78760 - DNA, 414 bp, Artificial Sequence
  derived and/or modified sequence
atggccgccatgagcctgctgcggcgggtgtctgtgacagctgtggccgccctgagcggccggcccctgggcacccggctgggctttggaggcttcctgacccggggcttccccaaggctgctggccaggccgagctggccgagatccctgagggctacgtgcctgagcactgggagtactacaagcaccccatcagccgctggatcgccaggaacttctatgacagccctgagaagatctatgaaagaaccatggctgtgctgcagatcgaggccgagaaggccgagctgcgggtgaaggagctggaggtgaggaagctgatgcacgtgagaggagatggcccctggtactactatgagaccatcgacaaggagctgattgaccacagccccaaggccaccccagacaactag

SEQ ID NO: 78761 - DNA, 4046 bp, Artificial Sequence
  derived and/or modified sequence
cttcttcctcctgcccgtagtagccatggcggccatgagtttgttgcggcgggtttcggttactgcggtggcagctctgtctggccggccccttggcactcgcctcggatttgggggcttcctcactcgtggctttccgaaggctgctggtcaagctgaactagcagaaattccagaaggctatgtcccagaacactgggaatattataagcatcccatatcaagatggattgcccgtaatttctatgatagtcctgaaaagatatatgaaagaacaatggccgtccttcagattgaagctgaaaaggctgaattacgggtaaaggagctggaagtgcgaaaattgatgcatgtgagaggagatggaccctggtattactatgagacaattgacaaggaacttattgatcattctccgaaagcaactcctgacaattaagcatttttttctccaaatacaaagtatattctctttattggaaaataaattaataaatatattctgtatttttgctctccgtgaaaaacaaaagagcctctgacattactgtctctcagtgttggttcagattgaggcttttgtttgaggagtttggcttccagtccccaaagaaggtttaaaatgtactaataaaaactggagaaataggaatttgtgaactcctaaaattgtagcaactttgaaaggttagtgttttatttacctgacaaatggaagttatagaagtctaataatgttaagcaccagtaattatagtattttgtacaaatgcctgtactgtagatgtctgtattattgaggggcaactcaggattttaagttccataaagtattgaaccaactctaaaatgttaactccttaataaacagattctcagtaaacaaattttaaagtttataatgctttcatggtttttttttttgccatgtattgttcttttttaaactacacacagacacacagacacgtacacacacacacacacacacacacacacacacgctcttttcctagatgcaatctctgggatcccttagagtccttttttggggaagtagttgcactaggtaatgtgattcctgcagagattataaaatgtgagtaaaagctaaaaatgactcatttattaagcatttattgtctgctagacactatattaaataactgcattttttaacattattttcttttctttttttttttttttttttttgacgaaatcttgcactgtcacccaggctagagtgcagtgccgtgatctcggctgcaacctccgcctcccgggttcaagcaattcttgtctcagcctcccaagtagctgggattacaggcacccaccaccacacccggctaatttttgtatttttcagtaaagactgtttcgctgtgttggccaggctggtcttgaacttctgacctcaggtgattggcctgtctccacttcccaaagtgctgattacaggcctgagccactgcacccaacattattttcaaaatgacaagaggtagtatttagtacctgaggctcagatgttaaacacaaactcagtatttacaaaaataaacatttaaaacatttacacttcaacttccaaaatggctttttaccataaacattcaggattttcaaacctgtaacagcttatcaatgcatctcatcttagaagtatgttttacattcttcataaaaataaaaatgaacccaggcttcctaagattcaggccagtgggtctccacttaaggccaaatggagaaataattttttgctgcctaaacacacaagtgaattgaaaagccacaggccattcattcaacaaataactttattatttttattgataatgtacttgtaatgtgctattttgatacatgtatgcaaagtataatggtcaaatcagggtatttgaatatacatatatttcaaaatatagttatatatttcaaaataagatatagcaagttagaagtatatataagtatattattatatgttattgttaactataatttacctactgtactatcaaatactagaacttattccttgtatctaaatgtattcttgtaaccattaactaacttttctgaatttcctactctccccttcccttcccagccttgtaaccacctttctactctgcctccatgagacccattttttaatctcccacatatgagtgagaacattcaatatttgtctttctaggcttggcttatttcacttacattaatgacctccagttccatccatgttgctacaaatgacagaatcccattctttttcataatattgtccatacataccacattttctatatccatttatctgttgatggacacaggttgcaaagggattgctggattgtatgataattctatgtgtagtttcttgaggaaccttcatggtgttcttcatagtggttgtactactgtacattcctaccaatggtggatgagcgttcccctttctccacatcctcacaagcatttgttattttttcttttttttcaaatgaacattttaactggggtgagatatcttaatgtggtattggtttacatttccctaattatggttgagcattttttcacatatctaatggccattcatatgtcttcctttgagaaatgtctatacagatctctggccctttttttaaattttttttttttttgaattggggtcacccagtctggaggtgatctgggcttccacatcctgggctcaagtgatcattccacctcaggatgacccaaatagctaggaccaaaggcgagtgccaccatgctcagctaatttttttgtattttttgtagcgactgggtttcaccatgttgcccaggctggtcttgaactcctgtgctcaagtgatccgctcaccttggcctctcaaagtgcaggtactttaggcgtgcctggcctttttgtccattttatttttttgagatggagtcttgctgtgtcacccaggctggagtgcagtggtgcgatctcgactcagtgcaacctccgcctcccaggttcaagcaattctcctgcctcagcctcctgagtagctgggattacaggtgtgcaccaccacacccagctaatttttttgtatttttagtagagagggggtgtcaccatgttggccagggtgatcttgaacttctgaccttgtgatccacccaccttggtctcccaaagtgctgggattacaggtgtgagccactgcgcccagcctgtccattttttaatcaggttatgggttttttgctattgaattgtttgagttccttatatattctggttatgaatcccttgttagatggtgtgttaggccattcttgtgttgctataaagaaaatcctgagtctgggtaatttataaagaaaaaaggtgtaaatggctcatagttctgcagactgtacaggaagcatggcaccagcattgcttggcttctggggaggcctcaaggaactttcactcatagcagaaagcaaagcaggagcaggcacatcacatggcaagagagcaagagagagaggtggaggagatgccacacactgttttaaacaaccagatctctcaggaactcattgttgttagaaaaggaattaaaagaaatcaaagagtgtgtaagcagaaactcagttgtacgtaagaaaacccaattccccctgagaaagagaaagagctggagtcctttaaaaattcactgcctgtttttctggtggctagtgagtgttagctctcctcccttcccaggcattgtgaagaccctgtttccctagctgtgcagctgcaaggtcactagacagataaactcaagtcgcaaaacatgtttttccttgaaaagtaagaaatgatgtaatgcatgtcttgactgaataactgtctttgtttcttgcttctgtaatatgcttccccctgcacagatctccccctgccccacgaaatgcttaaaagctaacttaactctttgttcagggctcagtcctttggatgttaatctgactgggccggagcacctaaataataaatattctcctgaacccca

SEQ ID NO: 78762 - DNA, 414 bp, Artificial Sequence
  derived and/or modified sequence
atggccgccatgagcctgctgcggcgggtgagcgtgaccgccgtggctgcactgtcaggccgccccctggggacacgtctaggatttggcggctttcttactcgagggtttcctaaagcagctggccaagccgagctcgcagagattcctgagggatatgtccctgaacactgggaatactataagcatcccataagtcggtggatcgccagaaatttttacgacagtccggaaaaaatttatgagagaaccatggcagtcctacagatcgaggcagaaaaagctgaattgagggtgaaggagttggaagtccggaagctgatgcacgtgcgaggagacggtccctggtactactacgagacaatagacaaggaattgatcgatcatagcccaaaagctaccccagataactag

SEQ ID NO: 78763 - DNA, 414 bp, Artificial Sequence
  derived and/or modified sequence
atggccgctatgtctctgctgcgacgcgtctctgttaccgcagtggcagctctcagcggtcgccctcttgggactcggttaggctttggtggcttcttgacccgtggtttccccaaagcagcaggccaggccgaactggccgaaatcccagaggggtacgtcccagagcactgggagtattacaaacatccaatttctcgttggatagcgaggaatttctatgatagtcccgaaaaaatttacgagcgtacaatggccgttctccagatcgaagccgagaaagccgaactgcgagtgaaagagcttgaggttaggaaattaatgcacgttcggggtgacgggccttggtattactatgagaccatagataaggaactgatcgaccactcaccaaaagctacccctgacaattag

SEQ ID NO: 78764 - protein, 56 aa, Artificial Sequence
  derived and/or modified sequence
IPVAIFITLVNVFIGQAELAEIPEGYVPEHWEYYKGKGAGSAKIDACERRWTLVLL

SEQ ID NO: 78765 - DNA, 171 bp, Artificial Sequence
  derived and/or modified sequence
atccccgtggccatcttcatcaccctggtgaacgtgttcatcggccaggccgagctggccgagatccccgagggctacgtgcccgagcactgggagtactacaagggcaagggcgccggcagcgccaagatcgacgcctgcgagagaagatggaccctggtgctgctgtag

SEQ ID NO: 78766 - DNA, 171 bp, Artificial Sequence
  derived and/or modified sequence
ataccagtcgccatttttataacattggttaatgtgtttattggacaggccgagctggccgagatccctgagggttatgttcctgagcattgggaatattataaggggaagggtgccggaagcgcaaaaattgacgcttgcgagaggaggtggacactggtgttactatag

SEQ ID NO: 78767 - DNA, 171 bp, Artificial Sequence
  derived and/or modified sequence
atccctgtggccatcttcatcaccctggtgaatgtgttcatcggccaggccgagctggccgagatccctgagggctacgtgcctgagcactgggagtactacaagggcaaaggagctggcagcgccaagattgatgcctgtgaaagacgctggaccctggtgctgctgtag

SEQ ID NO: 78768 - DNA, 171 bp, Artificial Sequence
  derived and/or modified sequence
atccccgtggccatcttcatcaccctggtgaacgtgttcatcggccaggccgaactggctgagatccccgagggttatgtcccagagcactgggagtactacaaggggaagggagccggcagtgctaagattgatgcctgtgagcgacgctggactctcgtacttctgtag

SEQ ID NO: 78769 - DNA, 171 bp, Artificial Sequence
  derived and/or modified sequence
atccccgttgccatttttattaccctggtgaatgtcttcatcggccaggcagaacttgcagagatccccgagggctacgtcccggagcattgggagtattataaaggtaagggagcgggttccgctaagattgacgcctgcgagaggcgctggacactggtcttgctgtag

SEQ ID NO: 78770 - protein, 691 aa, Artificial Sequence
  derived and/or modified sequence
MLRIPVRKALVGLSKSPKGCVRTTATAASNLIEVFVDGQSVMVEPGTTVLQVVAACAMPVMKGWNILTNSEKSKKAREGVMEFLLANHPLDCPICDQGGECDLQDQSMMFGNDRSRFLEGKRAVEDKNIGPLVKTIMTRCIQCTRCIRFASEIAGVDDLGTTGRGNDMQVGTYIEKMFMSELSGNIIDICPVGALTSKPYAFTARPWETRKTESIDVMDAVGSNIVVSTRTGEVMRILPRMHEDINEEWISDKTRFAYDGLKRQRLTEPMVRNEKGLLTYTSWEDALSRVAGMLQSFQGKDVAAIAGGLVDAEALVALKDLLNRVDSDTLCTEEVFPTAGAGTDLRSNYLLNTTIAGVEEADVVLLVGTNPRFEAPLFNARIRKSWLHNDLKVALIGSPVDLTYTYDHLGDSPKILQDIASGSHPFSQVLKEAKKPMVVLGSSALQRNDGAAILAAVSSIAQKIRMTSGVTGDWKVMNILHRIASQVAALDLGYKPGVEAIRKNPPKVLFLLGADGGCITRQDLPKDCFIIYQGHHGDVGAPIADVILPGAAYTEKSATYVNTEGRAQQTKVAVTPPGLAREDWKIIRALSEIAGMTLPYDTLDQVRNRLEEVSPNLVRYDDIEGANYFQQANELSKLVNQQLLADPLVPPQLTIKDFYMTDSISRASQTMAKCVKAVTEGAQAVEEPSIC

SEQ ID NO: 78771 - protein, 611 aa, Artificial Sequence
  derived and/or modified sequence
MEFLLANHPLDCPICDQGGECDLQDQSMMFGNDRSRFLEGKRAVEDKNIGPLVKTIMTRCIQCTRCIRFASEIAGVDDLGTTGRGNDMQVGTYIEKMFMSELSGNIIDICPVGALTSKPYAFTARPWETRKTESIDVMDAVGSNIVVSTRTGEVMRILPRMHEDINEEWISDKTRFAYDGLKRQRLTEPMVRNEKGLLTYTSWEDALSRVAGMLQSFQGKDVAAIAGGLVDAEALVALKDLLNRVDSDTLCTEEVFPTAGAGTDLRSNYLLNTTIAGVEEADVVLLVGTNPRFEAPLFNARIRKSWLHNDLKVALIGSPVDLTYTYDHLGDSPKILQDIASGSHPFSQVLKEAKKPMVVLGSSALQRNDGAAILAAVSSIAQKIRMTSGVTGDWKVMNILHRIASQVAALDLGYKPGVEAIRKNPPKVLFLLGADGGCITRQDLPKDCFIIYQGHHGDVGAPIADVILPGAAYTEKSATYVNTEGRAQQTKVAVTPPGLAREDWKIIRALSEIAGMTLPYDTLDQVRNRLEEVSPNLVRYDDIEGANYFQQANELSKLVNQQLLADPLVPPQLTIKDFYMTDSISRASQTMAKCVKAVTEGAQAVEEPSIC

SEQ ID NO: 78772 - DNA, 2076 bp, Artificial Sequence
  derived and/or modified sequence
atgctccggatccctgttcgtaaggctctggtggggctgagcaagtcgccaaaaggttgtgttcggacaaccgccactgcagcgagcaacttaattgaagtttttgtggatgggcaatctgtgatggtggagcccggcacgaccgtactgcaggttgtggcagcttgcgcaatgccagtgatgaagggatggaacatattaaccaacagcgagaagtctaaaaaggccagagagggtgttatggagttccttttggccaaccatcctctcgattgccccatatgcgatcagggcggagaatgtgatcttcaggatcagagtatgatgtttggtaacgaccgctcgcgctttttggagggaaaacgggctgttgaggacaaaaacataggccccctggtaaaaacgataatgacaaggtgtatccagtgtactcgatgcatacgctttgcatctgaaatagcaggcgtcgatgatctggggacgacgggtaggggcaatgatatgcaagtgggtacttacattgagaagatgtttatgagcgaattgtctggtaacatcatagacatttgccccgtcggcgccctaacttcaaagccctacgcctttacagccagaccatgggaaactaggaagactgaatcaatcgatgtgatggacgctgtcggctctaacatcgttgtctcaactaggaccggcgaagtgatgcggatactcccacgcatgcacgaggacatcaacgaggagtggattagcgataaaactagattcgcatatgacgggctcaagcgtcaacgactaaccgaaccgatggtccgcaacgaaaaagggctcctaacttacactagctgggaggatgctcttagcagggtggccggtatgctgcaatctttccaaggcaaagacgttgcggcaattgctggcgggttggtcgatgcagaagccctcgtggctctgaaggacttactcaaccgtgtcgatagcgacacgctatgcactgaggaagtatttcctaccgcaggtgccggaactgacctgcgatccaactacctcctgaataccaccattgctggagtggaggaggctgatgtcgtgctgttggtggggacaaacccccgctttgaggccccgctgtttaacgccaggatcaggaaatcttggttacacaacgatctaaaggttgccctgatcgggagcccggtggatctcacctatacctacgatcatcttggtgactcccctaagatccttcaagatattgcaagcgggagtcaccctttctctcaggttctgaaagaggctaagaaacctatggtggtgcttggtagcagtgccctgcaaagaaatgacggtgcggccatcctggccgctgttagctccattgcccagaaaattcggatgacatcgggagtgaccggcgactggaaagtcatgaacatcctgcaccgaattgcgagccaggtggctgccttagacctgggttacaaacctggagtagaggcgataagaaagaacccccccaaggtgttattcctcctgggagccgacggtggctgcattacccgccaggacctgccgaaagattgtttcatcatctaccagggccaccatggagatgtcggggcccccatcgcagatgtaatcctccccggggcggcctacaccgagaaaagcgctacgtacgtgaacaccgagggacgcgctcagcaaacaaaggtcgccgttacccccccgggtctggctagagaggactggaaaatcatccgtgcactttccgagattgccggaatgactctgccatacgacacactcgatcaggtcagaaacagactggaggaggtgtcacctaatctggtccggtacgacgatatcgagggggctaattattttcagcaggccaatgagctgtccaagctagtgaaccagcagctgctcgcagatcctctagttccaccccagttgaccattaaggacttctacatgactgattccatctccagagcatcgcagaccatggcgaaatgtgtcaaagccgttaccgagggagcacaggccgtcgaagagccttctatctgctag

SEQ ID NO: 78773 - DNA, 2076 bp, Artificial Sequence
  derived and/or modified sequence
atgctgcgcatccctgtgaggaaggccctggtgggcctgagcaagagccccaagggctgtgtgaggaccacagccacagctgccagcaacctgattgaggtgtttgtggatggccagagcgtgatggtggagcccggcaccaccgtgctgcaggtggtggccgcctgtgccatgcctgtgatgaagggctggaacatcctgaccaacagcgagaagagcaagaaggcccgggagggcgtgatggagttcctgctggccaaccaccccctggactgccccatctgtgaccagggcggggagtgtgacctgcaggaccagagcatgatgtttggaaatgacaggagccgcttcctggagggcaagagagctgtggaggacaagaacatcggccccctggtgaagaccatcatgacccgctgcatccagtgcacccgctgcatccgctttgccagcgagattgctggggtggatgacctgggcaccaccggcagaggaaatgacatgcaggtgggcacctacatcgagaagatgttcatgtctgagctgagcggcaacatcatcgacatctgccctgtgggcgccctgaccagcaagccctatgccttcaccgcccggccctgggagaccaggaagacagagagcattgatgtgatggatgctgtgggcagcaacatcgtggtgtccaccaggactggagaggtgatgaggatcctgcccaggatgcatgaggacatcaatgaggagtggatcagtgacaagaccaggtttgcctatgatggcctgaagaggcagaggctgacagagcccatggtgagaaatgagaagggcctgctgacctacacctcctgggaggatgccctgagccgggtggccggcatgctgcagagcttccagggcaaggatgtggccgccatcgccggcggcctggtggatgctgaggccctggtggccctgaaggacctgctgaacagagtggacagcgacaccctgtgcacagaggaggtgttccccacagctggagctggaacagacctgcggagcaactacctgctgaacaccaccatcgccggcgtggaggaggctgatgtggtgctgctggtgggcaccaaccccaggtttgaggcccccctcttcaatgcccgcatcaggaagtcctggctgcacaatgacctgaaggtggccctgattggcagccctgtggacctgacctacacctatgaccacctgggggacagccccaagatcctgcaggacatcgccagcggcagccaccccttcagccaggtgctgaaggaggccaagaagcccatggtggtgctgggcagcagcgccctgcagagaaatgatggagctgccatcctggccgctgtgagcagcatcgcccagaagatccgcatgaccagcggcgtgactggagactggaaggtgatgaacatcctgcacagaattgccagccaggtggccgccctggacctgggctacaagccaggagtggaggccatcaggaagaacccccccaaggtgctcttcctgctgggcgcagatggcggctgcatcacccggcaggacctgcccaaggactgcttcatcatctaccagggccaccacggagatgtgggcgcccccatcgcagatgtgatcctgcctggagctgcctacacagagaagagcgccacctacgtgaacacagagggccgggcccagcagaccaaggtggccgtgaccccacctggcctggcccgggaggactggaagatcatccgggccctgtctgaaattgctggcatgaccctgccctatgacaccctggaccaggtgaggaaccggctggaggaggtgagccccaacctggtgcgctatgatgacattgaaggagccaactacttccagcaggccaatgagctgagcaagctggtgaaccagcagctgctggccgaccccctggtgcccccccagctgaccatcaaggacttctacatgacagacagcatcagccgggccagccagaccatggccaagtgtgtgaaggctgtgacagaaggagcccaggccgtggaggagcccagcatctgctag

SEQ ID NO: 78774 - DNA, 2394 bp, Artificial Sequence
  derived and/or modified sequence
atattgaataagcgacccggcctcctagggggtcgtcgtggtccagacagtttagcagaacagcctccgcggctccggggagaagcaatatgttaaggatacctgtaagaaaggccttagtaggcctttctaagtctcctaaaggatgtgttcgaacaactgccacagcagcaagcaacttgattgaagtatttgttgatggtcagtctgtcatggtggaaccgggaacgaccgtcctccaagttgtagctgcttgtgccatgccagtaatgaagggttggaatatcctaacaaactcagaaaaatccaaaaaagccagggaaggtgtgatggagttcttattagcaaatcacccattggactgtcctatttgtgaccagggaggtgaatgtgatctgcaggaccagtccatgatgtttggaaatgataggagccgatttttagaggggaagcgtgctgtggaagacaagaacattgggccattggtaaagaccatcatgacaagatgtatacagtgtactcgctgcatcaggtttgcaagtgagattgcaggagtagatgatttgggaacaacaggcagaggaaatgatatgcaagttggcacatacattgaaaagatgttcatgtctgaactgtctgggaatatcattgatatctgccctgtaggtgccctaacctctaagccctatgcctttactgcccggccttgggaaacaagaaagacagaatccattgatgtaatggatgcggttggaagtaatattgtggttagcacaagaactggagaagtgatgaggattttgccacgtatgcatgaggacatcaatgaagagtggatctctgataaaaccagatttgcctatgatgggctaaaacgtcaaagacttaccgagccaatggtcagaaatgaaaaagggcttttaacctatacttcttgggaggatgcgctctctcgcgtagctggaatgttgcagagttttcaaggcaaagatgtggcagcaattgcaggtggcttggtggatgctgaagccctggtagctctcaaagatttgcttaatagagtggactctgacaccttatgcactgaagaggtcttccccactgcaggagctggcacagatttgcgttccaattatcttcttaatactacaattgctggtgtggaagaggcagatgttgttcttctggttggtacaaacccacgttttgaggcaccactgtttaatgctagaattcgaaagagctggctgcataatgacttaaaagtggcccttataggcagtccagtggacctcacttacacatatgaccacctgggagactcccccaaaattcttcaagacattgcttcgggaagccatccatttagccaggtcctaaaggaagctaaaaaaccaatggtggttttaggcagttctgcactccaaagaaatgatggagcagcaattcttgcagctgtttctagcattgcacaaaagattcggatgactagtggtgttactggtgattggaaagttatgaatatccttcataggattgcaagtcaagtagctgctttggaccttggctataagcctggggtggaagcaattcggaagaaccctcccaaggtgctgtttctcctgggagcagatggaggttgtatcacacgacaggatttgccaaaggattgtttcattatttatcaaggacatcatggtgatgttggggctcccatagctgatgttattctcccaggagctgcttacacagagaagtctgctacatatgtcaacactgagggtagagctcagcagactaaggtagcagtgacacctcctggcttggcaagagaagactggaaaattataagagcactctctgagattgctggaatgactcttccatatgatactctggatcaagtaaggaacagattggaagaagtctctcctaatcttgttcgatatgatgatattgaaggggctaattacttccagcaagcaaatgagctctcaaagctagtgaaccagcagcttcttgctgacccacttgttccacctcagctaactataaaagacttctacatgacagattcaattagcagagcctcacagacaatggccaaatgtgtcaaagctgtcacagagggtgcccaggcagtagaggaaccatccatatgctgaagcttctactaggatcccagttttgccgcagataattaatggacaactgtagtgcagtgatcctttacaggtttatttctttgtaaaaaaaaataataataatttgaatcatgtaatatttaaggttatactatgcctatttgaaaatgatattagttatcaactttgcagtttgaaaaacatgtattgtgtgtaaaggttaaataacaaaactatgcagatgctctta

SEQ ID NO: 78775 - DNA, 2076 bp, Artificial Sequence
  derived and/or modified sequence
atgctgcggatccccgtgcggaaggccctggtgggcctgagcaagtcccctaagggatgtgtgagaaccaccgcaaccgccgcttcaaatttgatcgaggtgttcgtggatggccagagtgtgatggtggagcccgggactaccgtgctgcaagtggtggctgcttgtgctatgccagtaatgaagggctggaacattctgactaatagcgaaaagtctaaaaaggcgagagaaggcgtcatggagtttctgcttgcgaaccaccccctggattgccctatttgtgaccagggtggcgaatgcgatctccaggaccaatccatgatgttcggcaacgacagaagcagatttctggaggggaagcgagccgtcgaggataaaaatataggcccactcgtcaagaccattatgaccagatgtatccagtgcacgcgttgcatcagatttgcaagcgagatagcgggagtggacgacctaggcaccaccggccggggcaacgacatgcaagtaggcacttacatagagaaaatgttcatgtccgagctgagcggcaacattattgatatttgcccagtgggagcgttgacttccaaaccctacgccttcacggctaggccctgggagacacggaagaccgaatctatcgacgtgatggatgccgttggatcaaatatcgtggtgtctactagaacgggtgaagttatgcgaatcttgccccgcatgcatgaagacataaacgaggagtggatttctgacaaaaccaggtttgcttacgatggcctgaagcggcagagactcacggaaccgatggtgaggaacgagaaaggactgctcacatatacttcatgggaagatgccttatctcgggtggccggaatgctacaaagttttcaaggaaaggacgtggcggctatagcgggtggtctggtcgacgcagaggcactggtcgcactaaaggatctacttaatcgcgtggacagtgacaccctatgcactgaagaggtgttcccgaccgccggcgccggcaccgatcttaggtcaaattaccttttgaacactacaattgctggagtagaggaggccgacgtagtgctgttagtgggtaccaatcctaggttcgaagctccactcttcaatgccaggatacgaaagtcctggctccacaacgaccttaaggtggccctgattggttcacccgtagacctgacttatacctatgaccacttgggggactcaccgaaaatcctccaagatattgccagcgggagccaccctttttcccaggttctcaaggaggcaaagaagcccatggtggtgctgggcagctcagccctgcaaagaaatgacggagccgctatccttgcagcagtgagctctattgcccagaaaatccggatgacatccggtgtgacaggggattggaaggtgatgaacatcctgcatcgcatagcctcgcaggtggctgccctggacttggggtacaaaccaggcgtggaggcgattagaaaaaatcccccaaaggtcctctttctgctgggcgccgatgggggttgtataacaagacaagatctccctaaggattgctttattatatatcagggccatcacggggatgtgggcgcaccgattgccgatgtgattctaccgggcgccgcctatacagagaaatctgccacctacgtgaatacagagggtagagcacagcaaacaaaggtggctgtgacaccacctggcctggccagggaagactggaagatcattcgggcactttctgaaattgccggtatgactctgccatacgacacgctggaccaggtcagaaaccgcctcgaagaagtcagcccaaatttagtacgttatgacgatatcgagggcgctaattacttccagcaagccaacgagctgtctaagctagttaaccagcagcttttagcggatcctttggtgcctccccagcttacaattaaagacttttatatgaccgatagcataagcagggcctcccaaacgatggccaagtgcgttaaggctgttacagaaggagcacaggctgttgaggaaccttcaatctgttag

SEQ ID NO: 78776 - DNA, 2076 bp, Artificial Sequence
  derived and/or modified sequence
atgctgcgcatcccagttcgaaaggctcttgtgggcctcagcaaatcacccaaaggatgcgtgaggacaaccgcgacagccgcttcgaatctcatagaagtgtttgtcgacggccagtcagtgatggtcgagccaggcacaacagtactccaagtggtggcagcatgtgcaatgccagttatgaaaggctggaacattctgacaaactcagagaagtccaaaaaggccagggagggggttatggagttccttctggccaatcaccccctggactgcccgatctgcgaccagggtggcgagtgcgacctgcaggaccagtccatgatgttcgggaacgatcgctcaagattcctcgaagggaaaagagccgtcgaggataaaaatattggcccactagtcaagactattatgactcgatgcatccagtgtactcggtgtatcagattcgccagcgaaatcgctggcgtagatgacctgggcacaaccggcaggggaaacgatatgcaggtgggaacatacatagagaaaatgtttatgtctgagctgtccgggaacatcatagatatttgccctgtgggtgcgttaacttctaagccctacgcttttactgctcgcccatgggagactaggaaaactgagagcatagatgtgatggatgctgttggaagcaatatcgtggtgtccacccggacaggagaggtaatgcggatcctgcccagaatgcacgaagacatcaatgaggaatggatctcagataagacccgatttgcctatgatggtctcaagcggcagcggctcaccgagccaatggtccgaaacgaaaaggggctgctgacttatacctcatgggaagatgccttgagccgtgtggccggaatgctgcagtcttttcagggcaaagacgtcgccgcaatcgccggtggcctagttgacgctgaagccctggtggccctaaaggatttgcttaaccgagtagactctgacaccctgtgtactgaagaggtatttcctacagcaggcgcaggtacagaccttcggagtaattatcttttgaacaccaccatcgccggagttgaggaggccgacgttgtgctgctagtgggaacaaaccctagattcgaggcgcctctattcaatgctagaatccgaaaatcatggttgcacaatgatctgaaagtggccctcataggaagcccagtggacttaacatacacttacgaccatctgggcgatagcccaaagattttgcaggacattgcctcaggttcacatccattttcgcaagtgctaaaagaagccaagaaacccatggtcgtgttagggtcctcggccctgcagcggaatgacggcgctgctatcctggcggcagtgtctagcattgctcaaaaaatcaggatgaccagcggggtcacaggcgattggaaggtcatgaatattctccacaggattgccagtcaggtggctgctctcgacttgggatacaagcccggtgtggaggccatccggaaaaatcccccaaaagtgctctttttgctgggggcagacggcggttgcatcactagacaggatctgccgaaagattgcttcattatctaccagggccatcacggagatgttggggctccaatagctgatgtaatactgccaggggcagcttataccgaaaaaagtgctacatatgtgaatacggagggccgagcccagcagactaaggttgcagtcaccccccctggcttggccagggaagattggaaaattatcagagccctttctgagatcgcaggcatgacgctgccttacgacacactggatcaggtgcgaaacagactcgaggaagtgagcccaaatttggtgcggtatgatgatatcgagggagccaattacttccaacaggccaacgagctgtctaaactggtcaatcagcagcttttagccgaccctctcgtgcccccacaacttacaattaaggacttctatatgacggattctataagtagggcgtcccagacaatggcaaaatgcgttaaggccgttacagagggggcacaagcggtggaggaaccatccatctgctag

SEQ ID NO: 78777 - DNA, 2076 bp, Artificial Sequence
  derived and/or modified sequence
atgctgagaatccccgtgagaaaggccctggtgggcctgagcaagagccccaagggctgcgtgagaaccaccgccaccgccgccagcaacctgatcgaggtgttcgtggacggccagagcgtgatggtggagcccggcaccaccgtgctgcaggtggtggccgcctgcgccatgcccgtgatgaagggctggaacatcctgaccaacagcgagaagagcaagaaggccagagagggcgtgatggagttcctgctggccaaccaccccctggactgccccatctgcgaccagggcggcgagtgcgacctgcaggaccagagcatgatgttcggcaacgacagaagcagattcctggagggcaagagagccgtggaggacaagaacatcggccccctggtgaagaccatcatgaccagatgcatccagtgcaccagatgcatcagattcgccagcgagatcgccggcgtggacgacctgggcaccaccggcagaggcaacgacatgcaggtgggcacctacatcgagaagatgttcatgagcgagctgagcggcaacatcatcgacatctgccccgtgggcgccctgaccagcaagccctacgccttcaccgccagaccctgggagaccagaaagaccgagagcatcgacgtgatggacgccgtgggcagcaacatcgtggtgagcaccagaaccggcgaggtgatgagaatcctgcccagaatgcacgaggacatcaacgaggagtggatcagcgacaagaccagattcgcctacgacggcctgaagagacagagactgaccgagcccatggtgagaaacgagaagggcctgctgacctacaccagctgggaggacgccctgagcagagtggccggcatgctgcagagcttccagggcaaggacgtggccgccatcgccggcggcctggtggacgccgaggccctggtggccctgaaggacctgctgaacagagtggacagcgacaccctgtgcaccgaggaggtgttccccaccgccggcgccggcaccgacctgagaagcaactacctgctgaacaccaccatcgccggcgtggaggaggccgacgtggtgctgctggtgggcaccaaccccagattcgaggcccccctgttcaacgccagaatcagaaagagctggctgcacaacgacctgaaggtggccctgatcggcagccccgtggacctgacctacacctacgaccacctgggcgacagccccaagatcctgcaggacatcgccagcggcagccaccccttcagccaggtgctgaaggaggccaagaagcccatggtggtgctgggcagcagcgccctgcagagaaacgacggcgccgccatcctggccgccgtgagcagcatcgcccagaagatcagaatgaccagcggcgtgaccggcgactggaaggtgatgaacatcctgcacagaatcgccagccaggtggccgccctggacctgggctacaagcccggcgtggaggccatcagaaagaacccccccaaggtgctgttcctgctgggcgccgacggcggctgcatcaccagacaggacctgcccaaggactgcttcatcatctaccagggccaccacggcgacgtgggcgcccccatcgccgacgtgatcctgcccggcgccgcctacaccgagaagagcgccacctacgtgaacaccgagggcagagcccagcagaccaaggtggccgtgaccccccccggcctggccagagaggactggaagatcatcagagccctgagcgagatcgccggcatgaccctgccctacgacaccctggaccaggtgagaaacagactggaggaggtgagccccaacctggtgagatacgacgacatcgagggcgccaactacttccagcaggccaacgagctgagcaagctggtgaaccagcagctgctggccgaccccctggtgcccccccagctgaccatcaaggacttctacatgaccgacagcatcagcagagccagccagaccatggccaagtgcgtgaaggccgtgaccgagggcgcccaggccgtggaggagcccagcatctgctag

SEQ ID NO: 78778 - protein, 616 aa, Artificial Sequence
  derived and/or modified sequence
MWEGVMEFLLANHPLDCPICDQGGECDLQDQSMMFGNDRSRFLEGKRAVEDKNIGPLVKTIMTRCIQCTRCIRFASEIAGVDDLGTTGRGNDMQVGTYIEKMFMSELSGNIIDICPVGALTSKPYAFTARPWETRKTESIDVMDAVGSNIVVSTRTGEVMRILPRMHEDINEEWISDKTRFAYDGLKRQRLTEPMVRNEKGLLTYTSWEDALSRVAGMLQSFQGKDVAAIAGGLVDAEALVALKDLLNRVDSDTLCTEEVFPTAGAGTDLRSNYLLNTTIAGVEEADVVLLVGTNPRFEAPLFNARIRKSWLHNDLKVALIGSPVDLTYTYDHLGDSPKILQDIASGSHPFSQVLKEAKKPMVVLGSSALQRNDGAAILAAVSSIAQKIRMTSGVTGDWKVMNILHRIASQVAALDLGYKPGVEAIRKNPPKVLFLLGADGGCITRQDLPKDCFIIYQGHHGDVGAPIADVILPGAAYTEKSATYVNTEGRAQQTKVAVTPPGLAREDWKIIRALSEIAGMTLPYDTLDQVRNRLEEVSPNLVRYDDIEGANYFQQANELSKLVNQQLLADPLVPPQLTIKDFYMTDSISRASQTMAKCVKAVTEGAQAVEEPSIC

SEQ ID NO: 78779 - DNA, 1851 bp, Artificial Sequence
  derived and/or modified sequence
atgtgggaaggcgtgatggaatttctgctggcaaaccaccccttagattgtcctatctgcgatcagggcggcgaatgtgacctccaggaccagagcatgatgtttggaaatgacagatcgcgctttttggaaggtaagagagcagtagaagacaaaaatataggcccgttagtgaagaccattatgaccaggtgtatccagtgtacccgctgcattcgtttcgctagcgagatagccggcgtagatgatcttggtactaccgggagaggcaacgatatgcaagttggtacgtacatcgaaaagatgtttatgtcagagctctctggcaatatcatcgatatttgtccagtcggggcgctgacctctaagccctacgcctttactgcccgcccctgggagaccagaaaaaccgaatcaatcgatgtaatggacgctgttggaagtaacatcgtggttagtaccaggaccggcgaagtgatgcgtatcctcccacggatgcacgaggatatcaatgaagagtggatttccgataagacccgattcgcttacgacggactgaaaaggcagagactgacggagccaatggttaggaacgagaaaggcctgctgacctatacctcctgggaggacgccctgtctagagtggctggaatgctgcagagttttcagggcaaggatgtggccgcgattgccggtgggctggtggacgcagaagctttagttgcacttaaagacctgctaaatagagtagatagcgataccttgtgtacagaagaagtctttcccacagcaggcgccggcaccgacctgcggagtaattacctcctgaatactacgatagccggcgtcgaagaagcggatgtcgttctactcgttggtactaaccctcggtttgaggcccccctgttcaacgctcgcatccggaaatcttggttacataatgatctgaaggtggccctgattggctctccagtggatctgacatacacttatgatcacctaggggactcccctaaaatcttacaggacatagcctccggtagccacccgttctctcaggtgctgaaagaggccaagaagcctatggtggtcctgggatcctccgcgcttcagcggaacgacggggccgcgattctggcggccgtatccagcatcgcccagaagatccggatgacatccggggttaccggcgactggaaagtcatgaacatactgcatagaattgcaagtcaggtcgccgcattggatctcggctacaaacccggagtagaagctatccgcaagaaccctcccaaagttctcttcctcctgggtgcggacggcggatgcatcacccgccaggatttgcccaaagactgctttatcatttaccagggtcaccacggtgacgtgggcgcccccatcgccgacgttatcctaccgggcgctgcctatacagagaaaagtgctacatatgtcaatactgagggccgagcacagcaaactaaagtggcagttactccacccggactggctcgcgaggattggaagatcatccgggcattatcggagatcgcagggatgacgctgccttatgacacactcgaccaggtaaggaaccgtctagaagaggtctctcctaacctggttcgctacgacgatatagagggagccaactacttccaacaggctaatgagttgtccaaactggtgaatcagcaactactcgctgacccactggtaccacctcaactaaccatcaaagacttttatatgacagactcgatatcgcgcgcaagtcagactatggctaaatgtgtgaaagccgtcacggagggcgcccaggccgtggaggagccaagcatctgctag

SEQ ID NO: 78780 - DNA, 1851 bp, Artificial Sequence
  derived and/or modified sequence
atgtgggagggcgtgatggagttcctgctggccaaccaccccctggactgccccatctgtgaccagggcggagaatgtgacctgcaggaccagagcatgatgtttggaaatgacaggagccgcttcctggagggcaagagagctgtggaggacaagaacatcggccccctggtgaagaccatcatgacccgctgcatccagtgcacccgctgcatccgctttgccagcgagattgctggggtggatgacctgggcaccaccggcagaggaaatgacatgcaggtgggcacctacatcgagaagatgttcatgtctgagctgagcggcaacatcatcgacatctgccctgtgggcgccctgaccagcaagccctatgccttcaccgcccggccctgggagaccaggaagacagagagcattgatgtgatggatgctgtgggcagcaacatcgtggtgtccaccaggactggagaggtgatgaggatcctgcccaggatgcatgaggacatcaatgaggagtggatcagtgacaagaccaggtttgcctatgatggcctgaagaggcagaggctgacagagcccatggtgagaaatgagaagggcctgctgacctacacctcctgggaggatgccctgagccgggtggccggcatgctgcagagcttccagggcaaggatgtggccgccatcgccggcggcctggtggatgctgaggccctggtggccctgaaggacctgctgaacagagtggacagcgacaccctgtgcacagaggaggtgttccccacagctggggccggcacagacctgcggagcaactacctgctgaacaccaccatcgccggcgtggaggaggctgatgtggtgctgctggtgggcaccaaccccaggtttgaggcccccctcttcaatgcccgcatcaggaagtcctggctgcacaatgacctgaaggtggccctgattggcagccctgtggacctgacctacacctatgaccacctgggggacagccccaagatcctgcaggacatcgccagcggcagccaccccttcagccaggtgctgaaggaggccaagaagcccatggtggtgctgggcagcagcgccctgcagagaaatgatggagctgccatcctggccgctgtgagcagcatcgcccagaagatccgcatgaccagcggcgtgactggagactggaaggtgatgaacatcctgcaccgcatcgccagccaggtggccgccctggacctgggctacaagccaggagtggaggccatcaggaagaacccccccaaggtgctcttcctgctgggcgcagatggcggctgcatcacccggcaggacctgcccaaggactgcttcatcatctaccagggccaccacggagatgtgggcgcccccatcgcagatgtgatcctgcccggggccgcctacacagagaagagcgccacctacgtgaacacagagggccgggcccagcagaccaaggtggccgtgaccccacctggcctggcccgggaggactggaagatcatccgggccctgtctgaaattgctggcatgaccctgccctatgacaccctggaccaggtgaggaaccggctggaggaggtgagccccaacctggtgcgctatgatgacatcgagggcgccaactacttccagcaggccaatgagctgagcaagctggtgaaccagcagctgctggccgaccccctggtgcccccccagctgaccatcaaggacttctacatgacagacagcatcagccgggccagccagaccatggccaagtgtgtgaaggctgtgacagagggcgcccaggccgtggaggagcccagcatctgctag

SEQ ID NO: 78781 - DNA, 2080 bp, Artificial Sequence
  derived and/or modified sequence
atattgaataagcgacccggcctcctagggggtcgtcgtggtccagacagtttagcagaacagcctccgcggctccggggagaagcaatatgttaaggatacctgtaagaaaggccttagtaggcctttctaagtctcctaaaggatgtgggaaggtgtgatggagttcttattagcaaatcacccattggactgtcctatttgtgaccagggaggtgaatgtgatctgcaggaccagtccatgatgtttggaaatgataggagccgatttttagaggggaagcgtgctgtggaagacaagaacattgggccattggtaaagaccatcatgacaagatgtatacagtgtactcgctgcatcaggtttgcaagtgagattgcaggagtagatgatttgggaacaacaggcagaggaaatgatatgcaagttggcacatacattgaaaagatgttcatgtctgaactgtctgggaatatcattgatatctgccctgtaggtgccctaacctctaagccctatgcctttactgcccggccttgggaaacaagaaagacagaatccattgatgtaatggatgcggttggaagtaatattgtggttagcacaagaactggagaagtgatgaggattttgccacgtatgcatgaggacatcaatgaagagtggatctctgataaaaccagatttgcctatgatgggctaaaacgtcaaagacttaccgagccaatggtcagaaatgaaaaagggcttttaacctatacttcttgggaggatgcgctctctcgcgtagctggaatgttgcagagttttcaaggcaaagatgtggcagcaattgcaggtggcttggtggatgctgaagccctggtagctctcaaagatttgcttaatagagtggactctgacaccttatgcactgaagaggtcttccccactgcaggagctggcacagatttgcgttccaattatcttcttaatactacaattgctggtgtggaagaggcagatgttgttcttctggttggtacaaacccacgttttgaggcaccactgtttaatgctagaattcgaaagagctggctgcataatgacttaaaagtggcccttataggcagtccagtggacctcacttacacatatgaccacctgggagactcccccaaaattcttcaagacattgcttcgggaagccatccatttagccaggtcctaaaggaagctaaaaaaccaatggtggttttaggcagttctgcactccaaagaaatgatggagcagcaattcttgcagctgtttctagcattgcacaaaagattcggatgactagtggtgttactggtgattggaaagttatgaatatccttcataggattgcaagtcaagtagctgctttggaccttggctataagcctggggtggaagcaattcggaagaaccctcccaaggtgctgtttctcctgggagcagatggaggttgtatcacacgacaggatttgccaaaggattgtttcattatttatcaaggacatcatggtgatgttggggctcccatagctgatgttattctcccaggagctgcttacacagagaagtctgctacatatgtcaacactgagggtagagctcagcagactaaggtagcagtgacacctcctggcttggcaagagaagactggaaaattataagagcactctctgagattgctggaatgactcttccatatgatactctggatcaagtaaggaacagattggaagaagtctctcctaatcttgttcgatatgatgatattgaaggggctaattacttccagcaagcaaatgagctctcaaagctagtgaaccagcagcttcttgctgacccacttgttccacctcagctaactataaaagacttctacatgacagattcaattagcagagcctcacagacaatggccaaatgtgtcaaagctgtcacagagggtgcccaggcagtagaggaaccatccatatgctgaagcttctactaggatcccagttttgccgcagataattaatggacaactgtagtgcagtgatcctttacaggtttatttctttgt

SEQ ID NO: 78782 - DNA, 1851 bp, Artificial Sequence
  derived and/or modified sequence
atgtgggagggcgtgatggagttcctgctggccaaccaccccctggattgcccaatctgtgatcagggcggagagtgcgacctgcaggatcagagcatgatgttcgggaacgaccgctctaggtttctcgaaggaaagcgcgccgtagaggacaagaacattggccccctggtcaaaactattatgacacggtgtatccagtgtacccgatgtatacgctttgcatcagaaattgccggtgtcgatgatctcggaaccactggtcggggtaatgatatgcaggtgggaacctacattgagaagatgttcatgtccgagcttagcggcaacatcattgatatctgtccagtgggcgcactgacttctaagccctacgcctttacagcaagaccttgggaaacaagaaaaaccgagagtatcgacgtgatggacgcagtaggtagcaacatagtcgtgtcaaccaggaccggcgaggtcatgcgcatattgcctcgcatgcacgaggacatcaacgaggagtggattagtgacaagacccgtttcgcatacgacggattaaagaggcagcgcctgaccgaaccaatggtgcggaacgagaagggtctgttaacctatacgagttgggaggacgccctctctcgggtagcagggatgttgcagagcttccagggcaaagacgtcgcagcgattgccggcgggctcgtggatgcagaagcgctagtcgctctgaaagatttgttgaacagggtggacagcgataccctctgtactgaagaggtcttcccaactgccggagccggaacagatcttaggagcaattacttactgaatactacaatcgccggggtggaggaggctgatgtagtgctccttgtaggtacgaatcctcgattcgaggctccactcttcaacgctcgaatccgcaaatcttggctccataacgatcttaaagtcgcgcttatcggctctccagtagaccttacgtacacctacgaccatctgggagacagccccaagatactacaagacattgcctcgggctctcaccctttcagccaagtcctgaaagaggccaagaagcccatggtggtccttggcagttctgccttacagcgcaatgatggggctgctatactggccgcagtcagctctatcgcgcagaagatacgaatgacaagtggcgtaaccggcgattggaaagtgatgaacattctacaccgcatcgcttcccaggttgcagccctggacttgggctataaaccgggggtggaagcaatcagaaagaatccccccaaagttctgttccttttaggcgcagacggagggtgtatcaccaggcaggatcttcctaaggactgttttataatttatcagggtcaccacggtgatgttggagctcccattgccgatgttatccttcccggcgctgcctacacagagaaaagcgccacatatgttaataccgaaggaagagctcaacaaacgaaagttgcggtgaccccccctggcctcgccagagaggactggaaaatcatcagagcactttccgaaatagctggaatgacactcccatacgatactctcgaccaggtgagaaataggcttgaggaggtgagcccaaacctcgttcgttacgatgatattgaaggtgcaaactacttccagcaggccaatgaactgtctaagcttgtaaaccaacagctcctggccgacccgcttgtacccccccaactgacaattaaggacttctatatgaccgactctatctcgcgcgcctctcagactatggctaaatgcgttaaggctgtcacggagggagctcaggcggtggaagagccctcgatctgttag

SEQ ID NO: 78783 - DNA, 1851 bp, Artificial Sequence
  derived and/or modified sequence
atgtgggaaggcgtcatggagtttctcctggcaaatcatccgttggattgcccgatctgcgaccaaggaggagaatgcgacctccaggatcagtccatgatgtttggaaacgacagatcccgcttccttgaagggaagagggccgtagaagataagaacataggtcccctcgttaagaccatcatgacccgttgtatccagtgcactcgctgcattcgattcgcgtcggagattgcgggagtggacgatctaggtacgactggcaggggaaatgacatgcaagtggggacgtacatagaaaagatgtttatgtccgaactcagcggcaacatcatagatatttgtcccgtcggggctctgacgtctaagccctatgcattcactgccagaccgtgggagacccgtaaaacggagtcaatcgacgtgatggacgccgtggggtcaaacattgtcgtgtcaacccgtacgggcgaagtgatgagaatcctgcccagaatgcatgaggatatcaatgaagaatggatttcagacaaaacccgctttgcttacgacgggctgaagaggcagaggctgaccgaacctatggtgcggaacgaaaaggggcttttgacttatacatcgtgggaagacgcactgagcagagtggcgggaatgctgcagagcttccagggtaaggacgtcgccgctatcgcgggtggactagtggatgcagaggccttagtagctctcaaagatttgctcaatcgcgtggacagcgacactctctgcaccgaggaagtgtttcctacagctggcgctgggaccgatctcagaagcaattatctccttaatactactatcgccggtgtggaagaggcagacgtcgtgctgctggtcggcaccaacccgcgtttcgaggcacccttatttaacgcgagaatccggaaatcatggctccacaacgatttgaaggtggccttaattggcagccctgtagatctgacctacacatacgatcatctcggtgactcccctaaaatcttgcaagacattgcttctggcagccaccccttcagccaagtgctgaaagaagcgaagaagccgatggtagtcttgggctctagtgccttgcagcggaacgacggcgcagcaatcctggccgcagtatcaagcatcgcacagaagatcaggatgactagcggggtgacaggcgactggaaggtgatgaacatccttcaccgcatagcttcccaggtcgctgctctagacctgggctacaaaccaggcgttgaagctatacgcaagaatccccctaaggtcttatttctgctaggggcagacggaggctgtatcacccggcaagatctgccgaaagattgcttcatcatatatcagggacaccacggagacgtgggagctccgattgccgacgtgatcctgcctggcgctgcctacactgagaagtctgcaacgtacgttaacacagagggcagggcccagcagacaaaggtcgctgttacacccccaggactcgctcgagaagattggaagattataagagcgctaagcgaaatcgcgggtatgacactaccgtacgatacacttgatcaggttcggaatcggctagaagaggtgagccctaacctggttcggtacgacgatatcgaaggggctaactacttccagcaggcgaatgagctctccaaacttgtgaaccaacaactgctcgctgacccactcgttccccctcaattaaccatcaaagacttctatatgacggactccattagcagggcttcccagaccatggctaaatgcgtgaaagccgttacagagggcgcacaggcagttgaggagccctctatatgttag

SEQ ID NO: 78784 - DNA, 1851 bp, Artificial Sequence
  derived and/or modified sequence
atgtgggagggcgtgatggagttcctgctggccaaccaccccctggactgccccatctgcgaccagggcggcgagtgcgacctgcaggaccagagcatgatgttcggcaacgacagaagcagattcctggagggcaagagagccgtggaggacaagaacatcggccccctggtgaagaccatcatgaccagatgcatccagtgcaccagatgcatcagattcgccagcgagatcgccggcgtggacgacctgggcaccaccggcagaggcaacgacatgcaggtgggcacctacatcgagaagatgttcatgagcgagctgagcggcaacatcatcgacatctgccccgtgggcgccctgaccagcaagccctacgccttcaccgccagaccctgggagaccagaaagaccgagagcatcgacgtgatggacgccgtgggcagcaacatcgtggtgagcaccagaaccggcgaggtgatgagaatcctgcccagaatgcacgaggacatcaacgaggagtggatcagcgacaagaccagattcgcctacgacggcctgaagagacagagactgaccgagcccatggtgagaaacgagaagggcctgctgacctacaccagctgggaggacgccctgagcagagtggccggcatgctgcagagcttccagggcaaggacgtggccgccatcgccggcggcctggtggacgccgaggccctggtggccctgaaggacctgctgaacagagtggacagcgacaccctgtgcaccgaggaggtgttccccaccgccggcgccggcaccgacctgagaagcaactacctgctgaacaccaccatcgccggcgtggaggaggccgacgtggtgctgctggtgggcaccaaccccagattcgaggcccccctgttcaacgccagaatcagaaagagctggctgcacaacgacctgaaggtggccctgatcggcagccccgtggacctgacctacacctacgaccacctgggcgacagccccaagatcctgcaggacatcgccagcggcagccaccccttcagccaggtgctgaaggaggccaagaagcccatggtggtgctgggcagcagcgccctgcagagaaacgacggcgccgccatcctggccgccgtgagcagcatcgcccagaagatcagaatgaccagcggcgtgaccggcgactggaaggtgatgaacatcctgcacagaatcgccagccaggtggccgccctggacctgggctacaagcccggcgtggaggccatcagaaagaacccccccaaggtgctgttcctgctgggcgccgacggcggctgcatcaccagacaggacctgcccaaggactgcttcatcatctaccagggccaccacggcgacgtgggcgcccccatcgccgacgtgatcctgcccggcgccgcctacaccgagaagagcgccacctacgtgaacaccgagggcagagcccagcagaccaaggtggccgtgaccccccccggcctggccagagaggactggaagatcatcagagccctgagcgagatcgccggcatgaccctgccctacgacaccctggaccaggtgagaaacagactggaggaggtgagccccaacctggtgagatacgacgacatcgagggcgccaactacttccagcaggccaacgagctgagcaagctggtgaaccagcagctgctggccgaccccctggtgcccccccagctgaccatcaaggacttctacatgaccgacagcatcagcagagccagccagaccatggccaagtgcgtgaaggccgtgaccgagggcgcccaggccgtggaggagcccagcatctgctag

SEQ ID NO: 78785 - protein, 727 aa, Artificial Sequence
  derived and/or modified sequence
MLRIPVRKALVGLSKSPKGCVRTTATAASNLIEVFVDGQSVMVEPGTTVLQACEKVGMQIPRFCYHERLSVAGNCRMCLVEIEKAPKVVAACAMPVMKGWNILTNSEKSKKAREGVMEFLLANHPLDCPICDQGGECDLQDQSMMFGNDRSRFLEGKRAVEDKNIGPLVKTIMTRCIQCTRCIRFASEIAGVDDLGTTGRGNDMQVGTYIEKMFMSELSGNIIDICPVGALTSKPYAFTARPWETRKTESIDVMDAVGSNIVVSTRTGEVMRILPRMHEDINEEWISDKTRFAYDGLKRQRLTEPMVRNEKGLLTYTSWEDALSRVAGMLQSFQGKDVAAIAGGLVDAEALVALKDLLNRVDSDTLCTEEVFPTAGAGTDLRSNYLLNTTIAGVEEADVVLLVGTNPRFEAPLFNARIRKSWLHNDLKVALIGSPVDLTYTYDHLGDSPKILQDIASGSHPFSQVLKEAKKPMVVLGSSALQRNDGAAILAAVSSIAQKIRMTSGVTGDWKVMNILHRIASQVAALDLGYKPGVEAIRKNPPKVLFLLGADGGCITRQDLPKDCFIIYQGHHGDVGAPIADVILPGAAYTEKSATYVNTEGRAQQTKVAVTPPGLAREDWKIIRALSEIAGMTLPYDTLDQVRNRLEEVSPNLVRYDDIEGANYFQQANELSKLVNQQLLADPLVPPQLTIKDFYMTDSISRASQTMAKCVKAVTEGAQAVEEPSIC

SEQ ID NO: 78786 - protein, 670 aa, Artificial Sequence
  derived and/or modified sequence
MQIPRFCYHERLSVAGNCRMCLVEIEKAPKVVAACAMPVMKGWNILTNSEKSKKAREGVMEFLLANHPLDCPICDQGGECDLQDQSMMFGNDRSRFLEGKRAVEDKNIGPLVKTIMTRCIQCTRCIRFASEIAGVDDLGTTGRGNDMQVGTYIEKMFMSELSGNIIDICPVGALTSKPYAFTARPWETRKTESIDVMDAVGSNIVVSTRTGEVMRILPRMHEDINEEWISDKTRFAYDGLKRQRLTEPMVRNEKGLLTYTSWEDALSRVAGMLQSFQGKDVAAIAGGLVDAEALVALKDLLNRVDSDTLCTEEVFPTAGAGTDLRSNYLLNTTIAGVEEADVVLLVGTNPRFEAPLFNARIRKSWLHNDLKVALIGSPVDLTYTYDHLGDSPKILQDIASGSHPFSQVLKEAKKPMVVLGSSALQRNDGAAILAAVSSIAQKIRMTSGVTGDWKVMNILHRIASQVAALDLGYKPGVEAIRKNPPKVLFLLGADGGCITRQDLPKDCFIIYQGHHGDVGAPIADVILPGAAYTEKSATYVNTEGRAQQTKVAVTPPGLAREDWKIIRALSEIAGMTLPYDTLDQVRNRLEEVSPNLVRYDDIEGANYFQQANELSKLVNQQLLADPLVPPQLTIKDFYMTDSISRASQTMAKCVKAVTEGAQAVEEPSIC

SEQ ID NO: 78787 - protein, 130 aa, Artificial Sequence
  derived and/or modified sequence
MLRIPVRKALVGLSKSPKGCVRTTATAASNLIEVFVDGQSVMVEPGTTVLQACEKVGMQIPRFCYHERLSVAGNCRMCLVEIEKAPKVVAACAMPVMKGWNILTNSEKSKKAREGVMEFLLANHPLDCPI

SEQ ID NO: 78788 - protein, 741 aa, Artificial Sequence
  derived and/or modified sequence
MRIRGSSGTLSRINMLRIPVRKALVGLSKSPKGCVRTTATAASNLIEVFVDGQSVMVEPGTTVLQACEKVGMQIPRFCYHERLSVAGNCRMCLVEIEKAPKVVAACAMPVMKGWNILTNSEKSKKAREGVMEFLLANHPLDCPICDQGGECDLQDQSMMFGNDRSRFLEGKRAVEDKNIGPLVKTIMTRCIQCTRCIRFASEIAGVDDLGTTGRGNDMQVGTYIEKMFMSELSGNIIDICPVGALTSKPYAFTARPWETRKTESIDVMDAVGSNIVVSTRTGEVMRILPRMHEDINEEWISDKTRFAYDGLKRQRLTEPMVRNEKGLLTYTSWEDALSRVAGMLQSFQGKDVAAIAGGLVDAEALVALKDLLNRVDSDTLCTEEVFPTAGAGTDLRSNYLLNTTIAGVEEADVVLLVGTNPRFEAPLFNARIRKSWLHNDLKVALIGSPVDLTYTYDHLGDSPKILQDIASGSHPFSQVLKEAKKPMVVLGSSALQRNDGAAILAAVSSIAQKIRMTSGVTGDWKVMNILHRIASQVAALDLGYKPGVEAIRKNPPKVLFLLGADGGCITRQDLPKDCFIIYQGHHGDVGAPIADVILPGAAYTEKSATYVNTEGRAQQTKVAVTPPGLAREDWKIIRALSEIAGMTLPYDTLDQVRNRLEEVSPNLVRYDDIEGANYFQQANELSKLVNQQLLADPLVPPQLTIKDFYMTDSISRASQTMAKCVKAVTEGAQAVEEPSIC

SEQ ID NO: 78789 - DNA, 2013 bp, Artificial Sequence
  derived and/or modified sequence
atgcaaattcctagattttgctaccatgagagactgtccgtggccggcaattgtaggatgtgtctggtggaaatcgagaaagccccaaaagtggtggcagcctgtgcaatgcccgtgatgaaaggatggaacattctgacaaactctgagaaaagcaaaaaggcgagggaaggcgtgatggaatttttactcgctaatcaccccctggattgtcctatctgtgaccaaggcggcgagtgtgaccttcaagaccagtcgatgatgttcgggaatgatcggtctcggtttctggaaggtaaacgggccgtcgaggataaaaatatcggcccactggtgaagacgataatgacacgatgtattcagtgtacccgatgcatccgattcgcaagcgagattgctggggtggacgatctgggaaccaccgggcgaggcaatgacatgcaggtgggcacgtacatagagaaaatgttcatgagtgagctgtccgggaacattatcgatatctgccccgtgggggctttgacatcaaagccatatgcctttaccgcacgcccttgggagacaaggaagactgagtctatagatgtcatggatgccgtagggtctaatatcgtcgttagtacaaggaccggcgaagttatgcgaatcctcccacggatgcatgaggatatcaatgaggaatggatcagcgacaagacccgctttgcctatgatggattgaaaaggcagcgactaacagaacctatggtgcggaatgaaaagggcctgcttacatacacatcttgggaggacgccctgagcagggtcgccggcatgctccagagtttccaaggaaaagacgtcgccgctatcgccgggggcttagtggacgcagaagccttggtcgcactaaaagatctcctgaaccgtgtcgacagtgatactctgtgcacggaggaggtctttcctaccgctggtgccgggactgacttgcggtcgaactatcttttgaataccacaatcgccggagtggaagaggccgatgtggtgcttcttgtggggacaaaccctaggtttgaggcaccgctctttaacgccaggattcgaaagagttggttgcacaacgacctcaaagtcgcactgatcggatcgcccgttgatctaacatacacctacgaccacctgggggatagtcctaagatcctgcaggacatagcttctggctctcatcctttttcacaggtactgaaggaagcaaaaaaaccaatggtcgtcctcgggtcgtcagctcttcagagaaatgacggggctgcaatcctcgctgctgtgtcttccattgcccagaagataaggatgacgtccggggtgactggagactggaaggtaatgaacattttacatcgcattgcctcccaagtggccgcccttgatctggggtataagcccggagtggaggcaattcggaagaatccgcctaaggtgttgttcctcttgggcgcagacggagggtgcattacgcgacaagatcttcccaaagactgtttcataatttatcaaggccatcacggcgacgtgggcgctccaattgcagacgtgatccttccaggagctgcgtataccgagaagagcgctacttatgtgaatacagaaggccgagcacaacaaaccaaagtggcagtcaccccacctggactcgcccgggaagactggaagatcattagagcgctgtctgagattgccgggatgaccctcccttatgacacccttgatcaagtgcgcaacaggctggaggaagtaagccctaatctcgtgaggtacgacgacatagaaggggctaactatttccagcaggctaacgaactgagcaagctggtaaatcagcagctgctggcagacccacttgtgccaccacagctaaccattaaggacttttatatgacggatagtatcagcagggcgagtcagaccatggcaaagtgtgtgaaggctgtgactgaaggggcccaggcagtggaagagcctagtatctgctag

SEQ ID NO: 78790 - DNA, 2184 bp, Artificial Sequence
  derived and/or modified sequence
atgttaagaatccctgtccgcaaggccctcgtgggcctgtccaagtcccctaaggggtgtgtaagaacaaccgctacagctgcgagcaatctaattgaagtcttcgtggatgggcagtctgtaatggtggaaccaggaacaaccgtgctgcaagcatgtgagaaagtcggcatgcagataccaaggttttgttaccatgaaagactgtccgtggccgggaattgtcggatgtgcctggttgagatcgagaaagctcccaaggtggtcgctgcatgcgcaatgcctgtgatgaaaggctggaacatcctgaccaacagcgaaaagtccaaaaaggcccgtgaaggggtgatggagttcttactagccaaccaccccctcgactgtccaatatgcgatcagggcggcgagtgcgacctgcaagaccagtcaatgatgtttggtaacgaccggtccaggtttttagaaggtaaaagagcagtcgaagataagaatattggtcctctggtaaaaactatcatgactagatgcattcagtgcacccgttgcatcaggtttgcttcggagatagccggcgtagacgacctgggcacaactgggcggggtaatgacatgcaagtgggtacctacatcgagaaaatgttcatgtccgaattgagcgggaacatcattgacatctgccctgttggggccctaacgtccaaaccttacgctttcaccgcccgtccttgggagactcgaaagacagaatccatcgacgtaatggacgcagttggatccaacattgtcgtgtcaacccggacaggtgaggtgatgcgaattctacctcggatgcacgaagacattaatgaagagtggatatccgataaaacgcgatttgcgtacgacgggctgaagagacaacggcttaccgagcccatggtccgaaatgagaagggcctgctgacctatacctcatgggaggatgccctgagtcgggtagccgggatgctacagtcttttcaaggaaaagacgtggcagccatcgctggtgggctggtcgatgccgaggctctggtcgcattaaaggacttactcaatcgggtggacagcgatacactgtgcaccgaggaagtattcccaactgcaggggccggcacagacctgagatccaactacctgctcaatactaccatcgcaggagtggaagaggcggacgtcgttctcttggtagggactaaccctcggtttgaggctcctctgtttaacgctcgtattaggaaaagctggctccacaatgacctgaaggtcgcacttattggttcaccagtcgatctcacctatacttatgaccatcttggggactcacctaagatactccaggacatcgcatctggaagccatccattctctcaagttctgaaggaggctaagaagcctatggtagtcctgggatcaagcgcattgcagagaaacgatggtgcagctatcctcgccgccgtgagctcaattgcacagaagatccgcatgacaagcggggtcacaggagattggaaggtaatgaatatcctgcaccgcatcgcctcacaggtggcggctttagatttgggatataaaccaggggtagaggctattcgcaagaacccaccaaaagtcctctttctgcttggggccgacgggggatgcattacaagacaggacctgcccaaagactgcttcatcatataccagggccatcacggtgatgtcggggcacctattgcagacgtgatcctgccaggggccgcttacaccgagaaatcagctacttacgtaaacactgaaggcagagcacaacaaacaaaggtggcagtgactccgcctggcctggctagagaagactggaaaattattcgcgccctgagcgaaatagccggcatgactcttccctacgataccctggaccaggtgcgcaaccgacttgaagaggtaagcccaaatctggtgcgttacgacgatatagagggagccaactatttccagcaggcaaatgaactgtctaaactcgtaaatcagcagttactcgcagaccccctggtgccgccccagcttacaatcaaagacttttatatgacagacagtattagcagggccagccagaccatggccaagtgcgtgaaagccgtcactgaaggcgcccaggctgtggaagaaccgtctatatgctag

SEQ ID NO: 78791 - DNA, 2226 bp, Artificial Sequence
  derived and/or modified sequence
atgagaatcagggggagcagtggaaccctgagccggattaacatgctgcgaattcccgtgagaaaggcactagtgggactctccaagtccccgaaggggtgtgttcggaccacagccacagctgccagtaacttgatagaggttttcgtggatggccagtcagtcatggttgaaccagggaccacagtgctccaagcatgcgagaaggtgggaatgcagatccctcggttctgttatcacgagaggctgtcagtggccggcaattgccggatgtgtctggtcgagattgaaaaggccccaaaagtggtcgctgcatgcgctatgccagttatgaaaggctggaatattctcacgaattctgaaaaatctaagaaggctcgggagggcgtcatggagttcctgctcgctaaccatccactcgattgcccaatttgcgaccagggtggcgagtgcgacttacaggatcagtcaatgatgtttgggaacgacagaagtcgattcttggaaggtaaacgagccgtcgaggataagaacatcggacctttggtgaagacaatcatgactcgctgcatacagtgcacccgctgcatccgatttgcttccgaaatcgccggagtggatgatttagggaccacaggcagaggcaacgacatgcaggtggggacgtacatcgaaaaaatgttcatgtctgagttaagcgggaacatcattgacatttgtcctgtgggggctctgacctctaagccatacgctttcacagcccgcccatgggagaccaggaagactgagtcaatcgatgttatggacgcagtgggaagtaacattgttgtgtccacccggactggtgaggtcatgcggatcttgccaagaatgcatgaagacattaacgaagagtggatctctgacaagacacggttcgcgtacgatggactgaagagacagaggcttaccgagccaatggtccggaatgagaaggggctgctcacatacacatcctgggaggatgccctaagccgagtcgccggcatgctgcagagcttccagggtaaagatgttgctgcaatagcgggaggcttggtcgacgcagaagctctggtggctttgaaggacctgctgaaccgagttgactcagatacactctgcacggaggaggtctttcccaccgccggggccggaactgatctgcgctctaactatctgttgaataccaccatcgctggggtcgaggaagccgatgtggttctgctagttggaacaaatccacgttttgaagcgcctctcttcaatgctaggatccggaaatcttggttgcacaatgatctgaaagtggctctgatcgggagtccagttgacctaacatatacttacgaccacctgggagactcaccgaaaatccttcaggatatagccagtgggtcccatcctttttcccaggtccttaaggaagcaaagaaaccaatggtagtcctggggagttccgccctccagcgaaatgacggagctgcaatactcgcggcagtcagctctatcgcacagaaaattaggatgacatccggcgttactggcgattggaaggtcatgaacatcctacaccggattgcaagccaagtggcggccctggaccttggctataagcccggagttgaagctatcaggaaaaatccgccaaaggtccttttcctgctgggggcagatggggggtgcattacccggcaggatttgcccaaggattgtttcatcatctaccagggccaccacggggacgtgggcgctcccattgctgatgtcatcctgcctggggccgcttataccgagaagagtgctacctatgtcaatactgaaggtagggctcaacaaaccaaagttgctgtgaccccccctggcctcgcccgtgaagactggaaaatcattcgagccctgagtgagatagccggcatgacacttccctacgataccctggatcaagtccgcaatcgactggaagaggtgagcccgaacctggtacggtatgacgacatcgagggggcgaactactttcagcaagccaatgagctctcaaagcttgtgaaccagcaattgctggctgaccccttggtacccccacaactaactataaaggatttctacatgactgactccattagtcgagctagtcaaactatggcaaaatgtgttaaagctgtcaccgaaggtgcccaagccgtggaagagcccagtatctgttag

SEQ ID NO: 78792 - DNA, 1836 bp, Artificial Sequence
  derived and/or modified sequence
atggaatttttgctagcgaaccatcccctagattgtcccatctgcgatcagggcggtgaatgcgatttgcaggatcagtccatgatgtttggtaatgacaggtcgcgcttcctcgaaggcaaacgggcagtggaagataagaatattgggcccctcgtgaaaaccatcatgacccgctgcattcagtgcacacgatgcattcggtttgcaagtgagatcgcaggcgtcgatgaccttggaactaccgggaggggcaacgatatgcaggtgggtacctacatagagaagatgtttatgagcgaattgagtggcaacattattgatatctgccccgtcggcgcgcttacttccaaaccttacgctttcacagccaggccgtgggagaccaggaagacggaatctatcgatgtcatggatgccgtcggctctaacatcgtggtttctacaagaaccggagaagttatgcgcattctcccacggatgcacgaagacattaacgaggagtggatcagcgataagacacggtttgcctatgatggtctcaagcgccagagactcacggaaccgatggtgagaaatgaaaagggtttactgacatatacgagctgggaagatgctctgagccgggtggccggcatgcttcagtctttccagggcaaagacgtggccgccatcgccggggggttggtagacgcagaggccctggttgctctgaaggatctcttgaaccgcgtggacagcgacacactgtgcaccgaagaagtgttccctaccgctggggctgggaccgacctccgaagtaactacctgctcaatacaactattgctggcgtcgaggaggccgacgtagtgttgctcgtcggaactaatccgcgcttcgaagcccctctctttaatgcccgtatccggaagtcgtggctgcacaacgatctaaaggtagctctgatcggttcccccgttgacctcacttatacctatgaccacctcggagattcccctaaaattttgcaggatatcgccagcggaagccatcctttcagccaggttctaaaggaagcgaagaagccaatggtggtccttgggagttccgctttgcagagaaacgatggagctgcaattctggcggccgtgtcatcaatagctcagaaaattagaatgacgtccggtgtcactggggattggaaggtgatgaacatcctccatcgcatcgcaagccaagtagctgcacttgaccttggttataaacctggagtcgaggcaattcggaaaaatcctccaaaggtgctcttccttctgggggctgacggcggatgtataacacgtcaagacctgcccaaagactgtttcatcatctatcagggccaccacggcgacgtgggtgcgccaattgcagatgttattttgcctggggccgcctatacagagaaatctgccacttacgtaaatacagaagggcgggcacagcagacaaaagtggcagtgacaccccccggcctggctcgcgaggattggaagataatcagggctctgagcgaaattgccggtatgaccctgccctatgacaccttggaccaggtccggaatcgcttagaggaggtatctccaaacctggtgagatatgacgatattgaaggagcgaactatttccaacaagctaacgagctatccaagttggtgaatcagcagcttcttgcagatcctcttgtgcctccacagctcacgatcaaagatttttacatgactgactcaatctctcgggcatctcagacaatggccaaatgtgttaaggccgtaacggaaggagcacaggccgtggaggaaccaagcatctgctag

SEQ ID NO: 78793 - DNA, 2184 bp, Artificial Sequence
  derived and/or modified sequence
atgctgcgcatccctgtgcgaaaagctctggtcggtctcagtaaatctccaaagggttgcgtgaggaccaccgctaccgctgcttcgaatcttattgaagttttcgtggacggacagagcgtaatggtggagcccggcacaacagtgcttcaggcttgtgagaaggtcggtatgcagattcctaggttttgctaccacgaaaggctgagcgttgctgggaactgtcgtatgtgtttagtagaaatcgaaaaagcacctaaggtagtcgctgcctgcgccatgccagttatgaaaggatggaacatcctgacaaactcagaaaagtcgaaaaaggctcgtgaaggggtgatggaattccttctggctaaccacccattagactgccctatctgtgaccagggcggagagtgtgatctacaggatcaatccatgatgtttgggaacgatagatcacggttcctggagggtaagagagctgtggaagacaagaacataggtccactggtgaagactatcatgacccgctgtatccagtgtacgagatgtattcggtttgcctccgagatcgccggagtggatgacctcggtacaaccggacgcggaaatgacatgcaggtcggaacctacatcgagaagatgttcatgtcggaactgtcaggcaacatcattgatatttgtccagtgggcgcactaaccagcaagccctacgcatttactgcccgaccttgggagacacggaagaccgagagcatcgatgtcatggacgctgttggctctaacattgtcgtttcaaccagaactggagaagttatgagaattctcccacgcatgcacgaggacattaacgaggagtggatcagtgacaaaacccgcttcgcctacgacgggttgaagagacagagactgaccgaaccgatggtaagaaatgagaaaggactgctgacgtataccagctgggaagatgccctgtctcgggttgccggtatgctgcagtcctttcaaggcaaagacgtggcagctatcgctggaggcctggtcgatgcagaagcactcgtggctctgaaggatctattgaacagagtagacagcgatactctgtgcaccgaggaggtgttccctacagccggcgctggaacagatctccgctccaactacctgctcaacacaaccatcgctggcgtcgaggaggccgatgttgtcctgctggtcggaacgaatccgagattcgaggcacctctgttcaacgcgcgtatacggaagtcttggctgcataacgatctgaaagtggcactgattggcagtccagtggacctaacatacacgtatgaccacctaggcgacagcccaaaaatcctccaggatattgcgtccggctcccacccattcagccaagtgctcaaagaggcaaaaaaaccaatggtcgtcttgggctcatctgcgctgcaacggaacgacggcgccgctatattggctgcagtctcttctattgcccagaagatccggatgacctccggcgtgaccggcgactggaaagtcatgaatatcctccatcggatcgcctcccaggtcgccgccctcgaccttggatacaaaccaggcgttgaggccatcagaaaaaatcctcctaaagttctgttcctgttaggtgccgacgggggttgtataaccaggcaggatctacccaaagactgcttcatcatataccaaggccatcacggcgacgtgggcgcccccattgctgatgtgattttgcccggtgcagcttatacagagaagagtgccacatatgtaaatacggagggacgcgcccagcagactaaagtggctgtgactcctccaggactagctagggaagattggaagatcattcgggcactctctgaaattgctggtatgactcttccctatgacaccctggaccaagtaaggaacaggttggaagaagtgagccctaatctcgtccggtacgacgatatagaaggagccaactattttcagcaagcaaatgagctctccaaattagtaaaccagcagctcctggctgaccccctggtgccaccacagctgacgatcaaggatttctatatgactgactctatctccagagcctctcaaacgatggccaagtgtgtgaaagcagtcaccgagggtgcgcaggccgtggaggagccttccatctgctag

SEQ ID NO: 78794 - DNA, 2013 bp, Artificial Sequence
  derived and/or modified sequence
atgcagatcccccgcttctgctaccacgagcggctgtctgtggccggcaactgcaggatgtgcctggtggagattgagaaggcccccaaggtggtggccgcctgtgccatgcctgtgatgaagggctggaacatcctgaccaacagcgagaagagcaagaaggcccgggagggcgtgatggagttcctgctggccaaccaccccctggactgccccatctgtgaccagggcggagaatgtgacctgcaggaccagagcatgatgtttggaaatgacaggagccgcttcctggagggcaagagagctgtggaggacaagaacatcggccccctggtgaagaccatcatgacccgctgcatccagtgcacccgctgcatccgctttgccagcgagattgctggggtggatgacctgggcaccaccggcagaggaaatgacatgcaggtgggcacctacatcgagaagatgttcatgtctgagctgagcggcaacatcatcgacatctgccctgtgggcgccctgaccagcaagccctatgccttcaccgcccggccctgggagaccaggaagacagagagcattgatgtgatggatgctgtgggcagcaacatcgtggtgtccaccaggactggagaggtgatgaggatcctgcccaggatgcatgaggacatcaatgaggagtggatcagtgacaagaccaggtttgcctatgatggcctgaagaggcagaggctgacagagcccatggtgagaaatgagaagggcctgctgacctacacctcctgggaggatgccctgagccgggtggccggcatgctgcagagcttccagggcaaggatgtggccgccatcgccggcggcctggtggatgctgaggccctggtggccctgaaggacctgctgaacagagtggacagcgacaccctgtgcacagaggaggtgttccccacagctggggccggcacagacctgcggagcaactacctgctgaacaccaccatcgccggcgtggaggaggctgatgtggtgctgctggtgggcaccaaccccaggtttgaggcccccctcttcaatgcccgcatcaggaagtcctggctgcacaatgacctgaaggtggccctgattggcagccctgtggacctgacctacacctatgaccacctgggggacagccccaagatcctgcaggacatcgccagcggcagccaccccttcagccaggtgctgaaggaggccaagaagcccatggtggtgctgggcagcagcgccctgcagagaaatgatggagctgccatcctggccgctgtgagcagcatcgcccagaagatccgcatgaccagcggcgtgactggagactggaaggtgatgaacatcctgcaccgcatcgccagccaggtggccgccctggacctgggctacaagccaggagtggaggccatcaggaagaacccccccaaggtgctcttcctgctgggcgcagatggcggctgcatcacccggcaggacctgcccaaggactgcttcatcatctaccagggccaccacggagatgtgggcgcccccatcgcagatgtgatcctgcccggggccgcctacacagagaagagcgccacctacgtgaacacagagggccgggcccagcagaccaaggtggccgtgaccccacctggcctggcccgggaggactggaagatcatccgggccctgtctgaaattgctggcatgaccctgccctatgacaccctggaccaggtgaggaaccggctggaggaggtgagccccaacctggtgcgctatgatgacatcgagggcgccaactacttccagcaggccaatgagctgagcaagctggtgaaccagcagctgctggccgaccccctggtgcccccccagctgaccatcaaggacttctacatgacagacagcatcagccgggccagccagaccatggccaagtgtgtgaaggctgtgacagagggcgcccaggccgtggaggagcccagcatctgctag

SEQ ID NO: 78795 - DNA, 2184 bp, Artificial Sequence
  derived and/or modified sequence
atgctgcgcatccctgtgaggaaggccctggtgggcctgagcaagagccccaagggctgtgtgaggaccacagccacagctgccagcaacctgattgaggtgtttgtggatggccagagcgtgatggtggagcccggcaccaccgtgctgcaggcctgtgagaaggtgggcatgcagatcccccgcttctgctaccacgagcggctgtctgtggccggcaactgcaggatgtgcctggtggagattgagaaggcccccaaggtggtggccgcctgtgccatgcctgtgatgaagggctggaacatcctgaccaacagcgagaagagcaagaaggcccgggagggcgtgatggagttcctgctggccaaccaccccctggactgccccatctgtgaccagggcggggagtgtgacctgcaggaccagagcatgatgtttggaaatgacaggagccgcttcctggagggcaagagagctgtggaggacaagaacatcggccccctggtgaagaccatcatgacccgctgcatccagtgcacccgctgcatccgctttgccagcgagattgctggggtggatgacctgggcaccaccggcagaggaaatgacatgcaggtgggcacctacatcgagaagatgttcatgtctgagctgagcggcaacatcatcgacatctgccctgtgggcgccctgaccagcaagccctatgccttcaccgcccggccctgggagaccaggaagacagagagcattgatgtgatggatgctgtgggcagcaacatcgtggtgtccaccaggactggagaggtgatgaggatcctgcccaggatgcatgaggacatcaatgaggagtggatcagtgacaagaccaggtttgcctatgatggcctgaagaggcagaggctgacagagcccatggtgagaaatgagaagggcctgctgacctacacctcctgggaggatgccctgagccgggtggccggcatgctgcagagcttccagggcaaggatgtggccgccatcgccggcggcctggtggatgctgaggccctggtggccctgaaggacctgctgaacagagtggacagcgacaccctgtgcacagaggaggtgttccccacagctggagctggaacagacctgcggagcaactacctgctgaacaccaccatcgccggcgtggaggaggctgatgtggtgctgctggtgggcaccaaccccaggtttgaggcccccctcttcaatgcccgcatcaggaagtcctggctgcacaatgacctgaaggtggccctgattggcagccctgtggacctgacctacacctatgaccacctgggggacagccccaagatcctgcaggacatcgccagcggcagccaccccttcagccaggtgctgaaggaggccaagaagcccatggtggtgctgggcagcagcgccctgcagagaaatgatggagctgccatcctggccgctgtgagcagcatcgcccagaagatccgcatgaccagcggcgtgactggagactggaaggtgatgaacatcctgcacagaattgccagccaggtggccgccctggacctgggctacaagccaggagtggaggccatcaggaagaacccccccaaggtgctcttcctgctgggcgcagatggcggctgcatcacccggcaggacctgcccaaggactgcttcatcatctaccagggccaccacggagatgtgggcgcccccatcgcagatgtgatcctgcctggagctgcctacacagagaagagcgccacctacgtgaacacagagggccgggcccagcagaccaaggtggccgtgaccccacctggcctggcccgggaggactggaagatcatccgggccctgtctgaaattgctggcatgaccctgccctatgacaccctggaccaggtgaggaaccggctggaggaggtgagccccaacctggtgcgctatgatgacattgaaggagccaactacttccagcaggccaatgagctgagcaagctggtgaaccagcagctgctggccgaccccctggtgcccccccagctgaccatcaaggacttctacatgacagacagcatcagccgggccagccagaccatggccaagtgtgtgaaggctgtgacagaaggagcccaggccgtggaggagcccagcatctgctag

SEQ ID NO: 78796 - DNA, 2226 bp, Artificial Sequence
  derived and/or modified sequence
atgaggatccggggcagcagcggcaccctgagccgcatcaacatgctgcgcatccctgtgaggaaggccctggtgggcctgagcaagagccccaagggctgtgtgaggaccacagccacagctgccagcaacctgattgaggtgtttgtggatggccagagcgtgatggtggagcccggcaccaccgtgctgcaggcctgtgagaaggtgggcatgcagatcccccgcttctgctaccacgagcggctgtctgtggccggcaactgcaggatgtgcctggtggagattgagaaggcccccaaggtggtggccgcctgtgccatgcctgtgatgaagggctggaacatcctgaccaacagcgagaagagcaagaaggcccgggagggcgtgatggagttcctgctggccaaccaccccctggactgccccatctgtgaccagggcggggagtgtgacctgcaggaccagagcatgatgtttggaaatgacaggagccgcttcctggagggcaagagagctgtggaggacaagaacatcggccccctggtgaagaccatcatgacccgctgcatccagtgcacccgctgcatccgctttgccagcgagattgctggggtggatgacctgggcaccaccggcagaggaaatgacatgcaggtgggcacctacatcgagaagatgttcatgtctgagctgagcggcaacatcatcgacatctgccctgtgggcgccctgaccagcaagccctatgccttcaccgcccggccctgggagaccaggaagacagagagcattgatgtgatggatgctgtgggcagcaacatcgtggtgtccaccaggactggagaggtgatgaggatcctgcccaggatgcatgaggacatcaatgaggagtggatcagtgacaagaccaggtttgcctatgatggcctgaagaggcagaggctgacagagcccatggtgagaaatgagaagggcctgctgacctacacctcctgggaggatgccctgagccgggtggccggcatgctgcagagcttccagggcaaggatgtggccgccatcgccggcggcctggtggatgctgaggccctggtggccctgaaggacctgctgaacagagtggacagcgacaccctgtgcacagaggaggtgttccccacagctggagctggaacagacctgcggagcaactacctgctgaacaccaccatcgccggcgtggaggaggctgatgtggtgctgctggtgggcaccaaccccaggtttgaggcccccctcttcaatgcccgcatcaggaagtcctggctgcacaatgacctgaaggtggccctgattggcagccctgtggacctgacctacacctatgaccacctgggggacagccccaagatcctgcaggacatcgccagcggcagccaccccttcagccaggtgctgaaggaggccaagaagcccatggtggtgctgggcagcagcgccctgcagagaaatgatggagctgccatcctggccgctgtgagcagcatcgcccagaagatccgcatgaccagcggcgtgactggagactggaaggtgatgaacatcctgcacagaattgccagccaggtggccgccctggacctgggctacaagccaggagtggaggccatcaggaagaacccccccaaggtgctcttcctgctgggcgcagatggcggctgcatcacccggcaggacctgcccaaggactgcttcatcatctaccagggccaccacggagatgtgggcgcccccatcgcagatgtgatcctgcctggagctgcctacacagagaagagcgccacctacgtgaacacagagggccgggcccagcagaccaaggtggccgtgaccccacctggcctggcccgggaggactggaagatcatccgggccctgtctgaaattgctggcatgaccctgccctatgacaccctggaccaggtgaggaaccggctggaggaggtgagccccaacctggtgcgctatgatgacattgaaggagccaactacttccagcaggccaatgagctgagcaagctggtgaaccagcagctgctggccgaccccctggtgcccccccagctgaccatcaaggacttctacatgacagacagcatcagccgggccagccagaccatggccaagtgtgtgaaggctgtgacagaaggagcccaggccgtggaggagcccagcatctgctag

SEQ ID NO: 78797 - DNA, 1836 bp, Artificial Sequence
  derived and/or modified sequence
atggagttcctgctggccaaccaccccctggactgccccatctgtgaccagggcggggagtgtgacctgcaggaccagagcatgatgtttggaaatgacaggagccgcttcctggagggcaagagagctgtggaggacaagaacatcggccccctggtgaagaccatcatgacccgctgcatccagtgcacccgctgcatccgctttgccagcgagattgctggggtggatgacctgggcaccaccggcagaggaaatgacatgcaggtgggcacctacatcgagaagatgttcatgtctgagctgagcggcaacatcatcgacatctgccctgtgggcgccctgaccagcaagccctatgccttcaccgcccggccctgggagaccaggaagacagagagcattgatgtgatggatgctgtgggcagcaacatcgtggtgtccaccaggactggagaggtgatgaggatcctgcccaggatgcatgaggacatcaatgaggagtggatcagtgacaagaccaggtttgcctatgatggcctgaagaggcagaggctgacagagcccatggtgagaaatgagaagggcctgctgacctacacctcctgggaggatgccctgagccgggtggccggcatgctgcagagcttccagggcaaggatgtggccgccatcgccggcggcctggtggatgctgaggccctggtggccctgaaggacctgctgaacagagtggacagcgacaccctgtgcacagaggaggtgttccccacagctggagctggaacagacctgcggagcaactacctgctgaacaccaccatcgccggcgtggaggaggctgatgtggtgctgctggtgggcaccaaccccaggtttgaggcccccctcttcaatgcccgcatcaggaagtcctggctgcacaatgacctgaaggtggccctgattggcagccctgtggacctgacctacacctatgaccacctgggggacagccccaagatcctgcaggacatcgccagcggcagccaccccttcagccaggtgctgaaggaggccaagaagcccatggtggtgctgggcagcagcgccctgcagagaaatgatggagctgccatcctggccgctgtgagcagcatcgcccagaagatccgcatgaccagcggcgtgactggagactggaaggtgatgaacatcctgcacagaattgccagccaggtggccgccctggacctgggctacaagccaggagtggaggccatcaggaagaacccccccaaggtgctcttcctgctgggcgcagatggcggctgcatcacccggcaggacctgcccaaggactgcttcatcatctaccagggccaccacggagatgtgggcgcccccatcgcagatgtgatcctgcctggagctgcctacacagagaagagcgccacctacgtgaacacagagggccgggcccagcagaccaaggtggccgtgaccccacctggcctggcccgggaggactggaagatcatccgggccctgtctgaaattgctggcatgaccctgccctatgacaccctggaccaggtgaggaaccggctggaggaggtgagccccaacctggtgcgctatgatgacattgaaggagccaactacttccagcaggccaatgagctgagcaagctggtgaaccagcagctgctggccgaccccctggtgcccccccagctgaccatcaaggacttctacatgacagacagcatcagccgggccagccagaccatggccaagtgtgtgaaggctgtgacagaaggagcccaggccgtggaggagcccagcatctgctag

SEQ ID NO: 78798 - DNA, 5211 bp, Artificial Sequence
  derived and/or modified sequence
cacttccggcggaactgcgggtccaagttgtccttcccgcctccgggctgggccgacctcagctccgccctctggtcggctgacggaaattgccgacaaacttgtcgaatgcaaggattctagtccctccgggctttccgttctccaggcccggctgacagagttagccgaggccgccatattgaataagcgacccggcctcctagggggtcgtcgtggtccagacagtttagcagaacagcctccgcggctccggggagaagcaatatgttaaggatacctgtaagaaaggccttagtaggcctttctaagtctcctaaaggatgtgttcgaacaactgccacagcagcaagcaacttgattgaagtatttgttgatggtcagtctgtcatggtggaaccgggaacgaccgtcctccaagcttgtgagaaggttggcatgcagatccctcgattctgttatcatgaaaggttgtctgttgctggaaactgcaggatgtgccttgttgaaattgagaaagcccctaaggttgtagctgcttgtgccatgccagtaatgaagggttggaatatcctaacaaactcagaaaaatccaaaaaagccagggaaggtgtgatggagttcttattagcaaatcacccattggactgtcctatttgtgaccagggaggtgaatgtgatctgcaggaccagtccatgatgtttggaaatgataggagccgatttttagaggggaagcgtgctgtggaagacaagaacattgggccattggtaaagaccatcatgacaagatgtatacagtgtactcgctgcatcaggtttgcaagtgagattgcaggagtagatgatttgggaacaacaggcagaggaaatgatatgcaagttggcacatacattgaaaagatgttcatgtctgaactgtctgggaatatcattgatatctgccctgtaggtgccctaacctctaagccctatgcctttactgcccggccttgggaaacaagaaagacagaatccattgatgtaatggatgcggttggaagtaatattgtggttagcacaagaactggagaagtgatgaggattttgccacgtatgcatgaggacatcaatgaagagtggatctctgataaaaccagatttgcctatgatgggctaaaacgtcaaagacttaccgagccaatggtcagaaatgaaaaagggcttttaacctatacttcttgggaggatgcgctctctcgcgtagctggaatgttgcagagttttcaaggcaaagatgtggcagcaattgcaggtggcttggtggatgctgaagccctggtagctctcaaagatttgcttaatagagtggactctgacaccttatgcactgaagaggtcttccccactgcaggagctggcacagatttgcgttccaattatcttcttaatactacaattgctggtgtggaagaggcagatgttgttcttctggttggtacaaacccacgttttgaggcaccactgtttaatgctagaattcgaaagagctggctgcataatgacttaaaagtggcccttataggcagtccagtggacctcacttacacatatgaccacctgggagactcccccaaaattcttcaagacattgcttcgggaagccatccatttagccaggtcctaaaggaagctaaaaaaccaatggtggttttaggcagttctgcactccaaagaaatgatggagcagcaattcttgcagctgtttctagcattgcacaaaagattcggatgactagtggtgttactggtgattggaaagttatgaatatccttcataggattgcaagtcaagtagctgctttggaccttggctataagcctggggtggaagcaattcggaagaaccctcccaaggtgctgtttctcctgggagcagatggaggttgtatcacacgacaggatttgccaaaggattgtttcattatttatcaaggacatcatggtgatgttggggctcccatagctgatgttattctcccaggagctgcttacacagagaagtctgctacatatgtcaacactgagggtagagctcagcagactaaggtagcagtgacacctcctggcttggcaagagaagactggaaaattataagagcactctctgagattgctggaatgactcttccatatgatactctggatcaagtaaggaacagattggaagaagtctctcctaatcttgttcgatatgatgatattgaaggggctaattacttccagcaagcaaatgagctctcaaagctagtgaaccagcagcttcttgctgacccacttgttccacctcagctaactataaaagacttctacatgacagattcaattagcagagcctcacagacaatggccaaatgtgtcaaagctgtcacagagggtgcccaggcagtagaggaaccatccatatgctgaagcttctactaggatcccagttttgccgcagataattaatggacaactgtagtgcagtgatcctttacaggtttatttctttgtaaaaaaaaataataataatttgaatcatgtaatatttaaggttatactatgcctatttgaaaatgatattagttatcaactttgcagtttgaaaaacatgtattgtgtgtaaaggttaaataacaaaactatgcagatgctcttaaaagcattgataacctttgtgacgaacataaagagatccttaaattatgagttgttggcttatcttcataaataatttgtctgtaaaatggatgaaatgaaaagaggttcaattaaaacctacttttttctagtgctaaagaaaagatttaagcaccttgtcaagctgggtaaataggaaaaatacataatcatgctcagatatgtatctaggataattataattaataataatcatagtaacaatggctaatgataatttagctttattatatgtgctaagcactctggttttacatgcattatcttcttttgttcttgctacaaccctgtgagatagtagtattatctcattttactgatgaagactgaagcctaggtatattaaatagcttgcccaaggccacacagcaaaagtcaccaactcaaacctacttcttatttactccaaagcctgttgttcttaactgcaacatattatttcgtctcattaatgttgattctataggttgttacttctaaaaattagtattgagtttaatggtgaacacatttttctattttctcttgaatctgcttctataatgtcatggtgatttatgtggcttttttttttttataagttatacatgtatgcatgtatacttatgagacctcccttggaatgagggaggtctcaagagatataatttagattctcattgatgttctgtattcattatcctaacaccatctgtagtgttaaatcaactaaattatttcagcaataggagacaaaacaaccagctttcataatttttaattgtcaaaaccaaaaggaatcagaataaggatcactgagaatttaaaaaaataaaaaaggaagtaaaaattttacaattaggagataattaaaaatagataatttttttttttaatctaaggttgggtgtggtggcttacacctgtaatcccaacacttggggggccaaggtgggtggatcgcttgagcccaggcagttggagaccagtctgggcaacatggtgaaaccccatctctacaaaaaatacaaaaattagctgggtgtggtggtgtacacctatagtcccagctactcggaaggctgaggtgggaggatcacctgacccaggaggttgaggctgcagtgagccgtgattgcgccactgcattccagcctgggcaacagagcaagactttgtttcaaacaaacaaacaaaactatgttcacaatttatttgttttgtaatccttattcttttctgctttcactaaagactcagcccaagtataggatgccctttttccctttgttttttttttttttttgagatggagtcttactctgtcacccaaggctggaatgcagtggcatgatcttggctcactgcaatcaccacctccctgattcaagcgattctcctgcctcagcctccccggtagctgggattacaagcgcacgccaccacacctggctaatttttgtatttttagtagagacagggtttcaccaatttggccaggctggtcttgaactcctaacctcaggtgatctacctgccttggcctcccaaagtgctgggattacaggcgtgagccaccgcgcccagtctaggatgtcgtttttctgatacaacaaaggataaggttttagaataatagtatgttacaatatctttaaaaacagcaggtgcagtggctcacacctgtaagcccagcattttgggggttcaaggcaggaagatcagttgaggccaggagttcaagaccagcctggactgcatagcaagatcctatttgtacaaaaaaatgtaaaacttaaaattgcacaaaatttgtcacctgtaccagcttttagaactgtttatcttatcctcctcagtgatacatcatgaagttgtgtgctttgcctaaaatgcccagttacctgaaattgtataaattcttgccaaaagtgtttgaacttaatacaaacttcccatctcttacctcttagcactgtgctcatcttgaggggacatagtcccaattttgtattttatataatactgttaatgaatatgtgtagacttcatatggttgtgggtaagagaatactgcattcagatagaaaagatgctatatagctaagttgatccaggatccttgggctacctgctaggcagcttgtggtgaacaatcataatctctaaaaaataccttgtctggaccgggcgcggtggctcacacctgtaatcccagcactttggcaggctgaggcgggcagatcattgaggtcaggagtttgagaccagcctggccaacgtggtgaaaccctgtctctactaaaaatacaaaaattagccaggcatggtggcacatggctgtaatcccagctactggggaggctgaagcaggaaaatcgcttgaactgagagtcaaggcggaggtcgcggtaagccgagatcacaccattgcactgcagcctgggtgaagaaacaagcctccctctcaaaaaataaataaataaataaataatacctcctctgggataa

SEQ ID NO: 78799 - DNA, 2631 bp, Artificial Sequence
  derived and/or modified sequence
gacaaacttgtcgaatgcaaggattctagtccctccgggctttccgttctccaggcccggctgacagagttagccgaggccgccatattgaataagcgacccggcctcctagggggtcgtcgtggtccagacagtttagcagaacagcctccgcggctccggggagaagcaatatgttaaggatacctgtaagaaaggccttagtaggcctttctaagtctcctaaaggatgtggcttgtgagaaggttggcatgcagatccctcgattctgttatcatgaaaggttgtctgttgctggaaactgcaggatgtgccttgttgaaattgagaaagcccctaaggttgtagctgcttgtgccatgccagtaatgaagggttggaatatcctaacaaactcagaaaaatccaaaaaagccagggaaggtgtgatggagttcttattagcaaatcacccattggactgtcctatttgtgaccagggaggtgaatgtgatctgcaggaccagtccatgatgtttggaaatgataggagccgatttttagaggggaagcgtgctgtggaagacaagaacattgggccattggtaaagaccatcatgacaagatgtatacagtgtactcgctgcatcaggtttgcaagtgagattgcaggagtagatgatttgggaacaacaggcagaggaaatgatatgcaagttggcacatacattgaaaagatgttcatgtctgaactgtctgggaatatcattgatatctgccctgtaggtgccctaacctctaagccctatgcctttactgcccggccttgggaaacaagaaagacagaatccattgatgtaatggatgcggttggaagtaatattgtggttagcacaagaactggagaagtgatgaggattttgccacgtatgcatgaggacatcaatgaagagtggatctctgataaaaccagatttgcctatgatgggctaaaacgtcaaagacttaccgagccaatggtcagaaatgaaaaagggcttttaacctatacttcttgggaggatgcgctctctcgcgtagctggaatgttgcagagttttcaaggcaaagatgtggcagcaattgcaggtggcttggtggatgctgaagccctggtagctctcaaagatttgcttaatagagtggactctgacaccttatgcactgaagaggtcttccccactgcaggagctggcacagatttgcgttccaattatcttcttaatactacaattgctggtgtggaagaggcagatgttgttcttctggttggtacaaacccacgttttgaggcaccactgtttaatgctagaattcgaaagagctggctgcataatgacttaaaagtggcccttataggcagtccagtggacctcacttacacatatgaccacctgggagactcccccaaaattcttcaagacattgcttcgggaagccatccatttagccaggtcctaaaggaagctaaaaaaccaatggtggttttaggcagttctgcactccaaagaaatgatggagcagcaattcttgcagctgtttctagcattgcacaaaagattcggatgactagtggtgttactggtgattggaaagttatgaatatccttcataggattgcaagtcaagtagctgctttggaccttggctataagcctggggtggaagcaattcggaagaaccctcccaaggtgctgtttctcctgggagcagatggaggttgtatcacacgacaggatttgccaaaggattgtttcattatttatcaaggacatcatggtgatgttggggctcccatagctgatgttattctcccaggagctgcttacacagagaagtctgctacatatgtcaacactgagggtagagctcagcagactaaggtagcagtgacacctcctggcttggcaagagaagactggaaaattataagagcactctctgagattgctggaatgactcttccatatgatactctggatcaagtaaggaacagattggaagaagtctctcctaatcttgttcgatatgatgatattgaaggggctaattacttccagcaagcaaatgagctctcaaagctagtgaaccagcagcttcttgctgacccacttgttccacctcagctaactataaaagacttctacatgacagattcaattagcagagcctcacagacaatggccaaatgtgtcaaagctgtcacagagggtgcccaggcagtagaggaaccatccatatgctgaagcttctactaggatcccagttttgccgcagataattaatggacaactgtagtgcagtgatcctttacaggtttatttctttgtaaaaaaaaataataataatttgaatcatgtaatatttaaggttatactatgcctatttgaaaatgatattagttatcaactttgcagtttgaaaaacatgtattgtgtgtaaaggttaaataacaaaactatgcagatgctcttaaaagcattgataacctttgtgacgaacataaagagatccttaaattatgagttgttggcttatcttcataaataatttgtctgtaaaatggatgaaatgaaaagaggttcaattaaaacctacttttttctagtgct

SEQ ID NO: 78800 - DNA, 2371 bp, Artificial Sequence
  derived and/or modified sequence
gagagccggcagatggggggcttttagccacggtctctggtctgatgaagcagaaaagaagatgaggatcagggggtcctcgggaacgctgtcacgaatcaatatgttaaggatacctgtaagaaaggccttagtaggcctttctaagtctcctaaaggatgtgttcgaacaactgccacagcagcaagcaacttgattgaagtatttgttgatggtcagtctgtcatggtggaaccgggaacgaccgtcctccaagcttgtgagaaggttggcatgcagatccctcgattctgttatcatgaaaggttgtctgttgctggaaactgcaggatgtgccttgttgaaattgagaaagcccctaaggttgtagctgcttgtgccatgccagtaatgaagggttggaatatcctaacaaactcagaaaaatccaaaaaagccagggaaggtgtgatggagttcttattagcaaatcacccattggactgtcctatttgtgaccagggaggtgaatgtgatctgcaggaccagtccatgatgtttggaaatgataggagccgatttttagaggggaagcgtgctgtggaagacaagaacattgggccattggtaaagaccatcatgacaagatgtatacagtgtactcgctgcatcaggtttgcaagtgagattgcaggagtagatgatttgggaacaacaggcagaggaaatgatatgcaagttggcacatacattgaaaagatgttcatgtctgaactgtctgggaatatcattgatatctgccctgtaggtgccctaacctctaagccctatgcctttactgcccggccttgggaaacaagaaagacagaatccattgatgtaatggatgcggttggaagtaatattgtggttagcacaagaactggagaagtgatgaggattttgccacgtatgcatgaggacatcaatgaagagtggatctctgataaaaccagatttgcctatgatgggctaaaacgtcaaagacttaccgagccaatggtcagaaatgaaaaagggcttttaacctatacttcttgggaggatgcgctctctcgcgtagctggaatgttgcagagttttcaaggcaaagatgtggcagcaattgcaggtggcttggtggatgctgaagccctggtagctctcaaagatttgcttaatagagtggactctgacaccttatgcactgaagaggtcttccccactgcaggagctggcacagatttgcgttccaattatcttcttaatactacaattgctggtgtggaagaggcagatgttgttcttctggttggtacaaacccacgttttgaggcaccactgtttaatgctagaattcgaaagagctggctgcataatgacttaaaagtggcccttataggcagtccagtggacctcacttacacatatgaccacctgggagactcccccaaaattcttcaagacattgcttcgggaagccatccatttagccaggtcctaaaggaagctaaaaaaccaatggtggttttaggcagttctgcactccaaagaaatgatggagcagcaattcttgcagctgtttctagcattgcacaaaagattcggatgactagtggtgttactggtgattggaaagttatgaatatccttcataggattgcaagtcaagtagctgctttggaccttggctataagcctggggtggaagcaattcggaagaaccctcccaaggtgctgtttctcctgggagcagatggaggttgtatcacacgacaggatttgccaaaggattgtttcattatttatcaaggacatcatggtgatgttggggctcccatagctgatgttattctcccaggagctgcttacacagagaagtctgctacatatgtcaacactgagggtagagctcagcagactaaggtagcagtgacacctcctggcttggcaagagaagactggaaaattataagagcactctctgagattgctggaatgactcttccatatgatactctggatcaagtaaggaacagattggaagaagtctctcctaatcttgttcgatatgatgatattgaaggggctaattacttccagcaagcaaatgagctctcaaagctagtgaaccagcagcttcttgctgacccacttgttccacctcagctaactataaaagacttctacatgacagattcaattagcagagcctcacagacaatggccaaatgtgtcaaagctgtcacagagggtgcccaggcagtagaggaaccatccatatgctgaagcttctactaggatcccagttttgccgcagataattaatggacaactgtagtgcagtgatcctttacaggtttatttctttgt

SEQ ID NO: 78801 - DNA, 569 bp, Artificial Sequence
  derived and/or modified sequence
gacgtagtcttctgttgtccttgactgggcgccgcctcccgccccgccgcctcggaagcccctgagagccggcagatggggggcttttagccacggtctctggtctgatgaagcagaaaagaagatgaggatcagggggtcctcgggaacgctgtcacgaatgtaggcttgcagcaatatgttaaggatacctgtaagaaaggccttagtaggcctttctaagtctcctaaaggatgtgttcgaacaactgccacagcagcaagcaacttgattgaagtatttgttgatggtcagtctgtcatggtggaaccgggaacgaccgtcctccaagcttgtgagaaggttggcatgcagatccctcgattctgttatcatgaaaggttgtctgttgctggaaactgcaggatgtgccttgttgaaattgagaaagcccctaaggttgtagctgcttgtgccatgccagtaatgaagggttggaatatcctaacaaactcagaaaaatccaaaaaagccagggaaggtgtgatggagttcttattagcaaatcacccattggactgtcctattt

SEQ ID NO: 78802 - DNA, 2373 bp, Artificial Sequence
  derived and/or modified sequence
gagagccggcagatggggggcttttagccacggtctctggtctgatgaagcagaaaagaagatgaggatcagggggtcctcgggaacgctgtcacgaatcaatatgttaaggatacctgtaagaaaggccttagtaggcctttctaagtctcctaaaggatgtgttcgaacaactgccacagcagcaagcaacttgattgaagtatttgttgatggtcagtctgtcatggtggaaccgggaacgaccgtcctccaagcttgtgagaaggttggcatgcagatccctcgattctgttatcatgaaaggttgtctgttgctggaaactgcaggatgtgccttgttgaaattgagaaagcccctaaggttgtagctgcttgtgccatgccagtaatgaagggttggaatatcctaacaaactcagaaaaatccaaaaaagccagggaaggtgtgatggagttcttattagcaaatcacccattggactgtcctatttgtgaccagggaggtgaatgtgatctgcaggaccagtccatgatgtttggaaatgataggagccgatttttagaggggaagcgtgctgtggaagacaagaacattgggccattggtaaagaccatcatgacaagatgtatacagtgtactcgctgcatcaggtttgcaagtgagattgcaggagtagatgatttgggaacaacaggcagaggaaatgatatgcaagttggcacatacattgaaaagatgttcatgtctgaactgtctgggaatatcattgatatctgccctgtaggtgccctaacctctaagccctatgcctttactgcccggccttgggaaacaagaaagacagaatccattgatgtaatggatgcggttggaagtaatattgtggttagcacaagaactggagaagtgatgaggattttgccacgtatgcatgaggacatcaatgaagagtggatctctgataaaaccagatttgcctatgatgggctaaaacgtcaaagacttaccgagccaatggtcagaaatgaaaaagggcttttaacctatacttcttgggaggatgcgctctctcgcgtagctggaatgttgcagagttttcaaggcaaagatgtggcagcaattgcaggtggcttggtggatgctgaagccctggtagctctcaaagatttgcttaatagagtggactctgacaccttatgcactgaagaggtcttccccactgcaggagctggcacagatttgcgttccaattatcttcttaatactacaattgctggtgtggaagaggcagatgttgttcttctggttggtacaaacccacgttttgaggcaccactgtttaatgctagaattcgaaagagctggctgcataatgacttaaaagtggcccttataggcagtccagtggacctcacttacacatatgaccacctgggagactcccccaaaattcttcaagacattgcttcgggaagccatccatttagccaggtcctaaaggaagctaaaaaaccaatggtggttttaggcagttctgcactccaaagaaatgatggagcagcaattcttgcagctgtttctagcattgcacaaaagattcggatgactagtggtgttactggtgattggaaagttatgaatatccttcataggattgcaagtcaagtagctgctttggaccttggctataagcctggggtggaagcaattcggaagaaccctcccaaggtgctgtttctcctgggagcagatggaggttgtatcacacgacaggatttgccaaaggattgtttcattatttatcaaggacatcatggtgatgttggggctcccatagctgatgttattctcccaggagctgcttacacagagaagtctgctacatatgtcaacactgagggtagagctcagcagactaaggtagcagtgacacctcctggcttggcaagagaagactggaaaattataagagcactctctgagattgctggaatgactcttccatatgatactctggatcaagtaaggaacagattggaagaagtctctcctaatcttgttcgatatgatgatattgaaggggctaattacttccagcaagcaaatgagctctcaaagctagtgaaccagcagcttcttgctgacccacttgttccacctcagctaactataaaagacttctacatgacagattcaattagcagagcctcacagacaatggccaaatgtgtcaaagctgtcacagagggtgcccaggcagtagaggaaccatccatatgctgaagcttctactaggatcccagttttgccgcagataattaatggacaactgtagtgcagtgatcctttacaggtttatttctttgtaa

SEQ ID NO: 78803 - DNA, 2171 bp, Artificial Sequence
  derived and/or modified sequence
atattgaataagcgacccggcctcctagggggtcgtcgtggtccagacagtttagcagaacagcctccgcggctccggggagaagggaaggtgtgatggagttcttattagcaaatcacccattggactgtcctatttgtgaccagggaggtgaatgtgatctgcaggaccagtccatgatgtttggaaatgataggagccgatttttagaggggaagcgtgctgtggaagacaagaacattgggccattggtaaagaccatcatgacaagatgtatacagtgtactcgctgcatcaggtttgcaagtgagattgcaggagtagatgatttgggaacaacaggcagaggaaatgatatgcaagttggcacatacattgaaaagatgttcatgtctgaactgtctgggaatatcattgatatctgccctgtaggtgccctaacctctaagccctatgcctttactgcccggccttgggaaacaagaaagacagaatccattgatgtaatggatgcggttggaagtaatattgtggttagcacaagaactggagaagtgatgaggattttgccacgtatgcatgaggacatcaatgaagagtggatctctgataaaaccagatttgcctatgatgggctaaaacgtcaaagacttaccgagccaatggtcagaaatgaaaaagggcttttaacctatacttcttgggaggatgcgctctctcgcgtagctggaatgttgcagagttttcaaggcaaagatgtggcagcaattgcaggtggcttggtggatgctgaagccctggtagctctcaaagatttgcttaatagagtggactctgacaccttatgcactgaagaggtcttccccactgcaggagctggcacagatttgcgttccaattatcttcttaatactacaattgctggtgtggaagaggcagatgttgttcttctggttggtacaaacccacgttttgaggcaccactgtttaatgctagaattcgaaagagctggctgcataatgacttaaaagtggcccttataggcagtccagtggacctcacttacacatatgaccacctgggagactcccccaaaattcttcaagacattgcttcgggaagccatccatttagccaggtcctaaaggaagctaaaaaaccaatggtggttttaggcagttctgcactccaaagaaatgatggagcagcaattcttgcagctgtttctagcattgcacaaaagattcggatgactagtggtgttactggtgattggaaagttatgaatatccttcataggattgcaagtcaagtagctgctttggaccttggctataagcctggggtggaagcaattcggaagaaccctcccaaggtgctgtttctcctgggagcagatggaggttgtatcacacgacaggatttgccaaaggattgtttcattatttatcaaggacatcatggtgatgttggggctcccatagctgatgttattctcccaggagctgcttacacagagaagtctgctacatatgtcaacactgagggtagagctcagcagactaaggtagcagtgacacctcctggcttggcaagagaagactggaaaattataagagcactctctgagattgctggaatgactcttccatatgatactctggatcaagtaaggaacagattggaagaagtctctcctaatcttgttcgatatgatgatattgaaggggctaattacttccagcaagcaaatgagctctcaaagctagtgaaccagcagcttcttgctgacccacttgttccacctcagctaactataaaagacttctacatgacagattcaattagcagagcctcacagacaatggccaaatgtgtcaaagctgtcacagagggtgcccaggcagtagaggaaccatccatatgctgaagcttctactaggatcccagttttgccgcagataattaatggacaactgtagtgcagtgatcctttacaggtttatttctttgtaaaaaaaaataataataatttgaatcatgtaatatttaaggttatactatgcctatttgaaaatgatattagttatcaactttgcagtttgaaaaacatgtattgtgtgtaaaggttaaataacaaaactatgcagatgctcttaaaagcattgat

SEQ ID NO: 78804 - DNA, 2013 bp, Artificial Sequence
  derived and/or modified sequence
atgcagatcccccggttctgctaccacgagcggctgagcgtggccggcaactgccgcatgtgtctggtagagatagaaaaagcacccaaggtcgtcgccgcatgtgccatgcccgtgatgaaggggtggaatattttaacgaacagcgaaaagagtaaaaaagctagggaaggcgtgatggaattcctgctagccaatcatcccctggattgtcccatttgcgatcagggtggcgagtgtgacctacaggaccagtccatgatgttcgggaacgatcgaagtcggttcctagaaggaaaacgggcggtcgaggacaagaacatcggccccctggttaagactatcatgacccgctgtatccagtgtacccggtgcatcaggtttgcttctgagattgctggtgtcgacgatctgggaaccacgggccgcggcaatgacatgcaggtcggcacttatattgaaaagatgttcatgagtgagctctccggaaatattatcgacatctgtcctgtcggagctctcacttctaagccatatgcttttactgcaagaccatgggagacgcggaagaccgagagtatcgacgtgatggatgctgtagggtctaatatagtggtgagcaccaggactggagaagtgatgcgcatcctgccacgcatgcatgaggacatcaacgaggagtggataagcgacaagacgagatttgcatatgacggactaaaaaggcaacggctaactgaacctatggtccgtaacgaaaagggactgctcacatatacctcttgggaggatgcgctgtcacgcgttgctggcatgctgcagagtttccagggcaaagacgttgcagccatcgcgggcggtcttgtcgatgctgaagcactggtggcattgaaggatttgcttaaccgcgtagatagcgacacactctgtacggaagaggtgttcccgacagccggtgccggcaccgacttgcgatcaaactacctactgaacaccactatcgccggcgtggaggaagctgacgttgtgctcttagtgggcaccaatccccgtttcgaagctcccttattcaatgcaaggattaggaaaagctggctgcacaatgacctgaaggttgcccttattggttcacccgtggaccttacgtacacctacgatcatttgggcgattcccccaaaatcctccaggatatcgccagtggtagccatcctttttcacaggtactgaaggaagctaaaaaacctatggttgtgctcgggagcagcgccctgcaacgcaatgatggggctgccatcctggccgccgtgtccagtatcgcccagaagattcggatgacgtctggagtgaccggtgactggaaggtgatgaatatcctgcataggattgcaagccaggtagcagcactcgacttaggatataaacccggcgtggaagccatccgtaaaaacccacccaaggtgcttttcctgctgggggccgacggcggctgtatcacacggcaggaccttccaaaggactgcttcatcatttaccaaggccaccatggcgatgtgggggctcccatcgctgatgttatcctgcctggtgcggcatacacagagaagtccgctacctacgtgaatacagaaggaagggctcagcagaccaaagtggccgtgaccccccccggtcttgcccgcgaggactggaagattatcagggcgctgtctgagatcgccggaatgacactgccatacgatacacttgatcaagtcagaaatcgcctggaagaagtgagccccaacctcgtacgttatgatgacatagaaggggcgaattacttccagcaagccaacgagttgtccaaactcgttaaccagcagttgttggccgacccattggtacctccacagctgaccatcaaggacttctacatgactgacagcatctcccgcgcctcccagaccatggcaaagtgcgtgaaagcagttaccgaaggcgcgcaggccgtggaagagccttccatctgttag

SEQ ID NO: 78805 - DNA, 2184 bp, Artificial Sequence
  derived and/or modified sequence
atgctgcggatccccgtgcggaaggccctggtgggcctgagcaagtcccccaagggatgcgtgagaacaaccgcaacagctgcgagcaacctcattgaggtttttgtcgatggacaaagcgtgatggtggagcctggcactaccgtcttgcaggcatgtgaaaaggtaggtatgcagatccctcggttttgttaccacgagcggctcagcgtcgccggcaactgtcgcatgtgtttggtcgagatagagaaggctcctaaagtggtggccgcttgcgccatgcccgtgatgaagggatggaacattttgaccaacagtgagaagtcaaagaaggcacgggaaggagtaatggaatttctgcttgctaaccacccactcgattgtccaatctgtgaccagggtggtgagtgcgatcttcaagatcagagtatgatgttcggaaacgatcgcagtcggtttctggaggggaagagagccgtggaggacaaaaatattggaccactggtgaagactatcatgacacgctgtattcaatgtacgcggtgtatcagattcgccagcgagattgctggcgtcgacgacctgggaaccactggaagagggaatgatatgcaggtcggcacttacatagagaagatgttcatgtcagagctgtccggcaatattattgatatttgtcccgtgggcgctctgaccagcaagccctacgcctttacagcgcgcccttgggagacgcgaaaaactgagtcaattgatgtcatggacgcagtcggaagcaatatcgtcgtgtccactcgtaccggcgaggtgatgaggatactgccaaggatgcacgaagacattaatgaagagtggatttcagacaaaacgaggtttgcctatgatggactgaaacggcagcgccttactgagcccatggtgagaaacgagaagggattgctgacatacacatcttgggaagacgcccttagccgggtagccggtatgctgcaaagttttcagggcaaggatgtcgccgccatcgcaggcggcttagtggacgccgaggctttggttgccctcaaggatttgctcaatagagtcgatagtgataccctgtgcactgaagaagtgttccccacagcaggtgcggggaccgacttgaggtccaattatttattaaacaccaccattgccggcgtagaggaggcagacgtggtactgctggtcggcactaaccccaggttcgaggccccgttgttcaatgcgagaatccgcaagtcctggttgcataacgatctaaaagtggcccttattggctcacccgttgacctgacttatacgtacgaccatctgggcgactcccctaagatcttacaggatatcgccagcggcagtcatccatttagtcaggtgctaaaagaggccaagaaacctatggtggtcctgggatcatccgctctacagcggaacgacggagctgccatactggcggctgtgtcttctatagcccagaagatacgcatgaccagcggtgtaactggcgactggaaggtgatgaatatacttcatcgcatcgcatcacaggtggccgctctcgatctcgggtacaagccaggtgtggaggctatccggaaaaatcctcccaaggtgctattcttattgggggcagatggggggtgcataactaggcaagatctgcctaaggattgctttattatttaccaggggcaccacggcgatgtcggggcacctatagcggatgtgattctgcctggggccgcttacacagagaagtccgccacatatgtgaacactgagggcagggcgcagcagactaaagttgccgtgactcctcccgggctggctcgagaggactggaaaatcatccgtgcactgtctgaaattgctgggatgaccctcccttatgacaccctggaccaggttagaaatagacttgaggaggtgagccctaatctcgtgaggtacgacgatattgaaggagctaactattttcaacaggccaatgagctgagcaaactcgtcaaccagcagctgttggctgaccccctggtgccgccccaattaactattaaggacttctatatgacagacagcatctccagagcttcccagacgatggccaagtgcgtcaaagccgtcactgaaggagctcaggccgtggaggaaccatctatttgttag

SEQ ID NO: 78806 - DNA, 2226 bp, Artificial Sequence
  derived and/or modified sequence
atgcggatccggggcagcagcggcaccctgagccggatcaacatgctgcgcattccagtgcgcaaggcccttgtgggtctgtccaaatcccccaagggctgcgtccgcaccaccgctacagcagcatcaaacttaattgaagtcttcgtcgacggccagagcgtcatggtagagcccgggactaccgtcctgcaggcctgcgagaaagtaggaatgcagatacccaggttctgttatcacgaacgactttccgtggcgggcaattgccgtatgtgtctggtggaaatcgagaaggccccaaaggttgtggctgcttgcgctatgcccgttatgaagggctggaacattctgacaaacagcgaaaaaagcaaaaaggctagagaaggagtgatggaatttttgttggctaatcacccgttggattgtcccatttgtgatcaggggggcgagtgcgatctgcaggaccagtcaatgatgtttggcaatgaccgtagtcgcttcttggagggtaagcgggccgtggaggacaagaacatcggccctctagtcaagaccatcatgacccgctgcattcagtgcactagatgcatccggtttgcgagcgaaatcgccggagtggatgatttgggcacaaccggccgcggtaatgatatgcaggtcgggacatacattgagaaaatgtttatgtctgagctgagcggcaacattatagacatatgccccgtgggcgcattgacctccaaaccttacgctttcaccgccaggccctgggagacgaggaagacggaatctatcgacgtgatggatgctgtcggatccaacattgtggtttcgactcggactggcgaggtaatgcggatcctaccaaggatgcacgaggatattaacgaggaatggattagcgataaaacgcgttttgcctatgacggactaaagagacagcggctcacagagcccatggtacggaatgagaaaggcctgctgacgtataccagctgggaagatgccctctctcgcgtggcgggaatgcttcaatcgtttcagggcaaagatgtggcggctatcgctggcggtttggttgatgccgaagccctggtggcccttaaggacctgctgaaccgtgtagactcagacacactgtgtacagaagaggttttccccacagctggagccggcacagatcttagatcaaattacctgctgaacacaacaatagctggcgttgaagaagccgacgtagtgctccttgtgggcaccaatcccagattcgaagcgccgctcttcaacgcacggatccgaaagagttggctgcataatgatctaaaagttgccttaattgggagcccagtggatctgacttacacgtacgaccacctgggagacagccccaaaattctgcaggacatcgccagcggatcacaccccttttcccaggtcttaaaggaagctaaaaaacccatggtcgtgcttggatcctcagcgttgcagcggaatgatggagcagctattcttgctgcagtatcatcaattgcgcaaaagattagaatgactagtggcgttactggagactggaaagtaatgaatatcctccatcggatcgcatcccaggtggccgccttagatctgggctacaagcctggtgttgaggccattcggaaaaaccctcccaaggtactctttctacttggcgctgatggaggctgcatcacgcggcaagatctgcccaaggattgctttatcatttaccagggtcatcatggcgatgtgggcgcccccattgccgatgtgattctcccaggagccgcctatacggagaagtcagccacctacgttaacactgaaggacgcgcccaacagacaaaggttgcagtgacccccccagggctcgcacgcgaggactggaaaattattcgcgccctgagcgaaattgctgggatgacattgccctacgacacactagatcaggtgaggaacagacttgaggaggtatccccgaatctggtaagatatgacgacatcgagggggccaactatttccagcaggccaacgagctaagcaagcttgtcaatcagcagctgttagctgatcctctggtcccgccgcagcttactatcaaagatttttacatgaccgattctatttctagggcgagccagacaatggctaaatgcgtgaaagccgtgaccgagggtgcgcaggctgtggaggaaccgtccatctgttag

SEQ ID NO: 78807 - DNA, 1836 bp, Artificial Sequence
  derived and/or modified sequence
atggagttcctgctggccaaccaccccctggactgccccatctgcgatcagggaggcgaatgcgatctccaggaccaatctatgatgtttggcaatgacagaagtcggtttctggagggaaagcgcgctgtggaagacaagaacatcggtcctttagtgaagaccatcatgaccagatgcattcagtgcactaggtgtatccggtttgcgagcgagatcgcaggagtcgacgacctcggtacgaccggtcgcggaaacgacatgcaggtaggcacctacatagagaagatgttcatgtcggagctgagcggaaacatcatagatatttgccccgtgggtgcattaaccagcaagccctatgcctttactgctaggccatgggaaacacgtaagacggagagcattgatgtcatggatgcggtgggctccaacatcgtcgttagcacacggacaggggaagtgatgcgaatcctaccccggatgcatgaagacatcaacgaggagtggatcagtgataagacccggttcgcttacgatgggctgaagagacaaagattaactgagcccatggtgcggaatgaaaagggattactgacttatacatcttgggaagatgccctctcacgtgtagccgggatgttgcaatctttccagggcaaggacgtagcagcgattgccggagggttggtggacgctgaagcgttggtcgcactcaaggatctgctgaaccgagttgattccgatacattgtgcaccgaagaagtctttcccaccgctggggcgggaactgacctacgctcgaattacctgctgaacaccactattgcaggtgtggaggaggccgacgttgtccttctggttggcacaaaccccagattcgaggcgcctctctttaatgcccggattcgcaagtcgtggcttcacaatgacttaaaggtggcccttatagggtcacctgtggatctcacctatacctacgaccacttgggcgatagccctaagatcctacaggacatcgcctccggaagtcacccgttcagccaggtgttgaaggaagccaagaagcccatggtcgtgctgggaagctccgctctccaaaggaacgatggcgccgctatcctggccgccgtgtcatccatcgcccaaaagattcggatgacatcaggagtcaccggcgactggaaggtgatgaatatattacatcgcatagccagccaagtggctgctctcgatttaggatataagcctggagtagaggcgatccggaaaaatccaccaaaggtgctatttcttctcggcgcagatgggggttgcatcacgcggcaagatttgccgaaagattgctttataatctatcagggccatcacggagatgtcggcgcccccatcgccgacgttatactaccgggggctgcctacacggaaaaaagcgccacctacgtaaacacagagggcagggcccagcagactaaagtggctgttacgcctccagggctcgcgcgggaagattggaagatcatcagagctctaagtgagattgctggcatgaccctgccgtacgacaccctcgaccaggtaaggaacagactcgaggaggtgtcgcccaatctcgtgaggtacgacgacatcgaaggagctaattactttcagcaggccaacgagttatccaagttagtgaaccagcagcttctggcagacccactggtgccaccccagctgaccatcaaggatttctacatgacagactcaatttcccgcgcttcccagactatggctaagtgtgtgaaagcagttaccgagggcgctcaagccgtcgaggaacccagcatctgttag

SEQ ID NO: 78808 - DNA, 2184 bp, Artificial Sequence
  derived and/or modified sequence
atgctgcggatccccgtgcggaaggccctggtgggcctgagcaagtcccccaagggatgcgtgcgcacaactgcaacggccgcgtcgaatctgattgaagtctttgtcgatgggcagagcgtgatggtggagcccggaacaaccgtgcttcaggcctgcgagaaggtgggcatgcagatcccacgcttttgttatcatgaacgtctgagcgtcgctggcaattgtaggatgtgtttggtcgagatcgaaaaagcacctaaggtggtggcagcctgcgcgatgccggtaatgaaaggctggaacattctcactaactcagaaaaaagcaaaaaggcgagggagggagtgatggaatttctactcgctaaccaccctctcgattgccctatttgcgaccagggcggcgaatgtgatttgcaggaccagagtatgatgttcgggaacgaccgtagcaggttcttggaggggaagagggccgtggaggacaagaacatcggccccttggttaagacgataatgactcggtgcattcagtgcacaaggtgtatacggttcgccagcgagatcgccggtgtcgacgatctgggtacaacagggcgaggtaatgacatgcaggtcggtacatatatcgagaaaatgttcatgtcagagctttctggtaacatcattgacatttgtccagtgggcgctctcactagtaaaccgtacgcattcaccgcccgaccctgggagacccgcaagacagagagcatcgacgtgatggatgctgtggggagcaatatcgtggtgagtaccaggactggtgaggtgatgcgtatccttccacgcatgcatgaggacataaacgaggaatggatttctgataagactagattcgcctacgatggccttaagcgacagcgcctaacggagccaatggtgaggaacgagaagggactgcttacctatactagctgggaggatgctctgtctagggtcgccggaatgctgcagtcctttcagggcaaggatgtggccgctattgccggtggactggtggacgctgaggcactcgttgccctcaaagacttactcaacagagtggacagcgacaccctatgcaccgaggaagtgttcccaaccgcaggtgcaggtaccgatctgagatccaattacctgctgaacactacgattgccggggtcgaagaggccgacgtcgtattactcgtgggcaccaaccctaggtttgaggctcctctctttaacgcccgaattaggaagtcttggctccataatgacttgaaagtggctctcattggctcgccagtggacctgacctacacatatgatcacctcggggacagccccaaaattctgcaggacattgcatcaggatctcacccattctcgcaggtgttgaaggaagctaaaaaacctatggtggtactgggcagttcagccctgcagaggaacgacggagctgccattctagcggccgtatcttcgatcgcccagaagatcaggatgacctccggagtcaccggcgattggaaagtgatgaatattctgcataggatcgcgagtcaagtggcggcactggacttggggtacaaacctggagttgaggccatcaggaaaaatcctccaaaggttctcttcctactgggggccgacggcggctgtatcactaggcaggacctcccaaaggattgttttataatataccaaggacatcacggggacgtgggagccccaatcgcagatgttatcctacccggagctgcttatactgaaaagagcgcaacctacgtgaacaccgaagggcgagcccagcagactaaagttgccgtgactccccccgggctggcacgggaagattggaagataatacgtgctctgagtgaaattgcaggcatgactttgccctatgacacgttagaccaagtaagaaataggctcgaggaagttagtccaaatctggtgcgctacgacgatattgagggtgcaaattatttccagcaagccaatgaacttagcaaactcgtaaaccagcagctgctcgcagacccgctggttccaccccagctgacaatcaaagacttctacatgactgattcaatttcccgggcatcacaaactatggcaaaatgtgtcaaagcagtgactgaaggcgcccaagccgttgaagagccctccatctgttag

SEQ ID NO: 78809 - DNA, 2013 bp, Artificial Sequence
  derived and/or modified sequence
atgcaaatcccacggttctgctaccacgaaaggctaagcgtagccggtaactgtaggatgtgcctggtcgaaatagagaaagctcccaaggtggtcgccgcttgcgcaatgcctgtcatgaaggggtggaatatcctgaccaactccgaaaaatcgaagaaggcaagggagggcgtgatggaattccttctcgccaatcatccacttgattgtcctatctgtgaccaggggggtgagtgtgacctccaggatcagtctatgatgtttgggaatgacagatcccggtttttggagggaaaaagggccgtggaggacaagaacatcgggcctctggtcaaaaccattatgactcgctgtatccagtgtacccgctgcattaggtttgcaagtgagatagcaggggtcgacgacctcggaacaaccggaagaggaaatgacatgcaggtcggaacgtacattgagaagatgtttatgtcagagctatccgggaatatcatcgacatctgccctgtgggagccctgacctcaaaaccgtatgcgttcacggcgagaccatgggaaacccgcaagaccgagagtatcgacgttatggacgctgttgggtccaacattgtcgttagtactagaaccggcgaggtgatgcgcattctccctcgaatgcacgaggatattaacgaggagtggatatcagacaagacaaggttcgcctacgacgggcttaagcgacagcgcctaactgaacctatggttcgcaacgagaagggcctgctgacgtatacaagttgggaagacgctctttctagggttgctgggatgcttcaaagctttcagggtaaagacgttgcagccattgccggtgggttggtggacgctgaggcgcttgtggcactgaaggacttgcttaaccgcgttgactcagatacactatgcacagaggaggtattccccaccgcgggtgcaggcacggatttacgcagcaactacctcctgaataccaccatcgccggagtcgaagaggcagacgtagttctgctggttggcactaaccctagatttgaggcccctttgttcaatgcacggattcgcaagtcatggttgcataacgacctcaaggtcgccctgatcggctcccccgtcgatcttacctacacgtatgaccatctcggagactctcctaaaatactgcaggacatcgcctccggctcccaccctttctctcaggtgctgaaggaagctaagaaacctatggtggttctgggttccagcgcactccaacggaatgacggagctgccatcctggcagcagtctcaagcattgcccagaaaataagaatgaccagcggagttaccggtgactggaaggtgatgaacatactgcacagaatagcctcccaggtggcagctcttgatctgggatacaagcccggtgtggaggcaattcggaaaaacccacctaaggtactgtttttgctgggtgctgatggaggatgtatcacaagacaggacctgcccaaggactgtttcatcatctaccaggggcaccatggcgacgtgggggcacccatagccgacgttatcttaccaggggcagcttacaccgagaagagcgccacatacgttaacacagaaggtagggcacaacagacaaaagtggctgtcacaccccctggcctggccagggaagactggaagataatccgggctcttagcgaaattgcaggaatgacccttccttacgatacactggaccaagtgcgcaatcgcttggaagaagtctcaccgaatttggtgaggtacgacgatatagagggagccaattatttccagcaggctaatgagctctcaaaactcgtgaatcaacagcttctcgccgaccccctggtccccccacagttgactattaaagacttctatatgactgatagcatctctagagcttctcaaaccatggctaagtgtgtgaaagcagtaaccgagggagctcaggcggtcgaggaaccttctatctgttag

SEQ ID NO: 78810 - DNA, 2184 bp, Artificial Sequence
  derived and/or modified sequence
atgctaagaataccggtgcgaaaagctttggtcggcctgtcaaagtctccaaaggggtgcgtcagaacgactgccacagccgcaagcaatttgattgaagtgtttgtggacggccagtccgtgatggtggaacctgggactaccgtgctgcaagcctgcgaaaaggtcggaatgcagatcccccgtttctgttaccacgaacgcctgtctgtggctggcaactgcagaatgtgccttgtggagatcgaaaaagccccaaaagtggtcgctgcctgcgccatgcccgtgatgaagggatggaatatactgaccaatagcgagaaaagcaagaaagcgagagaaggagtcatggaatttttgttagcgaatcaccccctggattgccccatctgtgaccaggggggagaatgtgatctgcaggatcagtcaatgatgttcggtaatgacagatctagatttctcgagggcaaaagagctgtcgaggataagaacattggtccactggtcaagactatcatgactaggtgtatccagtgcacaaggtgcatcagatttgcatctgagattgccggagtggacgatctgggaaccacggggagaggcaacgacatgcaggtgggaacttatattgaaaaaatgttcatgtccgaattgtctggaaacataatagacatctgtccagtcggggcacttacaagtaagccctacgctttcaccgccagaccttgggagactagaaagacagaaagcatagacgtgatggacgccgtcggaagtaatatcgtggtatccaccagaacaggagaggtcatgagaatactgccccgtatgcacgaagatatcaacgaggaatggatttcagataagacccggttcgcctatgatggactcaagagacagagacttaccgaaccgatggttagaaacgaaaagggtttgctgacatacacctcttgggaagacgcattgtcccgcgtggccggaatgctgcaatctttccaggggaaggatgtcgccgcaatcgcgggaggactggtggatgctgaggccctggtggctctgaaggacctgctgaatcgggtggactccgatactctttgtacagaagaggtgtttccaactgccggagccggaactgatctgagatccaattatctactgaacactactatcgccggtgtagaagaagctgacgtggtactgctagtaggaacaaatccaaggtttgaagcacctctgtttaatgctcgcatacgcaagtcctggctgcataatgacctaaaggtcgcccttatagggagccctgtggacctgacatacacgtacgatcacctgggagatagcccgaaaatcctgcaggacatcgcctccggatcacatccattttctcaagtcttgaaagaggcgaaaaaacccatggtggtgctcggcagttcagctttacagcgcaacgatggggctgctatacttgccgcagtatcatccatagcacagaagatccggatgacatccggagtaactggggattggaaagtgatgaacatcttgcaccgcattgcaagtcaggtggccgcactggatcttggatataaaccaggggttgaggccattcggaagaaccctccaaaggttctgtttctcctcggggctgacgggggttgcattactcggcaggatctacctaaggactgctttataatttaccagggccatcacggcgacgtgggtgctccaatcgccgatgtaatactgcccggagcagcttatactgagaaaagtgcgacatatgtcaacactgaaggaagagcccagcaaacaaaggtggccgttacgccacccggattggccagggaagattggaaaatcattcgagccctcagcgagatagccggaatgacgctgccatacgatacactggaccaggtgcggaacagactcgaggaggtctcccctaacttggtccgttacgacgatattgagggcgcaaattacttccagcaggccaatgagttgtccaagctcgtgaaccagcagctgctggccgaccctttggtgcccccacaactgacaattaaggatttctacatgaccgactccattagccgcgcatcccaaactatggcgaaatgtgtcaaggccgtcacggagggcgcacaggcggtcgaagaacccagcatctgctag

SEQ ID NO: 78811 - DNA, 2226 bp, Artificial Sequence
  derived and/or modified sequence
atgcgtatacgcggtagctccggaacgttgagccgcataaatatgctaaggattccagttagaaaggcattagttggtttgagtaagtcaccaaaagggtgcgttcgaactaccgcgacagctgcctcaaacctgatcgaggtatttgtcgatggccagagcgttatggtcgagccagggaccaccgttttgcaggcgtgcgagaaggttggcatgcagatccctaggttctgttaccacgaaagactcagcgtggccggaaattgccggatgtgcctcgtggaaatcgagaaggcccctaaggttgtcgcagcctgtgccatgccagtgatgaagggctggaatatcttgactaactctgagaaatctaagaaagcacgagagggggtgatggagttcctcctggctaaccacccgctcgattgccccatttgtgatcaaggcggagagtgtgacctacaggatcagagtatgatgttcgggaacgatcgttctaggttcttggagggtaaaagggcagtggaagacaaaaacattgggccattagtcaagacaattatgaccagatgtatacaatgtacacgatgtattcgcttcgcaagtgaaatcgctggggtggatgacctagggaccacaggcagagggaacgacatgcaggtaggtacatatatagagaagatgttcatgtcagagctttctgggaatattatagacatctgtccagtgggcgcacttacatcaaagccttacgccttcaccgctagaccttgggagacgcggaaaaccgagtccatcgacgttatggacgcagtcgggtccaacatcgtcgtctctacgcgcaccggagaggtgatgcgaattctgccaaggatgcacgaggatattaatgaagagtggatcagcgacaaaacacgatttgcttatgatggcctgaaacggcaacgactgacagaaccgatggtgagaaatgagaagggattactgacatacacgtcttgggaagacgctctgtccagggtagccggaatgttacagtcgtttcagggaaaagatgttgcagcaattgccggaggactggtggacgcggaggctctggtggcattgaaggacctgttaaacagggtggactctgacacattatgcaccgaggaagtgttcccaaccgcgggtgcaggtactgacctgaggagtaactacctgctgaacacgaccatcgctggcgtggaggaggcagacgtagttctactcgtgggcacgaatcccaggtttgaggcaccactcttcaatgccagaatcaggaagagttggctccacaatgacctgaaggtggcactcattggatcaccggttgatcttacatacacatacgaccacttaggcgacagccctaagatcctccaggacattgcctcaggctctcaccccttcagccaggtgctgaaggaggcaaagaaacctatggtggtccttgggtcatccgctctgcagcggaacgatggggcagcaattctcgcggcagtttctagtatagcccagaaaataagaatgacttcaggtgttactggcgactggaaggtcatgaacatcctacacagaatcgcctcacaagtggccgctcttgatttgggatataaacccggtgtagaagcaattcgaaaaaaccctccgaaagtgctgtttctgctgggcgctgacggaggctgtattacccgacaggatttaccaaaggactgcttcatcatctaccaggggcaccacggcgatgttggagcgcctattgccgatgtcattctgcccggagccgcatacaccgagaagtcggccacctatgttaatacagagggcagggcccagcagacgaaggtggccgtgaccccgccagggctcgctcgcgaggattggaagattatcagagctctgtccgagatagctggaatgactctgccatacgatacattagaccaagtaagaaaccgactggaggaggtgtctcctaatctggtccggtacgacgatattgagggggcaaattattttcagcaggccaatgagctctctaagctggtgaaccaacagttgcttgcagatcctctggtgccgcctcagctaactattaaagacttctacatgacagattccatcagcagagctagtcaaactatggccaaatgtgtgaaggcagtgacagaaggcgcacaggcagttgaggagccttcgatatgctag

SEQ ID NO: 78812 - DNA, 1836 bp, Artificial Sequence
  derived and/or modified sequence
atggagttcttgctggcaaatcatcctctggactgccccatttgcgaccagggcggagagtgcgacctccaggaccagtccatgatgttcggaaacgatagatcccgattcttggagggaaagcgggcagtggaggacaagaacataggtccactggttaaaactattatgacgaggtgtatccagtgtacacgctgtattcgtttcgcttcggagatcgcgggagtggacgatttggggacaacaggacggggaaatgacatgcaagttggaacctacatcgaaaagatgtttatgtctgaactgtctggaaacatcattgatatttgcccggttggtgccttgactagcaaaccgtacgcctttaccgcccgtccctgggaaactcgaaagaccgagtccattgacgtgatggatgcagtggggagcaacatcgttgtctcaacccgcacgggtgaagtcatgcgcattttgccccgaatgcacgaagacatcaacgaagagtggatttccgataagacacggttcgcatatgatggccttaagaggcagaggctcacggagcctatggtgcgtaatgagaagggcttgcttacctatacatcgtgggaggacgctctttcccgagttgcaggcatgctgcagtcctttcaaggcaaggacgtggccgctatcgcagggggattggtggatgctgaggcactcgtcgctctgaaggatttactgaaccgagttgattccgacaccttatgtactgaggaggtattccctacggctggtgcgggtactgatctgcgatcaaattatttgctgaatacaacaatcgctggcgtggaggaagccgacgtagtacttttggtcggaacaaatccaaggtttgaagcgccactgttcaatgcacgcatacgaaagtcctggctccacaatgacctgaaggtcgcactgatcgggtctccagtggatctaacctacacgtatgatcacctcggcgatagcccgaaaatcctacaggatatcgcatccgggagccacccctttagtcaagtcctgaaggaggccaaaaagccaatggttgtcctaggctcttccgctcttcagcgcaatgatggagcagccattcttgcagccgtgagctcaatcgcccaaaaaatccgaatgacaagtggcgttacaggagattggaaggtgatgaacatcctgcaccggattgcatcacaggtcgctgctctggacctggggtacaagccgggagtggaggccatcagaaaaaatcctccaaaagttctcttcctattgggggctgatggcggatgcattacacgccaggatctgccaaaagactgcttcatcatttatcaggggcaccatggggacgtgggtgcaccaatcgcggatgtgatactgcctggagctgcctacactgaaaaaagtgcaacctacgtgaacacagaaggcagggcccagcagaccaaggtggctgtcacacctcccggactcgcccgagaggactggaagatcattagagcgctgtccgagatcgcaggcatgaccctgccttacgataccctggatcaggtccggaaccgcttggaggaggtatccccaaatctggttcgatacgatgatattgaaggcgctaactatttccagcaggccaacgagctgagtaagctggtgaaccaacaattgctggcagaccccttggttccccctcagttaacaatcaaggacttttatatgactgactctattagtcgagcttcacaaacaatggcaaagtgcgtgaaagccgtgactgaaggggctcaggctgtggaagagccgtctatctgctag

SEQ ID NO: 78813 - DNA, 2184 bp, Artificial Sequence
  derived and/or modified sequence
atgctgaggatccctgtgaggaaagctctggtcggcctgagtaagagcccaaaggggtgtgtgcgcaccactgctacagccgcatctaatctgattgaagtgtttgtcgatggccagtccgttatggttgagccagggacaactgtgctccaagcttgtgagaaggtaggcatgcagatcccacggttttgctaccacgagcggctttccgtcgctgggaactgccggatgtgcctcgttgagatcgaaaaagcaccgaaagtcgtggcagcctgcgccatgcctgtcatgaaagggtggaacattctgacgaactcagagaaatccaaaaaagctagagagggcgtcatggagttcctgctggctaaccatcctttggattgtccaatctgtgaccagggcggtgagtgcgatttgcaagatcagtccatgatgtttggcaacgatcggtctcgttttctggagggtaaacgagccgttgaggacaagaacatcggtcccctggtaaaaacaattatgacacgctgcattcagtgtacccggtgtatacgatttgcaagtgaaattgctggagtggatgatctcggtaccacgggtcgagggaatgacatgcaggtgggtacatacatcgagaaaatgttcatgtcagagttgtccggaaatatcatcgatatttgcccggttggagccttaacgtctaagccttatgcatttacagcccgtccatgggagacacgtaagaccgagtccattgacgtgatggatgccgtgggttccaatatcgtggtgtctacacggacgggagaggtcatgagaattctcccaaggatgcatgaggacattaatgaggaatggatttctgataaaactcgcttcgcttatgacgggctgaaacgacagagactgaccgaacctatggtccgaaacgagaagggtttgttaacttatacctcatgggaggacgcactgagcagagtggcaggaatgctccagtcttttcaagggaaagacgtcgccgctatcgctggcggactcgtggatgccgaggctctggtcgcgctgaaagatctgctgaaccgggtcgatagcgataccttatgcactgaagaggtcttccctactgcaggtgccggaacggatctgcggagcaactaccttttgaataccaccatcgccggtgtcgaggaggccgacgtggtgctactggtgggtactaatccacgattcgaagcccctctgtttaacgctcgcatacgaaagtcatggcttcataacgatctcaaggtggccctgattgggtcaccagtcgatctcacgtacacatatgatcatctgggcgattcacccaaaatcctccaagatatagcttccgggtcacatccgttttctcaggtacttaaggaagctaagaagcctatggtcgtcctgggttccagcgcgcttcagcgtaacgatggagctgccatcctggccgctgtgtcttcaattgcccagaagatccggatgacgagtggggtcactggagactggaaagtcatgaatattctgcatcgcatcgcaagccaggtggcagcacttgaccttggttacaagcccggtgtagaggctatcaggaaaaacccgccaaaggttcttttcctcctcggcgcagacggcggatgcataactcggcaagacctgccaaaggactgcttcatcatctaccaaggtcatcacggcgacgtcggtgcaccgatcgccgacgtcatactgcctggagcggcttataccgaaaaatcggcaacttacgtcaatactgagggcagggcccagcagaccaaggtcgccgtcactccacccggactggcccgtgaagattggaagattattcgagcactttctgagattgcgggaatgactctgccttacgacacattggaccaagtgcgtaaccgacttgaggaagtatctcccaacctggtccgatatgacgacatcgagggcgcaaactactttcagcaggcaaacgaactttctaagctagttaaccaacagctgctcgccgatcctctcgtgcctccacagctgacaatcaaggacttctacatgacagactctatcagcagagcaagccaaaccatggccaaatgtgtgaaagccgtgacagagggcgcacaagccgtggaggagccctctatttgttag

SEQ ID NO: 78814 - DNA, 2013 bp, Artificial Sequence
  derived and/or modified sequence
atgcagatccccagattctgctaccacgagagactgagcgtggccggcaactgcagaatgtgcctggtggagatcgagaaggcccccaaggtggtggccgcctgcgccatgcccgtgatgaagggctggaacatcctgaccaacagcgagaagagcaagaaggccagagagggcgtgatggagttcctgctggccaaccaccccctggactgccccatctgcgaccagggcggcgagtgcgacctgcaggaccagagcatgatgttcggcaacgacagaagcagattcctggagggcaagagagccgtggaggacaagaacatcggccccctggtgaagaccatcatgaccagatgcatccagtgcaccagatgcatcagattcgccagcgagatcgccggcgtggacgacctgggcaccaccggcagaggcaacgacatgcaggtgggcacctacatcgagaagatgttcatgagcgagctgagcggcaacatcatcgacatctgccccgtgggcgccctgaccagcaagccctacgccttcaccgccagaccctgggagaccagaaagaccgagagcatcgacgtgatggacgccgtgggcagcaacatcgtggtgagcaccagaaccggcgaggtgatgagaatcctgcccagaatgcacgaggacatcaacgaggagtggatcagcgacaagaccagattcgcctacgacggcctgaagagacagagactgaccgagcccatggtgagaaacgagaagggcctgctgacctacaccagctgggaggacgccctgagcagagtggccggcatgctgcagagcttccagggcaaggacgtggccgccatcgccggcggcctggtggacgccgaggccctggtggccctgaaggacctgctgaacagagtggacagcgacaccctgtgcaccgaggaggtgttccccaccgccggcgccggcaccgacctgagaagcaactacctgctgaacaccaccatcgccggcgtggaggaggccgacgtggtgctgctggtgggcaccaaccccagattcgaggcccccctgttcaacgccagaatcagaaagagctggctgcacaacgacctgaaggtggccctgatcggcagccccgtggacctgacctacacctacgaccacctgggcgacagccccaagatcctgcaggacatcgccagcggcagccaccccttcagccaggtgctgaaggaggccaagaagcccatggtggtgctgggcagcagcgccctgcagagaaacgacggcgccgccatcctggccgccgtgagcagcatcgcccagaagatcagaatgaccagcggcgtgaccggcgactggaaggtgatgaacatcctgcacagaatcgccagccaggtggccgccctggacctgggctacaagcccggcgtggaggccatcagaaagaacccccccaaggtgctgttcctgctgggcgccgacggcggctgcatcaccagacaggacctgcccaaggactgcttcatcatctaccagggccaccacggcgacgtgggcgcccccatcgccgacgtgatcctgcccggcgccgcctacaccgagaagagcgccacctacgtgaacaccgagggcagagcccagcagaccaaggtggccgtgaccccccccggcctggccagagaggactggaagatcatcagagccctgagcgagatcgccggcatgaccctgccctacgacaccctggaccaggtgagaaacagactggaggaggtgagccccaacctggtgagatacgacgacatcgagggcgccaactacttccagcaggccaacgagctgagcaagctggtgaaccagcagctgctggccgaccccctggtgcccccccagctgaccatcaaggacttctacatgaccgacagcatcagcagagccagccagaccatggccaagtgcgtgaaggccgtgaccgagggcgcccaggccgtggaggagcccagcatctgctag

SEQ ID NO: 78815 - DNA, 2184 bp, Artificial Sequence
  derived and/or modified sequence
atgctgagaatccccgtgagaaaggccctggtgggcctgagcaagagccccaagggctgcgtgagaaccaccgccaccgccgccagcaacctgatcgaggtgttcgtggacggccagagcgtgatggtggagcccggcaccaccgtgctgcaggcctgcgagaaggtgggcatgcagatccccagattctgctaccacgagagactgagcgtggccggcaactgcagaatgtgcctggtggagatcgagaaggcccccaaggtggtggccgcctgcgccatgcccgtgatgaagggctggaacatcctgaccaacagcgagaagagcaagaaggccagagagggcgtgatggagttcctgctggccaaccaccccctggactgccccatctgcgaccagggcggcgagtgcgacctgcaggaccagagcatgatgttcggcaacgacagaagcagattcctggagggcaagagagccgtggaggacaagaacatcggccccctggtgaagaccatcatgaccagatgcatccagtgcaccagatgcatcagattcgccagcgagatcgccggcgtggacgacctgggcaccaccggcagaggcaacgacatgcaggtgggcacctacatcgagaagatgttcatgagcgagctgagcggcaacatcatcgacatctgccccgtgggcgccctgaccagcaagccctacgccttcaccgccagaccctgggagaccagaaagaccgagagcatcgacgtgatggacgccgtgggcagcaacatcgtggtgagcaccagaaccggcgaggtgatgagaatcctgcccagaatgcacgaggacatcaacgaggagtggatcagcgacaagaccagattcgcctacgacggcctgaagagacagagactgaccgagcccatggtgagaaacgagaagggcctgctgacctacaccagctgggaggacgccctgagcagagtggccggcatgctgcagagcttccagggcaaggacgtggccgccatcgccggcggcctggtggacgccgaggccctggtggccctgaaggacctgctgaacagagtggacagcgacaccctgtgcaccgaggaggtgttccccaccgccggcgccggcaccgacctgagaagcaactacctgctgaacaccaccatcgccggcgtggaggaggccgacgtggtgctgctggtgggcaccaaccccagattcgaggcccccctgttcaacgccagaatcagaaagagctggctgcacaacgacctgaaggtggccctgatcggcagccccgtggacctgacctacacctacgaccacctgggcgacagccccaagatcctgcaggacatcgccagcggcagccaccccttcagccaggtgctgaaggaggccaagaagcccatggtggtgctgggcagcagcgccctgcagagaaacgacggcgccgccatcctggccgccgtgagcagcatcgcccagaagatcagaatgaccagcggcgtgaccggcgactggaaggtgatgaacatcctgcacagaatcgccagccaggtggccgccctggacctgggctacaagcccggcgtggaggccatcagaaagaacccccccaaggtgctgttcctgctgggcgccgacggcggctgcatcaccagacaggacctgcccaaggactgcttcatcatctaccagggccaccacggcgacgtgggcgcccccatcgccgacgtgatcctgcccggcgccgcctacaccgagaagagcgccacctacgtgaacaccgagggcagagcccagcagaccaaggtggccgtgaccccccccggcctggccagagaggactggaagatcatcagagccctgagcgagatcgccggcatgaccctgccctacgacaccctggaccaggtgagaaacagactggaggaggtgagccccaacctggtgagatacgacgacatcgagggcgccaactacttccagcaggccaacgagctgagcaagctggtgaaccagcagctgctggccgaccccctggtgcccccccagctgaccatcaaggacttctacatgaccgacagcatcagcagagccagccagaccatggccaagtgcgtgaaggccgtgaccgagggcgcccaggccgtggaggagcccagcatctgctag

SEQ ID NO: 78816 - DNA, 2226 bp, Artificial Sequence
  derived and/or modified sequence
atgagaatcagaggcagcagcggcaccctgagcagaatcaacatgctgagaatccccgtgagaaaggccctggtgggcctgagcaagagccccaagggctgcgtgagaaccaccgccaccgccgccagcaacctgatcgaggtgttcgtggacggccagagcgtgatggtggagcccggcaccaccgtgctgcaggcctgcgagaaggtgggcatgcagatccccagattctgctaccacgagagactgagcgtggccggcaactgcagaatgtgcctggtggagatcgagaaggcccccaaggtggtggccgcctgcgccatgcccgtgatgaagggctggaacatcctgaccaacagcgagaagagcaagaaggccagagagggcgtgatggagttcctgctggccaaccaccccctggactgccccatctgcgaccagggcggcgagtgcgacctgcaggaccagagcatgatgttcggcaacgacagaagcagattcctggagggcaagagagccgtggaggacaagaacatcggccccctggtgaagaccatcatgaccagatgcatccagtgcaccagatgcatcagattcgccagcgagatcgccggcgtggacgacctgggcaccaccggcagaggcaacgacatgcaggtgggcacctacatcgagaagatgttcatgagcgagctgagcggcaacatcatcgacatctgccccgtgggcgccctgaccagcaagccctacgccttcaccgccagaccctgggagaccagaaagaccgagagcatcgacgtgatggacgccgtgggcagcaacatcgtggtgagcaccagaaccggcgaggtgatgagaatcctgcccagaatgcacgaggacatcaacgaggagtggatcagcgacaagaccagattcgcctacgacggcctgaagagacagagactgaccgagcccatggtgagaaacgagaagggcctgctgacctacaccagctgggaggacgccctgagcagagtggccggcatgctgcagagcttccagggcaaggacgtggccgccatcgccggcggcctggtggacgccgaggccctggtggccctgaaggacctgctgaacagagtggacagcgacaccctgtgcaccgaggaggtgttccccaccgccggcgccggcaccgacctgagaagcaactacctgctgaacaccaccatcgccggcgtggaggaggccgacgtggtgctgctggtgggcaccaaccccagattcgaggcccccctgttcaacgccagaatcagaaagagctggctgcacaacgacctgaaggtggccctgatcggcagccccgtggacctgacctacacctacgaccacctgggcgacagccccaagatcctgcaggacatcgccagcggcagccaccccttcagccaggtgctgaaggaggccaagaagcccatggtggtgctgggcagcagcgccctgcagagaaacgacggcgccgccatcctggccgccgtgagcagcatcgcccagaagatcagaatgaccagcggcgtgaccggcgactggaaggtgatgaacatcctgcacagaatcgccagccaggtggccgccctggacctgggctacaagcccggcgtggaggccatcagaaagaacccccccaaggtgctgttcctgctgggcgccgacggcggctgcatcaccagacaggacctgcccaaggactgcttcatcatctaccagggccaccacggcgacgtgggcgcccccatcgccgacgtgatcctgcccggcgccgcctacaccgagaagagcgccacctacgtgaacaccgagggcagagcccagcagaccaaggtggccgtgaccccccccggcctggccagagaggactggaagatcatcagagccctgagcgagatcgccggcatgaccctgccctacgacaccctggaccaggtgagaaacagactggaggaggtgagccccaacctggtgagatacgacgacatcgagggcgccaactacttccagcaggccaacgagctgagcaagctggtgaaccagcagctgctggccgaccccctggtgcccccccagctgaccatcaaggacttctacatgaccgacagcatcagcagagccagccagaccatggccaagtgcgtgaaggccgtgaccgagggcgcccaggccgtggaggagcccagcatctgctag

SEQ ID NO: 78817 - DNA, 1836 bp, Artificial Sequence
  derived and/or modified sequence
atggagttcctgctggccaaccaccccctggactgccccatctgcgaccagggcggcgagtgcgacctgcaggaccagagcatgatgttcggcaacgacagaagcagattcctggagggcaagagagccgtggaggacaagaacatcggccccctggtgaagaccatcatgaccagatgcatccagtgcaccagatgcatcagattcgccagcgagatcgccggcgtggacgacctgggcaccaccggcagaggcaacgacatgcaggtgggcacctacatcgagaagatgttcatgagcgagctgagcggcaacatcatcgacatctgccccgtgggcgccctgaccagcaagccctacgccttcaccgccagaccctgggagaccagaaagaccgagagcatcgacgtgatggacgccgtgggcagcaacatcgtggtgagcaccagaaccggcgaggtgatgagaatcctgcccagaatgcacgaggacatcaacgaggagtggatcagcgacaagaccagattcgcctacgacggcctgaagagacagagactgaccgagcccatggtgagaaacgagaagggcctgctgacctacaccagctgggaggacgccctgagcagagtggccggcatgctgcagagcttccagggcaaggacgtggccgccatcgccggcggcctggtggacgccgaggccctggtggccctgaaggacctgctgaacagagtggacagcgacaccctgtgcaccgaggaggtgttccccaccgccggcgccggcaccgacctgagaagcaactacctgctgaacaccaccatcgccggcgtggaggaggccgacgtggtgctgctggtgggcaccaaccccagattcgaggcccccctgttcaacgccagaatcagaaagagctggctgcacaacgacctgaaggtggccctgatcggcagccccgtggacctgacctacacctacgaccacctgggcgacagccccaagatcctgcaggacatcgccagcggcagccaccccttcagccaggtgctgaaggaggccaagaagcccatggtggtgctgggcagcagcgccctgcagagaaacgacggcgccgccatcctggccgccgtgagcagcatcgcccagaagatcagaatgaccagcggcgtgaccggcgactggaaggtgatgaacatcctgcacagaatcgccagccaggtggccgccctggacctgggctacaagcccggcgtggaggccatcagaaagaacccccccaaggtgctgttcctgctgggcgccgacggcggctgcatcaccagacaggacctgcccaaggactgcttcatcatctaccagggccaccacggcgacgtgggcgcccccatcgccgacgtgatcctgcccggcgccgcctacaccgagaagagcgccacctacgtgaacaccgagggcagagcccagcagaccaaggtggccgtgaccccccccggcctggccagagaggactggaagatcatcagagccctgagcgagatcgccggcatgaccctgccctacgacaccctggaccaggtgagaaacagactggaggaggtgagccccaacctggtgagatacgacgacatcgagggcgccaactacttccagcaggccaacgagctgagcaagctggtgaaccagcagctgctggccgaccccctggtgcccccccagctgaccatcaaggacttctacatgaccgacagcatcagcagagccagccagaccatggccaagtgcgtgaaggccgtgaccgagggcgcccaggccgtggaggagcccagcatctgctag

SEQ ID NO: 78818 - protein, 122 aa, Artificial Sequence
  derived and/or modified sequence
MKLAAMIKKMCPSDSELSIPAKNCYRMVILGSSKVGKTAIVSRFLTGRFEDAYTPTIEDFHRKFYSIRGEVYQLDILDTSGNHPFPAMRRLSILTDPRHQVLPQEQNQGERGRAPGHLRQQG

SEQ ID NO: 78819 - DNA, 369 bp, Artificial Sequence
  derived and/or modified sequence
atgaagttggccgccatgatcaagaaaatgtgtccaagcgattccgaactcagcattccggccaagaattgttaccgtatggtgatcttaggtagcagcaaagtgggaaaaactgctattgtgtccaggttcttgaccggcaggtttgaggacgcatacacacctacaatcgaggacttccatcgaaaattctattcgatccgcggagaggtgtaccagttggatatactggatacctctggcaaccacccatttccggctatgagacgtctgtctatcctgacagatccccgccaccaagtactgccacaggagcagaatcagggagagaggggacgggcacctggccaccttcgacagcaggggtag

SEQ ID NO: 78820 - DNA, 369 bp, Artificial Sequence
  derived and/or modified sequence
atgaagctggccgccatgatcaagaagatgtgccccagcgacagcgagctgagcatcccagccaagaactgctacaggatggtgatcctgggcagcagcaaggtgggcaagacagccatcgtgagccgcttcctgaccggccgctttgaagatgcctacacccccaccatcgaggacttccacaggaagttctacagcatccggggggaggtgtaccagctggacatcctggacaccagcggcaaccaccccttccctgccatgaggcggctgagcatcctgacagaccccaggcaccaggtgctgccccaggagcagaaccagggcgagcggggccgggcccctggccacctgcggcagcagggctag

SEQ ID NO: 78821 - DNA, 369 bp, Artificial Sequence
  derived and/or modified sequence
atgaagctggccgccatgatcaagaagatgtgccccagcgacagcgaattgtcaataccagcaaaaaactgttataggatggttattctcgggtcttccaaagtcggaaaaaccgccatcgtgagccggtttttaaccggacggttcgaggatgcttacacaccgacaattgaggactttcacagaaagttttatagcatcaggggagaggtttatcaactcgatattctggacactagtggaaatcacccattccctgctatgcgacggttaagcatattaactgaccctcgccaccaggtgcttccccaagagcaaaaccagggtgaaagaggaagggccccggggcaccttcgacagcaggggtag

SEQ ID NO: 78822 - DNA, 369 bp, Artificial Sequence
  derived and/or modified sequence
atgaaattggcagctatgatcaagaaaatgtgcccgtctgattcagaactgtccatccctgctaaaaactgttatcggatggtgattctgggtagttcaaaagtgggaaagaccgcgatcgttagtagatttcttactggacgctttgaagatgcttacaccccaacaattgaggactttcatcgcaagttttactccattagaggtgaggtataccagctggatatcctcgacacaagcggcaatcatccttttcccgcaatgagacgtctttcaatccttacagatcctcgtcaccaggtgctgccccaagaacagaaccagggcgagcgcggtagggctccaggccatctcagacagcaggggtag

SEQ ID NO: 78823 - DNA, 369 bp, Artificial Sequence
  derived and/or modified sequence
atgaagctggccgccatgatcaagaagatgtgccccagcgacagcgagctgagcatccccgccaagaactgctacagaatggtgatcctgggcagcagcaaggtgggcaagaccgccatcgtgagcagattcctgaccggcagattcgaggacgcctacacccccaccatcgaggacttccacagaaagttctacagcatcagaggcgaggtgtaccagctggacatcctggacaccagcggcaaccaccccttccccgccatgagaagactgagcatcctgaccgaccccagacaccaggtgctgccccaggagcagaaccagggcgagagaggcagagcccccggccacctgagacagcagggctag

SEQ ID NO: 78824 - protein, 166 aa, Artificial Sequence
  derived and/or modified sequence
MDDQRCPLDDGQAGAAEATAAPTLEDRIAQPSMTASPQTEEFFDLIASSQSRRLDDQRASVGSLPGLRITHSNAGHLRGHGEPQEPGDDFFNMLIKYQSSRIDDQRCPPPDVLPRGPTMPDEDFFSLIQRVQAKRMDEQRVDLAGGPEQGAGGPPEPQQQCQPGAS

SEQ ID NO: 78825 - DNA, 501 bp, Artificial Sequence
  derived and/or modified sequence
atggacgaccagagatgccccctggacgacggccaggccggcgccgccgaggccaccgccgcccccaccctggaggacagaatcgcccagcccagcatgaccgccagcccccagaccgaggagttcttcgacctgatcgccagcagccagagcagaagactggacgaccagagagccagcgtgggcagcctgcccggcctgagaatcacccacagcaacgccggccacctgagaggccacggcgagccccaggagcccggcgacgacttcttcaacatgctgatcaagtaccagagcagcagaatcgacgaccagagatgccccccccccgacgtgctgcccagaggccccaccatgcccgacgaggacttcttcagcctgatccagagagtgcaggccaagagaatggacgagcagagagtggacctggccggcggccccgagcagggcgccggcggcccccccgagccccagcagcagtgccagcccggcgccagctag

SEQ ID NO: 78826 - DNA, 501 bp, Artificial Sequence
  derived and/or modified sequence
atggatgatcaacgatgccctctggatgacgggcaggctggagccgccgaggcgaccgctgcacccaccctggaagatcggattgcccagcccagcatgacggcctctcctcagacggaggaatttttcgacctgatcgctagctcgcagtctcgacgactggacgaccagcgcgcctctgttggatcacttcccggcttgagaatcacgcattccaacgctgggcacctccggggacacggcgagccgcaggagcccggtgacgattttttcaacatgctgataaagtaccagagcagtagaattgatgaccaacgctgtccaccacctgacgtcttaccgaggggcccaacaatgccagacgaggacttcttcagcttaatccaacgggtgcaggctaagcgcatggatgaacagagagtggacctggctggcggacctgaacagggcgccggtggaccacccgaaccccagcagcagtgccaacctggggcttcgtag

SEQ ID NO: 78827 - DNA, 501 bp, Artificial Sequence
  derived and/or modified sequence
atggatgatcagcgatgtccactcgacgatgggcaggctggcgctgctgaagctactgctgcccccactctggaggatcgaatcgcacagcccagtatgacagccagcccacagaccgaagaatttttcgacctgattgcatcttctcaaagtcggcggctggatgaccaaagggcatctgttggaagtctccctggcctccgtatcacgcacagtaatgcggggcaccttagggggcatggcgagccacaagaacccggcgatgatttttttaacatgcttatcaaatatcagtcttcccggatagatgaccaacgctgcccacccccggatgtgctgcctagaggccccacaatgccagacgaggacttcttctcattaatccagcgggtgcaagctaagcggatggacgaacagcgcgtggatctggccggcggccctgagcaaggagcagggggaccacccgaaccccagcagcaatgccagccgggagcaagttag

SEQ ID NO: 78828 - DNA, 501 bp, Artificial Sequence
  derived and/or modified sequence
atggacgatcagcggtgtccccttgacgacggccaagctggggcggcagaagcaaccgccgctcctactctcgaggatcgaatagcacagccaagtatgaccgcctctcctcagaccgaggagttcttcgatttgattgcttcatctcaaagtcgccggctcgatgatcagagagcatctgtcggtagcctgcccggattgcgcatcacccacagcaacgcgggccacttacgcggtcacggcgagccgcaggagccgggggacgactttttcaacatgctaatcaagtatcaaagcagccggattgacgaccagcgctgtccccccccagatgtgctgcctaggggcccgaccatgccagatgaagatttcttctcgctgatacagcgagtgcaagctaaaagaatggatgaacagagggtggacctggcaggaggacccgagcaaggagcagggggcccaccagaaccacagcagcaatgccaaccgggcgcttcttag

SEQ ID NO: 78829 - DNA, 501 bp, Artificial Sequence
  derived and/or modified sequence
atggatgaccagcgctgccccctggatgatggccaggccggggctgctgaggccacagctgcccccaccctggaggaccgcatcgcccagcccagcatgacagccagcccccagacagaggagttctttgacctgattgccagcagccagagccggcggctggatgaccagagggcctctgtgggcagcctgcccggcctgcgcatcacccacagcaatgccggccacctgcggggccacggggagccccaggagcctggagatgacttcttcaacatgctgatcaagtaccagagcagcagaattgatgaccagcgctgccccccaccagatgtgctgccccggggccccaccatgccagatgaggacttcttcagcctcatccagagggtgcaggccaagaggatggatgagcagagggtggacctggccggcggccctgagcagggcgccggcggccccccagagccccagcagcagtgccagcccggggccagctag

SEQ ID NO: 78830 - DNA, 501 bp, Artificial Sequence
  derived and/or modified sequence
atggacgaccagcggtgccccctggacgacggccaggccggcgccgccgaggccacagccgctcccacgcttgaagacaggatcgcacagccatcaatgacagcctcacctcagaccgaggaattttttgacctaattgccagctctcagagtaggagactggatgatcagcgagcttctgtcggtagcttgcccggcttacgcattactcacagcaatgcaggccatctacggggccacggggagcctcaagaacccggagacgatttcttcaatatgttgatcaagtatcagagctcaagaatcgatgatcagcgatgccccccgcccgacgtcctgccacggggcccaactatgccagatgaggattttttcagtctaattcagcgggtccaggccaagcgtatggatgaacaacgcgtcgacctcgccggcgggccggagcagggcgctggcgggcctcccgagccgcagcaacagtgccaacccggcgctagctag

SEQ ID NO: 78831 - DNA, 501 bp, Artificial Sequence
  derived and/or modified sequence
atggacgaccagcggtgccccctggacgacggccaggccggcgccgccgaggcgactgctgcacctacgctcgaggatcgtatcgcccagccttcaatgacagcaagcccccagaccgaggaatttttcgatctgattgcttctagtcaatcccgaaggcttgacgatcagagggctagcgtgggatccctgcctggactgaggataacccactctaacgcagggcacctacgcggacacggcgaaccccaggaacctggcgacgatttcttcaatatgctgataaagtaccagtcaagtagaatcgacgaccaacgctgtccgccacctgacgtgctgcccagggggcccactatgcccgatgaggactttttttctctgattcagcgggtccaggccaagcgcatggatgagcagcgggtggacctggctgggggtcctgaacagggggctggaggccctcctgagccacagcagcagtgtcagccgggagctagctag

SEQ ID NO: 78832 - DNA, 501 bp, Artificial Sequence
  derived and/or modified sequence
atggacgaccagcggtgccccctggacgacggccaggccggcgccgcagaggccacggcagctcccaccctggaagaccgaatagctcaaccctcaatgacagcctcacctcagaccgaggagttttttgacttaatcgcatccagtcaatcacgtaggctggacgaccagagagcatccgtcggcagcctgccgggtctgaggatcactcatagcaatgcgggacacctcagaggacatggcgaaccacaagagccgggtgacgacttttttaacatgctgattaagtatcaaagcagtcgcatagatgaccagcgatgtcctcccccagacgtccttcctcgcggcccaactatgccggacgaggacttcttctctttaattcagcgggtgcaggccaaacgtatggatgaacagcgcgtcgacttagccggcgggccggagcaaggcgcaggaggcccacccgagccccagcagcaatgtcagcccggcgcgagttag

SEQ ID NO: 78833 - DNA, 501 bp, Artificial Sequence
  derived and/or modified sequence
atggatgatcaacggtgtccactggatgatggtcaggccggtgccgcagaggccactgccgctccaaccctcgaagataggatcgcacagccatctatgaccgcctcgccccaaactgaggaattcttcgacctgatcgcatcatcccagtctaggagattggatgaccagcgcgctagcgtaggttccctgccgggtttgaggattacgcattccaacgcgggacatcttagaggacacggcgagccgcaggagccgggagatgactttttcaacatgctgatcaagtaccagtcgagccggatcgacgatcagcgttgtcctccccctgatgtcttgcctcggggtccaacgatgcctgacgaagacttctttagtctgattcaacgcgtacaggccaagcgcatggacgagcaaagggtagacttggctggtggaccagagcagggcgcaggaggccctcctgaacctcaacagcagtgccagccaggagccagctag

SEQ ID NO: 78834 - DNA, 501 bp, Artificial Sequence
  derived and/or modified sequence
atggacgatcagaggtgcccgttggacgatgggcaggctggggctgcagaagccactgcagcgccaaccttagaggatcgcattgctcagcccagcatgactgcctcacctcagacagaagaatttttcgacctgatcgcaagctctcagtcgaggcggttggatgaccagcgtgccagcgtgggttccctgccaggtttgaggatcacacattcgaacgccggtcatcttcgaggacacggggaacctcaagaaccaggcgacgatttttttaatatgctgataaaataccaatcttctcggattgatgatcagcgttgtccgcctccggatgtgcttccaagaggcccaacaatgcccgacgaagattttttcagtctcatacagcgggtccaggccaaacggatggacgaacagagagtggatctcgccggagggccagaacagggtgccggtggccctcctgaaccccaacagcagtgtcaaccaggtgctagctag

SEQ ID NO: 78835 - DNA, 501 bp, Artificial Sequence
  derived and/or modified sequence
atggacgaccagcggtgtcccttagacgatggccaagctggagcagctgaagcgacagccgcacctactctggaagaccgcattgcacagccgagtatgacagcctcgccacagactgaagaatttttcgacctgatcgcttcatcccagtctaggcgcctggacgatcagcgggcttccgtgggcagtctgccaggactcagaatcacccactcaaacgcgggacatttgcgcggacacggcgaaccccaggagccgggtgatgacttcttcaatatgctgataaagtaccaaagtagccgcatcgacgaccagaggtgcccacccccagacgtgctcccccgtggtccaaccatgcctgatgaggatttcttctcactgatccaaagggtgcaagccaagcgtatggatgaacagagggttgaccttgccggaggcccagaacagggagcaggaggcccacccgagccacaacagcaatgtcagcccggagctagctag

SEQ ID NO: 78836 - DNA, 861 bp, Artificial Sequence
  derived and/or modified sequence
atggagctgatcctgagcaccagccccgccgagctgaccctggaccccgcctgccagcccaagctgcccctggacagcacctgccagcccgagatgaccttcaaccccggccccaccgagctgaccctggaccccgagcaccagcccgaggagacccccgcccccagcctggccgagctgaccctggagcccgtgcacagaagacccgagctgctggacgcctgcgccgacctgatcaacgaccagtggcccagaagcagaaccagcagactgcacagcctgggccagagcagcgacgccttccccctgtgcctgatgctgctgagcccccaccccaccctggaggccgcccccgtggtggtgggccacgccagactgagcagagtgctgaaccagccccagagcctgctggtggagaccgtggtggtggccagagccctgagaggcagaggcttcggcagaagactgatggagggcctggaggtgttcgccagagccagaggcttcagaaagctgcacctgaccacccacgaccaggtgcacttctacacccacctgggctaccagctgggcgagcccgtgcagggcctggtgttcaccagcagaagactgcccgccaccctgctgaacgccttccccaccgcccccagccccagaccccccagaaaggcccccaacctgaccgcccaggccgcccccagaggccccaagggcccccccctgcccccccccccccccctgcccgagtgcctgaccatcagcccccccgtgcccagcggcccccccagcaagagcctgctggagacccagtaccagaacgtgagaggcagacccatcttctggatggagaaggacatctag

SEQ ID NO: 78837 - DNA, 174 bp, Artificial Sequence
  derived and/or modified sequence
atggagctgatcctgagcaccagccccgccgagctgaccctggaccccgcctgccagcccaagctgcccctggacagcacctgccagcccgagatgaccttcaaccccggccccaccgagctgaccctggaccccgagcaccagcccgaggagacccccgcccccagcctgtag

SEQ ID NO: 78838 - DNA, 261 bp, Artificial Sequence
  derived and/or modified sequence
atggagctgatcctgagcaccagccccgccgagctgaccctggaccccgcctgccagcccaagctgcccctggacagcacctgccagcccgagatgaccttcaaccccggccccaccgagctgaccctggaccccgagcaccagcccgaggagacccccgcccccagcctggccgagctgaccctggagcccgtgcacagaagacccgagctgctggacgcctgcgccgacctgatcaacgaccagtggcccagaagctag

SEQ ID NO: 78839 - DNA, 861 bp, Artificial Sequence
  derived and/or modified sequence
atggagctcatcctttcaacaagtcctgctgaattgacactcgaccctgcctgtcaacctaaactcccactggactccacctgccaacctgagatgacatttaatcctggaccaacagaactcaccctggaccccgagcaccagcccgaagagacaccagctcctagcttggcagaactgacactggagcccgtgcaccgacgtcctgagttattagacgcttgcgctgatctcatcaatgaccagtggccccgatctcgtacaagccggttacatagcttagggcaatcttcggatgcgttccccctgtgtctcatgctcctctcgccacacccaaccctcgaggcggctccagttgttgttgggcacgccaggctgagcagagtcctgaaccagccgcaaagcttactggtggagacagtggttgtagccagggcccttcgaggacgagggtttggtaggcgcctgatggaagggttggaagtgttcgcaagagctagagggtttaggaagctgcacctaacaactcatgaccaggttcatttttatactcacctcggataccagctgggcgagcccgtgcagggcctcgtgttcacctcacgacgtctcccagctaccttgcttaatgcatttcccacagcaccctcacctcgcccacctcggaaggccccaaaccttacagcacaagctgcacccagaggcccaaaagggcctccactgcctccccctcccccccttcccgagtgcctgacaatcagcccccccgtgccgagtgggcccccctcgaaatcacttctggagacacagtaccagaatgttagagggcgaccaattttttggatggaaaaggacatttag

SEQ ID NO: 78840 - DNA, 174 bp, Artificial Sequence
  derived and/or modified sequence
atggagctcatactctctacaagcccagccgagctgacgttagatccagcctgccaacctaagctcccactggactctacctgccagcctgagatgacctttaacccggggccaactgagctcacattggaccccgagcatcagccagaagaaacaccagcccccagcctctag

SEQ ID NO: 78841 - DNA, 861 bp, Artificial Sequence
  derived and/or modified sequence
atggagcttatcctgtcaacctctccagccgaactgactcttgatccagcatgtcagccaaagcttccattggattctacttgtcagcctgagatgacttttaatcctggaccaacggagttgacactggacccagaacaccagcccgaagagacccctgccccttccctggctgaattaacactggagccggtgcatcgaagaccagagctgttagatgcctgcgctgacctaattaatgaccagtggccacgcagccgaacctccagactgcattcactgggccagtctagcgacgctttcccattatgcctgatgcttttgagcccccatcccacactggaggctgcccccgtggtggttggccatgctagactgagcagagtccttaatcaacctcagagtctactggtggagacagtggttgtcgcccgtgcactgcggggaaggggctttgggcgccgactgatggagggactggaagtgtttgctcgcgcccgtgggtttcgcaagctccatttaactacacacgaccaggtgcacttttacacacatctgggataccaactcggcgagcctgtccagggcctagtatttacctctcgtaggctgcctgccaccctgcttaatgcattccccactgctccatctcctaggccaccaaggaaggcccccaatctcacagcgcaagctgcccctagaggcccaaaggggcccccgctcccccctcctccaccgctgccagaatgtctcacgatttctccccccgtaccttccggtcccccctcaaaatcattgcttgaaacccaataccagaacgtgcgtggtcggcccattttttggatggagaaggatatctag

SEQ ID NO: 78842 - DNA, 861 bp, Artificial Sequence
  derived and/or modified sequence
atggagctaatactgtctacttctccagccgaattgaccctggacccggcatgccagcctaagctcccccttgacagcacatgccagccagaaatgaccttcaaccccggaccaactgagctgacccttgatcccgagcaccagccagaagaaacccccgctccttccctggctgagctgactctggagcccgttcacagaaggcctgagctattggatgcatgtgccgacctaatcaatgatcagtggccaaggtcacgcactagccgtctccattccctggggcaaagtagtgatgcttttcctttatgcctgatgctgctgtctccgcaccccactctggaggcagcccccgttgtcgtggggcatgcgcgactttccagagttctgaatcagccacaaagcctcctagtggaaactgtggtcgtcgctcgcgccctacgggggcgcggcttcggacgccgactgatggaaggactcgaagtgtttgcccgagctagaggatttagaaaactccacctgacgactcacgaccaggtgcacttctatacccacctaggctaccagctaggcgagccagtgcagggcctcgtctttaccagtaggcgactccctgcgactctgcttaatgcgttcccaaccgctccctctccccggcctcctcgaaaggcgcctaatctcacagctcaggcagccccacgggggcccaaaggccctccactacccccccctccacctttgcctgaatgcctgacaatcagcccccctgtcccttctgggcctccctctaagagcctgcttgaaacacaataccagaatgtcagaggcaggcctatcttctggatggagaaggatatttag

SEQ ID NO: 78843 - DNA, 261 bp, Artificial Sequence
  derived and/or modified sequence
atggaattgattctgtccacatcgccagccgagctgaccttggacccagcctgtcagcccaagctcccactcgatagcacatgtcagcccgaaatgactttcaatccagggccaaccgaactcacgctcgacccagaacaccagccagaggagacacctgcacctagcctggcagagcttactttggagccagttcaccgcagaccggagctgctagatgcatgtgctgacctcataaacgaccagtggcccagatcctag

SEQ ID NO: 78844 - DNA, 861 bp, Artificial Sequence
  derived and/or modified sequence
atggagctgatcctgagcaccagccctgctgagctgaccctggaccctgcctgccagcccaagctgcccctggacagcacctgccagcctgagatgaccttcaaccctggccccacagagctgaccctggaccctgagcaccagcctgaggagaccccagcccccagcctggccgagctgaccctggagcctgtgcacagaagacctgagctgctggatgcctgtgccgacctgatcaatgaccagtggcccaggagcaggaccagccggctgcacagcctgggccagagcagtgatgccttccccctgtgcctgatgctgctgagcccccaccccaccctggaggccgcccctgtggtggtgggccacgcccggctgagccgggtgctgaaccagccccagagcctgctggtggagaccgtggtggtggcccgggccctgcggggccggggcttcggccggcggctgatggagggcctggaggtgtttgcccgggcccggggcttcaggaagctgcacctgaccacccatgaccaggtgcacttctacacccacctgggctaccagctgggggagcctgtgcagggcctggtgttcaccagccggcggctgcctgccaccctgctgaatgccttccccacagcccccagcccccggccccccaggaaggcccccaacctgacagcccaggccgccccccggggccccaagggcccccccctgcccccacctccacccctgcctgaatgtctgaccatcagcccccctgtgcccagcggcccccccagcaagagcctgctggagacccagtaccagaatgtgcggggccggcccatcttctggatggagaaggacatctag

SEQ ID NO: 78845 - DNA, 174 bp, Artificial Sequence
  derived and/or modified sequence
atggagctgatcctgagcaccagccctgctgagctgaccctggaccctgcctgccagcccaagctgcccctggacagcacctgccagcctgagatgaccttcaaccctggccccacagagctgaccctggaccctgagcaccagcctgaggagaccccagcccccagcctgtag

SEQ ID NO: 78846 - DNA, 261 bp, Artificial Sequence
  derived and/or modified sequence
atggagctgatcctgagcaccagccctgctgagctgaccctggaccctgcctgccagcccaagctgcccctggacagcacctgccagcctgagatgaccttcaaccctggccccacagagctgaccctggaccctgagcaccagcctgaggagaccccagcccccagcctggccgagctgaccctggagcctgtgcacagaagacctgagctgctggatgcctgtgccgacctgatcaatgaccagtggcccaggagctag

SEQ ID NO: 78847 - DNA, 861 bp, Artificial Sequence
  derived and/or modified sequence
atggagctgatcctgagcaccagccccgccgagctgaccctggacccggcgtgccaacccaagttacctttagatagtacatgtcagcctgagatgacattcaacccaggcccaacagaactgacactggatcccgagcaccagcctgaggagactccagccccgtcgctcgcagaactgaccctcgaacccgtgcaccgccgccctgagctcctggacgcgtgtgccgatctgattaatgaccagtggcctcgctctcggacctccagactgcactcgctgggccagagtagcgatgccttcccactgtgcctgatgctgctgagcccgcatcctactctggaggcagcacccgtcgtagtcgggcacgctaggctgagccgcgttctgaaccaaccacagtctctgcttgtcgagacagttgtcgtggcgcgcgctctgcgcgggagaggatttggtcgtcgattgatggaaggactggaagtctttgctcgagcccgcggattcaggaagcttcacctgaccactcatgaccaagtccacttttacacacacttgggctaccagctgggtgagccagtacagggtcttgtattcacatcccgccgccttccagccaccctgctaaacgcctttccgaccgcccccagccccaggcctcccaggaaggcccccaatctgactgctcaggccgcccctcgaggccccaagggacccccacttcccccccctccacccttgcctgagtgcctgacaattagtccccctgtgcccagcgggccgccatctaagtccctcttagaaactcagtatcaaaacgtaagggggcgcccaatcttttggatggagaaagatatctag

SEQ ID NO: 78848 - DNA, 174 bp, Artificial Sequence
  derived and/or modified sequence
atggagctgatcctgagcaccagccccgccgagctgaccctggacccagcttgccagcccaagctgcctctggactccacctgtcagcctgagatgacttttaatcctggtcccactgaacttacattggacccagagcatcagccagaggagacgcctgcaccttctctgtag

SEQ ID NO: 78849 - DNA, 861 bp, Artificial Sequence
  derived and/or modified sequence
atggagctgatcctgagcaccagccccgccgagctgaccctggaccctgcatgccagcccaagctcccactggacagtacctgccagcccgaaatgaccttcaacccagggcctactgagttaacccttgaccccgagcaccagccagaagaaaccccagccccgtcactagccgaactaaccttggagcccgtgcatcgccgaccagagcttctcgacgcctgtgctgatctcatcaacgatcaatggccaagatcaaggactagccggttgcattccctgggccaatcatcagacgccttccccctgtgcttgatgctcctatctccacatcctacacttgaggccgccccagttgtcgtcggacatgccagattgagtcgggtgcttaatcaaccccaatccttgctggtggagacggtggttgtggcccgtgctctgcggggacgtggcttcgggcgtaggctgatggaggggctggaggtgtttgcccgggcccgggggttcaggaaacttcacttgactacacatgaccaggttcatttttatactcacctgggctaccagttaggggagcctgtgcaagggcttgtatttacatcaaggcgcctccctgccacgctgctgaatgctttccccaccgccccgagtccgcggccgcccagaaaggcccccaatctgacagcccaggcagcacctaggggccctaaaggtccacccctgccacctccgcctcccctacccgagtgtctaaccattagtccccctgtgcctagcggcccgccaagcaagtccctccttgaaacacagtatcagaacgtgcggggccgacccatattttggatggagaaagatatctag

SEQ ID NO: 78850 - DNA, 861 bp, Artificial Sequence
  derived and/or modified sequence
atggagctgatcctgagcaccagccccgccgagctgaccctggaccctgcgtgccaaccgaaattgcccctagactctacctgtcagccagaaatgacttttaaccctgggcctacggagctaacactggaccctgaacaccagcccgaagaaacgccagcgccaagcctcgccgagttaaccttggaacctgtccatcgccggcctgagctgcttgacgcctgtgccgatttgataaatgatcagtggccgagaagcagaacatcgcggctccactccctcggtcagagcagcgatgcttttcccctgtgcctgatgctcctgtcccctcaccctaccctggaggcagcccccgtcgtggtcgggcacgctcgcctgtcccgggtgctgaaccagccgcagagcttgctggtcgagactgtcgtggtagcccgcgccctccggggccgcggatttggtcggagattaatggaagggttggaagtctttgctcgcgcccgggggtttaggaaattacacctaaccactcacgatcaagtccacttttacacccatcttggctatcagctcggggagcccgtgcagggcctggtgttcacatctcgccgcttgcccgctaccttgctaaacgccttcccaaccgccccctctccacgtccccctcggaaagcccctaacctaaccgcccaagccgctcccaggggtccgaaagggccgcctctgccacctccacccccattgcctgagtgtcttactattagcccacctgtaccttccggccccccgagcaaaagtcttttggagacacaatatcaaaacgtccgcggaagacccatattttggatggagaaagatatatag

SEQ ID NO: 78851 - DNA, 261 bp, Artificial Sequence
  derived and/or modified sequence
atggagctgatcctgagcaccagccccgccgagctgaccctggacccagcctgtcaacctaaattgcctttggactctacttgtcagcctgagatgacctttaacccaggaccaacagagctgaccttggatccagagcatcagcctgaagaaacacccgctccttccttagccgagttgaccctggaacccgtgcaccgacgccccgaattgttagacgcttgcgctgacctgatcaatgatcagtggccacgcagttag

SEQ ID NO: 78852 - DNA, 861 bp, Artificial Sequence
  derived and/or modified sequence
atggaactgattctgtccacttcacctgctgaacttactctcgatcccgcttgtcagccaaaattgccccttgactctacctgtcaacccgaaatgacattcaaccccggacccaccgaattaacccttgatccagaacaccagccagaggaaacgcctgccccaagcttggccgagcttactctcgaacctgtccaccgcaggcccgagctcctcgacgcttgcgccgacttgattaatgaccaatggccacgctccagaacaagcagactgcatagccttggtcagagctccgacgccttccctctgtgccttatgctccttagccctcaccctactctggaggcagctccagtggtagtcgggcacgcccgtctgtccagggtacttaatcagccgcagagtctgctggtcgaaactgtcgtggtggctagagccttacgtggcagagggttcggtagaaggctcatggaaggtttggaggtctttgctcgcgctaggggcttcagaaaactgcacctgactacacatgatcaggtccacttttatacacacctgggctatcagctcggggagcccgtacaaggcctcgtgttcacctccagacgcctgccagctactctcctgaatgcattccccaccgctccctcccctcgtccgccacgtaaggcccctaatctgaccgcccaggctgcacctcgtggccctaaggggccaccactgcctcctccccctcctttgcctgaatgcttgaccatcagcccacccgtacccagtggccctccctccaaaagcctcttggaaacacagtaccaaaacgtgagaggtaggccaatattttggatggagaaagatatttag

SEQ ID NO: 78853 - DNA, 174 bp, Artificial Sequence
  derived and/or modified sequence
atggaactgatactgtccacgtcacccgctgaattaactctcgaccctgcttgtcaacctaagctgccccttgatagcacttgccagcccgagatgacatttaacccagggccaactgagctgactttggatcccgagcaccagcctgaggagacacctgccccaagtctatag

SEQ ID NO: 78854 - DNA, 861 bp, Artificial Sequence
  derived and/or modified sequence
atggaactcatcctgagtacctccccggctgaattgaccctggacccggcttgtcagcccaagctgccgctcgattccacctgccagccagaaatgacatttaatcccggacctaccgaactgacactggacccagagcatcagccagaggaaacgcctgctccatccctagcggagttgactctggagccggtgcatagaaggcctgagctgcttgacgcatgcgccgacctaattaatgaccagtggccccgaagcaggacatcgagactccattcgctgggacagtcttctgatgcgttccccctctgtctcatgctgctgagtccacatcccacattagaggctgcgccagtcgttgtcgggcatgctagactgagtagggtcctgaaccagccccagtcattactggtagagaccgtggtggtggcgcgtgcgttgagaggtcggggttttggcagaaggctaatggagggtctggaggtatttgcacgtgctcgcggattcagaaaactacacttgaccacccacgatcaggtccatttctatacacatctagggtaccaactgggagagcctgtgcaaggcctcgtcttcactagtaggcgtctgcccgctacactcctgaacgctttccccaccgctccgtccccacgcccacccaggaaggctcctaatctgactgcccaagcagccccacgagggcctaaaggtcctccgttaccacctccaccgccattgcccgaatgtttgacaattagtcctccagtgccatcaggcccaccaagcaagtctctcttggaaacccagtatcagaacgtgcgcggtcggcctattttctggatggaaaaagatatctag

SEQ ID NO: 78855 - DNA, 861 bp, Artificial Sequence
  derived and/or modified sequence
atggaactgattctaagcacatcccccgctgagttaaccctggatcctgcatgccaaccaaagctgccgctggattcgacatgtcagccagagatgaccttcaatcctggaccgaccgaattaacgctggaccctgagcatcaacccgaggagacccctgcgccatcgttggctgagctgacactggaacccgttcatcggagacccgaactgctggatgcctgtgctgatctgattaatgatcagtggcccagatcccggacttcaagattgcatagcctgggccaaagcagtgatgcgttccccctttgtctgatgctgcttagcccccaccctacgctcgaggcagccccagtggtggtgggccacgctaggttgtcccgggttctgaaccagccccagtcccttttggtggaaacagtggtggtcgccagagccctacgaggccgaggctttggtcgcagactgatggaggggctggaagtctttgcacgggcacggggtttccggaagttgcacctgacaacgcacgatcaagtgcacttctacacacatctgggttaccagctgggggagccagttcagggcctcgtcttcacctctcgccgactcccagctactttgcttaatgcattcccaactgccccttctcctcggcctccgaggaaggctcctaatcttacagctcaagccgctccacgcggacctaaagggccaccactccctccacctccgcctttaccagagtgccttacaattagcccccctgtgccctcaggccctccttccaaatcgctactggaaacgcagtaccaaaatgtgcggggacggccaattttctggatggaaaaagacatatag

SEQ ID NO: 78856 - DNA, 261 bp, Artificial Sequence
  derived and/or modified sequence
atggagctgattctgtcgaccagtcctgccgagctgacactggacccagcgtgtcagccaaagctgcctctcgatagtacgtgccagcctgaaatgacattcaatccaggacccactgaactgacgctcgaccctgagcaccagccggaggagacgcccgctccaagccttgccgaactgaccctggagcccgtgcatcggcgacccgaactgttggatgcttgcgcggacctaatcaatgatcagtggccacgctcctag

SEQ ID NO: 78857 - DNA, 861 bp, Artificial Sequence
  derived and/or modified sequence
atggaattgatcctcagtacttcccccgccgaattgacactcgatcccgcgtgccagccgaagcttcctctggattccacgtgccagcctgaaatgacgtttaatcctggcccgaccgaactcacactcgatcccgaacatcagccggaagaaactcccgctcctagcctagcagaactgacactggaaccagtgcacagacgcccagagctcctggatgcctgcgcggacttgatcaacgatcagtggcccaggtctagaacaagtaggttacattccctcggccagtcgtcagacgcgtttcccttatgcttaatgcttctgagcccccacccaaccctggaggccgcccctgtggttgtgggacacgccagactgagcagagtcctgaatcaaccacagagcttgctcgtggagacagtggtggttgctcgggccctaagaggccggggcttcggccgccggcttatggaagggctagaagtatttgcgcgagccaggggcttcaggaaactgcatctgaccacccacgatcaggtgcacttctacacgcacctgggctaccaactaggggagcccgtacagggcctggtgtttacaagtagaaggctgcctgccaccctcctgaacgccttccccacagcccccagtcccagaccgcctcgtaaagcgcccaacttgaccgcccaggctgctccgagggggcccaagggcccaccgttaccccccccaccgcctctgcccgagtgtctgaccatcagtccaccagtgccatcaggcccgccatccaaatcactcctggagacccagtaccagaatgtccgtggcagacccatcttttggatggaaaaagatatttag

SEQ ID NO: 78858 - DNA, 861 bp, Artificial Sequence
  derived and/or modified sequence
atggagttgatactgtccacatcgccagctgagcttacgctggatcccgcctgccagcccaagctgcccctggactctacatgccagccagagatgacctttaatccaggccctaccgaactgacattggatcctgagcaccagcccgaggaaacgcctgcgcctagcctggcagaactgacactcgagcccgttcacagaagaccagaacttcttgacgcgtgtgccgacctcattaacgatcagtggccaaggagtaggacaagtcggctgcactcgctggggcagagttcggacgctttccctctctgcctcatgctgctgagccctcaccctacccttgaggctgctccagtggtagtgggccacgcacgcctatccagagtcctcaaccagccacagtccttgctggtggaaaccgtggtggtggcacgggcacttcgtgggcggggctttggccgtcgcctgatggaaggattggaggtgtttgctagggccagagggttccgtaagctccacctgacaacccacgatcaggtgcatttttatacacatcttggttaccaactgggagagcccgttcagggtctggtgttcacttctcgtagattgcctgccaccctgctgaatgctttcccaaccgcaccaagcccccggcccccacgcaaggcacctaatctgactgctcaggccgctccacggggcccgaagggcccgccactgccccctccacctcccctgcctgaatgtctcactatatcccccccggtgccgtctgggcccccttcaaagagcctgctcgagacccaataccagaatgtacgcggtcgacctattttttggatggagaaggatatatag

SEQ ID NO: 78859 - DNA, 861 bp, Artificial Sequence
  derived and/or modified sequence
atggagctgatcctgagcaccagccccgccgagctgaccctggaccctgcctgccagcctaaactacctcttgattcgacttgccaaccggagatgacttttaatccgggccccaccgaactgaccctggaccccgagcatcaacccgaggagacacctgctcccagcctggccgaactgacacttgaacccgtccaccgacgtccagagctcctggacgcctgtgccgacctcatcaacgatcaatggcctaggagccgtacaagtcgcttgcattccctggggcagagtagcgacgccttccctctctgcctcatgttgcttagcccacatcccaccctggaggcagcaccggtagtggtagggcatgccaggctgtcgagggtactgaaccagcctcaatctttactcgtggagacagtcgttgtcgcaagagccttacggggtagaggttttggaagacgcctgatggaagggctggaggtcttcgccagggcacggggattcagaaagctccatctcaccacccacgaccaggtgcatttctacacacacctgggctaccagctgggagaaccagtgcaaggcctcgtgtttacatctaggcggctgcctgccaccctcctgaatgcctttcccaccgcgccttcacctcggcctccccggaaagcccccaatctgaccgctcaggccgcacctagggggcctaagggacctcccttgcccccgcctcctcctctgccggagtgcttaacaatttcccctcccgtgccttctggtcccccatcaaaaagcctgctggagacccagtatcagaatgtgagggggaggcccatcttctggatggaaaaagatatctag

SEQ ID NO: 78860 - DNA, 861 bp, Artificial Sequence
  derived and/or modified sequence
atggagctgatcctgagcaccagccccgccgagctgaccctggaccccgcctgtcaaccgaaactgccacttgacagtacgtgtcaacccgaaatgacgtttaaccccggcccaaccgagctcaccctggatcctgagcatcagcccgaagagacacctgcccccagcctcgcagaacttaccttggagcctgtccatcgccggcctgaactgttggatgcatgcgccgacctgataaacgatcagtggccacggagtagaacttcccggttgcactccttggggcaaagcagcgatgctttccctctgtgcttgatgctgcttagtccccaccccaccctggaggcggccccagtggtagttggtcacgcaaggttatccagagtgttgaaccagccacagtccctgctggtcgagacagtcgtggtggcgcgcgctcttaggggacgcgggttcggcagaaggctgatggaagggttggaggtgtttgctcgggctcgtggatttagaaagctccatctgactacccacgatcaggttcatttctacacccacctcggttaccagctgggcgagcctgtgcagggcctcgtcttcacatctcgacgtctccctgctacactcttgaacgcatttcctaccgctccctcaccaagaccccctcgaaaggcacccaacttaacagctcaggctgcaccccggggtcctaaaggtccccccctcccaccgccacccccactccccgagtgcttaactataagccctccagtgccaagtgggccccccagcaagagtcttctggagacccagtaccaaaatgtgagaggtaggccaatcttctggatggaaaaggacatctag

SEQ ID NO: 78861 - DNA, 861 bp, Artificial Sequence
  derived and/or modified sequence
atggagctcatcctgagcacatcccctgcggagttgaccctagaccccgcttgccagccaaagctccctctggactcaacttgccagccagagatgactttcaatccaggaccaactgaactaactctcgatccagagcaccagcctgaagagactcccgctccatcccttgccgagctcactctggagcctgtccacaggcgaccggagctactcgacgcatgcgccgacctgatcaatgatcagtggccacgctccaggacctcacgtttacattccctgggacagagcagcgatgcttttcctctgtgcctgatgttgctatcccctcatcccactttagaagccgcaccagtggtcgtaggacatgctcgcctgagcagagtgctgaaccaacctcagagtctactggtcgagacagtcgtggttgcccgtgcactcaggggtcggggattcggtcggagactgatggagggacttgaggttttcgccagggctagaggcttccgcaaattacacctgacgactcacgaccaggtacacttttacacccacctcggatatcagctgggggagccagtgcaaggccttgtttttacatctaggcggttgcctgcaacgctcctaaatgcgtttcccaccgcacccagccccaggcctccacgcaaggctcctaacttgacagcccaggctgcacctagagggcctaagggcccaccactccctcctccaccccctctgcccgaatgcctgacaattagccctcccgtgccttccggtccaccttctaagtctcttctggaaacgcagtatcagaacgtgaggggtcgccctatattttggatggagaaggacatctag

SEQ ID NO: 78862 - DNA, 861 bp, Artificial Sequence
  derived and/or modified sequence
atggagttgatcctgtcaacttccccagcagagctcaccctagatcccgcttgtcaaccaaaactccctttagatagcacctgccagccagagatgaccttcaacccaggcccaactgagctcacactggaccctgagcaccagcctgaagaaactcccgcacccagcttagcggagctcacactggagcccgtgcacagaagacccgagttactggacgcctgtgccgatcttattaatgatcagtggcctcggtctagaacttctagattgcattctttgggtcagtcatctgatgcattcccgctctgcctgatgctgctgtcacctcacccaacgttagaggcagccccagtggttgtgggacacgcgcgtctttcccgggtgttgaaccaaccgcagtcactgctcgtcgaaactgtcgtcgtggctcgagcactgagggggagaggcttcggaaggaggctgatggaaggactcgaggtctttgccagagcgagaggttttcgtaagcttcacttgactacacatgaccaggttcatttctatactcatctggggtaccagcttggagagccagtgcaggggctggtgtttacatctagaagactgcctgccacgttgttgaacgcctttcctacggcaccaagtcctcgcccaccacgcaaggcgccaaacctgacggctcaggccgctcctagagggccaaaaggtcctcctttgcctcctcctccccctttgcctgagtgcctcaccatctctccgcctgtgccaagtggcccaccatcgaaatctctgcttgaaacccagtaccagaatgtgcgcggacggcctatattctggatggagaaggacatctag

SEQ ID NO: 78863 - DNA, 1113 bp, Artificial Sequence
  derived and/or modified sequence
atggagcccctgttccccgcccccttctgggaggtgatctacggcagccacctgcagggcaacctgagcctgctgagccccaaccacagcctgctgcccccccacctgctgctgaacgccagccacggcgccttcctgcccctgggcctgaaggtgaccatcgtgggcctgtacctggccgtgtgcgtgggcggcctgctgggcaactgcctggtgatgtacgtgatcctgagacacaccaagatgaagaccgccaccaacatctacatcttcaacctggccctggccgacaccctggtgctgctgaccctgcccttccagggcaccgacatcctgctgggcttctggcccttcggcaacgccctgtgcaagaccgtgatcgccatcgactactacaacatgttcaccagcaccttcaccctgaccgccatgagcgtggacagatacgtggccatctgccaccccatcagagccctggacgtgagaaccagcagcaaggcccaggccgtgaacgtggccatctgggccctggccagcgtggtgggcgtgcccgtggccatcatgggcagcgcccaggtggaggacgaggagatcgagtgcctggtggagatccccaccccccaggactactggggccccgtgttcgccatctgcatcttcctgttcagcttcatcgtgcccgtgctggtgatcagcgtgtgctacagcctgatgatcagaagactgagaggcgtgagactgctgagcggcagcagagagaaggacagaaacctgagaagaatcaccagactggtgctggtggtggtggccgtgttcgtgggctgctggacccccgtgcaggtgttcgtgctggcccagggcctgggcgtgcagcccagcagcgagaccgccgtggccatcctgagattctgcaccgccctgggctacgtgaacagctgcctgaaccccatcctgtacgccttcctggacgagaacttcaaggcctgcttcagaaagttctgctgcgccagcgccctgagaagagacgtgcaggtgagcgacagagtgagaagcatcgccaaggacgtggccctggcctgcaagaccagcgagaccgtgcccagacccgcctag

SEQ ID NO: 78864 - DNA, 1113 bp, Artificial Sequence
  derived and/or modified sequence
atggagccactcttccctgctcccttttgggaggttatttacggatcacaccttcaaggtaacttgtccctgctgtctcccaatcattcattgctgcctccccacctgcttttgaacgcaagtcacggtgccttcttaccactggggttgaaagtgactatcgtgggcttatacctggctgtatgcgtaggcggtctgctgggcaactgtctcgtaatgtacgttattttgcggcataccaaaatgaaaaccgcaaccaacatttatattttcaacctggccctcgcggataccctggtcctgctgactctgcccttccaggggacggacatcctgttagggttctggccgttcggcaacgcactgtgtaagacagtgatcgcaatagattactataatatgttcactagcacctttacgctgaccgctatgagcgtggaccgatatgttgctatttgccaccccatccgggccctggatgtgaggactagcagcaaggcccaagccgttaacgtcgctatttgggccctcgcttccgtcgtgggagtgcccgtggcaatcatgggctcggcccaggttgaagatgaagagatcgaatgcctggtcgaaatccccactccacaggattactggggaccggtttttgcaatctgcatctttctgttctcttttattgtacccgtactcgtcatcagcgtgtgctattctttgatgatccgacgattacggggggtaagactgctcagcggctctagggaaaaagacagaaatctacggaggatcactcgcctggtcttggtggttgtggccgtgttcgtgggctgttggacacctgtccaggtgttcgtcctggcccagggactcggggttcagccatccagtgaaaccgctgtcgcaattctgcgattctgcacggccctcggctatgtgaacagctgtctgaatcctattctttacgccttcctcgatgagaactttaaggcctgcttccgcaaattctgctgtgctagcgccttgcgcagagacgtacaggtgtcggacagggttcggagcattgctaaggatgtggccctggcttgcaaaacctctgagaccgtgccaagaccagcttag

SEQ ID NO: 78865 - DNA, 1113 bp, Artificial Sequence
  derived and/or modified sequence
atggagcccctgttccccgcgccattttgggaggtgatctatggctctcacctacaggggaacctcagcttactgagccctaatcactccctcctcccaccacacctgttgcttaatgcctctcatggtgcatttctccctttggggctgaaggttacaatagtgggactctacctagctgtttgcgttgggggcctcttgggcaactgtctggtgatgtacgttatcctgcgtcatactaagatgaagaccgccaccaacatatatatattcaatctcgccctggccgacaccctcgtcctactgactttaccctttcagggcactgacatccttcttggtttctggccattcggcaacgcactgtgtaaaacagtcatagctatagattattacaacatgtttacctccacgtttacactcactgcgatgtcagttgacaggtatgtggcgatatgccatccaattagagctttagatgtgaggacctcctcgaaggcccaggcagttaatgtggccatatgggctctggcgtctgtagtgggtgtcccagtcgctattatgggaagtgcacaggtcgaggacgaagaaattgagtgtctcgtggaaatacccaccccgcaggactattggggccctgtgttcgccatctgcatttttcttttctccttcatcgttccagtccttgttatctctgtatgttacagccttatgatcagacggctgcgtggcgtcaggttgctgtcgggctcaagagagaaagacaggaacctgcgaaggatcactaggctcgtgttggtggtggtcgccgtctttgttggttgttggacccctgtccaagttttcgtgctggcccagggactgggggtgcagccatcttcggaaactgccgtggccatcctaaggttttgcaccgcgttgggctacgtcaacagctgtctgaatccaatcctatatgctttcctcgatgagaattttaaggcctgcttcagaaaattctgctgtgcatctgctctgcgcagggacgttcaggttagtgatcgcgtgcggagcattgcaaaggacgtggctctggcctgtaagacaagcgaaaccgtcccccggcccgcctag

SEQ ID NO: 78866 - DNA, 1113 bp, Artificial Sequence
  derived and/or modified sequence
atggagcccctgttccccgctccattttgggaggtcatctatggaagccacctgcaaggcaacctgtctctcctttcccccaaccactctttgcttccgccccatctgttgctcaatgccagccacggggcatttttacccctaggattgaaggtgacaattgtcggactttatctcgccgtttgcgttggcggactgctcggaaactgtctcgtcatgtacgtaattctccgtcatacgaagatgaagacagcaactaacatttatatatttaatctggccctggccgatacgttggtgctattgaccctaccgttccagggaactgacatactgctcggtttctggccttttggtaacgctttgtgcaagaccgttattgcgatcgattactacaacatgtttacttccaccttcacgctgaccgccatgtccgtggacaggtatgtggcaatttgtcacccaattcgagctctggacgttagaacttcttcaaaggcacaggccgttaacgtggcaatatgggcactggcaagcgtggtcggagtccccgtggccatcatgggctctgcccaggttgaagacgaggagattgagtgcctcgtggaaattcctacacctcaggattactgggggccagtctttgctatctgcatattcttgtttagcttcatcgtgccagtgcttgtgatatcggtgtgctattctctaatgataaggcgcttgagaggcgttagactgctgagcggctcccgtgaaaaagatcggaatctgaggagaattacgcgcctggtcctggtggtcgtagctgtgtttgtcgggtgttggacccccgtgcaggttttcgttttagcgcagggactgggggtgcagccatcttccgagaccgcggtggcaatcctgcgcttttgcaccgccttgggttatgtgaacagttgcctcaaccctatcttgtacgcctttctcgacgagaacttcaaagcctgcttccgtaaattctgctgcgcatccgcgcttagaagagacgtgcaggtgtccgatagagtcagatcaatcgcgaaggatgtcgctcttgcctgtaagacctccgaaacagtgcctaggcctgcttag

SEQ ID NO: 78867 - DNA, 1113 bp, Artificial Sequence
  derived and/or modified sequence
atggagcccctcttccctgcccccttctgggaggtgatctacggcagccacctgcagggcaacctgagcctgctgagccccaaccacagcctgctgcccccccacctgctgctgaatgccagccacggggccttcctgcccctgggcctgaaggtgaccatcgtgggcctgtacctggccgtgtgtgtgggcggcctgctgggcaactgcctggtgatgtatgtgatcctgcggcacaccaagatgaagacagccaccaacatctacatcttcaacctggccctggccgacaccctggtgctgctgaccctgcccttccagggcacagacatcctgctgggcttctggccctttggaaatgccctgtgcaagacagtgattgccatcgactactacaacatgttcaccagcaccttcaccctgacagccatgtctgtggacagatatgtggccatctgccaccccatccgggccctggatgtgaggaccagcagcaaggcccaggccgtgaatgtggccatctgggccctggcctctgtggtgggcgtgcctgtggccatcatgggcagcgcccaggtggaggatgaggagattgaatgtctggtggagatccccaccccccaggactactggggccctgtgtttgccatctgcatcttcctgttctccttcatcgtgcctgtgctggtgatctctgtgtgctacagcctgatgatccggcggctgcggggcgtgcggctgctgagcggcagccgggagaaggacaggaacctgcggcgcatcacccggctggtgctggtggtggtggccgtgtttgtgggctgctggacccctgtgcaggtgtttgtgctggcccagggcctgggcgtgcagcccagcagcgagacagctgtggccatcctgcgcttctgcacagccctgggctacgtgaacagctgcctgaaccccatcctgtatgccttcctggatgagaacttcaaggcctgcttcaggaagttctgctgtgccagcgccctgcggagagatgtgcaggtgtctgacagagtgcgcagcatcgccaaggatgtggccctggcctgcaagaccagcgagaccgtgcccaggcctgcctag

SEQ ID NO: 78868 - DNA, 1113 bp, Artificial Sequence
  derived and/or modified sequence
atggagcccctgttccccgcccccttctgggaggtgatctacggctcccacctgcaaggaaatctatcactgctctcaccgaatcacagcctactcccaccccacctcctacttaatgcctcccacggggcttttctgccacttggtttaaaagtgaccattgtgggtctctaccttgccgtttgcgtggggggccttctcggaaactgcttagtcatgtatgtgatcctgagacacacgaaaatgaagaccgccaccaatatctacatttttaacctcgcactggccgacacactcgttttgttgaccttaccttttcaggggaccgacattctgctcgggttttggccttttggaaatgctctctgcaaaacagttatagccatagattactataacatgttcaccagcacttttacgctcacagcaatgtcagttgacaggtacgtggcaatctgccatcctattcgagctctggatgttcgaacgagcagcaaggcacaagccgtgaatgtggccatttgggcgttggctagcgttgtgggggtgccagtcgcgatcatgggctcagcgcaggtggaagacgaggaaattgagtgccttgtcgaaataccgacaccccaggactactgggggccagtgtttgctatttgtattttcctgttttccttcatcgtaccagtgctcgtcatttctgtctgctatagcctgatgatccggcgccttcggggtgtgagattgctgagcgggtcccgtgaaaaagaccggaatcttcgcaggatcactcgtctggtgctagtggtggtcgcggtgtttgtcggatgttggacacctgtgcaagtatttgtgttggcgcagggcctaggcgtacagccctcaagtgaaacagctgtcgcaattctgaggttctgtactgctctgggttacgtgaacagttgcctcaaccccatcctgtacgccttccttgatgagaattttaaggcttgctttaggaagttttgctgcgcgtccgcgttgaggcgtgatgtgcaggtgtccgatcgcgtgcggagcatagccaaagacgttgcgttggcatgtaaaactagcgagacagtgcccaggccagcttag

SEQ ID NO: 78869 - DNA, 1113 bp, Artificial Sequence
  derived and/or modified sequence
atggagcccctgttccccgcccccttctgggaggtgatctacggcagccacctgcagggaaacctctctctactgagtcctaaccacagcctccttccgccccatttgttgttgaacgcaagtcacggcgccttcttacccttgggactgaaagtgactatcgtagggctgtaccttgccgtttgcgttggagggctgctgggtaactgcctcgtgatgtacgtaatcctcaggcacacgaagatgaaaacagcaacaaacatctacatcttcaatcttgccttagcagacaccctcgttctcttgacactgcccttccagggcaccgatatcttgttggggttttggccttttggtaacgctttatgcaagacagtgattgccattgactactacaatatgttcaccagcacattcaccttgaccgcaatgagcgtcgaccgctacgtggctatctgccacccaattagggccctcgacgttaggacaagttctaaggctcaagcagtgaatgtagccatttgggctttagcctctgtggttggggtgccggtggccataatgggtagcgcccaggtcgaagacgaggagatcgagtgccttgtcgaaatccccacccctcaggactactggggaccagttttcgccatatgcatattcctgttctcgttcatcgtaccggttctggtaatcagcgtctgctacagcctgatgattcggagactgagaggcgtcagattattatcaggatcccgagagaaagaccgcaaccttcgacggataacccgactggtactcgtcgtggttgccgtctttgtggggtgctggactccagtgcaggtgtttgtgctggcccagggcctgggagtgcagccgtcgtcagagacagcagtcgccattctacggttctgcaccgctttggggtacgtgaactcctgcctgaatccaatcttatacgcctttctggatgagaatttcaaggcctgcttccggaagttttgttgcgcaagcgctttaaggagagatgtccaagtatccgaccgcgttcgaagcatcgccaaggatgtggccttagcctgcaaaacgagtgaaaccgtacctaggccggcttag

SEQ ID NO: 78870 - DNA, 1113 bp, Artificial Sequence
  derived and/or modified sequence
atggagcccctgttccccgcccccttctgggaggtgatctacggcagtcacctgcagggaaacctgagcctgctcagccctaaccattctctcctgccacctcaccttttgctgaacgccagtcacggcgcctttctgccccttggtttgaaggtcacaattgtggggctatacctggccgtgtgtgttgggggtcttctgggaaattgcctagtcatgtacgttatcttgaggcataccaaaatgaagacagcaaccaacatatacatctttaatcttgccctcgcagatacattagtactgttaactttaccattccagggaacagacatcctgctgggattctggcctttcgggaacgcgctttgcaaaaccgtgattgcaatagattattacaacatgtttacctcgacctttaccctgacagccatgtctgtggaccgttatgtggcaatttgtcatcctattagagccctggacgtgaggaccagctccaaagctcaggcagtcaacgtggcgatctgggcgctggcttctgtagtgggcgttcctgtggctataatgggatcagcacaagtagaggatgaggaaattgaatgtctcgtggagattcctactcctcaggactactgggggccagtgttcgccatatgtatatttcttttttcttttatcgtccctgtcctggtcatttcagtctgttacagtctgatgatcagacgcctgcgtggcgtccggctgctgtcaggaagcagggagaaagacagaaatttgcggagaattacccgactcgtgctggtcgtcgtcgctgtgtttgtcggctgttggacacctgtgcaggttttcgttttggctcagggactgggagttcagcctagcagcgagacagccgtggccatcctgagattttgcacagcacttggctacgtcaattcctgtctgaacccgatactgtatgccttcctggatgagaatttcaaagcctgttttcgtaaattttgctgcgccagcgctttgaggagagatgtgcaagtgtctgatcgggtgcggtccatcgcaaaggacgtagctttagcatgtaagacctctgagaccgtcccgcgccccgcctag

SEQ ID NO: 78871 - DNA, 1113 bp, Artificial Sequence
  derived and/or modified sequence
atggaaccattattccctgccccattttgggaggttatttatggatcacatctgcaaggcaatttgtctctcctctccccaaatcattcactgcttcctccacatttgctcctcaacgcatcccacggggcttttcttcctttgggcctgaaggtgactatagtgggattgtacctcgcggtgtgtgtgggaggactcctgggaaactgccttgtaatgtacgttatactgaggcacaccaagatgaaaaccgccaccaatatttacatctttaatctcgctctcgctgataccttagtcttattaaccctgccattccaaggaacagatatcctgttggggttttggccttttggaaatgccctttgcaagacagtgatagcaatcgactactacaatatgtttacatctacctttacactgactgctatgtccgtagaccggtacgtagctatctgtcaccctatcagagcacttgacgtgagaacctcttccaaggcccaggcggtcaatgtagcaatctgggctctcgcgagcgtggtcggagtgcccgtggctattatgggtagcgcccaggtggaagatgaggaaattgagtgtctcgtcgagattccgacccctcaggactattgggggcctgtcttcgctatttgcatcttcctctttagcttcatagtgcctgtgctcgtgatcagcgtctgctacagcctgatgattcggagattaagaggggttcgtcttctgtctggcagtcgtgaaaaagaccggaacctccggaggatcactaggcttgtgctggtggtcgtggcagtgttcgttgggtgctggacccccgtgcaggtgtttgtgctcgctcagggcctgggcgtccagccctctagcgaaacagcggtcgccatcctgaggttctgtaccgcccttgggtacgtgaacagctgtttgaacccaatcctgtacgcgtttctggacgagaattttaaggcctgttttcgcaaattttgctgcgcttctgcattgcgccgagatgtccaggtgtctgacagagtgcggagtatcgctaaggacgtggccttggcatgcaagacctccgagactgtcccaaggcctgcttag

SEQ ID NO: 78872 - DNA, 1113 bp, Artificial Sequence
  derived and/or modified sequence
atggagccgttattccccgcaccattctgggaggtgatctatggatcccacctgcagggaaacctttccctgctttctccaaaccatagccttcttcctccgcaccttctgctgaatgcaagccacggcgctttcctgccacttggacttaaagtaactattgttggtctctacttggccgtttgtgttgggggactcctgggtaattgcctggtgatgtacgttattctgcggcacaccaaaatgaaaaccgctaccaacatctatatatttaacctcgcactagccgacaccctcgtcctcctgacactgccgtttcaggggacagacattctgctgggcttttggccgttcgggaacgccttatgtaaaactgtgattgctatcgattactacaacatgttcacctctaccttcaccttgacagcaatgagcgtcgatcggtacgttgcgatttgccatcccattcgggctttggatgtgcgaacctcctccaaagcccaggccgtaaatgtcgctatctgggccctagccagcgtggtgggagttccagtcgccattatgggttcagcccaagtggaagacgaggagatcgagtgtctggtggagattcccactcctcaggattattgggggcctgtttttgctatttgtattttcttattcagctttatcgtgcctgtcctcgtcattagcgtttgttactcccttatgatcaggagacttcgcggagttagacttttgtccggcagccgtgaaaaggataggaacttaaggaggatcacacgcttggtcttggtcgtcgtcgccgtgttcgtgggatgctggaccccagtccaggttttcgtgcttgctcaagggctcggggttcagcctagttccgagacggctgttgccattctgaggttctgcacagccctggggtatgtaaactcctgtttgaatcccatcttatatgcctttctggacgaaaatttcaaggcttgcttcaggaagttctgctgcgcctccgcgctgcggagagacgtccaggtgagcgaccgagtaagatcgattgcaaaggatgtggctcttgcctgcaagacttctgagacagtacctcgacccgcttag

SEQ ID NO: 78873 - DNA, 1113 bp, Artificial Sequence
  derived and/or modified sequence
atggaaccacttttccctgctccattttgggaagtgatctacggtagtcatctgcagggaaatctgagtttgttgtccccgaatcactctctgctcccgcctcatttgctgctgaatgctagtcatggagcctttcttccgcttggcttaaaggtgaccattgttggactgtaccttgctgtgtgcgtcggcggtctgctcggcaactgtctggtcatgtacgtgatcctgcggcacaccaagatgaaaactgccaccaatatttacatattcaatctggctctggctgacaccttggtgttattgacactaccgtttcagggtacggacattcttttaggtttttggccttttggtaacgccctctgcaaaacggttatagctatcgactactataatatgttcaccagtacattcactctgacagcaatgagcgtggataggtacgttgccatctgtcatcccatccgggcattagacgtaagaacaagtagcaaagcacaggctgttaacgttgcaatctgggccctggccagtgtcgtcggggtgcccgtcgcgatcatgggaagtgcccaagtggaggacgaagagatcgagtgtttggttgagatcccgacaccacaggactactggggtcccgtctttgccatttgcattttcctgtttagctttattgttccagtactggtcatatctgtttgttactctttaatgatcaggcgactcagaggagtgagactgctttccggttccagagaaaaggacagaaatctccggaggattaccaggttggtgttggtggtggttgctgtgtttgtgggatgctggacccctgtgcaggttttcgttctggcccaggggttaggcgttcagccttcctcagaaacggcggtggccatcctaaggttctgtacagctctcgggtacgtgaacagttgtctcaacccaatcctgtatgccttcctagacgagaactttaaagcctgtttcaggaaattttgttgtgcttcagccctgcggagggatgtgcaggtgtctgatcgggtccggagcatagccaaggacgttgcattggcctgcaaaacctccgagacagttcccaggccagcttag

SEQ ID NO: 78874 - protein, 387 aa, Artificial Sequence
  derived and/or modified sequence
MTTQLGPALVLGVALCLGCGQPLPQVPERPFSVLWNVPSAHCEARFGVHLPLNALGIIANRGQHFHGQNMTIFYKNQLGLYPYFGPRGTAHNGGIPQALPLDRHLALAAYQIHHSLRPGFAGPAVLDWEEWCPLWAGNWGRRRAYQAASWAWAQQVFPDLDPQEQLYKAYTGFEQAARALMEDTLRVAQALRPHGLWGFYHYPACGNGWHSMASNYTGRCHAATLARNTQLHWLWAASSALFPSIYLPPRLPPAHHQAFVRHRLEEAFRVALVGHRHPLPVLAYVRLTHRRSGRFLSQEECWHLHDYLVDTLGPYVINVTRAAMACSHQRCHGHGRCARRDPGQMEAFLHLWPDGSLGDWKSFSCHCYWGWAGPTCQEPRPGPKEAV

SEQ ID NO: 78875 - protein, 138 aa, Artificial Sequence
  derived and/or modified sequence
MLPPAHHQAFVRHRLEEAFRVALVGHRHPLPVLAYVRLTHRRSGRFLSQEECWHLHDYLVDTLGPYVINVTRAAMACSHQRCHGHGRCARRDPGQMEAFLHLWPDGSLGDWKSFSCHCYWGWAGPTCQEPRPGPKEAV

SEQ ID NO: 78876 - DNA, 1164 bp, Artificial Sequence
  derived and/or modified sequence
atgaccacccagctgggccccgccctggtgctgggcgtggccctgtgcctgggctgcggccagcccctgccccaggtgcccgagagacccttcagcgtgctgtggaacgtgcccagcgcccactgcgaggccagattcggcgtgcacctgcccctgaacgccctgggcatcatcgccaacagaggccagcacttccacggccagaacatgaccatcttctacaagaaccagctgggcctgtacccctacttcggccccagaggcaccgcccacaacggcggcatcccccaggccctgcccctggacagacacctggccctggccgcctaccagatccaccacagcctgagacccggcttcgccggccccgccgtgctggactgggaggagtggtgccccctgtgggccggcaactggggcagaagaagagcctaccaggccgccagctgggcctgggcccagcaggtgttccccgacctggacccccaggagcagctgtacaaggcctacaccggcttcgagcaggccgccagagccctgatggaggacaccctgagagtggcccaggccctgagaccccacggcctgtggggcttctaccactaccccgcctgcggcaacggctggcacagcatggccagcaactacaccggcagatgccacgccgccaccctggccagaaacacccagctgcactggctgtgggccgccagcagcgccctgttccccagcatctacctgccccccagactgccccccgcccaccaccaggccttcgtgagacacagactggaggaggccttcagagtggccctggtgggccacagacaccccctgcccgtgctggcctacgtgagactgacccacagaagaagcggcagattcctgagccaggaggagtgctggcacctgcacgactacctggtggacaccctgggcccctacgtgatcaacgtgaccagagccgccatggcctgcagccaccagagatgccacggccacggcagatgcgccagaagagaccccggccagatggaggccttcctgcacctgtggcccgacggcagcctgggcgactggaagagcttcagctgccactgctactggggctgggccggccccacctgccaggagcccagacccggccccaaggaggccgtgtag

SEQ ID NO: 78877 - DNA, 1164 bp, Artificial Sequence
  derived and/or modified sequence
atgactacccaactgggccctgctttggtcctgggggtagcactgtgtctgggctgtgggcagcccttgccccaggtcccagaaaggcccttcagcgtgctgtggaatgtgccatcggcccattgcgaggcaagattcggcgtccaccttcccctaaatgccttggggattatcgctaatcgtgggcaacattttcacgggcagaacatgacgattttttataagaaccagctgggtttgtatccttacttcggcccaaggggcacagctcacaatgggggcatccctcaggcgctgccccttgaccgtcatctcgccctcgcagcctaccagattcaccatagcttgaggcctggcttcgctgggcccgccgtgctggattgggaggaatggtgccctctatgggctggtaattggggccggagacgcgcctaccaagctgccagctgggcttgggctcaacaagtgtttccagacctggacccccaagagcagctctacaaagcatacacaggtttcgagcaggccgctagggccctcatggaggacacactgcgggttgcccaagcattgagaccgcacggtctgtggggcttttaccattatcccgcctgtggaaatggttggcatagtatggcttcaaactacactgggcggtgtcacgcggccacccttgcccgtaacacccaactgcattggttgtgggctgcctcgagcgctctattccccagtatctatctccccccacgcctccccccggcccaccaccaggcatttgtgcggcatcggcttgaggaggcttttagagtcgcgcttgtggggcaccgacacccactcccagtgctggcgtacgtgagactgacccaccggcggtctggccgctttctgtcccaggaggagtgctggcacctccatgactacctggttgataccctggggccgtacgtgattaatgtgacacgcgccgcaatggcctgttctcatcagcgctgccacggacacggtcgatgcgcccggagagaccccggacaaatggaggcgttcctccacctttggcccgacggatctctcggggactggaagtctttctcgtgtcactgctattggggatgggccggcccgacgtgtcaggagccaaggcccggcccaaaggaggccgtctag

SEQ ID NO: 78878 - DNA, 1164 bp, Artificial Sequence
  derived and/or modified sequence
atgaccacccagctgggccctgccctggtgctgggcgtggccctgtgcctgggctgcggccagcccctgccccaggtgcctgagcggcccttctctgtgctgtggaatgtgcccagcgcccactgtgaggcccgcttcggcgtgcacctgcccctgaatgccctgggcatcatcgccaacagaggccagcacttccacggccagaacatgaccatcttctacaagaaccagctgggcctgtacccctacttcggcccccggggcacagcccacaacggcggcatcccccaggccctgcccctggacagacacctggccctggccgcctaccagatccaccacagcctgcggcccggctttgctggccctgctgtgctggactgggaggagtggtgccccctgtgggccggcaactggggcagaagaagagcctaccaggccgcctcctgggcctgggcccagcaggtgtttcctgacctggacccccaggagcagctgtacaaggcctacacaggctttgagcaggccgcccgggccctgatggaggacaccctgcgggtggcccaggccctgcggccccacggcctgtggggcttctaccactacccagcctgtggaaatggctggcacagcatggccagcaactacacaggccgctgccacgccgccaccctggccaggaacacccagctgcactggctgtgggccgccagcagcgccctcttccccagcatctacctgcccccccggctgcccccagcccaccaccaggcctttgtgcgccaccggctggaggaggccttccgggtggccctggtgggccaccgccaccccctgcctgtgctggcctacgtgcggctgacccaccggcgcagcggccgcttcctgagccaggaggagtgctggcacctgcatgactacctggtggacaccctgggcccctacgtgatcaacgtgacccgggccgccatggcctgcagccaccagcgctgccacggccacggccgctgtgcccggcgggaccccggccagatggaggccttcctgcacctgtggccagatggcagcctgggggactggaagagcttcagctgccactgctactggggctgggccggccccacctgccaggagcccaggcctggccccaaggaggccgtgtag

SEQ ID NO: 78879 - DNA, 1635 bp, Artificial Sequence
  derived and/or modified sequence
gaccaaagggtgcggctgctgcagaggtggctgatgcaggtttccatccttggggaatgaccacgcaactgggcccagccctggtgctgggggtggccctgtgcctgggttgtggccagcccctaccacaggtccctgaacgccccttctctgtgctgtggaatgtaccctcagcacactgtgaggcccgctttggtgtgcacctgccactcaatgctctgggcatcatagccaaccgtggccagcattttcacggtcagaacatgaccattttctacaagaaccaactcggcctctatccctactttggacccaggggcacagctcacaatgggggcatcccccaggctttgccccttgaccgccacctggcactggctgcctaccagatccaccacagcctgagacctggctttgctggcccagcagtgctggattgggaggagtggtgtccactctgggctgggaactggggccgccgccgagcttatcaggcagcctcttgggcttgggcacagcaggtattccctgacctggaccctcaggagcagctctacaaggcctatactggctttgagcaggcggcccgtgcactgatggaggatacgctgcgggtggcccaggcactacggccccatggactctggggcttctatcactacccagcctgtggcaatggctggcatagtatggcttccaactataccggccgctgccatgcagccacccttgcccgcaacactcaactgcattggctctgggccgcctccagtgccctcttccccagcatctacctcccacccaggctgccacctgcccaccaccaggcctttgtccgacatcgcctggaggaggccttccgtgtggcccttgttgggcaccgacatcccctgcctgtcctggcctatgtccgcctcacacaccggagatctgggaggttcctgtcccaggaggagtgctggcatctccatgactacctggtggacaccttgggcccctatgtgatcaatgtgaccagggcagcgatggcctgcagtcaccagcggtgccatggccacgggcgctgtgcccggcgagatccaggacagatggaagcctttctacacctgtggccagacggcagccttggagattggaagtccttcagctgccactgttactggggctgggctggccccacctgccaggagcccaggcctgggcctaaagaagcagtataaagccagggcccctgccactgcctcttcttttccctgctgccacttttccagtcctggaactactctgtcccactcttgctctattcagtttacagtcaaccctcccaagcacacaccccgcttcccttggaatccctgaggggtagaaggggccagaaaaaacgcttataaaaccagaggccctctgagatcatgtgagtcctccatggcaaggaagcagttccagggagagtcaggttccagctagttagggctgccagcctagggctttgtgcctacacctcactaagcccatggagaggtcacagatgggccgtgcacgggcagatgggccccaaaaaatcttggcgaaggtcggtaaagtgctaagctgttgtctgcactctttcatcataaagtcacttttttccactgc

SEQ ID NO: 78880 - DNA, 1164 bp, Artificial Sequence
  derived and/or modified sequence
atgaccacccagctgggccccgccctggtgctgggcgtggccctgtgccttggctgcggccagcctctaccacaggttcccgagcgccccttctcagtgctttggaatgtgcccagtgcccattgtgaggctcgcttcggcgtgcacctgccgctgaatgctcttggaattattgcaaatcgaggccagcacttccacggccaaaatatgacaatcttctacaagaatcaattggggttgtacccctactttggtcctagaggcaccgcccataacggaggtatcccacaggcactgcctctggacagacatttggcccttgctgcttatcagatccaccactcactgcggccaggttttgcaggtccagcagtgcttgactgggaagagtggtgtccactctgggccggaaattggggacggagacgggcatatcaggctgcatcatgggcatgggcccaacaagtgttccctgacctcgatccacaagagcaactttacaaagcgtataccggattcgaacaggctgcaagagctctaatggaagataccctgagagtagcacaagccctgagaccacacggcctgtggggcttctaccattaccctgcatgtggaaatggatggcactccatggccagtaactataccggacgttgtcatgcagccaccctagcgagaaatacccagcttcattggctctgggccgcctcttccgcgctctttccatctatctacttgccccctcgacttccaccggcgcaccaccaggcctttgtgagacataggctcgaagaagcctttagagtggccctggtaggccatcggcacccactgccagtcctggcgtatgtacgacttacccaccggcgttctggcaggtttttgagtcaggaagaatgctggcatctgcacgactatctggtggatactctggggccttacgttatcaatgtcaccagggcagctatggcatgtagccaccagagatgtcatggccacgggcgatgtgctcgccgggatcctggccagatggaagccttcctccatttgtggcccgacgggtctcttggagactggaagtccttctcctgccattgttattggggatgggccgggccaacatgtcaagaacccagaccaggccccaaagaggcggtatag

SEQ ID NO: 78881 - DNA, 1164 bp, Artificial Sequence
  derived and/or modified sequence
atgactacgcagttgggaccagcacttgtcctgggcgtggcgctctgtctggggtgcggacagccattgccacaagtgcctgaacggcctttctccgtgctgtggaacgttcctagcgcccactgcgaggctcggtttggggtgcacctgccactaaacgcattagggattattgccaataggggccagcactttcacggtcagaacatgaccattttttataagaatcagttgggactctacccctattttggccctcggggaacagcgcataatggcggaatcccccaggcgctgccactggatcgtcatctggccctggctgcctaccagatccaccactcgctgcgtccaggttttgcaggcccagcagtgttggactgggaagagtggtgccccctttgggcagggaactggggacggcgtagagcatatcaagccgcatcctgggcctgggcccaacaggtgttcccagacctggatcctcaggagcagctgtataaggcctatactggcttcgagcaggcagccagggccctcatggaggataccctgagagtggcgcaggccctgagaccacatggactctgggggttctatcactatcccgcatgtggcaatgggtggcactcaatggcttcaaattacacaggcaggtgtcacgccgcaactctggctcgcaatactcaactgcactggctgtgggctgcatcttctgctctgttcccatcaatctaccttcctcctagactgccgcctgcacaccaccaagccttcgttagacatcgtctcgaagaggcctttcgtgtggccctggtggggcatcggcacccactgcccgtgctcgcttatgtccgcctgacgcaccgccgtagcggacggttcctgagccaagaggagtgctggcacctccatgactatctggtggacactttagggccatacgtgatcaacgtcacgagggctgccatggcctgttctcaccaacgctgtcatgggcatggaaggtgtgcgagacgcgaccctggacaaatggaagccttcctgcatctctggcccgacggcagcctcggggactggaaatccttctcatgtcactgttactggggatgggccggacctacttgccaggaaccccgtccaggtcccaaagaggccgtctag

SEQ ID NO: 78882 - DNA, 1164 bp, Artificial Sequence
  derived and/or modified sequence
atgactacacagttaggacccgcgctggtgttgggcgtagcgttatgtctgggttgcggacagccgctgccgcaggtgcccgaacgtcccttctctgtactttggaacgtaccgagcgctcactgtgaagccaggtttggcgtccacctgccattgaatgccctcgggattattgccaatcgcgggcaacacttccatgggcagaacatgacaatcttttacaagaaccagctgggcctgtacccctacttcggacctaggggaactgcacacaatggaggcattccgcaggcactccctctcgacagacacctggcactggctgcataccagattcatcactcgctgcggcctggatttgccggaccggccgtccttgactgggaagaatggtgtcctctttgggctggtaactggggccgcaggcgggcttatcaggcggcatcatgggcctgggcgcagcaggtcttcccggacctggacccacaggagcagctgtataaggcatacaccgggttcgaacaagccgccagagcgctgatggaagatacactgagagtggcacaggccttgaggcctcacggcctgtggggattctaccactatcctgcatgcggtaatgggtggcacagcatggccagcaactataccggccgatgtcacgctgcaacactggcacggaacacacagttgcattggctgtgggccgctagttcagcactgttcccgtccatctacttaccccctcgactgcctcccgcacaccatcaggccttcgtgaggcatcgcctggaggaggcatttagagtggcactggtaggacaccgtcacccgctgccagttctggcatacgttcgactgacacaccggagatcagggcgctttcttagccaagaggagtgctggcacctccatgactatctggtagacacactgggcccatatgttatcaatgtcaccagggctgccatggcctgcagccatcagcggtgtcacggtcatggtcgctgcgctcggcgggaccccggtcagatggaggccttcctgcacctatggcctgatgggtctcttggcgattggaagtcatttagctgtcactgttattgggggtgggctggtccaacgtgtcaggagcccagaccggggccgaaagaggctgtctag

SEQ ID NO: 78883 - DNA, 483 bp, Artificial Sequence
  derived and/or modified sequence
atgactacccagttgggccctgctcttgtgctaggggtagctttgtgtttaggctgcggtcaaccgctgcctcaggttccggaaaggcccttctccgtgctgtggaacgttccaagcgcacactgcgaagctagattcggcgtccatttgccgctaaacgccctcggcatcatcgcaaaccgtggacagcattttcacggccagaacatgactatcttttataaaaaccagcttggattgtatccttactttggcccccggggaaccgctcacaacggaggtatccctcaagccttgcctctagatagacatttagcactagctgcataccaaattcatcactcgctccgccccggattcgccggccccgctgtcctggactgggaagagtggtgccctttatgggctgggaactggggcagacggcgagcttaccaggcggcatcttgggcctgggcacagcaagtatttccggacttgtag

SEQ ID NO: 78884 - DNA, 1164 bp, Artificial Sequence
  derived and/or modified sequence
atgactactcagctcggaccagccctggtgttgggggtggctctgtgcctgggctgtgggcagccgctccctcaggttcccgaacggccgttttctgttctttggaacgtgccttccgcccactgtgaagccaggttcggagtgcatcttcctttgaatgccttagggatcatcgcaaacagggggcagcattttcatggccagaatatgactattttctataagaaccagctcggactgtacccttatttcggccctcgcgggacggctcacaatggtggcattccacaggccttgccactagatagacacctggctctggcagcctaccagattcaccacagcctgcgccccgggttcgctgggcccgccgtgctcgattgggaggaatggtgcccactttgggcgggaaattggggtaggaggcgggcctatcaagctgcgagctgggcctgggcccaacaggtctttccagatcttgatccacaggagcagctgtataaagcgtataccggctttgaacaggccgcacgagccttaatggaagatactctgagagttgcccaggcattacggccacatggcctctgggggttctatcattatccagcatgcggaaacggctggcactccatggcctccaattacactggcaggtgtcatgccgccactctcgcaaggaacacccaactacactggctgtgggctgcctcaagcgcgttgtttcctagtatatacctccccccacgactgcccccagcacatcaccaggccttcgtgagacaccgcttggaggaggcattcagggtggccctggtcgggcaccgccatcctttgcccgtgctggcctatgtcagactgacacacaggcgcagcggccgtttcctatcccaagaggaatgctggcatctgcacgactacttagtggacactctgggaccctacgtcattaacgtgactagagccgccatggcgtgttcacatcagcgctgccatggccacggccgctgtgcacgccgcgatcctggacagatggaggccttcctacatttatggcccgatggatccttgggggactggaagtccttttcttgccactgctactgggggtgggcaggccctacctgccaggagcctcggccaggaccaaaagaggcagtgtag

SEQ ID NO: 78885 - DNA, 545 bp, Artificial Sequence
  derived and/or modified sequence
aaaaggcccaagagacccctggggaaacatgctttccccagctcctcctgtttccatccttggggaatgaccacgcaactgggcccagccctggtgctgggggtggccctgtgcctgggttgtggccagcccctaccacaggtccctgaacgccccttctctgtgctgtggaatgtaccctcagcacactgtgaggcccgctttggtgtgcacctgccactcaatgctctgggcatcatagccaaccgtggccagcattttcacggtcagaacatgaccattttctacaagaaccaactcggcctctatccctactttggacccaggggcacagctcacaatgggggcatcccccaggctttgccccttgaccgccacctggcactggctgcctaccagatccaccacagcctgagacctggctttgctggcccagcagtgctggattgggaggagtggtgtccactctgggctgggaactggggccgccgccgagcttatcaggcagcctcttgggcttgggcacagcaggtattccctgacct

SEQ ID NO: 78886 - DNA, 1402 bp, Artificial Sequence
  derived and/or modified sequence
ccagaggccagcatcaacatgtttccatccttggggaatgaccacgcaactgggcccagccctggtgctgggggtggccctgtgcctgggttgtggccagcccctaccacaggtccctgaacgccccttctctgtgctgtggaatgtaccctcagcacactgtgaggcccgctttggtgtgcacctgccactcaatgctctgggcatcatagccaaccgtggccagcattttcacggtcagaacatgaccattttctacaagaaccaactcggcctctatccctactttggacccaggggcacagctcacaatgggggcatcccccaggctttgccccttgaccgccacctggcactggctgcctaccagatccaccacagcctgagacctggctttgctggcccagcagtgctggattgggaggagtggtgtccactctgggctgggaactggggccgccgccgagcttatcaggcagcctcttgggcttgggcacagcaggtattccctgacctggaccctcaggagcagctctacaaggcctatactggctttgagcaggcggcccgtgcactgatggaggatacgctgcgggtggcccaggcactacggccccatggactctggggcttctatcactacccagcctgtggcaatggctggcatagtatggcttccaactataccggccgctgccatgcagccacccttgcccgcaacactcaactgcattggctctgggccgcctccagtgccctcttccccagcatctacctcccacccaggctgccacctgcccaccaccaggcctttgtccgacatcgcctggaggaggccttccgtgtggcccttgttgggcaccgacatcccctgcctgtcctggcctatgtccgcctcacacaccggagatctgggaggttcctgtcccaggaggagtgctggcatctccatgactacctggtggacaccttgggcccctatgtgatcaatgtgaccagggcagcgatggcctgcagtcaccagcggtgccatggccacgggcgctgtgcccggcgagatccaggacagatggaagcctttctacacctgtggccagacggcagccttggagattggaagtccttcagctgccactgttactggggctgggctggccccacctgccaggagcccaggcctgggcctaaagaagcagtataaagccagggcccctgccactgcctcttcttttccctgctgccacttttccagtcctggaactactctgtcccactcttgctctattcagtttacagtcaaccctcccaagcacacaccccgcttcccttggaatccctgaggggtagaaggggccagaaaaaacgcttataaaaccagaggccctctgagatcatgtgagtc

SEQ ID NO: 78887 - DNA, 483 bp, Artificial Sequence
  derived and/or modified sequence
atgaccacccagctgggccctgccctggtgctgggcgtggccctgtgcctgggctgcggccagcccctgccccaggtgcctgagcggcccttctctgtgctgtggaatgtgcccagcgcccactgtgaggcccgcttcggcgtgcacctgcccctgaatgccctgggcatcatcgccaacagaggccagcacttccacggccagaacatgaccatcttctacaagaaccagctgggcctgtacccctacttcggcccccggggcacagcccacaacggcggcatcccccaggccctgcccctggacagacacctggccctggccgcctaccagatccaccacagcctgcggcccggctttgctggccctgctgtgctggactgggaggagtggtgccccctgtgggccggcaactggggcagaagaagagcctaccaggccgcctcctgggcctgggcccagcaggtgtttcctgacctgtag

SEQ ID NO: 78888 - DNA, 1164 bp, Artificial Sequence
  derived and/or modified sequence
atgaccacccagctgggccccgccctggtgctgggcgtggccctgtgtctgggatgcggacagccattgcctcaggtccctgagcgcccctttagcgtgctgtggaacgtgccctctgcccactgcgaggctcgattcggagtccacctccctctcaatgctctgggcataatcgccaaccgtgggcagcatttccacggccagaacatgacaatattctacaaaaatcagctcggactatatccttatttcggcccacgaggaaccgcccataacggtggaattcctcaggcgttaccattggacagacatttggctttggccgcataccaaatccatcactcacttcgccctggcttcgccggaccagccgtcctggactgggaggaatggtgtcccctgtgggccgggaattgggggcggcgccgcgcttaccaggccgctagctgggcatgggcccaacaggtgttccctgacctggaccctcaggaacagctatacaaagcctataccggcttcgagcaggccgctcgggccctgatggaggatacattaagagtggctcaagctctgcgcccacatggcctatggggcttctaccactatcccgcatgcggcaacgggtggcattcaatggcatccaattacaccggaagatgccacgctgccactctggcaaggaatacccagctgcactggctgtgggcagccagcagtgccctgttcccttcaatttacctccctcccaggttaccccctgcacatcaccaggcatttgtaagacatagactggaagaggccttccgagtggccctggtgggacatcgccaccccttgcctgtcctggcctatgtgcgtcttacacacaggcgctcgggaaggttcttgtcccaagaggagtgttggcacctccacgactatttagtggacaccttgggtccttatgtcattaacgtgacacgcgccgctatggcgtgtagccaccaaaggtgtcacggacacggacgatgtgctcggcgggaccccgggcagatggaggctttccttcatctttggcccgacgggtctttgggcgactggaagtcgttctcctgtcactgttattggggctgggcgggtccaacttgtcaggaaccccgtccagggcccaaggaggcggtatag

SEQ ID NO: 78889 - DNA, 483 bp, Artificial Sequence
  derived and/or modified sequence
atgaccacccagctgggccccgccctggtgctgggcgtggccctgtgccttggctgcggccagcccctgcctcaagtgccagaaagaccctttagcgtgctgtggaacgtgccatctgcgcattgtgaggcaagattcggtgtgcatctgccactcaacgccctgggaatcatcgcaaaccgaggacaacactttcacgggcagaatatgactatattctacaaaaaccagctcggcctgtatccttatttcggcccgcgcggcaccgcccacaatgggggcattccacaggcgctgcccctagatcgccacctggcacttgcagcttaccaaatacaccatagcctgagaccaggtttcgccggacctgctgtgttggactgggaagaatggtgcccgctttgggctggaaactgggggcgcagacgtgcataccaggcagcatcttgggcctgggcgcagcaggtctttcccgatttatag

SEQ ID NO: 78890 - DNA, 1164 bp, Artificial Sequence
  derived and/or modified sequence
atgaccacccagctgggccccgccctggtgctgggcgtggccctgtgtttggggtgtggtcagcccctcccacaagtgcctgagcgtccattcagcgtactctggaatgtccctagcgctcactgcgaagcccggtttggggtgcatctgccgttgaatgcactcggcataatcgccaatagagggcaacactttcacgggcaaaatatgacgattttttataaaaatcagctgggactgtacccctactttggcccccgcggcactgctcacaatggcggcataccccaggcactgccactggaccgtcacttggcactagcagcctaccagatccatcacagtctgcgacctggtttcgctggcccagctgtgctggactgggaagaatggtgccctctatgggctggcaactgggggcgccgccgggcttatcaggccgctagctgggcttgggcgcagcaggtgttcccagacttagaccctcaggaacagctgtacaaagcctatactgggtttgagcaggctgcaagggcactcatggaagatacactgcgggtcgcgcaggcactgagaccacacgggctgtgggggttctatcattatccagcctgcggcaatggatggcatagtatggcctctaactatacgggccgatgccatgctgctacattggctcgcaatactcagcttcactggctgtgggcagcctcctcagccttgtttccaagcatctacctcccacctcggttacccccggcccaccatcaagcctttgtccggcatagactggaggaggcgttccgtgtcgctctggtgggacaccgccacccgctgcctgtgttggcttacgttcgcctgacacaccggcggtctggcagattcctctctcaggaggaatgctggcacttgcatgattatctcgtagacacactcgggccttatgttatcaatgtaacacgtgcagccatggcatgttcgcatcagcgctgtcacgggcatggcagatgcgcaagacgagatcctgggcaaatggaagcttttctgcacctgtggcccgacggcagcctgggcgactggaagagtttttcctgccattgctactgggggtgggccggtccaacatgccaggaacctaggcctgggcccaaggaggccgtctag

SEQ ID NO: 78891 - DNA, 1164 bp, Artificial Sequence
  derived and/or modified sequence
atgaccactcaattgggtcccgcactcgtcctcggtgtcgccctgtgtctcggttgtgggcagccacttccacaggttcctgaaagacctttctcagtgctgtggaatgttccaagcgcacattgtgaagctcgctttggcgtccacctgccactgaacgctttaggtatcattgccaatcgcggtcagcacttccatggccagaatatgactatcttctacaagaaccagctggggctttacccttacttcggcccaagaggaacggcccataacgggggtattccacaggccctaccgttggaccgacacttggccctcgctgcataccagatccaccattccctgcggcctgggtttgccggacctgccgttcttgactgggaggaatggtgtcctctctgggcaggaaattggggccgtcgtcgtgcttaccaagcagccagttgggcctgggctcagcaggttttcccagacttggatccccaagaacaactctacaaagcctatactggctttgagcaggccgctagggcactgatggaagacacactcagagtggcgcaggcgttacgccctcacggattatggggcttctatcactatcctgcttgcgggaacggatggcatagcatggcctcaaactacacaggtaggtgccacgccgctaccctggcaagaaacacccagcttcactggctgtgggccgcatccagtgccctgttcccgagtatctacttacccccaaggctccctccagcccatcatcaggccttcgtgagacaccgactcgaggaggcctttcgtgtggctcttgtggggcatcggcaccctctgcctgtgcttgcatatgtgcgcttgacccatcgccgttcgggcaggttcttatcacaggaggagtgctggcatctgcatgactacctcgtggacacactcggaccatatgtgattaacgtgactcgcgcagccatggcctgttcgcatcagaggtgtcacgggcacggaagatgcgccaggcgcgatcccggtcagatggaagcatttctgcatctttggcccgacggatctctgggagattggaaaagtttctcgtgccactgttactggggctgggcaggcccaacctgtcaagagccgagaccaggaccaaaggaggcggtgtag

SEQ ID NO: 78892 - DNA, 483 bp, Artificial Sequence
  derived and/or modified sequence
atgacaacccagctgggccctgcactagttctgggtgtagcattgtgtctggggtgcgggcaaccgctcccgcaggtgcctgaaagacctttttccgtgctctggaacgtgccatccgcccattgcgaggctcgcttcggtgtgcatctcccactgaatgccctcggcataatagccaatcgcggtcagcacttccatgggcagaacatgaccattttttacaagaaccagctaggcctgtatccttattttggccctcgcggtactgcccacaacggagggattccgcaggcactgcccttggaccggcatcttgccctagcagcgtaccaaattcaccacagtctgaggcccggtttcgccggacccgctgtacttgattgggaagagtggtgccccctctgggccggaaactggggacgaaggcgagcctatcaggcggcttcatgggcgtgggcccaacaggtctttcccgacctgtag

SEQ ID NO: 78893 - DNA, 1164 bp, Artificial Sequence
  derived and/or modified sequence
atgactactcagctaggccctgctcttgtcctcggagtagccttgtgtctcggctgtggccagccccttccccaggtaccagaacgcccatttagcgtcctgtggaacgtcccgtcagcacattgcgaagcaagattcggcgtgcacctacctctgaatgccctggggattattgctaatagggggcagcactttcatggtcaaaacatgaccatcttttataagaatcaactcggtctgtatccttactttggaccgaggggcactgcgcacaacggaggaatcccccaggcactgccccttgaccggcacttggcactggccgcttatcagattcaccacagcctccgccctggattcgcaggtcctgccgtcttggattgggaagagtggtgtcccttatgggctggcaactggggtcggaggcgcgcataccaggcagccagctgggcgtgggctcagcaagtgttccccgacctggatccccaggagcaactgtacaaggcttacacgggcttcgagcaagcagctcgcgcactaatggaggatactttgcgcgtggcccaagcactacgtccacacggactgtggggcttctaccactatcctgcgtgtggcaacgggtggcattcaatggcttcaaattacacggggaggtgtcatgccgctaccctcgcacgtaacactcagttacattggctttgggcagcaagcagtgcactctttccctccatttatttgcctccacgcctcccacctgctcaccaccaggccttcgtccgccatcgcctggaggaagcgttcagggttgctctggtgggacatcggcatcccctccccgtgttggcatatgtgagactgactcaccgccgatctggacgcttcctatcacaggaggaatgttggcatcttcacgattacctggttgacacactagggccatacgtgatcaacgtgacccgcgctgctatggcttgctcacaccagcgctgccacgggcatggcagatgcgcccgaagggaccccggacagatggaggcttttctccacctgtggcctgatgggtctcttggggattggaaaagtttctcctgccactgttactggggctgggcgggacctacgtgtcaggagccgagacctggaccaaaggaggcagtgtag

SEQ ID NO: 78894 - DNA, 483 bp, Artificial Sequence
  derived and/or modified sequence
atgaccacccagctgggccccgccctggtgctgggcgtggccctgtgcctgggctgcggccagcccctgccccaggtgcccgagagacccttcagcgtgctgtggaacgtgcccagcgcccactgcgaggccagattcggcgtgcacctgcccctgaacgccctgggcatcatcgccaacagaggccagcacttccacggccagaacatgaccatcttctacaagaaccagctgggcctgtacccctacttcggccccagaggcaccgcccacaacggcggcatcccccaggccctgcccctggacagacacctggccctggccgcctaccagatccaccacagcctgagacccggcttcgccggccccgccgtgctggactgggaggagtggtgccccctgtgggccggcaactggggcagaagaagagcctaccaggccgccagctgggcctgggcccagcaggtgttccccgacctgtag

SEQ ID NO: 78895 - protein, 168 aa, Artificial Sequence
  derived and/or modified sequence
MLPPAHHQAFVRHRLEEAFRVALVGHRHPLPVLAYVRLTHRRSGRFLSQDDLVQSIGVSAALGAAGVVLWGDLSLSSSEEECWHLHDYLVDTLGPYVINVTRAAMACSHQRCHGHGRCARRDPGQMEAFLHLWPDGSLGDWKSFSCHCYWGWAGPTCQEPRPGPKEAV

SEQ ID NO: 78896 - DNA, 507 bp, Artificial Sequence
  derived and/or modified sequence
atgcttccccctgctcaccaccaggccttcgtacgtcataggttggaggaagccttccgggttgcactggtgggtcatcggcacccactccccgtgctcgcatacgtacgcctgactcaccgccgcagtggcagattccttagccaggatgatttggtacaatccattggcgtctcagccgcgctcggggccgccggcgttgtcctgtggggggacctgagtctgagctcaagtgaggaagagtgttggcacttacatgactacttggtggacaccctggggccttacgtcattaacgtgacgagagccgctatggcatgctcacatcagagatgtcatggccatggaagatgcgcccggagagatccagggcagatggaggcctttctgcatctgtggcctgatggatccctgggcgattggaaatccttctcgtgccattgttactggggatgggcaggtccgacatgtcaggaacccaggcctgggcccaaagaggccgtgtag

SEQ ID NO: 78897 - DNA, 959 bp, Artificial Sequence
  derived and/or modified sequence
gcggcgacgcgcgggtgctgggaggccttagaacgccgtggcgtgccgcaggacgcgacggctgcagaacatccgccgcaccgctgggggccaacgttgtcggaccgaggagtccgaggtggcgactgagtgagatacccagctgtgcggagctaggacgcggaacatcccagaggccagcatcaacatgctgccacctgcccaccaccaggcctttgtccgacatcgcctggaggaggccttccgtgtggcccttgttgggcaccgacatcccctgcctgtcctggcctatgtccgcctcacacaccggagatctgggaggttcctgtcccaggatgaccttgtgcagtccattggtgtgagtgcagcactaggggcagccggcgtggtgctctggggggacctgagcctctccagctctgaggaggagtgctggcatctccatgactacctggtggacaccttgggcccctatgtgatcaatgtgaccagggcagcgatggcctgcagtcaccagcggtgccatggccacgggcgctgtgcccggcgagatccaggacagatggaagcctttctacacctgtggccagacggcagccttggagattggaagtccttcagctgccactgttactggggctgggctggccccacctgccaggagcccaggcctgggcctaaagaagcagtataaagccagggcccctgccactgcctcttcttttccctgctgccacttttccagtcctggaactactctgtcccactcttgctctattcagtttacagtcaaccctcccaagcacacaccccgcttcccttggaatccctgaggggtagaaggggccagaaaaaacgcttataaaaccagaggccctctgagatcatgtgagtcctccatggcaaggaagcagttccagggagagtcaggttccagctagttagggctgccagcctag

SEQ ID NO: 78898 - DNA, 507 bp, Artificial Sequence
  derived and/or modified sequence
atgctgcccccagcccaccaccaggcctttgtgcgccaccggctggaggaggccttccgggtggccctggtgggccaccgccaccccctgcctgtgctggcctacgtgcggctgacccacagaagaagtggccgcttcctgagccaggatgacctggtgcagagcattggagtgtctgctgccctgggcgctgctggggtggtgctgtggggagacctgagcctgagcagcagcgaggaggagtgctggcacctgcatgactacctggtggacaccctgggcccctacgtgatcaacgtgaccagggctgccatggcctgcagccaccagcgctgccacggccacggccgctgtgcccggcgggaccccggccagatggaggccttcctgcacctgtggccagatggcagcctgggggactggaagagcttcagctgccactgctactggggctgggccggccccacctgccaggagccccggcccggccccaaggaggccgtgtag

SEQ ID NO: 78899 - DNA, 507 bp, Artificial Sequence
  derived and/or modified sequence
atgctgccccccgcccaccaccaggccttcgtgcggcaccggctggaggaggcttttcgggtcgcactggtgggacacaggcacccacttccggtgctggcgtatgtcagactcactcacagaagaagcggtcgcttcctctcgcaggacgatctggtacaaagcatcggtgtttctgctgcgctgggagccgctggtgtggtgctgtggggcgacttgtcactcagtagttccgaggaagaatgttggcacctccacgactacctggtggacaccctgggaccatacgttataaacgtcaccagagcggccatggcctgtagtcaccagcggtgccatggacacggccgttgtgctcgcagagatcctggccagatggaagcctttttacatttgtggcccgacgggtcgttgggcgattggaaatcgttttcctgccactgttactggggttgggcgggccccacctgccaggaaccccggccgggacccaaggaggccgtgtag

SEQ ID NO: 78900 - DNA, 507 bp, Artificial Sequence
  derived and/or modified sequence
atgttgcccccagcgcaccatcaagcgtttgtgaggcaccggcttgaagaggccttcagagtggcgctagtaggacatcgccatcctctccctgtgctcgcatacgtaaggttaacccaccgtagatccggccgatttctttcccaggatgatctcgtgcagagcattggggtcagtgcggctctgggtgcggcaggagtcgtactgtggggcgacctgtcgctgtctagctccgaggaagagtgttggcacctacacgattatttggtagataccctgggaccctatgtcatcaacgtgacaagggctgccatggcttgttcacatcaaaggtgccacggccatggacgctgtgcccgacgagacccaggccagatggaggctttcctacacttatggccggatggcagcttaggagattggaagagcttttcctgtcattgttactggggatgggctggcccaacatgccaggagcccaggcctgggccaaaagaagctgtttag

SEQ ID NO: 78901 - DNA, 507 bp, Artificial Sequence
  derived and/or modified sequence
atgctgccccccgcccaccaccaggccttcgtgagacacagactggaggaggccttcagagtggccctggtgggccacagacaccccctgcccgtgctggcctacgtgagactgacccacagaagaagcggcagattcctgagccaggacgacctggtgcagagcatcggcgtgagcgccgccctgggcgccgccggcgtggtgctgtggggcgacctgagcctgagcagcagcgaggaggagtgctggcacctgcacgactacctggtggacaccctgggcccctacgtgatcaacgtgaccagagccgccatggcctgcagccaccagagatgccacggccacggcagatgcgccagaagagaccccggccagatggaggccttcctgcacctgtggcccgacggcagcctgggcgactggaagagcttcagctgccactgctactggggctgggccggccccacctgccaggagcccagacccggccccaaggaggccgtgtag

SEQ ID NO: 78902 - DNA, 417 bp, Artificial Sequence
  derived and/or modified sequence
atgctacctcctgcccaccaccaggcgttcgtgaggcaccggcttgaagaagcctttcgtgtggccctcgtagggcatcggcatccattgcctgttctggcctacgtaagactgacccatcggcggagcggccgattcctctcacaggaggaatgttggcacttgcatgactatctcgttgatacccttgggccgtatgtcatcaacgtcacccgcgctgcaatggcttgttctcatcagagatgtcacgggcacggcagatgtgccaggcgagatccaggacagatggaggccttcctacatctgtggcctgacggcagccttggggattggaagagcttttcgtgtcattgttactggggatgggccggccccacatgccaggagcctcgtcccgggcctaaggaagccgtctag

SEQ ID NO: 78903 - DNA, 636 bp, Artificial Sequence
  derived and/or modified sequence
ccagaggccagcatcaacatgctgccacctgcccaccaccaggcctttgtccgacatcgcctggaggaggccttccgtgtggcccttgttgggcaccgacatcccctgcctgtcctggcctatgtccgcctcacacaccggagatctgggaggttcctgtcccaggaggagtgctggcatctccatgactacctggtggacaccttgggcccctatgtgatcaatgtgaccagggcagcgatggcctgcagtcaccagcggtgccatggccacgggcgctgtgcccggcgagatccaggacagatggaagcctttctacacctgtggccagacggcagccttggagattggaagtccttcagctgccactgttactggggctgggctggccccacctgccaggagcccaggcctgggcctaaagaagcagtataaagccagggcccctgccactgcctcttcttttccctgctgccacttttccagtcctggaactactctgtcccactcttgctctattcagtttacagtcaaccctcccaagcacacaccccgcttcccttggaatccctgaggggtagaaggggccagaaaaaacgcttataaaaccagaggccctctgagatcatgtgagtc

SEQ ID NO: 78904 - DNA, 417 bp, Artificial Sequence
  derived and/or modified sequence
atgctgcccccagcccaccaccaggcctttgtgcgccaccggctggaggaggccttccgggtggccctggtgggccaccgccaccccctgcctgtgctggcctacgtgcggctgacccacagaagaagtggccgcttcctgagccaggaggagtgctggcacctgcatgactacctggtggacaccctgggcccctacgtgatcaacgtgaccagggctgccatggcctgcagccaccagcgctgccacggccacggccgctgtgcccggcgggaccccggccagatggaggccttcctgcacctgtggccagatggcagcctgggggactggaagagcttcagctgccactgctactggggctgggccggccccacctgccaggagccccggcccggccccaaggaggccgtgtag

SEQ ID NO: 78905 - DNA, 417 bp, Artificial Sequence
  derived and/or modified sequence
atgctgccccccgcccaccaccaggccttcgtgcggcaccggctggaagaggccttccgggtcgccctcgtagggcaccgacatccccttcctgtgctggcttatgtcagactcacccacagacggagcgggagattcctctcccaggaagaatgctggcatctgcacgactacttggttgataccctgggaccctatgtgattaacgtcaccagagccgcgatggcgtgcagccatcaaaggtgccacggacacggtcgctgtgcgcgtagagaccccgggcaaatggaggcctttcttcatttgtggcctgatggtagcttgggggactggaagtcatttagctgccattgctactggggctgggccggtcctacttgccaggagcctaggcccggcccaaaggaagccgtgtag

SEQ ID NO: 78906 - DNA, 417 bp, Artificial Sequence
  derived and/or modified sequence
atgttacctcctgcccatcatcaggccttcgtcagacaccgacttgaggaggcctttagggtggcactggtgggacacaggcaccctctcccagtccttgcttatgtgcggctgacacacagacggtccgggcgttttctgagccaggaggaatgctggcatctgcacgactaccttgtggataccctgggaccctacgttattaacgtgacaagagccgctatggcctgctcacatcagcggtgccatggccacggaaggtgcgccagaagagatcccggacagatggaagcctttctgcacctgtggcccgacggcagcctcggcgattggaagtcattttcttgccactgctattggggctgggccggacctacgtgccaagagcccaggcccggacccaaagaggcagtatag

SEQ ID NO: 78907 - DNA, 417 bp, Artificial Sequence
  derived and/or modified sequence
atgctgccccccgcccaccaccaggccttcgtgagacacagactggaggaggccttcagagtggccctggtgggccacagacaccccctgcccgtgctggcctacgtgagactgacccacagaagaagcggcagattcctgagccaggaggagtgctggcacctgcacgactacctggtggacaccctgggcccctacgtgatcaacgtgaccagagccgccatggcctgcagccaccagagatgccacggccacggcagatgcgccagaagagaccccggccagatggaggccttcctgcacctgtggcccgacggcagcctgggcgactggaagagcttcagctgccactgctactggggctgggccggccccacctgccaggagcccagacccggccccaaggaggccgtgtag

SEQ ID NO: 78908 - protein, 163 aa, Artificial Sequence
  derived and/or modified sequence
MKSRIPVVLLACGSFNPITNMHLRMFEVARDHLHQTAVPELKLLCGADVLKTFQTPNLWKDAHIQEIVEKFGLVCVGRVGHDPKGYIAESPILRMHQHNIHLAKEPVQNEISATYIRRALGQGQSVKYLIPDAVITYIKDHGLYTKGSTWKGKSTQSTEGKTS

SEQ ID NO: 78909 - DNA, 492 bp, Artificial Sequence
  derived and/or modified sequence
atgaaatctaggatccctgtggtactgcttgcctgcggctctttcaaccccattaccaacatgcaccttcgcatgttcgaggtagccagggaccatctgcaccaaactgccgtgcccgaactcaaactgctatgtggtgccgatgttctgaagacgttccagacgcccaatctgtggaaagatgcccacatccaagagatcgtggagaaatttggccttgtgtgcgtaggacgcgtgggccatgaccccaaaggttacatcgcggagtcccctattctgcggatgcatcaacataatatccatcttgccaaggaaccggtgcagaacgagatttccgctacgtatattcgcagagcccttggccagggacagtcggtcaaatatctgatccctgatgcagtaataacctatattaaagaccacggtttgtatacaaaggggagcacatggaaaggtaagtcaacacagtctacagaaggaaagaccagctag

SEQ ID NO: 78910 - DNA, 492 bp, Artificial Sequence
  derived and/or modified sequence
atgaagagccgcatccctgtggtgctgctggcctgtggcagcttcaaccccatcaccaacatgcacctgaggatgtttgaggtggcccgggaccacctgcaccagacagctgtgcctgagctgaagctgctgtgtggggctgatgtgctgaagaccttccagacccccaacctgtggaaggatgcccacatccaggagatcgtggagaagtttggcctggtgtgtgtgggccgggtgggccatgaccccaagggctacatcgccgagagccccatcctgaggatgcaccagcacaacatccacctggccaaggagcctgtgcagaatgagatcagcgccacctacatcagaagagccctgggccagggccagagcgtgaagtacctgatcccagatgctgtgatcacctacatcaaggaccacggcctgtacaccaagggcagcacctggaagggcaagagcacccagagcacagagggcaagaccagctag

SEQ ID NO: 78911 - DNA, 492 bp, Artificial Sequence
  derived and/or modified sequence
atgaagagccggatccccgtggtgctgctggcctgcggcagcttcaatccaatcaccaatatgcacttaagaatgttcgaggtagctcgggatcatctccaccagacggcggtgccagagctcaagctgctatgtggtgctgatgtgctgaaaaccttccaaacacctaatctctggaaggatgcccatattcaagagatcgtcgagaagtttggcttagtgtgcgtcgggcgggtcgggcacgatccgaaaggatatatagcagaatcaccgatattgcggatgcaccaacacaatattcatcttgcaaaggaaccagttcagaatgagatttccgcaacttacattcggcgagctcttgggcagggccagtccgtgaagtacctcatccccgatgcagtgatcacttacatcaaggaccacgggttgtatacgaaaggatctacatggaaaggaaagtccacacagagcactgagggtaaaactagttag

SEQ ID NO: 78912 - DNA, 1711 bp, Artificial Sequence
  derived and/or modified sequence
atctgcccggggccgctaagggagcgcaaggtcaagttcgccttggccccgcctccagctcaggtactaggggatctagacctgaggctgcccgggccggaggcagccttgagtcccgagaccaaacgtcgtttccctctcggacctcgggcgccgggccgcgcgctgaccgacagcccctgctaggcccagcaggtcccctagtcccccgcagtcccccgagactcgccgagcgccgttgctgagccctgcaaatagcagctacctgcttcagcctagatcctgccatgaagcggactgctgctccctggctcccactctgatctgcttttcactcttgccttgtctcccaattaataagcagggtggccactgcaacaggtgtggatgtgcctgacaagatgaagagccgaatacctgtggtgctcctggcctgtggctcctttaaccccatcaccaacatgcacctgcgcatgtttgaggtggccagagatcacctacaccaaacagctgtgcctgagctgaagcttctctgtggggcagacgtcttgaagaccttccagacccccaacctctggaaggatgcgcacatccaggaaatagtggagaagtttggcttggtgtgcgtgggccgagtaggtcacgacccaaaaggttacatcgcagaatctcccatcctacggatgcaccagcacaacattcacctggccaaggagcctgtgcagaatgagatcagtgccacatacatcaggcgagccttgggccaagggcagagcgtaaagtacctgattcccgatgctgtcatcacgtacatcaaggaccatggcctctacaccaagggcagtacctggaaaggcaaaagcacccagagcactgagggcaagacaagctagggaggggggactcagcacccacacctcctccaacaagctcctgctggggagagggctgttaaggtttctgttttactttggtttttgcttctccatttttcatttgctttatttctacagtgattctacttctgaggagtcttctgtcccaggaagagataccttctttacaggagaggaaaggtctaaatcacaaggatagacatttatcaaagaagttaaaatggtgtggcaggtcattaggattaggcagaatctctcagagctgctggacaaggaggtctacttattttgtgtggatggtaattatggcatgcacgctgaatgcagttctgagcatggcagcggcccctgagggtcagatcagaattgcccacaatgtgttttttaactaggaccaggtgcagcatgctagtcttgattggaaagatttgacaggatgctaattactgaacagtgggttttgtcaacgccctggtttcagaatatgaactgaggagtcaaacagttggaaacagcacattgctgatttacactggatcttgccttagaaaccattgtctgcctgcctaaccagcttttcataaaatttaaacaaaactctttctacgtagtgatcctcaagcaatatttttgatacagcaagtgtcaaacttgctatagcataaaagccggggctcctgatttccaggtttctaaaaaggaactgaggtaaaacagatgcctgaccgttttaaaggatcttttttaatgttttatgactgcctgtctgtttgaatactggcaaagggataaataataaattgacatcaaaaagt

SEQ ID NO: 78913 - DNA, 492 bp, Artificial Sequence
  derived and/or modified sequence
atgaagagtaggatcccagtcgttctcctggcctgcggttccttcaatcctattaccaacatgcacctgagaatgtttgaggtcgcaagggaccatcttcatcaaacagcagtgccagagttaaagctgctgtgcggagccgacgtgctgaaaacctttcaaacccccaacctctggaaagatgcacacatccaggaaatagtggagaaatttgggctcgtctgtgtgggacgagttggtcatgatcccaagggatatatcgccgagtcaccaatcctgcggatgcatcaacataatattcacttggctaaagaaccagtgcagaacgagattagtgcaacctacattcgacgcgcactgggccagggtcagtccgtgaagtaccttatcccggatgcagtgatcacatacataaaggaccacggcttgtacacaaaaggatccacctggaaagggaagagcactcagtcgactgagggcaaaacgtcatag

SEQ ID NO: 78914 - DNA, 492 bp, Artificial Sequence
  derived and/or modified sequence
atgaagagcagaatccccgtggtgctgctggcctgcggcagcttcaaccccatcaccaacatgcacctgagaatgttcgaggtggccagagaccacctgcaccagaccgccgtgcccgagctgaagctgctgtgcggcgccgacgtgctgaagaccttccagacccccaacctgtggaaggacgcccacatccaggagatcgtggagaagttcggcctggtgtgcgtgggcagagtgggccacgaccccaagggctacatcgccgagagccccatcctgagaatgcaccagcacaacatccacctggccaaggagcccgtgcagaacgagatcagcgccacctacatcagaagagccctgggccagggccagagcgtgaagtacctgatccccgacgccgtgatcacctacatcaaggaccacggcctgtacaccaagggcagcacctggaagggcaagagcacccagagcaccgagggcaagaccagctag

SEQ ID NO: 78915 - protein, 185 aa, Artificial Sequence
  derived and/or modified sequence
MSRAPGILASWRRAPSLSVQKGSQTARHTCHPEVPLGNCFLPVYKASPLTVTRLWAERLDQVIIHVGALSLKESQELAQHAAEIGADGIAVIAPFFLKPWTKDILINFLKEVAAAAPALPFYYYHIPALTGVKIRAEELLDGILDKIPTFQGLKFSDTDLLDFGQCVDQNRQQQFAFLFGVDEHL

SEQ ID NO: 78916 - protein, 301 aa, Artificial Sequence
  derived and/or modified sequence
MSRAPGILASWRRAPSLSVQKGSQTARHTCHPEVPLGNCFLPVYKASPLTVTRLWAERLDQVIIHVGALSLKESQELAQHAAEIGADGIAVIAPFFLKPWTKDILINFLKEVAAAAPALPFYYYHIPALTGVKIRAEELLDGILDKIPTFQGLKFSDTDLLDFGQCVDQNRQQQFAFLFGVDEQLLSALVMGATGAVGSTYNYLGKKTNQMLEAFEQKDFSLALNYQFCIQRFINFVVKLGFGVSQTKAIMTLVSGIPMGPPRLPLQKASREFTDSAEAKLKSLDFLSFTDLKDGNLEAGS

SEQ ID NO: 78917 - protein, 207 aa, Artificial Sequence
  derived and/or modified sequence
REGQKGSQTARHTCHPEVPLGNCFLPVYKASPLTVTRLWAERLDQVIIHVGALSLKESQELAQHAAEIGADGIAVIAPFFLKPWTKDILINFLKEVAAAAPALPFYYYHIPALTGVKTTVECSGDGSNWSSGQFCIQRFINFVVKLGFGVSQTKAIMTLVSGIPMGPPRLPLQKASREFTDSAEAKLKSLDFLSFTDLKDGNLEAGS

SEQ ID NO: 78918 - DNA, 558 bp, Artificial Sequence
  derived and/or modified sequence
atgtcccgggctcccgggattttagcctcatggcgccgtgcaccctctctctccgtgcagaagggttcccagacagcacggcatacttgtcatcccgaggtgcctctggggaactgctttctccccgtctataaagcttccccgctcacggtgacgcgactctgggccgagagactggatcaagttatcattcacgtcggcgcgctatccctcaaggaaagccaggagctggcacaacatgctgcagaaatcggagctgacgggatcgcggttattgctcctttcttcctgaaaccatggaccaaggacatcctcatcaatttcttgaaggaggtggccgcagcggcaccagctttgcccttttattattatcatatcccagctttaacgggtgtaaagataagagcagaagaactgttggacgggattttggacaaaatccctaccttccagggactgaagttttctgacaccgacctgctggatttcggccaatgcgtcgaccagaaccgccagcaacaatttgctttcctgttcggcgtggacgaacacctgtag

SEQ ID NO: 78919 - DNA, 906 bp, Artificial Sequence
  derived and/or modified sequence
atgtctcgggcccctgggatcctggcctcatggcggcgcgctccctcactgagcgttcagaaaggcagtcagacagcacgacacacatgtcacccagaggttcccctggggaattgcttcctgcctgtatataaggcctcgcccttgacagtgactagactgtgggcagagcgcctggaccaggtcatcattcacgtgggggccttgtcgttgaaagagagccaggagctggcacagcacgctgccgaaatcggggccgatggaatcgcagtcatcgcaccttttttcctcaagccttggacaaaggatattctcattaactttctcaaagaggttgctgctgccgcgccagccctgcctttttactactatcacattccagcgctgacaggcgtaaaaatcagggctgaagagctgctggacggcattttagacaagatcccaacctttcagggtttaaagttttcagataccgatctgttggactttggtcagtgcgtggaccaaaataggcaacagcagttcgctttcctctttggagttgatgagcagctactgtctgcacttgtgatgggtgctaccggggcggtcggaagcacttacaattatttaggtaaaaaaactaaccagatgctcgaggctttcgagcaaaaggacttttctctcgccctaaactaccagttctgcatccagcgatttatcaacttcgtggtgaagttggggtttggggtgtcccagaccaaagctatcatgaccctcgtgtcgggaatccccatgggtcccccccgcctacctctacaaaaagcctcaagagaatttacagacagtgcggaggcgaaactcaagtctctggactttcttagctttaccgatctgaaggacggtaacctggaggctggaagttag

SEQ ID NO: 78920 - DNA, 624 bp, Artificial Sequence
  derived and/or modified sequence
cgagaaggacagaaagggtcacaaacagcccggcacacctgtcaccccgaggtgccactgggtaattgtttccttcccgtctataaggctagcccattgaccgttacgcggctttgggccgaacgcctggaccaggtaatcattcacgtaggcgctctctccctgaaggagtcccaagagctggcccagcacgccgctgagatcggggcagatggcatcgcggtcattgcccctttctttctcaaaccttggacgaaagacatactcattaactttctgaaggaagttgccgccgctgcaccggctctacctttttactattaccacatcccggcactgacaggagtgaaaactactgtggagtgctcgggcgacggtagcaactggtcgtcaggacagttctgcatacagcgctttatcaactttgtggtcaaattgggtttcggtgtcagccagaccaaagctattatgaccctcgtttcaggtatccccatggggcccccgcggctgccactgcagaaagccagccgggaattcaccgattctgcggaggccaagctgaaaagtcttgatttcctgtcctttaccgaccttaaggacggcaacctggaggccggtagctag

SEQ ID NO: 78921 - DNA, 558 bp, Artificial Sequence
  derived and/or modified sequence
atgagccgggcccctggcatcctggcctcctggaggcgggcccccagcctgtctgtgcagaagggcagccagacagcccggcacacctgccaccctgaggtgcccctgggcaactgcttcctgcctgtgtacaaggccagccccctgactgtgacccggctgtgggccgagcggctggaccaggtgatcatccacgtgggcgccctgagcctgaaggagagccaggagctggcccagcacgccgctgagatcggggctgatggcattgctgtgattgcccccttcttcctgaagccctggaccaaggacatcctgatcaacttcctgaaggaggtggccgctgctgccccagccctgcccttctactactaccacatcccagccctgactggagtgaagatccgggcagaggagctgctggatggcatcctggacaagatccccaccttccagggcctgaagttcagtgacacagacctgctggactttggccagtgtgtggaccagaaccggcagcagcagtttgccttcctgtttggagtggatgagcacctgtag

SEQ ID NO: 78922 - DNA, 906 bp, Artificial Sequence
  derived and/or modified sequence
atgagccgggcccctggcatcctggcctcctggaggcgggcccccagcctgtctgtgcagaagggcagccagacagcccggcacacctgccaccctgaggtgcccctgggcaactgcttcctgcctgtgtacaaggccagccccctgactgtgacccggctgtgggccgagcggctggaccaggtgatcatccacgtgggcgccctgagcctgaaggagagccaggagctggcccagcacgccgctgagatcggggctgatggcattgctgtgattgcccccttcttcctgaagccctggaccaaggacatcctgatcaacttcctgaaggaggtggccgctgctgccccagccctgcccttctactactaccacatcccagccctgactggagtgaagatccgggcagaggagctgctggatggcatcctggacaagatccccaccttccagggcctgaagttcagtgacacagacctgctggactttggccagtgtgtggaccagaaccggcagcagcagtttgccttcctgtttggagtggatgagcagctgctgagcgccctggtgatgggcgccaccggggctgtgggcagcacctacaactacctgggcaagaagaccaaccagatgctggaggcctttgagcagaaggacttcagcctggccctgaactaccagttctgcatccagcgcttcatcaactttgtggtgaagctgggcttcggcgtgtcccagaccaaggccatcatgaccctggtgtctggcatccccatgggccccccccggctgcccctgcagaaggccagccgggagttcacagacagcgctgaggccaagctgaagagcctggacttcctgtccttcacagacctgaaggatggcaacctggaggccggcagctag

SEQ ID NO: 78923 - DNA, 624 bp, Artificial Sequence
  derived and/or modified sequence
cgggagggccagaagggcagccagacagcccggcacacctgccaccctgaggtgcccctgggcaactgcttcctgcctgtgtacaaggccagccccctgactgtgacccggctgtgggccgagcggctggaccaggtgatcatccacgtgggcgccctgagcctgaaggagagccaggagctggcccagcacgccgctgagatcggggctgatggcattgctgtgattgcccccttcttcctgaagccctggaccaaggacatcctgatcaacttcctgaaggaggtggccgctgctgccccagccctgcccttctactactaccacatcccagccctgactggagtgaagaccaccgtggagtgcagcggagatggcagcaactggagcagcggccagttctgcatccagcgcttcatcaactttgtggtgaagctgggcttcggcgtgtcccagaccaaggccatcatgaccctggtgtctggcatccccatgggccccccccggctgcccctgcagaaggccagccgggagttcacagacagcgctgaggccaagctgaagagcctggacttcctgtccttcacagacctgaaggatggcaacctggaggccggcagctag

SEQ ID NO: 78924 - DNA, 873 bp, Artificial Sequence
  derived and/or modified sequence
gcggctgcacggacaagagcggaggcctggagaaatcaacttttcagtaattggtcagtatgtggattatcttgtgaaagaacagggagtgaagaacatttttgtgaatggcacaacaggagaaggcctgtccctgagcgtctcagagcgtcgccaggttgcagaggagtgggtgacaaaagggaaggacaagtgagtggctgcatgaggataaaaatgccctttggcaacagctgtattcagtgagcctcttccccagaggatacgccctccctgcttcctggtcagagccggggcttgaggtcagctggtgggaagatgagcagggcccccgggatcctggcttcttggagaagagccccctccctttctgtgcagaagggcagccaaactgctagacacacctgccacccagaggttccgctgggaaactgcttcttacctgtctacaaggccagtcccctcacagttacccgtctttgggctgaaaggctggatcaggtgataattcacgtaggagcactgagcttgaaggagtcacaggaactggcccaacatgcagcagaaataggagctgatggcatcgctgtcattgcaccgttcttcctcaagccatggaccaaagatatcctgattaatttcctaaaggaagtggctgctgccgcccctgccctgccattttattactatcacattcctgccttgacaggggtaaagattcgtgctgaggagttgttggatgggattctggataagatccccaccttccaagggctgaaattcagtgatacagatctcttagacttcgggcaatgtgttgatcagaatcgccagcaacagtttgctttcctttttggggtggatgagcatctc

SEQ ID NO: 78925 - DNA, 2418 bp, Artificial Sequence
  derived and/or modified sequence
gcggctgcacggacaagagcggaggcctggagaaatcaacttttcagtaattggtcagtatgtggattatcttgtgaaagaacagggagtgaagaacatttttgtgaatggcacaacaggagaaggcctgtccctgagcgtctcagagcgtcgccaggttgcagaggagtgggtgacaaaagggaaggacaagtgagtggctgcatgaggataaaaatgccctttggcaacagctgtattcagtgagcctcttccccagaggatacgccctccctgcttcctggtcagagccggggcttgaggtcagctggtgggaagatgagcagggcccccgggatcctggcttcttggagaagagccccctccctttctgtgcagaagggcagccaaactgctagacacacctgccacccagaggttccgctgggaaactgcttcttacctgtctacaaggccagtcccctcacagttacccgtctttgggctgaaaggctggatcaggtgataattcacgtaggagcactgagcttgaaggagtcacaggaactggcccaacatgcagcagaaataggagctgatggcatcgctgtcattgcaccgttcttcctcaagccatggaccaaagatatcctgattaatttcctaaaggaagtggctgctgccgcccctgccctgccattttattactatcacattcctgccttgacaggggtaaagattcgtgctgaggagttgttggatgggattctggataagatccccaccttccaagggctgaaattcagtgatacagatctcttagacttcgggcaatgtgttgatcagaatcgccagcaacagtttgctttcctttttggggtggatgagcaactgttgagtgctctggtgatgggagcaactggagcagtgggcagtacctataactacctgggaaaaaagacaaaccagatgttggaggcttttgaacaaaaggacttctctttagccctgaactatcagttttgtatccagagatttatcaactttgttgtcaaactaggttttggagtgtcacagaccaaagccatcatgactctggtctctgggattccaatgggcccaccccggcttccactgcagaaagcctccagggagtttactgatagtgctgaagctaaactgaagagcctggatttcctttctttcactgatttaaaggatggaaacttggaagctggtagctagtgcctctctatcaaatcagggtttgcaccttgagacataatctaccttaaatagtgcatttttttctcagggaattttagatgaacttgaataaactctcctagcaaatgaaatctcacaataagcattgaggtaccttttgtgagccttaaaaagtcttattttgtgaaggggcaaaaactctaggagtcacaactctcagtcattcatttcacagatttttttgtggagaaatttctgtttatatggatgaaatggaatcaagaggaaaattgtaattgattaattccatctgtctttaggagctctcattatctcggtctctggttcctaatcctattttaaagttgtctaattttaaaccactataatatgtcttcattttaataaatattcatttggaatctaggaaaactctgagctactgcatttaggcaggcactttaataccaaactgtaacatgtctcaactgtatacaactcaaaatacaccagctcatttggctgctcagtctaactctagaatggatgcttttgaattcatttcgatgtcaccacttttcgctctttaaaaacactgggtcaggtgaggacttgtttcagttcctataactaagtaaagggcggctttctcataacaaaggaaaaagtcttccccaaagatgaatttaagtctccacttttttctatacagaaaactcaaaactcaaagtttcaaagaaccaaaggactcttcctctgggcaccacaaacttccccttcctccactgagaagactgtctctcccgcaggaccctgaattattgaaatcgaaggctgacttcctttctgcagtgagcccaggggctaatgttattatcctgtcacacttgcaactagtgacttttgtttagtgatagaagatttggggaggacccaaaggactcagaactttctctccatacctccttttactcttttctttctgtgtaatgtatcaacaactgtttaatctcccttctaacaaaccttgatataagctttctgatatcaaagtatattgacagttaacccttactgattttaaacttgactatccagtctgttaattacctaagattttgttttcatttcatctctaattgttttgatcattggcagagaaagagtatttgaaattcatatcagttttgctccttattttaatctctttga

SEQ ID NO: 78926 - DNA, 1389 bp, Artificial Sequence
  derived and/or modified sequence
gcggctgcacggacaagagcggaggcctggagaaatcaacttttcagtaattggtcagtatgtggattatcttgtgaaagaacagggagtgaagaacatttttgtgaatggcacaacaggagaaggcctgtccctgagcgtctcagagcgtcgccaggttgcagaggagtgggtgacaaaagggaaggacaaaagggcagccaaactgctagacacacctgccacccagaggttccgctgggaaactgcttcttacctgtctacaaggccagtcccctcacagttacccgtctttgggctgaaaggctggatcaggtgataattcacgtaggagcactgagcttgaaggagtcacaggaactggcccaacatgcagcagaaataggagctgatggcatcgctgtcattgcaccgttcttcctcaagccatggaccaaagatatcctgattaatttcctaaaggaagtggctgctgccgcccctgccctgccattttattactatcacattcctgccttgacaggggtaaagacaactgttgagtgctctggtgatgggagcaactggagcagtgggcagttttgtatccagagatttatcaactttgttgtcaaactaggttttggagtgtcacagaccaaagccatcatgactctggtctctgggattccaatgggcccaccccggcttccactgcagaaagcctccagggagtttactgatagtgctgaagctaaactgaagagcctggatttcctttctttcactgatttaaaggatggaaacttggaagctggtagctagtgcctctctatcaaatcagggtttgcaccttgagacataatctaccttaaatagtgcatttttttctcagggaattttagatgaacttgaataaactctcctagcaaatgaaatctcacaataagcattgaggtaccttttgtgagccttaaaaagtcttattttgtgaaggggcaaaaactctaggagtcacaactctcagtcattcatttcacagatttttttgtggagaaatttctgtttatatggatgaaatggaatcaagaggaaaattgtaattgattaattccatctgtctttaggagctctcattatctcggtctctggttcctaatcctattttaaagttgtctaattttaaaccactataatatgtcttcattttaataaatattcatttggaatctaggaaaactctgagctactgcatttaggcaggcactttaataccaaactgtaacatgtctcaactgtatacaactcaaaatacaccagctcatttggctgctcagtctaactctagaatggatgcttttgaattcatttcgatgtcaccacttttcgctctttaaaaacactgggtca

SEQ ID NO: 78927 - DNA, 558 bp, Artificial Sequence
  derived and/or modified sequence
atgagccgggcccccggcatcctggccagctggcggcgggccccctcactgagtgtccagaagggttctcaaaccgcccggcacacctgccaccccgaagttccacttggaaattgcttcctccctgtatataaggcctcccccctgactgtgacccgcctctgggctgagagactggatcaagtgatcattcacgtgggggccctgagtctcaaagagtcccaggagcttgcacaacacgcagcagaaatcggcgccgatggaattgcagtcattgcccccttttttctaaaaccatggaccaaagacatccttattaattttctgaaagaggtggcagctgcagccccagccctgcctttctattattatcatattccagccttaacaggcgtcaaaattcgtgctgaggagctgctggatgggatcctggataagattccgacattccaggggctaaagttctccgatactgatctgctcgattttgggcagtgcgtggaccaaaataggcagcagcagtttgcatttctcttcggcgtagacgaacatctctag

SEQ ID NO: 78928 - DNA, 906 bp, Artificial Sequence
  derived and/or modified sequence
atgagccgggcccccggcatcctggccagctggcggcgggccccctcgttaagcgtccagaaaggcagccagactgctcggcatacttgtcatcccgaagtgcctcttggcaactgcttcctgcccgtctataaggcgagcccactgacggtaactcgtctctgggctgaacgactggatcaagtgattattcatgtcggcgcactctcgctgaaagagtctcaagaactcgcccagcacgccgccgagatcggcgccgacggaatcgctgttattgcccccttcttcctgaaaccgtggaccaaagacatcctcataaatttccttaaggaagtggccgccgccgcaccagcactgccattctactattatcacatccccgcactgaccggggtaaagattcgggccgaggaattattggatggcattttagacaaaattccaacatttcaaggacttaaattttccgacaccgatcttctcgactttggccagtgcgtagatcaaaacaggcagcagcagtttgcattcctcttcggcgttgacgagcaattgctgagcgcgttggttatgggggcaactggcgccgtgggcagcacttacaattatctcgggaagaagacaaatcaaatgttggaggcattcgagcaaaaggatttcagcctggccctgaattaccagttctgcattcagcggttcatcaattttgttgtaaagctcggattcggggtatcccagacaaaagcgatcatgactctagttagcgggatccctatgggtccaccccgattaccgcttcagaaggcatcacgggagttcactgactccgcagaggccaagcttaagtccctggactttctgtcgtttaccgatcttaaggatggaaacctcgaggccgggtcgtag

SEQ ID NO: 78929 - DNA, 624 bp, Artificial Sequence
  derived and/or modified sequence
cgggagggccagaagggcagccagaccgcccggcacacctgccaccctgaagtgcctctggggaattgtttccttccagtgtataaagcaagtcctctcactgtgacacgtctctgggctgagagattggaccaggtgatcattcacgtcggcgcactgagcctaaaggagtcccaggagctggcccagcacgcagccgagattggggccgacgggattgcagtgatcgcaccattttttctaaaaccctggactaaagatattctgatcaacttccttaaagaagtggccgctgcagcaccagctctccctttctattactaccacatcccagcgctcactggagtgaagacgactgtggagtgcagtggagacggctcaaactggtcaagcgggcagttctgtatccaaaggtttatcaactttgtagtgaagctcggcttcggcgtgtcccagacaaaggccatcatgactttagtgagcgggatccctatggggccaccccggctgccactgcagaaggcatcacgtgagtttaccgactctgctgaagccaaactgaagtccctcgactttctgtcttttaccgacctcaaggatggaaacttagaagccggcagctag

SEQ ID NO: 78930 - DNA, 558 bp, Artificial Sequence
  derived and/or modified sequence
atgagccgggcaccgggtatcctggcaagttggcggcgagcgccttctctgtcagtgcaaaagggatctcagaccgccaggcacacatgtcacccagaggtgcccttgggtaattgcttcctccctgtctacaaggcgagccccctgactgtgacgaggttatgggcagagcgactggaccaagtaattattcacgttggagccctctctcttaaagaaagccaggagctggcccagcatgccgcagagattggcgcagacggcattgcagtgatcgctccgttcttcttaaagccctggacaaaggacatcctcatcaatttcctcaaggaggtggctgcagccgctccagcactacctttctattactaccatatccctgcactgacaggcgtgaaaatcagagcggaggagttgttggatggtatactcgacaaaatccccacttttcagggactcaaattttcagatacagatctgttggactttggacagtgtgtggatcagaaccgccagcagcagtttgcgttcctgtttggtgtagacgagcacctttag

SEQ ID NO: 78931 - DNA, 906 bp, Artificial Sequence
  derived and/or modified sequence
atgagtcgcgcaccaggaatcctggcgtcctggcgccgagccccaagcctcagtgtccagaagggctctcagactgcacgacacacttgtcatccagaagtgcccttagggaactgtttcctacctgtgtacaaagcctcaccgctcacagtgactcggctgtgggccgagaggctggaccaagttattatccatgtaggggctctctcattgaaagagagtcaggaactcgcccagcacgcagccgaaatcggtgcagatggcatcgctgtgatagcccctttcttcctgaagccttggacaaaagacatcttgattaactttttgaaagaagttgctgccgcagctcccgctctccctttttactactatcacatccctgccttgactggtgtgaaaatacgggctgaggaactgttagacgggatcttggacaagatccctactttccagggcttaaaattttctgacacagaccttttggattttggacaatgtgtagatcagaatcggcagcaacaattcgcattccttttcggggtcgatgagcagttgctgagtgccctagttatgggcgctactggggctgtgggcagcacctacaattacctgggcaagaaaacaaatcagatgctggaagcgttcgaacaaaaggatttcagcctggccttgaactaccagttctgcatccaaaggttcatcaacttcgtagtaaaactcgggttcggtgtgagccagaccaaggcgattatgactctggtgagtgggatacctatgggacctcctcggttgcccctgcagaaagcgtcccgggagttcaccgatagcgcggaggccaaactcaaatcactggacttcttgagtttcacagacttgaaagacggaaatcttgaggccggaagctag

SEQ ID NO: 78932 - DNA, 624 bp, Artificial Sequence
  derived and/or modified sequence
agagaaggtcaaaaaggcagccagacagccagacacacgtgccacccggaggtgcctctcggtaactgttttctacctgtgtacaaggcctcacctcttaccgttactaggctgtgggccgagcgattggaccaggttataatccacgttggtgccttgtcattgaaggaatctcaggagctggcacaacacgccgcagagataggtgccgacggcattgcggtcatagcccctttctttctcaagccctggacaaaggatatattgattaacttcctcaaggaggttgccgctgcggcacccgcattaccattttattattatcacatccctgccctcaccggagtgaaaactaccgtagaatgctccggagatggctcaaattggagttcaggccagttctgcatacagcgattcatcaattttgtggtgaaactgggctttggcgtctcacagactaaggccattatgacgcttgtgagtggcattccgatgggtccacccaggttgcctctgcagaaagcctcgagggagtttacggactctgcagaagctaagctcaaatctcttgatttcctttcattcacagacctcaaggacggcaatctggaggctggaagttag

SEQ ID NO: 78933 - DNA, 558 bp, Artificial Sequence
  derived and/or modified sequence
atgagcagagcccccggcatcctggccagctggagaagagcccccagcctgagcgtgcagaagggcagccagaccgccagacacacctgccaccccgaggtgcccctgggcaactgcttcctgcccgtgtacaaggccagccccctgaccgtgaccagactgtgggccgagagactggaccaggtgatcatccacgtgggcgccctgagcctgaaggagagccaggagctggcccagcacgccgccgagatcggcgccgacggcatcgccgtgatcgcccccttcttcctgaagccctggaccaaggacatcctgatcaacttcctgaaggaggtggccgccgccgcccccgccctgcccttctactactaccacatccccgccctgaccggcgtgaagatcagagccgaggagctgctggacggcatcctggacaagatccccaccttccagggcctgaagttcagcgacaccgacctgctggacttcggccagtgcgtggaccagaacagacagcagcagttcgccttcctgttcggcgtggacgagcacctgtag

SEQ ID NO: 78934 - DNA, 906 bp, Artificial Sequence
  derived and/or modified sequence
atgagcagagcccccggcatcctggccagctggagaagagcccccagcctgagcgtgcagaagggcagccagaccgccagacacacctgccaccccgaggtgcccctgggcaactgcttcctgcccgtgtacaaggccagccccctgaccgtgaccagactgtgggccgagagactggaccaggtgatcatccacgtgggcgccctgagcctgaaggagagccaggagctggcccagcacgccgccgagatcggcgccgacggcatcgccgtgatcgcccccttcttcctgaagccctggaccaaggacatcctgatcaacttcctgaaggaggtggccgccgccgcccccgccctgcccttctactactaccacatccccgccctgaccggcgtgaagatcagagccgaggagctgctggacggcatcctggacaagatccccaccttccagggcctgaagttcagcgacaccgacctgctggacttcggccagtgcgtggaccagaacagacagcagcagttcgccttcctgttcggcgtggacgagcagctgctgagcgccctggtgatgggcgccaccggcgccgtgggcagcacctacaactacctgggcaagaagaccaaccagatgctggaggccttcgagcagaaggacttcagcctggccctgaactaccagttctgcatccagagattcatcaacttcgtggtgaagctgggcttcggcgtgagccagaccaaggccatcatgaccctggtgagcggcatccccatgggcccccccagactgcccctgcagaaggccagcagagagttcaccgacagcgccgaggccaagctgaagagcctggacttcctgagcttcaccgacctgaaggacggcaacctggaggccggcagctag

SEQ ID NO: 78935 - DNA, 624 bp, Artificial Sequence
  derived and/or modified sequence
agagagggccagaagggcagccagaccgccagacacacctgccaccccgaggtgcccctgggcaactgcttcctgcccgtgtacaaggccagccccctgaccgtgaccagactgtgggccgagagactggaccaggtgatcatccacgtgggcgccctgagcctgaaggagagccaggagctggcccagcacgccgccgagatcggcgccgacggcatcgccgtgatcgcccccttcttcctgaagccctggaccaaggacatcctgatcaacttcctgaaggaggtggccgccgccgcccccgccctgcccttctactactaccacatccccgccctgaccggcgtgaagaccaccgtggagtgcagcggcgacggcagcaactggagcagcggccagttctgcatccagagattcatcaacttcgtggtgaagctgggcttcggcgtgagccagaccaaggccatcatgaccctggtgagcggcatccccatgggcccccccagactgcccctgcagaaggccagcagagagttcaccgacagcgccgaggccaagctgaagagcctggacttcctgagcttcaccgacctgaaggacggcaacctggaggccggcagctag

SEQ ID NO: 78936 - protein, 240 aa, Artificial Sequence
  derived and/or modified sequence
MAFPKKKLQGLVAATITPMTENGEINFSVIGQYVDYLVKEQGVKNIFVNGTTGEGLSLSVSERRQVAEEWVTKGKDKLDQVIIHVGALSLKESQELAQHAAEIGADGIAVIAPFFLKPWTKDILINFLKEVAAAAPALPFYYYHIPALTGVKIRAEELLDGILDKIPTFQGLKFSDTDLLDFGQCVDQNRQQQFAFLFGVDEFCIQRFINFVVKLENSKLKVSKNQRTLPLGTTNFPFLH

SEQ ID NO: 78937 - DNA, 723 bp, Artificial Sequence
  derived and/or modified sequence
atggcgtttccaaaaaagaagttacagggtcttgtggcggcgactatcacaccaatgaccgagaacggcgagatcaatttctccgtgatagggcagtacgtcgactacctggtgaaggagcaaggcgtaaaaaatatctttgtgaatgggacaacaggtgaggggctctctctgtcagtgagtgaacggcggcaagtcgcagaggagtgggtaactaagggcaaagataagcttgatcaagtaatcatacacgtgggtgctctgagtctcaaagagtctcaagagctcgcacaacatgcggcggaaatcggcgccgacggtatcgccgtcatcgcgccctttttcctgaagccctggactaaagatatactgataaatttcctcaaagaggtcgcagctgccgctcccgctctgcctttctactactaccacattcccgccctgactggcgttaaaatcagagcagaggagcttctcgatggaatcctggataaaatcccaacctttcaggggcttaagttcagcgacacggacctcctcgatttcgggcagtgcgtcgatcagaatcgccagcagcagttcgctttcttatttggggtcgatgagttttgtattcagaggttcatcaattttgtagtcaaactcgagaatagtaaactcaaggtttcaaagaaccagcgcactctgcctctgggtaccacgaatttcccttttctccactag

SEQ ID NO: 78938 - DNA, 723 bp, Artificial Sequence
  derived and/or modified sequence
atggcctttccaaagaagaaacttcaaggcctcgttgcagccactatcaccccaatgacggagaatggcgagattaactttagcgtcattgggcagtatgtggattatctggttaaagagcagggcgttaaaaatatctttgtcaatggcaccacgggggagggcctatccctgtctgtgagtgagcgacgacaggtcgctgaggagtgggtgaccaaaggcaaggacaagcttgaccaggtgatcattcacgtcggagccctgagtctcaaggaatcacaagaactcgcacagcacgccgctgaaatcggcgccgacgggatagccgttatcgctccatttttccttaagccctggaccaaggacattctgattaatttcctcaaggaagtggccgctgccgctccagccctgcccttttactactatcacattcccgctctgaccggagttaagattcgggcggaggagctactggacggaatcctggataagattcctacattccagggactaaagtttagcgacacagatctgctggacttcggacagtgtgtggaccagaatcgacagcagcaatttgcattcctgttcggcgtggatgagttttgcatccagagatttattaacttcgtcgtcaagttagagaacagcaagctgaaagtttcaaaaaaccagcgcactctcccccttggtacaacaaacttcccatttctgcattag

SEQ ID NO: 78939 - DNA, 723 bp, Artificial Sequence
  derived and/or modified sequence
atggccttccccaagaagaagctgcagggcctggtggccgccaccatcacccccatgacagaaaatggagagatcaacttcagcgtcatcggccagtatgtggactacctggtgaaggagcagggcgtgaagaacatctttgtgaatggcaccaccggggagggcctgagcctgtctgtgtctgaaagacggcaggtggccgaggagtgggtgaccaagggcaaggacaagctggaccaggtgatcatccacgtgggcgccctgagcctgaaggagagccaggagctggcccagcacgccgctgagattggagcagatggcattgctgtgattgcccccttcttcctgaagccctggaccaaggacatcctgatcaacttcctgaaggaggtggccgccgccgccccagccctgcccttctactactaccacatcccagccctgactggagtgaagatccgggcagaggagctgctggatggcatcctggacaagatccccaccttccagggcctgaagttcagtgacacagacctgctggactttggccagtgtgtggaccagaaccggcagcagcagtttgccttcctgtttggagtggatgagttctgcatccagcgcttcatcaactttgtggtgaagctggagaacagcaagctgaaggtgtccaagaaccagaggaccctgcccctgggcaccaccaacttccccttcctgcactag

SEQ ID NO: 78940 - DNA, 745 bp, Artificial Sequence
  derived and/or modified sequence
ttccagacctaccagcagctcaatggccttcccaaagaagaaacttcagggtcttgtggctgcaaccatcacgccaatgactgagaatggagaaatcaacttttcagtaattggtcagtatgtggattatcttgtgaaagaacagggagtgaagaacatttttgtgaatggcacaacaggagaaggcctgtccctgagcgtctcagagcgtcgccaggttgcagaggagtgggtgacaaaagggaaggacaagctggatcaggtgataattcacgtaggagcactgagcttgaaggagtcacaggaactggcccaacatgcagcagaaataggagctgatggcatcgctgtcattgcaccgttcttcctcaagccatggaccaaagatatcctgattaatttcctaaaggaagtggctgctgccgcccctgccctgccattttattactatcacattcctgccttgacaggggtaaagattcgtgctgaggagttgttggatgggattctggataagatccccaccttccaagggctgaaattcagtgatacagatctcttagacttcgggcaatgtgttgatcagaatcgccagcaacagtttgctttcctttttggggtggatgagttttgtatccagagatttatcaactttgttgtcaaactagaaaactcaaaactcaaagtttcaaagaaccaaaggactcttcctctgggcaccacaaacttccccttcctccactga

SEQ ID NO: 78941 - DNA, 1536 bp, Artificial Sequence
  derived and/or modified sequence
gggcggagcggctgcacggacaagagcggaggcctggaaggggaaactgaagcagaaagaggttacttaatgggctcaaggtcacctacctgacctaccagcagctcaatggccttcccaaagaagaaacttcagggtcttgtggctgcaaccatcacgccaatgactgagaatggagaaatcaacttttcagtaattggtcagtatgtggattatcttgtgaaagaacagggagtgaagaacatttttgtgaatggcacaacaggagaaggcctgtccctgagcgtctcagagcgtcgccaggttgcagaggagtgggtgacaaaagggaaggacaagctggatcaggtgataattcacgtaggagcactgagcttgaaggagtcacaggaactggcccaacatgcagcagaaataggagctgatggcatcgctgtcattgcaccgttcttcctcaagccatggaccaaagatatcctgattaatttcctaaaggaagtggctgctgccgcccctgccctgccattttattactatcacattcctgccttgacaggggtaaagattcgtgctgaggagttgttggatgggattctggataagatccccaccttccaagggctgaaattcagtgatacagatctcttagacttcgggcaatgtgttgatcagaatcgccagcaacagtttgctttcctttttggggtggatgagttttgtatccagagatttatcaactttgttgtcaaactagaaaactcaaaactcaaagtttcaaagaaccaaaggactcttcctctgggcaccacaaacttccccttcctccactgagaagactgtctctcccgcaggaccctgaattattgaaatcgaaggctgacttcctttctgcagtgagcccaggggctaatgttattatcctgtcacacttgcaactagtgacttttgtttagtgatagaagatttggggaggacccaaaggactcagaactttctctccatacctccttttactcttttctttctgtgtaatgtatcaacaactgtttaatctcccttctaacaaaccttgatataagctttctgatatcaaagtatattgacagttaacccttactgattttaaacttgactatccagtctgttaattacctaagattttgttttcatttcatctctaattgttttgatcattggcagagaaagagtatttgaaattcatatcagttttgctccttattttaatctctttgaattaaaaataaaactttttcaaaatggaaatttgaaattataagtagacttcaattatctttgctaatcctctctttaattagtcagctagttaaaagttgttatattcatatatcctcaaccctctttttgcctttgtagcttttaatttcctgaaagaagaaaatgagttgttcgtttttggttctgaggatgtgatatccgtacttactgatactaaagccaaatttaaattctaaaattaattcttgggtatccaataaacaaagaactatttttcta

SEQ ID NO: 78942 - DNA, 723 bp, Artificial Sequence
  derived and/or modified sequence
atggccttccccaagaagaagctgcagggcctggtggccgccaccatcacccctatgaccgagaacggcgaaataaatttcagcgtcatcgggcagtatgtggactaccttgtcaaggagcaaggcgtgaagaacatatttgttaacgggactacaggcgaggggctgtccctgagcgttagcgagcgtcgacaggtggcagaagaatgggtgaccaagggtaaagacaaactcgaccaggtaataatccacgtcggcgcactgagtcttaaagagagccaggagctggcgcagcacgctgcagaaatcggagcagatggtattgccgtcatcgccccgttcttcctgaaaccttggacaaaggacattctcattaattttcttaaagaagtggccgcagccgcgcctgctctgcccttttactactaccacattccagccctaacaggggtgaagatcagagctgaagagttactcgacggcatcctcgataaaatcccaacatttcaaggcctgaagttcagcgacacagatctcctagacttcggccaatgtgtcgaccagaacagacagcagcagtttgcattcttgtttggcgtggatgaattttgcatacagcgctttatcaatttcgtagtgaagctcgagaactctaaattaaaagtctcaaagaaccagcgtaccttgccgctaggcaccacgaacttccctttcctgcactag

SEQ ID NO: 78943 - DNA, 723 bp, Artificial Sequence
  derived and/or modified sequence
atggccttccccaagaagaagctgcagggcctggtggccgccaccatcaccccaatgacagaaaatggagaaatcaatttttccgtgatcgggcagtatgtggactacctggtcaaggagcagggtgtaaagaatattttcgtgaatggcaccaccggtgaagggctaagcctgtccgtttctgagcgacgacaagttgctgaggagtgggttactaaaggcaaagataaactagatcaagtgatcatacacgtgggagccctaagcctcaaggaatcacaggaactagcgcagcatgccgcagaaatcggggctgacgggatcgcagtaattgcaccatttttcctgaaaccatggaccaaagacatccttataaactttcttaaagaggttgccgcagccgcaccggcattgcccttctactattatcacatcccagccctgaccggtgtgaagatcagggcagaagaactgctggacgggattctcgataaaatcccaactttccaaggtctcaaattctcggatacagatctgctcgattttggccaatgcgtcgaccagaatcgccaacagcaattcgctttcctattcggcgtcgatgagttctgtattcagcggtttatcaactttgttgtgaaactcgaaaatagtaaattgaaagtaagtaaaaaccagcgcaccttaccactggggacaacaaactttccattcctacattag

SEQ ID NO: 78944 - DNA, 723 bp, Artificial Sequence
  derived and/or modified sequence
atggcatttcccaagaagaagcttcaaggactggtcgccgcaaccattactcccatgacggaaaatggggagatcaattttagcgtcataggccagtatgtagactatctcgtcaaagaacagggagtaaaaaatattttcgtgaacggaaccactggagaaggactgagtctatcggtgagcgagcggaggcaggtcgctgaggagtgggtaaccaaggggaaggataaactcgaccaggttataatacacgtcggagccctgagcctgaaggagtcccaggaacttgctcagcacgcagctgagatcggagctgatggcatcgccgtaatcgccccatttttcctcaaaccctggacaaaggacatactgattaattttctcaaagaggtagctgcagctgccccagccttgcccttttactattatcatatccctgccttgacaggggtgaagatcagagcagaagagctgttggacgggatcctcgacaaaattcccacctttcaggggctgaagttctccgatactgacctcctcgacttcggccagtgtgtggatcagaacaggcaacagcagttcgcgttcctcttcggggtggatgaattctgtatccagaggtttattaattttgtggtgaaattggaaaattccaagctgaaagtgagcaaaaaccagagaacactgccattaggaacgactaatttcccgtttttgcattag

SEQ ID NO: 78945 - DNA, 723 bp, Artificial Sequence
  derived and/or modified sequence
atggcttttccaaagaaaaaattgcaagggctggtagcagccacgatcactccgatgaccgagaatggggagattaatttctctgtcatcgggcagtatgtggactatttagttaaagagcagggggtgaagaacatcttcgttaacgggacaaccggagaggggctaagcctttctgtgtccgaaagacgccaagtagctgaagaatgggtgaccaagggtaaagacaagctagatcaggtgattatccatgtgggagcactttccttgaaagaaagccaggagcttgcccagcacgccgctgagatcggtgccgacggcatagccgtaattgcccctttcttcctcaagccctggacaaaggatatcctgatcaacttcctgaaggaagtagccgcagcagcacccgctctgccattctattactatcacattcctgccctgactggtgtaaagattcgcgctgaagaactgttagatggcatcctggataaaattcctactttccagggcctcaagtttagcgataccgatctgctagactttggccagtgcgtcgatcagaacagacagcagcagtttgcttttcttttcggggtagatgaattttgcatccagagatttataaactttgttgtcaaattggagaattcaaaactcaaggtgtccaaaaaccaacgaacacttccactgggaactacaaatttccccttcctccactag

SEQ ID NO: 78946 - DNA, 723 bp, Artificial Sequence
  derived and/or modified sequence
atggccttccccaagaagaagctgcagggcctggtggccgccaccatcacccccatgaccgagaacggcgagatcaacttcagcgtgatcggccagtacgtggactacctggtgaaggagcagggcgtgaagaacatcttcgtgaacggcaccaccggcgagggcctgagcctgagcgtgagcgagagaagacaggtggccgaggagtgggtgaccaagggcaaggacaagctggaccaggtgatcatccacgtgggcgccctgagcctgaaggagagccaggagctggcccagcacgccgccgagatcggcgccgacggcatcgccgtgatcgcccccttcttcctgaagccctggaccaaggacatcctgatcaacttcctgaaggaggtggccgccgccgcccccgccctgcccttctactactaccacatccccgccctgaccggcgtgaagatcagagccgaggagctgctggacggcatcctggacaagatccccaccttccagggcctgaagttcagcgacaccgacctgctggacttcggccagtgcgtggaccagaacagacagcagcagttcgccttcctgttcggcgtggacgagttctgcatccagagattcatcaacttcgtggtgaagctggagaacagcaagctgaaggtgagcaagaaccagagaaccctgcccctgggcaccaccaacttccccttcctgcactag

SEQ ID NO: 78947 - DNA, 330 bp, Artificial Sequence
  derived and/or modified sequence
atggcatttccaaaaaagaaactgcagggcttggtggccgcaaccattacgccaatgaccgaaaatggcgagatcaacttctctgttataggacagtacgtggactatttggtaaaggaacagggtgtcaagaatatcttcgttaatgggacaacaggcgagggattgtccctgtcggtttccgaacgccggcaggtggccgaagagtgggtgactaagggaaaagacaagtcaaatcatcacaagctcgggactataagaaccactcagagcagaagatcttcatttaggagacagcttaaagcgtggcacagcggcagccacctctag

SEQ ID NO: 78948 - DNA, 330 bp, Artificial Sequence
  derived and/or modified sequence
atggccttccccaagaagaagctgcagggcctggtggccgccaccatcacccccatgacagaaaatggagagatcaacttcagcgtcatcggccagtatgtggactacctggtgaaggagcagggcgtgaagaacatctttgtgaatggcaccaccggggagggcctgagcctgtctgtgtctgaaagacggcaggtggccgaggagtgggtgaccaagggcaaggacaagagcaaccaccacaagctgggcaccatccgcaccacccagagccgccgcagcagcttccggcggcagctgaaggcctggcacagcggcagccacctgtag

SEQ ID NO: 78949 - DNA, 352 bp, Artificial Sequence
  derived and/or modified sequence
ttccagacctaccagcagctcaatggccttcccaaagaagaaacttcagggtcttgtggctgcaaccatcacgccaatgactgagaatggagaaatcaacttttcagtaattggtcagtatgtggattatcttgtgaaagaacagggagtgaagaacatttttgtgaatggcacaacaggagaaggcctgtccctgagcgtctcagagcgtcgccaggttgcagaggagtgggtgacaaaagggaaggacaagtcaaaccatcataagttggggaccatccgcacaacccaaagtagacggagtagctttagaagacagctgaaggcctggcacagtggctcacacctgtaa

SEQ ID NO: 78950 - DNA, 330 bp, Artificial Sequence
  derived and/or modified sequence
atggccttccccaagaagaagctgcagggcctggtggccgccaccataacacctatgactgagaacggtgagattaacttcagtgtgatcggacagtatgttgattatcttgtcaaggaacagggagttaagaatattttcgtcaacggaacgactggcgagggactctccctgtcagtaagcgagcggagacaggtagccgaggaatgggtgaccaagggcaaagataagtctaatcatcacaagctcggaactattcgcactactcagtcccgcagatcttctttccggcgacagttaaaagcctggcactctggatctcatctgtag

SEQ ID NO: 78951 - DNA, 330 bp, Artificial Sequence
  derived and/or modified sequence
atggccttcccaaaaaagaagctccaggggttagttgccgcaactataaccccaatgactgagaacggcgaaataaacttcagtgtaattggccaatatgtggactacttggtcaaggagcagggtgttaaaaacatatttgtgaacggaactaccggcgaaggactctccttgagtgtgagcgaacgcaggcaggtggccgaggagtgggtcactaaagggaaggacaagagcaaccaccacaagctcggaacaattcgcactacacagtctcggagatcctcttttagacgccaattgaaggcgtggcatagcggatcccacctgtag

SEQ ID NO: 78952 - DNA, 330 bp, Artificial Sequence
  derived and/or modified sequence
atggccttccccaagaagaagctgcagggcctggtggccgccaccatcacccccatgaccgagaacggcgagatcaacttcagcgtgatcggccagtacgtggactacctggtgaaggagcagggcgtgaagaacatcttcgtgaacggcaccaccggcgagggcctgagcctgagcgtgagcgagagaagacaggtggccgaggagtgggtgaccaagggcaaggacaagagcaaccaccacaagctgggcaccatcagaaccacccagagcagaagaagcagcttcagaagacagctgaaggcctggcacagcggcagccacctgtag

SEQ ID NO: 78953 - protein, 575 aa, Artificial Sequence
  derived and/or modified sequence
MDLVLKRCLLHLAVIGALLAVGATKGSQVWGGQPVYPQETDDACIFPDGGPCPSGSWSQKRSFVYVWKTWGQYWQVLGGPVSGLSIGTGRAMLGTHTMEVTVYHRRGSRSYVPLAHSSSAFTITDQVPFSVSVSQLRALDGGNKHFLRNQPLTFALQLHDPSGYLAEADLSYTWDFGDSSGTLISRALVVTHTYLEPGPVTAQVVLQAAIPLTSCGSSPVPGTTDGHRPTAEAPNTTAGQVPTTEVVGTTPGQAPTAEPSGTTSVQVPTTEVISTAPVQMPTAESTGMTPEKVPVSEVMGTTLAEMSTPEATGMTPAEVSIVVLSGTTAAQVTTTEWVETTARELPIPEPEGPDASSIMSTESITGSLGPLLDGTATLRLVKRQVPLDCVLYRYGSFSVTLDIVQGIESAEILQAVPSGEGDAFELTVSCQGGLPKEACMEISSPGCQPPAQRLCQPVLPSPACQLVLHQILKGGSGTYCLNVSLADTNSLAVVSTQLIMPGQEAGLGQVPLIVGILLVLMAVVLASLIYRRRLMKQDFSVPQLPHSSSHWLRLPRIFCSCPIGENSPLLSGQQV

SEQ ID NO: 78954 - DNA, 1728 bp, Artificial Sequence
  derived and/or modified sequence
atggacctggtgctgaagcggtgcctgctgcacctggccgtgatcggtgcgcttctggctgtcggggcaacgaaaggctctcaggtgtggggcgggcagcccgtgtaccctcaggaaactgatgacgcttgcatcttccctgacggaggcccatgcccatcaggctcctggtctcagaaacgatcttttgtgtatgtttggaagacttggggccagtattggcaggtactaggcggccctgtcagcggtctgagtataggcaccggccgagccatgctaggcacacatactatggaagtaactgtgtaccacagaaggggaagtagatcctatgtgcctctggcacatagtagcagtgcctttacgattacagatcaggtgcctttctccgtaagcgtttcccagctgcgagctttggatggcggcaacaagcattttttgagaaatcaaccacttacgttcgccctgcaactgcatgatccctccggctacctcgccgaggcagatctgagctacacctgggatttcggagactcctccggcaccctgatcagcagagcacttgtggtgacccacacttacctggagcctggcccagtgaccgcccaggtcgtgctccaggccgctatcccactgaccagttgcggatccagtccagtgcccgggactaccgatggacaccggccaaccgccgaagctcctaacaccacagccggccaggtcccaactacggaagtggtgggaaccacccccggacaggcacccaccgcagagccctcaggcaccactagcgtccaagtgccaacgaccgaagttatttccaccgcgcctgtgcagatgcctaccgccgaatctaccggcatgacccctgaaaaagtacccgtatctgaggtgatgggcaccactctggccgaaatgtctacacccgaagccacaggtatgactcccgctgaggtgagcatcgtcgtgctgtccggaaccacggctgctcaggtgaccaccaccgagtgggtggagactacagctagagagttaccaattcccgagccagaggggcctgatgcttcaagtataatgtcaacagagtccatcactggttccctgggcccacttctggatgggaccgccactctgcggcttgtcaagagacaggtgcctctcgattgcgtgctctatcgctacgggagctttagtgtgaccctggacattgtacagggaatcgaatcagctgagatcctgcaggctgtaccgagcggggagggagacgctttcgaacttaccgtgtcctgtcaggggggtcttcccaaggaagcctgcatggagatcagcagccctggctgccagcccccggcccagaggctttgccagcccgtgttgccttcacccgcatgccaattggtgctccatcagattctgaaaggaggctctgggacttactgcctgaacgtgtcactcgcagacaccaattctctggcagttgtctctacccagctgattatgcccgggcaggaagctgggctgggccaggttccattgattgtaggcatcttgttagtcctgatggccgtggttctggcaagtctaatatataggcgaagacttatgaaacaggatttttctgtgccacagttgccccactcatcctcacattggttgcggctgccacggatattttgctcctgtcctatcggtgagaactccccacttcttagcggacagcaggtgtag

SEQ ID NO: 78955 - DNA, 1728 bp, Artificial Sequence
  derived and/or modified sequence
atggacttggtgctcaagcggtgtttacttcaccttgctgtgatcggcgctctgctggccgtcggggcaactaaagggagccaggtgtggggcggacagccggtgtatcctcaggaaaccgatgacgcgtgcattttccctgacgggggtccgtgcccatcagggtcgtggtctcagaagcgctcatttgtgtacgtgtggaagacctggggccagtattggcaagtactgggcggacctgttagtggcctgagcattggaactgggagagcaatgctcggaactcacaccatggaagtaactgtttaccacagacgcggttctcggtcctacgtgcctcttgcacacagtagctctgccttcaccatcaccgatcaggtccctttcagcgtctctgttagccagctgagagcacttgacggtggaaataagcactttctgcggaatcagcctttgactttcgccttgcagctacacgacccatccggatacttagctgaggctgatttgtcctatacctgggacttcggagattccagtggtaccctgattagcagggcactggttgtaactcacacatatttggaaccaggacctgtgacagcccaggtggtgctccaagccgcaatccccctgacatcttgcgggtcctcccctgtgcccggtaccacagatgggcatcggccaaccgcggaagccccaaacaccactgccggacaggtcccgactaccgaggtggtgggtacgacgcctgggcaggcaccgacggccgagccatccgggaccacatccgtgcaggtgccaacgacagaggtaattagtacagctcccgtccaaatgccaacagctgaatcgacagggatgacaccagaaaaagtgcccgtgtcagaggtaatgggaacaactctggccgaaatgtccacgccggaggccacaggaatgacaccagcagaggtctccattgtagtccttagcgggacaaccgccgcacaggtgactactaccgagtgggtggagacaaccgctcgcgaattgcctatacctgagcctgagggcccagacgcctcttctatcatgagcaccgagagcatcactggttccctgggcccattgctcgatggcacggctacactgagactagtaaaaagacaggttcctttagactgcgtgctgtatcgctatggctccttttccgtcacactcgacattgtgcaaggaatcgagtcagccgagatcctccaagctgtcccatcaggagagggggacgcctttgagcttacggtcagttgtcaagggggactccccaaggaggcatgtatggagatttcatcacccggatgtcagcccccagcccagcggctgtgtcagccggtcctgcctagccctgcatgccagctcgtcttacaccagatcttgaaaggaggtagcggaacctattgcctcaacgtgtccctcgccgacacgaacagccttgccgtggtctctacacaactaattatgcccggacaagaggccggtttgggccaagtccccctaattgtgggaatcttgctggtattaatggccgttgtcttagcttcattaatttaccggcgtagattgatgaagcaggattttagcgtcccccagctcccacattccagttcacattggttgcggctacccaggatattctgttcgtgcccaattggagaaaattctcctttgctttctggacagcaggtttag

SEQ ID NO: 78956 - DNA, 1728 bp, Artificial Sequence
  derived and/or modified sequence
atggacctggtccttaaaagatgcctgcttcacctcgcagtcattggagctcttctggccgtaggtgcgactaaaggaagccaagtttggggcggccaaccagtctatccccaagagactgacgacgcctgtatttttccagatggcgggccgtgcccgtccggcagttggtctcagaaacggtccttcgtctacgtatggaaaacatggggccagtattggcaggtgctcggcggaccggtgtccgggctgagcatcggcacgggccgtgccatgcttggaacccacacaatggaggtcacggtttatcacagaagaggttcgcggtcttacgtcccattggctcatagtagcagtgcctttactatcacggaccaagtccccttttcagtgtccgttagtcagcttagggctctggatggtggcaataagcattttctccggaatcagcccttaaccttcgcattgcagttgcacgatccgtcaggctacttagccgaggcagacctttcctatacctgggacttcggtgactcgtcgggcaccctcatcagccgcgctctggttgtcacacatacctatctggaacctggacccgtaactgcacaggttgtgctgcaggccgccattcctttgactagctgtggctctagccctgtcccagggaccaccgacggacacagacccactgctgaagctccaaacacgaccgccggccaggtacctaccaccgaggtcgtcggaactacacccggtcaagccccaacagcagagccttctggcaccaccagcgtccaggtgcctactactgaggtgatctccaccgcaccggttcagatgccgactgcagagtctactggtatgacacccgagaaagtgccagtttctgaggtcatgggcacaacattagcagagatgtcaaccccagaagcgaccggcatgacgcccgctgaagttagtattgtcgttctgtcagggactacagcagcccaggttacaacaactgagtgggtagaaaccacagcacgtgagctcccaatccccgagccagagggccccgacgcctcttcaatcatgtccaccgaaagtatcactgggtccctcgggcccttgctggacggcaccgccaccctcagactggttaagcgccaagtgcccctagactgtgtgctttataggtacggaagctttagtgtcaccttggatattgtgcagggcattgagagcgccgagattctgcaggccgtacccagcggggagggcgatgcatttgaactgaccgtgtcttgccaaggggggctgcccaaagaagcttgcatggagattagctcacccggttgccagccgccagctcaacgcctgtgccaaccggtcttaccttctcccgcctgtcagctggtcttgcaccaaattttaaagggagggagcgggacatactgcctcaatgtgagtctcgccgatacgaactccctggcagtggtctccacacaactcatcatgcccggccaagaggcaggattaggccaagtgcctttgattgtcggaattttgttggtcctcatggcagtggtgcttgccagcctcatatacagacgaaggctgatgaaacaggattttagcgtgccccaactgccacactccagttcgcattggttgagactgccacggatattctgctcatgcccaatcggggagaacagtcccctgctgagtggccaacaggtgtag

SEQ ID NO: 78957 - DNA, 1728 bp, Artificial Sequence
  derived and/or modified sequence
atggacttggtcctaaaaagatgcttgctgcacctcgcagttatcggggctctgctggcagttggagcaacaaagggaagtcaggtgtggggtggccagcctgtgtacccccaagaaacagacgatgcatgtatcttcccagatggcggcccctgcccttctggcagctggtcacagaagcgctcctttgtctacgtatggaagacttggggacaatactggcaggtactcggtgggcccgttagcggcctgtccataggaaccggacgtgctatgctggggacacacacgatggaagtcaccgtttatcaccgccggggctcaagatcttacgtccccctggcacacagctcctctgcattcactattaccgatcaggtcccattcagtgtttctgtgtcacagttacgggctttagatggaggcaataaacactttttacggaatcagccgcttaccttcgccttgcagttacatgatccctccggatatctcgccgaggcagacctctcatacacttgggactttggtgattcttctggcaccctcatttcccgcgcgctggtggtgactcacacatacctcgagccgggcccagttacggctcaggtcgtgctccaggctgccatacccctaacaagttgtgggagctcccctgtgccaggtaccactgatggccaccgtcctaccgccgaggcacccaacactacggccgggcaggtgccaacaaccgaggtcgtgggaaccaccccgggtcaggcacctacagctgaacctagtggaaccaccagtgtccaggtcccaacaacagaggtaatttcaaccgcccccgtgcagatgcccaccgcagaatcaaccggcatgaccccagagaaagtgcctgtaagtgaagtcatgggcacaacattagcagagatgtcaaccccagaagcgaccggcatgacgcccgctgaagttagtattgtcgttctgtcagggactacagcagcccaggttacaacaactgagtgggtagaaaccacagcacgtgagctcccaatccccgagccagagggccccgacgcctcttcaatcatgtccaccgaaagtatcactgggtccctcgggcccttgctggacggcaccgccaccctcagactggttaagcgccaagtgcccctagactgtgtgctttataggtacggaagctttagtgtcaccctcgatattgtacaggggattgagtcagccgagatcctccaggccgtcccatcaggcgagggagatgcgttcgaactaaccgtttcctgtcaaggcggactcccaaaagaggcttgcatggagatcagctcacctggctgccaaccgccagcccagcgtctgtgtcagcccgtcctcccttctccggcctgtcagcttgtgcttcatcagattctcaagggtggatctggaacctactgcctcaacgtctctcttgccgatacaaactctcttgccgttgtgagtactcaacttattatgccagggcaggaagccggcttaggccaggtccccctaatcgtaggcatactgctcgtacttatggccgtcgttctggcctccctgatctatcggagacgccttatgaagcaagacttttccgttccacagttgccccattcaagctcccactggctccgccttccccgaatcttctgttcgtgtccgatcggtgagaactctcctctgctcagcggtcagcaagtctag

SEQ ID NO: 78958 - DNA, 1924 bp, Artificial Sequence
  derived and/or modified sequence
agcccagcgctcctccccgcaaatgatcccgccccaggggcctatcccagtccccccagtgcctttggttgctggagggaagaacacaatggatctggtgctaaaaagatgccttcttcatttggctgtgataggtgctttgctggctgtgggggctacaaaagggagccaggtgtggggaggacagccagtgtatccccaggaaactgacgatgcctgcatcttccctgatggtggaccttgcccatctggctcttggtctcagaagagaagctttgtttatgtctggaagacctggggccaatactggcaagttctagggggcccagtgtctgggctgagcattgggacaggcagggcaatgctgggcacacacaccatggaagtgactgtctaccatcgccggggatcccggagctatgtgcctcttgctcattccagctcagccttcaccattactgaccaggtgcctttctccgtgagcgtgtcccagttgcgggccttggatggagggaacaagcacttcctgagaaatcagcctctgacctttgccctccagctccatgaccccagtggctatctggctgaagctgacctctcctacacctgggactttggagacagtagtggaaccctgatctctcgggcacttgtggtcactcatacttacctggagcctggcccagtcactgcccaggtggtcctgcaggctgccattcctctcacctcctgtggctcctccccagttccaggcaccacagatgggcacaggccaactgcagaggcccctaacaccacagctggccaagtgcctactacagaagttgtgggtactacacctggtcaggcgccaactgcagagccctctggaaccacatctgtgcaggtgccaaccactgaagtcataagcactgcacctgtgcagatgccaactgcagagagcacaggtatgacacctgagaaggtgccagtttcagaggtcatgggtaccacactggcagagatgtcaactccagaggctacaggtatgacacctgcagaggtatcaattgtggtgctttctggaaccacagctgcacaggtaacaactacagagtgggtggagaccacagctagagagctacctatccctgagcctgaaggtccagatgccagctcaatcatgtctacggaaagtattacaggttccctgggccccctgctggatggtacagccaccttaaggctggtgaagagacaagtccccctggattgtgttctgtatcgatatggttccttttccgtcaccctggacattgtccagggtattgaaagtgccgagatcctgcaggctgtgccgtccggtgagggggatgcatttgagctgactgtgtcctgccaaggcgggctgcccaaggaagcctgcatggagatctcatcgccagggtgccagccccctgcccagcggctgtgccagcctgtgctacccagcccagcctgccagctggttctgcaccagatactgaagggtggctcggggacatactgcctcaatgtgtctctggctgataccaacagcctggcagtggtcagcacccagcttatcatgcctggtcaagaagcaggccttgggcaggttccgctgatcgtgggcatcttgctggtgttgatggctgtggtccttgcatctctgatatataggcgcagacttatgaagcaagacttctccgtaccccagttgccacatagcagcagtcactggctgcgtctaccccgcatcttctgctcttgtcccattggtgagaacagccccctcctcagtgggcagcaggtctgagtactctcatatgatgctgtgattttcctggagttgacagaaacacctatatttcccccagtcttccctgggagactactattaactgaaataaatactcagagcctg

SEQ ID NO: 78959 - DNA, 1728 bp, Artificial Sequence
  derived and/or modified sequence
atggacctggtgctgaagagatgcctgctgcacctggccgtgatcggcgccctgctggccgtgggcgccaccaagggcagccaggtgtggggcggccagcccgtgtacccccaggagaccgacgacgcctgcatcttccccgacggcggcccctgccccagcggcagctggagccagaagagaagcttcgtgtacgtgtggaagacctggggccagtactggcaggtgctgggcggccccgtgagcggcctgagcatcggcaccggcagagccatgctgggcacccacaccatggaggtgaccgtgtaccacagaagaggcagcagaagctacgtgcccctggcccacagcagcagcgccttcaccatcaccgaccaggtgcccttcagcgtgagcgtgagccagctgagagccctggacggcggcaacaagcacttcctgagaaaccagcccctgaccttcgccctgcagctgcacgaccccagcggctacctggccgaggccgacctgagctacacctgggacttcggcgacagcagcggcaccctgatcagcagagccctggtggtgacccacacctacctggagcccggccccgtgaccgcccaggtggtgctgcaggccgccatccccctgaccagctgcggcagcagccccgtgcccggcaccaccgacggccacagacccaccgccgaggcccccaacaccaccgccggccaggtgcccaccaccgaggtggtgggcaccacccccggccaggcccccaccgccgagcccagcggcaccaccagcgtgcaggtgcccaccaccgaggtgatcagcaccgcccccgtgcagatgcccaccgccgagagcaccggcatgacccccgagaaggtgcccgtgagcgaggtgatgggcaccaccctggccgagatgagcacccccgaggccaccggcatgacccccgccgaggtgagcatcgtggtgctgagcggcaccaccgccgcccaggtgaccaccaccgagtgggtggagaccaccgccagagagctgcccatccccgagcccgagggccccgacgccagcagcatcatgagcaccgagagcatcaccggcagcctgggccccctgctggacggcaccgccaccctgagactggtgaagagacaggtgcccctggactgcgtgctgtacagatacggcagcttcagcgtgaccctggacatcgtgcagggcatcgagagcgccgagatcctgcaggccgtgcccagcggcgagggcgacgccttcgagctgaccgtgagctgccagggcggcctgcccaaggaggcctgcatggagatcagcagccccggctgccagccccccgcccagagactgtgccagcccgtgctgcccagccccgcctgccagctggtgctgcaccagatcctgaagggcggcagcggcacctactgcctgaacgtgagcctggccgacaccaacagcctggccgtggtgagcacccagctgatcatgcccggccaggaggccggcctgggccaggtgcccctgatcgtgggcatcctgctggtgctgatggccgtggtgctggccagcctgatctacagaagaagactgatgaagcaggacttcagcgtgccccagctgccccacagcagcagccactggctgagactgcccagaatcttctgcagctgccccatcggcgagaacagccccctgctgagcggccagcaggtgtag

SEQ ID NO: 78960 - DNA, 1728 bp, Artificial Sequence
  derived and/or modified sequence
atggacctcgtactgaagcgttgcttgctgcatctggctgtcatcggagcactgcttgccgtcggcgctactaaagggtcccaggtctgggggggccagccagtgtatcctcaggagaccgacgatgcctgtatttttcccgacggcgggccttgcccgtctggttcttggtctcagaagcgaagttttgtttatgtttggaaaacatggggtcagtattggcaagttcttggggggcccgtctcaggacttagtatcggaactggaagggccatgctcggcacccatactatggaagtcaccgtgtatcacagaaggggcagcaggagttatgtgcccctggctcattcttcctctgcgtttactatcaccgatcaagtgcctttcagcgtttctgtctcacagctgagggctctggacggcggcaacaaacactttttaaggaatcagccactcacatttgccctgcagttacatgatccttcaggctatctggccgaagctgacctgtcctacacctgggacttcggtgacagctcaggcacccttatttctagggctttagttgtgactcatacctatctcgagcccgggccggttacggctcaggtggtactccaggccgctatcccgctgacctcctgcggctcctcacccgtgcctggtactaccgacgggcaccgccctacggcggaagcacccaacacgactgccggtcaagttccaacaactgaggtagtaggcactactccagggcaagcgcccactgcagagccctctggcaccacatccgtccaggttcccactacagaagtgatctcaactgcccccgtgcagatgcccacagccgaatccactgggatgacccccgagaaagtgcccgtgtcagaagttatgggcactacgttggccgagatgtccacccccgaagccactgggatgacacctgccgaggtgtcaattgttgttttgtctggcactacagcagcacaggtcaccaccaccgaatgggtggaaaccaccgcccgagagctgcctattccagagcccgaaggaccagacgcatctagtatcatgagtactgaaagcatcaccggtagtctgggacctttactggacggtaccgctacgttacggcttgtgaagcgtcaggtgccattggattgcgtgctgtacagatatggttccttctctgtaacgctcgacatcgtacagggaattgaaagtgcagagattcttcaggcagtccccagtggcgaaggagatgcttttgagcttactgttagctgtcagggaggcctgcccaaggaggcatgcatggaaattagctctccgggatgccaaccgcccgcccagcggctgtgtcagcccgtcctgccctcaccagcttgccaactggtgcttcatcaaattctcaaaggtggctctggtacctattgtcttaacgtctccctggctgacacaaactcactcgcagttgtgtcaacacaattgatcatgcctggtcaggaagccggcctgggacaggtgcccctgatagttgggatactattggtcctgatggcagtcgttctcgcctcccttatttaccgacgacgtttaatgaaacaagacttcagtgtgccacagctccctcattcttctagccactggctccggcttccacggatcttctgttcgtgcccaatcggcgaaaactcccctctcttgagtggccagcaggtttag

SEQ ID NO: 78961 - DNA, 1728 bp, Artificial Sequence
  derived and/or modified sequence
atggacctggtgctgaagcgctgcctgctgcacctggccgtgattggagccctgctggccgtgggcgccaccaagggcagccaggtgtggggcggccagcctgtgtacccccaggagacagatgatgcctgcatcttcccagatggcggcccctgccccagcggctcctggagccagaagaggagctttgtgtatgtgtggaagacctggggccagtactggcaggtgctgggcggccctgtgtctggcctgagcatcggcaccggccgggccatgctgggcacccacaccatggaggtgacagtgtaccacagaagaggcagccgctcctatgtgcccctggcccacagcagcagcgccttcaccatcacagaccaggtgcccttctctgtgtctgtgtcccagctgcgggccctggatggcggcaacaagcacttcctgaggaaccagcccctgacctttgccctgcagctgcatgaccccagcggctacctggccgaggccgacctgagctacacctgggactttggagacagcagcggcaccctcatcagccgggccctggtggtgacccacacctacctggagcccggccctgtgacagcccaggtggtgctgcaggccgccatccccctgaccagctgtggcagcagccctgtgcccggcaccacagatggccaccggcccacagctgaggcccccaacaccacagctggccaggtgcccaccacagaggtggtgggcaccaccccaggccaggcccccacagctgagcccagcggcaccacctctgtgcaggtgcccaccacagaggtgatcagcacagcccctgtgcagatgcccacagctgagagcacaggcatgaccccagagaaggtgcctgtgtctgaggtgatgggcaccaccctggccgagatgagcaccccagaggccaccggcatgaccccagctgaggtgtccatcgtggtgctgagcggcaccacagctgcccaggtgaccaccacagagtgggtggagaccacagcccgggagctgcccatccctgagcctgagggcccagatgccagcagcatcatgagcacagagagcatcaccggcagcctgggccccctgctggatggaacagccaccctgcggctggtgaagaggcaggtgcccctggactgtgtgctgtaccgctatggcagcttctctgtgaccctggacatcgtgcagggcattgaatctgctgagatcctgcaggccgtgcccagcggggagggagatgcctttgagctgactgtgtcctgccagggcggcctgcccaaggaggcctgcatggagatcagcagccctggctgccagcccccagcccagaggctgtgccagcctgtgctgcccagccctgcctgccagctggtgctgcaccagatcctgaagggcggcagcggcacctactgcctgaatgtgtccctggccgacaccaacagcctggccgtggtgtccacccagctgatcatgcctggccaggaggccggcctgggccaggtgcccctgattgtgggcatcctgctggtgctgatggctgtggtgctggccagcctcatctacagaagaaggctgatgaagcaggacttctctgtgccccagctgccccacagcagcagccactggctgcggctgccccgcatcttctgcagctgccccatcggggagaacagccccctgctgagcggccagcaggtgtag

SEQ ID NO: 78962 - RNA, 1728 nt, Artificial Sequence
  derived and/or modified sequence
auggaccugguccuuaaaagaugccugcuucaccucgcagucauuggagcucuucuggccguaggugcgacuaaaggaagccaaguuuggggcggccaaccagucuauccccaagagacugacgacgccuguauuuuuccagauggcgggccgugcccguccggcaguuggucucagaaacgguccuucgucuacguauggaaaacauggggccaguauuggcaggugcucggcggaccgguguccgggcugagcaucggcacgggccgugccaugcuuggaacccacacaauggaggucacgguuuaucacagaagagguucgcggucuuacgucccauuggcucauaguagcagugccuuuacuaucacggaccaaguccccuuuucaguguccguuagucagcuuagggcucuggaugguggcaauaagcauuuucuccggaaucagcccuuaaccuucgcauugcaguugcacgauccgucaggcuacuuagccgaggcagaccuuuccuauaccugggacuucggugacucgucgggcacccucaucagccgcgcucugguugucacacauaccuaucuggaaccuggacccguaacugcacagguugugcugcaggccgccauuccuuugacuagcuguggcucuagcccugucccagggaccaccgacggacacagacccacugcugaagcuccaaacacgaccgccggccagguaccuaccaccgaggucgucggaacuacacccggucaagccccaacagcagagccuucuggcaccaccagcguccaggugccuacuacugaggugaucuccaccgcaccgguucagaugccgacugcagagucuacugguaugacacccgagaaagugccaguuucugaggucaugggcacaacauuagcagagaugucaaccccagaagcgaccggcaugacgcccgcugaaguuaguauugucguucugucagggacuacagcagcccagguuacaacaacugaguggguagaaaccacagcacgugagcucccaauccccgagccagagggccccgacgccucuucaaucauguccaccgaaaguaucacugggucccucgggcccuugcuggacggcaccgccacccucagacugguuaagcgccaagugccccuagacugugugcuuuauagguacggaagcuuuagugucaccuuggauauugugcagggcauugagagcgccgagauucugcaggccguacccagcggggagggcgaugcauuugaacugaccgugucuugccaaggggggcugcccaaagaagcuugcauggagauuagcucacccgguugccagccgccagcucaacgccugugccaaccggucuuaccuucucccgccugucagcuggucuugcaccaaauuuuaaagggagggagcgggacauacugccucaaugugagucucgccgauacgaacucccuggcaguggucuccacacaacucaucaugcccggccaagaggcaggauuaggccaagugccuuugauugucggaauuuuguugguccucauggcaguggugcuugccagccucauauacagacgaaggcugaugaaacaggauuuuagcgugccccaacugccacacuccaguucgcauugguugagacugccacggauauucugcucaugcccaaucggggagaacaguccccugcugaguggccaacagguguag

SEQ ID NO: 78963 - RNA, 1728 nt, Artificial Sequence
  derived and/or modified sequence
auggacuugguccuaaaaagaugcuugcugcaccucgcaguuaucggggcucugcuggcaguuggagcaacaaagggaagucaggugugggguggccagccuguguacccccaagaaacagacgaugcauguaucuucccagauggcggccccugcccuucuggcagcuggucacagaagcgcuccuuugucuacguauggaagacuuggggacaauacuggcagguacucggugggcccguuagcggccuguccauaggaaccggacgugcuaugcuggggacacacacgauggaagucaccguuuaucaccgccggggcucaagaucuuacgucccccuggcacacagcuccucugcauucacuauuaccgaucaggucccauucaguguuucugugucacaguuacgggcuuuagauggaggcaauaaacacuuuuuacggaaucagccgcuuaccuucgccuugcaguuacaugaucccuccggauaucucgccgaggcagaccucucauacacuugggacuuuggugauucuucuggcacccucauuucccgcgcgcugguggugacucacacauaccucgagccgggcccaguuacggcucaggucgugcuccaggcugccauaccccuaacaaguugugggagcuccccugugccagguaccacugauggccaccguccuaccgccgaggcacccaacacuacggccgggcaggugccaacaaccgaggucgugggaaccaccccgggucaggcaccuacagcugaaccuaguggaaccaccaguguccaggucccaacaacagagguaauuucaaccgcccccgugcagaugcccaccgcagaaucaaccggcaugaccccagagaaagugccuguaagugaagucaugggcacaacauuagcagagaugucaaccccagaagcgaccggcaugacgcccgcugaaguuaguauugucguucugucagggacuacagcagcccagguuacaacaacugaguggguagaaaccacagcacgugagcucccaauccccgagccagagggccccgacgccucuucaaucauguccaccgaaaguaucacugggucccucgggcccuugcuggacggcaccgccacccucagacugguuaagcgccaagugccccuagacugugugcuuuauagguacggaagcuuuagugucacccucgauauuguacaggggauugagucagccgagauccuccaggccgucccaucaggcgagggagaugcguucgaacuaaccguuuccugucaaggcggacucccaaaagaggcuugcauggagaucagcucaccuggcugccaaccgccagcccagcgucugugucagcccguccucccuucuccggccugucagcuugugcuucaucagauucucaaggguggaucuggaaccuacugccucaacgucucucuugccgauacaaacucucuugccguugugaguacucaacuuauuaugccagggcaggaagccggcuuaggccaggucccccuaaucguaggcauacugcucguacuuauggccgucguucuggccucccugaucuaucggagacgccuuaugaagcaagacuuuuccguuccacaguugccccauucaagcucccacuggcuccgccuuccccgaaucuucuguucguguccgaucggugagaacucuccucugcucagcggucagcaagucuag

SEQ ID NO: 78964 - protein, 137 aa, Artificial Sequence
  derived and/or modified sequence
MDCEVNNGSSLRDECITNLLVFGFLQSCSDNSFRRELDALGHELPVLAPQWEGYDELQTDGNRSSHSRLGRIEAGASDNNTASAEEETEAAGSVAVERGLHGAATVILKVKKTSSGILPGTSPRSGTAWTVASLRAW

SEQ ID NO: 78965 - protein, 195 aa, Artificial Sequence
  derived and/or modified sequence
MDCEVNNGSSLRDECITNLLVFGFLQSCSDNSFRRELDALGHELPVLAPQWEGYDELQTDGNRSSHSRLGRIEADSESQEDIIRNIARHLAQVGDSMDRSIPPGLVNGLALQLRNTSRSEEDRNRDLATALEQLLQAYPRDMEKEKTMLVLALLLAKKVASHTPSLLRDVFHTTVNFINQNLRTYVRSLARNGMD

SEQ ID NO: 78966 - DNA, 414 bp, Artificial Sequence
  derived and/or modified sequence
atggactgcgaggtaaacaatggctcctctctcagggatgaatgtattaccaatttactggtttttggatttctccagagctgctctgataactcttttcggagagaactcgacgcgcttggtcacgagttacccgtgctggcccctcagtgggaagggtacgatgaactccagactgatgggaacaggtcaagtcattccagactcgggcggatagaagcaggtgcctctgacaataatactgcctcagctgaagaggaaaccgaagccgctggatctgtggctgtcgagagaggcttgcatggagctgccacagtgattctgaaagtgaagaagacaagcagcggcattctgcctggcaccagtccccggtctggaacagcatggacggtcgcaagcctgcgggcctggtag

SEQ ID NO: 78967 - DNA, 588 bp, Artificial Sequence
  derived and/or modified sequence
atggattgtgaagtgaacaacggttcttccctcagagacgagtgtattacaaatctgctggtgttcggcttcctacagtcttgctcagacaatagctttcgccgagaactcgatgctttgggccacgagctgcctgttctcgccccacagtgggagggatatgacgaattgcagactgacggcaaccgatccagtcatagccggctcggccgtattgaggcagatagcgagtctcaggaagatattataagaaacattgcacggcaccttgctcaggtcggggactcaatggatcggtctataccaccgggactcgtgaacggccttgctctacagctgcgtaataccagtcgctccgaggaggaccggaatagagatcttgctactgcccttgagcaactgcttcaggcttaccctcgagatatggagaaagagaaaaccatgttagtattggcacttctcctggctaagaaggtcgcctctcacaccccaagcctgcttcgggatgtcttccacacgacggtgaatttcattaaccagaacttgcggacctatgtgaggtctctggctcggaatggcatggattag

SEQ ID NO: 78968 - DNA, 588 bp, Artificial Sequence
  derived and/or modified sequence
atggattgtgaagtcaacaatggctctagcctgagggatgaatgtatcacgaacctgctggtgtttgggttcctccaaagctgttccgacaattcctttcgaagagagctggatgcattggggcacgagctgccggtgctggccccccagtgggaggggtatgatgagctgcagaccgacggaaatagatcctcccactcccggttgggccgtatagaggcagattcagagagccaggaggatatcatccgaaatattgctcgccacctggcccaggtcggagactctatggacagaagtatcccgcctgggctggttaatggtctggcattacagctgaggaacacctccagatccgaggaggaccgcaatagggaccttgctacagccctggagcagctcctgcaagcctacccacgagacatggagaaagagaaaacgatgctcgtgctggctctgctgctcgccaaaaaggtagcctcccacaccccaagcctgctacgcgatgtgtttcatactaccgtgaatttcatcaaccagaatctgcgcacatatgtgagaagcctagctaggaatggaatggattag

SEQ ID NO: 78969 - DNA, 414 bp, Artificial Sequence
  derived and/or modified sequence
atggactgtgaggtgaacaacggcagcagcctgagagatgagtgcatcaccaacctgctggtgtttggcttcctgcagagctgcagcgacaacagcttccggcgggagctggatgccctgggccacgagctgcctgtgctggccccccagtgggagggctatgatgagctgcagacagatggcaacagaagcagccacagccggctgggccgcatcgaggccggggccagtgacaacaacacagccagcgctgaggaggagacagaggccgccggctctgtggccgtggagcggggcctgcatggagctgccaccgtcatcctgaaggtgaagaagaccagcagcggcatcctgcccggcaccagccccaggtctggaacagcctggacagtggccagcctgcgggcctggtag

SEQ ID NO: 78970 - DNA, 588 bp, Artificial Sequence
  derived and/or modified sequence
atggactgtgaggtgaacaacggcagcagcctgagagatgagtgcatcaccaacctgctggtgtttggcttcctgcagagctgcagcgacaacagcttccggcgggagctggatgccctgggccacgagctgcctgtgctggccccccagtgggagggctatgatgagctgcagacagatggcaacagaagcagccacagccggctgggccgcatcgaggccgacagcgagagccaggaggacatcatccggaacatcgcccggcacctggcccaggtgggggacagcatggacaggagcatccccccaggcctggtgaatggcctggccctgcagctgaggaacaccagccgctcagaagaagatagaaacagagacctggccacagccctggagcagctgctgcaggcctacccccgggacatggagaaggagaagaccatgctggtgctggccctgctgctggccaagaaggtggccagccacacccccagcctgctgagagatgtgttccacaccaccgtgaacttcatcaaccagaacctgcggacctacgtgcgcagcctggccagaaatggcatggactag

SEQ ID NO: 78971 - DNA, 414 bp, Artificial Sequence
  derived and/or modified sequence
atggactgcgaggtgaacaacggcagcagcctgcgggacgagtgcataaccaacttattggtgttcggttttctgcagagttgtagcgataacagcttccgcagagagctagacgcccttgggcatgagctgcccgtgctggccccccagtgggagggctacgatgagctccagaccgatggcaacaggtcatctcattctcgcctgggcagaatagaggctggagcctcagacaacaacacagcctccgccgaggaggaaacagaagcagcaggcagcgtcgcggtcgagcgtggactgcacggggccgctactgttattttgaaggtcaagaagacctctagcggaattctgcctggaacttccccaaggagtgggacagcttggacagttgccagcctgagggcctggtag

SEQ ID NO: 78972 - DNA, 588 bp, Artificial Sequence
  derived and/or modified sequence
atggactgcgaggtgaacaacggcagcagcctgcgggacgagtgcatcacaaacctgctagttttcggcttcctccagagctgctccgacaactcattcaggagagagctggatgccctggggcacgagctccccgtgttagccccgcaatgggagggatatgacgagctccagactgacggcaatcgcagctctcattctcgactgggtagaattgaagctgactcagaaagtcaggaggatattataagaaatatagcccgccatttggcccaggtgggggattcaatggatcgcagtatcccacccggtctggtgaatggactcgccctccagttgagaaacacttctagaagtgaggaggatcgaaatcgtgacctggccacggccctggagcagctcctccaggcttaccctagggacatggagaaagagaaaacgatgttagtgctcgccctgctactagccaagaaggtcgcctctcacacccctagtctgctgagagacgtgtttcataccacggtgaatttcataaaccagaatttgcgcacttatgtacgttcccttgcaaggaacggtatggactag

SEQ ID NO: 78973 - DNA, 588 bp, Artificial Sequence
  derived and/or modified sequence
atggactgcgaggtgaacaacggcagcagcctgcgggacgagtgcatcacaaacctgctggtcttcggatttcttcaaagttgcagtgataattcctttagaagagagcttgacgcactagggcatgagctccccgtcctggcaccccagtgggaaggctatgacgagctgcagacggacggaaaccgtagctcacatagcagactcggtaggattgaggcggatagcgagagtcaggaggacattattcgcaacatcgccaggcacctggcccaagtcggagacagcatggataggtctatcccacctggattggtcaacgggctcgcccttcagctgcgaaatacttccaggtccgaagaagaccgaaatcgcgacctcgcgaccgctcttgaacagttgctccaagcatacccgcgcgatatggagaaggaaaaaacaatgctggtgcttgctttacttctggccaaaaaagtggcgtcacacactccctctttattaagggatgtgttccatacgacggtgaactttattaatcagaatctcaggacatacgtccggtccttagcaagaaatggcatggattag

SEQ ID NO: 78974 - DNA, 414 bp, Artificial Sequence
  derived and/or modified sequence
atggattgtgaggtcaacaacggaagtagcttacgcgacgagtgcataacaaacctgcttgttttcggcttcctgcagtcttgcagtgacaattcttttaggcgtgagttggatgctctgggacacgaactgccagttctcgcgccacaatgggaggggtacgatgaattgcagaccgatggcaaccggagctctcacagccggctcggacggatcgaggctggtgcgtctgacaacaacacagcaagtgccgaggaggaaactgaggccgcagggtccgtcgcagtggagcgcggtctgcacggggctgccactgtgattttgaaggtcaaaaaaactagtagcgggatcctccccggaacatcccctcggtcagggacagcatggaccgtcgcgtctctgcgcgcttggtag

SEQ ID NO: 78975 - DNA, 588 bp, Artificial Sequence
  derived and/or modified sequence
atggattgtgaagtcaataatggaagcagcttgcgagacgaatgtatcactaatcttttagtgttcggctttctccagtcctgcagcgataatagctttaggcgtgaacttgatgctcttgggcacgagttgcccgttcttgcccctcagtgggaaggctatgatgaattgcagacagacggaaatagaagctcccactctcgcctcgggaggatcgaagcagactctgaaagccaagaggacatcattagaaatattgccaggcaccttgctcaagtgggcgatagtatggataggtccatcccacctggcttggtgaatggactggctctgcagcttcgaaataccagcaggtccgaggaggatcgcaacagagacctggccaccgcactcgaacagctccttcaggcctacccgagggatatggagaaggaaaaaacaatgctggtgctggctctcctgctcgctaaaaaagtggctagtcacactccgtcacttctgagagatgtgtttcacacgacggtcaactttatcaatcagaacctccggacatatgtgcggagcttggctcggaatggaatggattag

SEQ ID NO: 78976 - DNA, 588 bp, Artificial Sequence
  derived and/or modified sequence
atggactgcgaagtaaacaacggatccagcttacgtgatgagtgcattaccaacctcctcgtctttggcttccttcagtcttgctccgataacagtttccggcgagagcttgacgctcttggacacgaattacctgtgctagcccctcagtgggagggatacgatgagttacagactgacgggaataggtcatctcactctcgtcttggaagaatcgaggctgacagcgaatctcaggaagacataattcgtaatatcgcccgacatctggctcaggtgggagattcaatggatagaagtatccccccaggcttggtcaatggtctcgctctgcagctgcggaacacttcaagatccgaagaagataggaatagagacctggcaaccgcactggaacaactcctgcaggcctacccacgtgacatggagaaggagaaaaccatgctcgtcctggccttgctcctcgccaaaaaagtggcttcacacacaccctcactgttacgcgacgtgttccatacaaccgtgaacttcatcaaccagaacctgcggacctatgtgaggtcacttgccaggaacggaatggactag

SEQ ID NO: 78977 - DNA, 1879 bp, Artificial Sequence
  derived and/or modified sequence
ggaagcgcgcggggcgccataaggaggaagcgggtagtcgaccgtgtccgcgcgcctgggagacgctgcctcggcccggacgcgcccgcgcccccgcggctggagggtgattctgaaagtcaagaagacatcatccggaatattgccaggcacctcgcccaggtcggggacagcatggaccgtagcatccctccgggcctggtgaacggcctggccctgcagctcaggaacaccagccggtcggaggaggaccggaacagggacctggccactgccctggagcagctgctgcaggcctaccctagagacatggagaaggagaagaccatgctggtgctggccctgctgctggccaagaaggtggccagtcacacgccgtccttgctccgtgatgtctttcacacaacagtgaattttattaaccagaacctacgcacctacgtgaggagcttagccagaaatgggatggactgaacggacagttccagaagtgtgactggctaaagctcgatgtggtcacagctgtatagctgcttccagtgtagacggagccctggcatgtcaacagcgttcctagagaagacaggctggaagatagctgtgacttctattttaaagacaatgttaaacttataacccactttaaaatatctacattaatatacttgaatgaaaatgtccatttacacgtatttgaatggccttcatatcatccacacatgaatctgcacatctgtaaatctacacacggtgcctttatttccactgtgcaggttcccacttaaaaattaaattggaaagcaggtttcaaggaagtagaaacaaaatacaatttttttggtaaaaaaaaattactgtttattaaagtacaaccatagaggatggtcttacagcaggcagtatcctgtttgaggaaagcaagaatcagagaaggaacataccccttacaaatgaaaaattccactcaaaatagggactatctatcttaatactaaggaaccaacaatcttcctgtttaaaaaaccacatggcacagagattctgaactaaagtgctgcactcaaatgatgggaagtccggccccagtacacaggggcttgactttttcaacttcgtttcctttgttggagtcaaaaagaaccacttgtggttctaaaaggtgtgaaggtgatttaagggcccaggtcagccactgtttgtttacaaaatcaggtaactaactgcatacactttttctctttccatgacatcaagactttgctaaagacatgaagccacgggtgccagaagctactgcgatgccccgggagttagccccctggtaatagctgtaaacttccaatttctagccatacgctcagctcatccatgcctcagaagtgcatctggagagaacaggtttctaagcataaaagatgaaagagcagttggactttttaaaaattcagcaaagtggttccctctcttagggacagtcaaaaccaagtcacttaggtagtaccaaaataaataaggaaaagcttagctttagaaacagtgcaacactggtctgctgttccagtggtaagctatgtcccaggaatcagtttaaaagcacgacagtggatgctgggtccatatcacacacattgctgtgaacaggaaactcctgtgaccacaacatgaggccactggagacgcatatgagtaagggcactgacggactcatgatttcttcttaccagatgctttcctgttctttaagagtttaaaatcatcagaaaggaaaaacaaactctatattgttcagcatgcaatacataccacgctagggctggctcaattgaaagtgggcaaaagcttacaaatactaaaaagaagtgctgccgcgcagtgtgga

SEQ ID NO: 78978 - DNA, 2126 bp, Artificial Sequence
  derived and/or modified sequence
ggaggaagcgcgcggggcgccataaggaggaagcgggtagtcgaccgtgtccgcgcgcctgggagacgctgcctcggcccggacgcgcccgcgcccccgcggctggagggtggtcaacaacggttccagcctcagggatgagtgcatcacaaacctactggtgtttggcttcctccaaagctgttctgacaacagcttccgcagagagctggacgcactgggccacgagctgccagtgctggctccccagtgggagggctacgatgagctgcagactgatggcaaccgcagcagccactcccgcttgggaagaatagaggcagattctgaaagtcaagaagacatcatccggaatattgccaggcacctcgcccaggtcggggacagcatggaccgtagcatccctccgggcctggtgaacggcctggccctgcagctcaggaacaccagccggtcggaggaggaccggaacagggacctggccactgccctggagcagctgctgcaggcctaccctagagacatggagaaggagaagaccatgctggtgctggccctgctgctggccaagaaggtggccagtcacacgccgtccttgctccgtgatgtctttcacacaacagtgaattttattaaccagaacctacgcacctacgtgaggagcttagccagaaatgggatggactgaacggacagttccagaagtgtgactggctaaagctcgatgtggtcacagctgtatagctgcttccagtgtagacggagccctggcatgtcaacagcgttcctagagaagacaggctggaagatagctgtgacttctattttaaagacaatgttaaacttataacccactttaaaatatctacattaatatacttgaatgaaaatgtccatttacacgtatttgaatggccttcatatcatccacacatgaatctgcacatctgtaaatctacacacggtgcctttatttccactgtgcaggttcccacttaaaaattaaattggaaagcaggtttcaaggaagtagaaacaaaatacaatttttttggtaaaaaaaaattactgtttattaaagtacaaccatagaggatggtcttacagcaggcagtatcctgtttgaggaaagcaagaatcagagaaggaacataccccttacaaatgaaaaattccactcaaaatagggactatctatcttaatactaaggaaccaacaatcttcctgtttaaaaaaccacatggcacagagattctgaactaaagtgctgcactcaaatgatgggaagtccggccccagtacacaggggcttgactttttcaacttcgtttcctttgttggagtcaaaaagaaccacttgtggttctaaaaggtgtgaaggtgatttaagggcccaggtcagccactgtttgtttacaaaatcaggtaactaactgcatacactttttctctttccatgacatcaagactttgctaaagacatgaagccacgggtgccagaagctactgcgatgccccgggagttagccccctggtaatagctgtaaacttccaatttctagccatacgctcagctcatccatgcctcagaagtgcatctggagagaacaggtttctaagcataaaagatgaaagagcagttggactttttaaaaattcagcaaagtggttccctctcttagggacagtcaaaaccaagtcacttaggtagtaccaaaataaataaggaaaagcttagctttagaaacagtgcaacactggtctgctgttccagtggtaagctatgtcccaggaatcagtttaaaagcacgacagtggatgctgggtccatatcacacacattgctgtgaacaggaaactcctgtgaccacaacatgaggccactggagacgcatatgagtaagggcactgacggactcatgatttcttcttaccagatgctttcctgttctttaagagtttaaaatcatcagaaaggaaaaacaaactctatattgttcagcatgcaatacataccacgctagggctggctcaattgaaagtgggcaaaagcttacaaatactaaaaagaagtgctgccgcgcagtgtggaggccactgtttggaaataaatcttcctaacact

SEQ ID NO: 78979 - DNA, 414 bp, Artificial Sequence
  derived and/or modified sequence
atggactgcgaggtgaacaacggcagcagcctgagagacgagtgcatcaccaacctgctggtgttcggcttcctgcagagctgcagcgacaacagcttcagaagagagctggacgccctgggccacgagctgcccgtgctggccccccagtgggagggctacgacgagctgcagaccgacggcaacagaagcagccacagcagactgggcagaatcgaggccggcgccagcgacaacaacaccgccagcgccgaggaggagaccgaggccgccggcagcgtggccgtggagagaggcctgcacggcgccgccaccgtgatcctgaaggtgaagaagaccagcagcggcatcctgcccggcaccagccccagaagcggcaccgcctggaccgtggccagcctgagagcctggtag

SEQ ID NO: 78980 - DNA, 588 bp, Artificial Sequence
  derived and/or modified sequence
atggactgcgaggtgaacaacggcagcagcctgagagacgagtgcatcaccaacctgctggtgttcggcttcctgcagagctgcagcgacaacagcttcagaagagagctggacgccctgggccacgagctgcccgtgctggccccccagtgggagggctacgacgagctgcagaccgacggcaacagaagcagccacagcagactgggcagaatcgaggccgacagcgagagccaggaggacatcatcagaaacatcgccagacacctggcccaggtgggcgacagcatggacagaagcatcccccccggcctggtgaacggcctggccctgcagctgagaaacaccagcagaagcgaggaggacagaaacagagacctggccaccgccctggagcagctgctgcaggcctaccccagagacatggagaaggagaagaccatgctggtgctggccctgctgctggccaagaaggtggccagccacacccccagcctgctgagagacgtgttccacaccaccgtgaacttcatcaaccagaacctgagaacctacgtgagaagcctggccagaaacggcatggactag

SEQ ID NO: 78981 - protein, 747 aa, Artificial Sequence
  derived and/or modified sequence
MKELPEQLQEHAIEDKETINNLDTSSSDFTILQEIEEPSLEPENEKILDILGETCKSEPVKEESSELEQPFAQDTSSVGPDRKLAEEEDLFDSAHPEEGDLDLASESTAHAQSSKADSLLAVVKREPAEQPGDGERTDCEPVGLEPAVEQSSAASELAEASSEELAEAPTEAPSPEARDSKEDGRKFDFDACNEVPPAPKESSTSEGADQKMSSPEDDSDTKRLSKEEKGRSSCGRNFWVSGLSSTTRATDLKNLFSKYGKVVGAKVVTNARSPGARCYGFVTMSTAEEATKCINHLHKTELHGKMISVEKAKNEPVGKKTSDKRDSDGKKEKSSNSDRSTNLKRDDKCDRKDDAKKGDDGSGEKSKDQDDQKPGPSERSRATKSGSRGTERTVVMDKSKGVPVISVKTSGSKERASKSQDRKSASREKRSVVSFDKVKEPRKSRDSESHSRVRERSEREQRMQAQWEREERERLEIARERLAFQRQRLERERMERERLERERMHVEHERRREQERIHREREELRRQQELRYEQERRPAVRRPYDLDRRDDAYWPEAKRAALDERYHSDFNRQDRFHDFDHRDRGRYPDHSVDRREGSRSMMGEREGQHYPERHGGPERHGRDSRDGWGGYGSDKRMSEGRGLPPPPRGRRDWGDHGRREDDRSWQGTADGGMMDRDHKRWQGGERSMSGHSGPGHMMNRGGMSGRGSFAPGGASRGHPIPHGGMQGGFGGQSRGSRPSDARFTRRY

SEQ ID NO: 78982 - protein, 759 aa, Artificial Sequence
  derived and/or modified sequence
MKVVILTKLKLPPRETRKHQRGLAKIEDKETINNLDTSSSDFTILQEIEEPSLEPENEKILDILGETCKSEPVKEESSELEQPFAQDTSSVGPDRKLAEEEDLFDSAHPEEGDLDLASESTAHAQSSKADSLLAVVKREPAEQPGDGERTDCEPVGLEPAVEQSSAASELAEASSEELAEAPTEAPSPEARDSKEDGRKFDFDACNEVPPAPKESSTSEGADQKMSSPEDDSDTKRLSKEEKGRSSCGRNFWVSGLSSTTRATDLKNLFSKYGKVVGAKVVTNARSPGARCYGFVTMSTAEEATKCINHLHKTELHGKMISVEKAKNEPVGKKTSDKRDSDGKKEKSSNSDRSTNLKRDDKCDRKDDAKKGDDGSGEKSKDQDDQKPGPSERSRATKSGSRGTERTVVMDKSKGVPVISVKTSGSKERASKSQDRKSASREKRSVVSFDKVKEPRKSRDSESHRVRERSEREQRMQAQWEREERERLEIARERLAFQRQRLERERMERERLERERMHVEHERRREQERIHREREELRRQQELRYEQERRPAVRRPYDLDRRDDAYWPEAKRAALDERYHSDFNRQDRFHDFDHRDRGRYPDHSVDRREGSRSMMGEREGQHYPERHGGPERHGRDSRDGWGGYGSDKRMSEGRGLPPPPRGRRDWGDHGRREDDRSWQGTADGGMMDRDHKRWQGGERSMSGHSGPGHMMNRGGMSGRGSFAPGGASRGHPIPHGGMQGGFGGQSRGSRPSDARFTRRY

SEQ ID NO: 78983 - protein, 848 aa, Artificial Sequence
  derived and/or modified sequence
MAETLSGLGDSGAAGAAALSSASSETGTRRLSDLRVIDLRAELRKRNVDSSGNKSVLMERLKKAIEDEGGNPDEIEITSEGNKKTSKRSSKGRKPEEEGVEDNGLEENSGDGQIEDKETINNLDTSSSDFTILQEIEEPSLEPENEKILDILGETCKSEPVKEESSELEQPFAQDTSSVGPDRKLAEEEDLFDSAHPEEGDLDLASESTAHAQSSKADSLLAVVKREPAEQPGDGERTDCEPVGLEPAVEQSSAASELAEASSEELAEAPTEAPSPEARDSKEDGRKFDFDACNEVPPAPKESSTSEGADQKMSSPEDDSDTKRLSKEEKGRSSCGRNFWVSGLSSTTRATDLKNLFSKYGKVVGAKVVTNARSPGARCYGFVTMSTAEEATKCINHLHKTELHGKMISVEKAKNEPVGKKTSDKRDSDGKKEKSSNSDRSTNLKRDDKCDRKDDAKKGDDGSGEKSKDQDDQKPGPSERSRATKSGSRGTERTVVMDKSKGVPVISVKTSGSKERASKSQDRKSASREKRSVVSFDKVKEPRKSRDSESHSRVRERSEREQRMQAQWEREERERLEIARERLAFQRQRLERERMERERLERERMHVEHERRREQERIHREREELRRQQELRYEQERRPAVRRPYDLDRRDDAYWPEAKRAALDERYHSDFNRQDRFHDFDHRDRGRYPDHSVDRREGSRSMMGEREGQHYPERHGGPERHGRDSRDGWGGYGSDKRMSEGRGLPPPPRGRRDWGDHGRREDDRSWQGTADGGMMDRDHKRWQGGERSMSGHSGPGHMMNRGGMSGRGSFAPGGASRGHPIPHGGMQGGFGGQSRGSRPSDARFTRRY

SEQ ID NO: 78984 - protein, 812 aa, Artificial Sequence
  derived and/or modified sequence
MAETLSGLGDSGAAGAAALSSASSETGTRRLSDLRVIDLRAELRKRNVDSSGNKSVLMERLKKAIEDEGGNPDEIEITSEGNKKTSKRSSKGRKPEEEGVEDNGLEPENEKILDILGETCKSEPVKEESSELEQPFAQDTSSVGPDRKLAEEEDLFDSAHPEEGDLDLASESTAHAQSSKADSLLAVVKREPAEQPGDGERTDCEPVGLEPAVEQSSAASELAEASSEELAEAPTEAPSPEARDSKEDGRKFDFDACNEVPPAPKESSTSEGADQKMSSPEDDSDTKRLSKEEKGRSSCGRNFWVSGLSSTTRATDLKNLFSKYGKVVGAKVVTNARSPGARCYGFVTMSTAEEATKCINHLHKTELHGKMISVEKAKNEPVGKKTSDKRDSDGKKEKSSNSDRSTNLKRDDKCDRKDDAKKGDDGSGEKSKDQDDQKPGPSERSRATKSGSRGTERTVVMDKSKGVPVISVKTSGSKERASKSQDRKSASREKRSVVSFDKVKEPRKSRDSESHSRVRERSEREQRMQAQWEREERERLEIARERLAFQRQRLERERMERERLERERMHVEHERRREQERIHREREELRRQQELRYEQERRPAVRRPYDLDRRDDAYWPEAKRAALDERYHSDFNRQDRFHDFDHRDRGRYPDHSVDRREGSRSMMGEREGQHYPERHGGPERHGRDSRDGWGGYGSDKRMSEGRGLPPPPRGRRDWGDHGRREDDRSWQGTADGGMMDRDHKRWQGGERSMSGHSGPGHMMNRGGMSGRGSFAPGGASRGHPIPHGGMQGGFGGQSRGSRPSDARFTRRY

SEQ ID NO: 78985 - protein, 406 aa, Artificial Sequence
  derived and/or modified sequence
MAETLPGSGDSGPGTASLGPGVAETGTRRLSELRVIDLRAELKKRNLDTGGNKSVLMERLKKAVKEEGQDPDEIGIELEATSKKSAKRCVKGLKMEEEGTEDNGLEVENEKILDILGETCKSEPVKEESSELEQPFAQDTSSVGPDRKLAEEEDLFDSAHPEEGDLDLASESTAHAQSSKADSLLAVVKREPAEQPGDGERTDCEPVGLEPAVEQSSAASELAEASSEELAEAPTEAPSPEARDSKEDGRKFDFDACNEVPPAPKESSTSEGADQKMSSFKEEKDIKPIIKDEKGRVGSGSGRNLWVSGLSSTTRATDLKNLFSKYGKVVGAKVVTNARSPGARCYGFVTMSTSDEATKCISHLHRTELHGRMISVEKAKNEPAGKKLSDRKECEVKKEKLSSVDR

SEQ ID NO: 78986 - DNA, 2547 bp, Artificial Sequence
  derived and/or modified sequence
atggcggaaacattgtctggattaggcgattcgggcgccgccggggcggctgctctgtctagtgccagcagtgaaaccgggaccaggcggctctcagacctgcgggtgatagacttgcgggccgagctccgcaaaaggaatgtggattcctctggtaacaaaagtgtgctgatggaacgactgaagaaggctatcgaggacgagggcggcaaccctgatgaaatagagatcacctcagagggcaataaaaagacttccaaacgctctagcaagggaaggaaacccgaggaggagggcgtggaggataacggcttagaggaaaattccggggacgggcaaatcgaggacaaggaaactataaacaatcttgatacgtcaagcagcgactttactatcctccaggagatagaagagccttccctggaacccgagaacgagaagattcttgacatcctcggcgagacctgtaaatctgagccggttaaggaggagtcaagcgagctggaacagccattcgctcaggatacaagctctgtggggcccgaccgcaagcttgcagaggaggaagatctgttcgatagtgcacaccctgaagagggggacctggatttggcatcagagtccactgcccatgcccagagttccaaggccgactctctgctggccgtggttaaaagggaaccggccgagcagccgggcgacggggagcggactgattgtgagccggtcgggcttgaaccagctgtggagcaaagctctgcagcatctgaactcgccgaggcaagctccgaggagctcgccgaggcccccaccgaggctccctcccccgaggcaagagacagcaaagaggatggccgcaagttcgacttcgacgcctgtaacgaggtaccacctgcaccaaaggagagctctactagtgagggagccgaccagaagatgtccagccctgaagatgattccgacaccaaacgtttgtcaaaggaggagaaagggcgcagcagttgcggcagaaacttttgggtgagtggactgagctccacaacccgggcaactgatttgaaaaaccttttctcaaagtatggcaaggttgttggagcaaaagtagtgactaacgcgaggagcccaggcgccagatgttatggcttcgtgaccatgagtacagcagaagaagccactaagtgcatcaaccatctgcataaaacggagctccacggtaaaatgatttctgtcgagaaggccaagaacgagcctgtgggtaaaaaaaccagtgacaaaagagactctgacggcaagaaggagaagagctctaatagcgaccgttcaaccaatctgaagagagacgataaatgtgatagaaaggacgacgccaaaaaaggcgatgacggctccggcgagaaatccaaggatcaggatgaccagaagccaggcccaagtgaacggtccagagcaactaagtcagggagccggggtactgaaagaactgtggttatggataagtctaagggggtccccgtaatctccgtgaaaacaagcggatccaaggagagagcttcgaaatcgcaggatagaaaaagcgcctctagagagaagagaagcgtcgtgtcattcgataaggtgaaggaaccgcgtaaaagccgtgactccgagagtcactctagggttagagagaggagcgaaagagaacagcgcatgcaagcccagtgggagagggaggaacgcgagaggctggagattgcgcgggagagattggcgtttcagagacaacggttggaaagagagcggatggagcgggagagactggagcgggaaagaatgcacgtcgagcatgagcggagaagggagcaagagaggatccacagagaacgcgaggaactccggagacagcaggaactgcgctacgaacaagagcgcaggcccgccgtacggcgcccatacgatcttgataggagggacgatgcctactggcccgaggcaaagagggcagccctggatgaacgctaccactcggatttcaatcgacaggaccgcttccacgacttcgaccaccgggaccgtggccggtatcccgaccacagcgtggatcggcgcgaagggtcccggtcgatgatgggagagagggaggggcagcattatcctgagcgccatggcggacctgagcggcatgggagggattcgagggatgggtgggggggatatgggtcagacaaaaggatgagcgaagggcggggcctgccccctccaccgaggggcaggcgtgattggggtgatcatgggcggagggaggacgaccgctcgtggcagggaacagccgatggaggcatgatggatcgggatcacaaaaggtggcaggggggggaaaggagtatgtcaggccatagtggacccgggcatatgatgaatagaggcggaatgagtggccgggggtctttcgcgcccgggggagcttctcggggacaccccatcccgcacgggggtatgcaaggcgggtttggcggacagagtcgaggctctcgtccctcagatgcccgttttacccggcgttattag

SEQ ID NO: 78987 - DNA, 2280 bp, Artificial Sequence
  derived and/or modified sequence
atgaaagtagttatcctcactaagttgaagctcccacccagagaaaccaggaaacatcagaggggactggcaaagatcgaagataaagagacaattaacaacttggataccagcagcagcgatttcaccatactacaggagattgaggagccctcgctggaacccgaaaatgagaagatcttggatatccttggagaaacttgcaagagcgagcccgtgaaggaagagagttctgagctcgagcagccatttgcacaggatactagctccgtgggaccggacagaaagctggctgaagaagaagacttattcgattcagctcacccagaggagggtgacctggacctggcctctgagtctaccgctcacgcccagtcaagcaaagcggacagcctgttggcggtggttaagagggaacctgcggagcagcccggagacggcgagcgcactgattgcgagccagtcggactggagcctgccgtggaacaatcttcagcagccagcgaactggccgaggcttcctctgaggagctggcagaggccccaacagaagcaccatccccagaggctagggactccaaggaagacggtagaaagttcgattttgacgcatgcaacgaagtgccaccggccccgaaggagtcatctacctccgagggggccgaccagaagatgtccagcccagaagatgacagcgacacgaagaggctgtcaaaagaggagaaagggaggtcctcatgcgggaggaatttttgggtcagcggcctcagttctacgacccgggccacggatctgaagaatcttttctcgaaatacggcaaggtagtaggggcgaaggtcgtgacaaatgcccgctctccaggtgccagatgttatggctttgttaccatgtctaccgcagaggaggccaccaagtgcataaatcatttgcacaaaactgagctccatgggaaaatgatttccgtagaaaaggcgaagaacgagcctgttggcaaaaagacctcagataagagggatagcgacggtaaaaaagagaagtccagcaattccgatcgctcaacaaatttgaaaagagatgataagtgtgataggaaggatgatgcaaaaaaaggcgatgacggctctggagaaaagtcaaaggaccaagacgatcagaagccaggaccttcggagcgctcaagagcgactaaatcgggctctcggggaacagagaggacggtcgtaatggataagtctaaaggtgtacccgtaatcagtgtaaagacatcaggtagcaaggagcgggcgtccaagagccaggatagaaagagcgccagtcgagaaaagcgcagcgtcgtatctttcgacaaagtcaaggagcccagaaaatctcgggacagtgagagccaccgcgtcagagagagatccgagcgtgagcagaggatgcaggcccagtgggagcgagaggagagggaaagactggagatagcccgtgagagattggccttccagcgccagcgcctcgaacgggagcggatggaaagagaacggttagaaagggagaggatgcatgtagaacacgagcgaagacgcgagcaggagcgtattcacagagagcgggaagaactgcggcgccagcaggagttgcgctacgagcaagagaggagacctgcagtgcgtcggccttacgatctggacaggcgagacgatgcttactggccagaggcaaagcgcgctgctctcgacgagaggtaccacagtgactttaatagacaggataggttccatgacttcgaccacagagacagaggccgctacccagaccactccgtggatcgccgtgagggctctcgctcaatgatgggcgagcgggagggccagcactaccctgagcggcacggcggtcctgagcggcacggccgcgattctagagatgggtggggcggctatggcagcgacaaacggatgagcgagggacgcggtttgccaccccctccacgcgggcgacgagattggggcgaccatggacgcagggaggatgatcggtcctggcagggcacagctgatggcgggatgatggaccgcgatcacaagaggtggcaaggaggggaaagatcaatgagtggccattcagggccaggccacatgatgaatagaggcgggatgagcgggagggggtctttcgctccggggggagccagcaggggtcatccaatcccccacgggggcatgcaagggggcttcggaggccaaagccggggaagccggccaagcgacgcgcgtttcacacgaaggtactag

SEQ ID NO: 78988 - DNA, 2439 bp, Artificial Sequence
  derived and/or modified sequence
atggcagaaactctctctggccttggggactccggggctgccggcgctgcagccctctcgagtgccagttcagaaaccggcacacggcggctgtctgatctgcgggtgatcgacctgcgtgcagagctccgaaaaaggaatgtagacagtagcgggaacaaatccgtgctcatggaacgcctgaaaaaggcgatcgaagacgaaggaggaaacccagacgagatcgagatcactagcgagggcaataaaaagacatccaaaaggtctagtaagggtaggaaacctgaagaagaaggcgtggaagataatggtttagagcccgaaaacgagaaaatacttgatatccttggcgaaacttgcaaaagcgaacccgtgaaggaggagtccagtgagttagagcagcctttcgctcaagacacaagttctgtaggaccggacagaaaacttgccgaggaggaagatctgttcgatagcgcccatcccgaggagggagatctcgacctggccagtgagtctaccgcacacgcccagagcagtaaggccgattctctgttggccgttgtcaagagggagcctgccgagcagcctggagatggggagcgtacggattgtgagccggttggcctggaacccgccgtggaacagtcttccgctgcaagtgaactggcggaggccagtagcgaagaactcgcagaagcccccaccgaggccccaagcccagaggcccgcgactctaaggaggacgggcggaagtttgacttcgatgcatgcaacgaggtgccaccagcccctaaggaatcttcgaccagcgagggggcagatcaaaaaatgagcagtcctgaggatgactcagatacaaagcggctaagcaaggaggagaaggggcggtcgtcatgtggcagaaacttttgggtaagtggcctgtccagcacaactagagccacagacctcaagaatctcttcagtaagtatgggaaagtcgtgggcgcaaaagtagttactaacgccaggtcgcctggcgccaggtgttacggttttgtcacgatgtccacagccgaagaggctaccaagtgtattaatcacctacataaaacagaactacatggaaaaatgattagcgtggaaaaggctaagaatgaacccgtgggtaaaaaaacatccgacaagcgagatagtgatggcaagaaggaaaagagctccaattctgacaggagtaccaatctaaagcgggatgacaagtgtgaccggaaggatgacgccaagaaaggggacgacgggagcggagaaaagagtaaggatcaggacgatcaaaaacctggacctagtgaacgttcacgggctacaaagtctggctcaaggggaactgaacggacagtagtgatggataaatctaagggggtgccggtcatctcagtgaagaccagtgggtcgaaagagcgagcttccaaatcacaggacagaaagtctgcgtctcgggaaaagcgcagtgtggtgagctttgacaaggtgaaggagcctagaaagagcagagatagcgagtcccattcacgcgtgcgggagagaagcgaacgggaacagcgcatgcaggctcaatgggagagggaggagcgcgaacgattggagattgcccgcgaaagactggctttccagcgtcagcgacttgaaagagaaagaatggaaagagagcggctggagcgcgagagaatgcatgtcgaacatgagcggaggcgagagcaggagcgcattcaccgggagcgggaggaactgcggcgacagcaagaactccggtatgagcaggaaagacgccctgccgtgaggagaccatatgatctcgacaggcgcgacgacgcctactggcctgaggccaagagggccgctcttgacgagagatatcactctgatttcaatcgccaggatcggtttcatgacttcgaccatcgagataggggaaggtaccccgaccactcagtagatagacgggaggggtcccgatcaatgatgggcgagcgggagggtcagcactacccagaacgccatggcggccctgagcggcacggcagggacagccgcgacgggtggggagggtatggcagcgacaagcggatgtctgagggcagaggtctgcctccgccaccccgtggccggagggactggggagaccacggcagacgtgaggatgatcgctcatggcaaggaacagctgatggtgggatgatggaccgcgatcataagagatggcaggggggagagcgctcaatgtccgggcactccggtcccggtcacatgatgaataggggggggatgagtggccgcggtagcttcgcccctggtggtgcctcacgcggccatcccattccccacgggggaatgcagggtgggtttggaggacagtctcggggcagtagaccctccgatgcccggttcactagaaggtattag

SEQ ID NO: 78989 - DNA, 1221 bp, Artificial Sequence
  derived and/or modified sequence
atggctgagaccctgccggggtctggtgatagcgggccaggtacagcatctcttggccctggcgtagctgagacaggaacaaggcggctctcagaacttcgggtcattgacctgcgggccgagctgaagaaaaggaacctggacactgggggaaacaagagcgtgctaatggaaagactcaaaaaggcagtcaaagaagagggccaggaccccgatgagatcggaattgaactggaggcaacctcaaaaaagtcagcaaaacgatgtgtgaagggcttgaagatggaggaagagggcacagaggataacggcctcgaggtcgagaacgagaaaatccttgatatcctcggggaaacctgtaaaagtgaacctgtcaaggaggagtcatccgagctcgagcaaccttttgcccaggatacatcatccgtggggcccgaccggaagttggctgaagaggaggacttgttcgactccgctcaccccgaagaaggcgacctggatctcgcatcagaaagtaccgcccatgctcagagctcgaaggctgactcgcttctggcagttgtcaaacgcgagcctgccgaacagccaggggatggagaacgaacagactgcgaacccgtcgggctcgagcccgccgtagagcagagcagtgctgctagtgaattggccgaagcgtccagtgaggagttggcagaagcccccacagaggctcccagccccgaggccagagatagcaaggaggatggacgcaagtttgactttgacgcctgcaacgaagttccaccagctccaaaagagtcatctacctcagagggggcggaccagaagatgagtagctttaaagaggagaaagatatcaagcccatcatcaaagacgagaagggcagagttggttctggctctggacggaacctgtgggtgagcggactgagcagtactaccagagcgactgacctgaagaacctgttcagcaagtacggcaaagtggttggcgcgaaggttgtaaccaatgccagatcaccaggggcaaggtgttacggcttcgtaactatgagtaccagcgacgaggcaaccaagtgcatcagccacctgcaccggaccgagctgcatggccgcatgatctcagtggaaaaggccaaaaacgagcccgccggaaaaaaattgtctgatcgaaaagagtgcgaggtgaaaaaggagaagctatccagtgtcgacagatag

SEQ ID NO: 78990 - DNA, 2547 bp, Artificial Sequence
  derived and/or modified sequence
atggccgagaccctgagcggcctgggggacagcggggccgccggggctgctgccctgagcagcgccagcagcgagaccggcacccggcggctgagtgacctgcgggtgattgacctgcgggcagagctgaggaagagaaatgtggacagcagcggcaacaagtctgtgctgatggagcggctgaagaaggccattgaagatgaaggaggcaacccagatgaaattgagatcaccagcgagggcaacaagaagaccagcaagaggagcagcaaaggaaggaagccagaggaggagggcgtggaggacaatggcctggaggagaacagcggagatggccagatcgaggacaaggagaccatcaacaacctggacaccagcagcagtgacttcaccatcctgcaggagattgaggagcccagcctggagccagaaaatgagaagatcctggacatcctgggggagacctgcaagtctgagcctgtgaaggaggagagcagcgagctggagcagccctttgcccaggacaccagctctgtgggccctgacaggaagctggccgaggaggaggacctgtttgacagcgcccaccctgaggagggggacctggacctggccagcgagagcacagcccacgcccagagcagcaaggctgacagcctgctggccgtggtgaagcgggagcctgctgagcagcctggagatggagagaggacagactgtgagcctgtgggcctggagcctgctgtggagcagagcagcgctgccagcgagctggccgaggccagcagcgaggagctggccgaggcccccacagaggcccccagccctgaggcccgggacagcaaagaagatggcaggaagtttgattttgatgcctgcaatgaggtgcccccagcccccaaggagagcagcaccagcgagggcgctgaccagaagatgagcagcccagaagatgacagcgacaccaagaggctgagcaaggaggagaagggccgcagcagctgtggcaggaacttctgggtgtctggcctgagcagcaccacccgggccacagacctgaagaacctcttcagcaaatatggcaaggtggtgggcgccaaggtggtgaccaatgcccggagccctggggcccgctgctacggctttgtgaccatgagcacagctgaggaggccaccaagtgcatcaaccacctgcacaagacagagctgcacggcaagatgatctctgtggagaaggccaagaatgaacctgtgggcaagaagaccagtgacaagagggacagtgatggcaagaaggagaagagcagcaacagcgacaggagcaccaacctgaagagagatgacaagtgtgacaggaaggatgatgccaagaagggagatgatggcagcggggagaagagcaaggaccaggatgaccagaagccaggccccagcgagaggagccgggccaccaagagcggcagccggggcacagagaggacagtggtgatggacaagagcaaaggagtgcctgtgatctctgtgaagaccagcggcagcaaggagcgggccagcaagagccaggacaggaagagcgccagccgggagaagaggtctgtggtgtcctttgacaaggtgaaggagcccaggaagagccgggacagcgagagccacagccgggtgcgggagaggtctgagcgggagcagaggatgcaggcccagtgggagcgggaggagcgggagcggctggagatcgcccgggagcggctggccttccagaggcagaggctggagcgggagaggatggagcgggagcggctggagcgggagaggatgcacgtggagcatgaaagaagaagagagcaggagcgcatccaccgggagcgggaggagctgcggcggcagcaggagctgcgctatgagcaggagaggaggcctgctgtgcggcggccctatgacctggacagaagagatgatgcctactggccagaggccaagagagctgccctggatgagcgctaccacagcgacttcaaccggcaggaccgcttccatgactttgaccaccgggaccggggccgctacccagaccacagcgtggacagaagagagggcagccgctccatgatgggagagcgggagggccagcactacccagagagacatggaggccctgagagacatggccgggacagcagagatggctggggcggctacggcagtgacaagaggatgtctgagggccggggcctgcccccaccaccccggggcagaagagactggggagaccatggaagaagagaagatgaccgctcctggcagggcacagcagatggcggcatgatggaccgggaccacaagcgctggcagggcggggagaggtccatgagcggccacagcggccctggccacatgatgaacagaggaggcatgagcggccggggcagctttgcccctgggggcgccagccggggccaccccatcccccatggaggcatgcagggcggctttggaggccagagccggggcagccggcccagtgatgcccgcttcacccggcgctactag

SEQ ID NO: 78991 - DNA, 2280 bp, Artificial Sequence
  derived and/or modified sequence
atgaaggtggtgatcctgaccaagctgaagctgcccccccgggagaccaggaagcaccagaggggcctggccaagattgaggacaaggagaccatcaacaacctggacaccagcagcagtgacttcaccatcctgcaggagattgaggagcccagcctggagccagaaaatgagaagatcctggacatcctgggggagacctgcaagtctgagcctgtgaaggaggagagcagcgagctggagcagccctttgcccaggacaccagctctgtgggccctgacaggaagctggccgaggaggaggacctgtttgacagcgcccaccctgaggagggggacctggacctggccagcgagagcacagcccacgcccagagcagcaaggctgacagcctgctggccgtggtgaagcgggagcctgctgagcagcctggagatggagagaggacagactgtgagcctgtgggcctggagcctgctgtggagcagagcagcgctgccagcgagctggccgaggccagcagcgaggagctggccgaggcccccacagaggcccccagccctgaggcccgggacagcaaagaagatggcaggaagtttgattttgatgcctgcaatgaggtgcccccagcccccaaggagagcagcaccagcgagggcgctgaccagaagatgagcagcccagaagatgacagcgacaccaagaggctgagcaaggaggagaagggccgcagcagctgtggcaggaacttctgggtgtctggcctgagcagcaccacccgggccacagacctgaagaacctcttcagcaaatatggcaaggtggtgggcgccaaggtggtgaccaatgcccggagccctggggcccgctgctacggctttgtgaccatgagcacagctgaggaggccaccaagtgcatcaaccacctgcacaagacagagctgcacggcaagatgatctctgtggagaaggccaagaatgaacctgtgggcaagaagaccagtgacaagagggacagtgatggcaagaaggagaagagcagcaacagcgacaggagcaccaacctgaagagagatgacaagtgtgacaggaaggatgatgccaagaagggagatgatggcagcggggagaagagcaaggaccaggatgaccagaagccaggccccagcgagaggagccgggccaccaagagcggcagccggggcacagagaggacagtggtgatggacaagagcaaaggagtgcctgtgatctctgtgaagaccagcggcagcaaggagcgggccagcaagagccaggacaggaagagcgccagccgggagaagaggtctgtggtgtcctttgacaaggtgaaggagcccaggaagagccgggacagcgagagccaccgggtgcgggagaggtctgagcgggagcagaggatgcaggcccagtgggagcgggaggagcgggagcggctggagatcgcccgggagcggctggccttccagaggcagaggctggagcgggagaggatggagcgggagcggctggagcgggagaggatgcacgtggagcacgagaggagaagagagcaggagcgcatccaccgggagcgggaggagctgcggcggcagcaggagctgcgctatgagcaggagcggcggcctgctgtgagaagaccctatgacctggacagaagagatgatgcctactggccagaggccaagagagctgccctggatgagcgctaccacagcgacttcaaccggcaggaccgcttccatgactttgaccaccgggaccggggccgctacccagaccacagcgtggaccggcgggagggcagccgctccatgatgggagagcgggagggccagcactacccagagcggcacggcggccctgagcggcacggccgggacagcagagatggctggggcggctacggcagtgacaagaggatgtctgagggccggggcctgcccccaccaccccggggccggcgggactggggagaccacggccggcgggaggatgaccgctcctggcagggcacagcagatggcggcatgatggaccgggaccacaagcgctggcagggcggggagaggtccatgagcggccacagcggccctggccacatgatgaacagaggaggcatgagcggccggggcagctttgcccctggaggagccagccggggccaccccatcccccacggcggcatgcagggcggctttggaggccagagccggggcagccggcccagtgatgcccgcttcacccggcgctactag

SEQ ID NO: 78992 - DNA, 2439 bp, Artificial Sequence
  derived and/or modified sequence
atggccgagaccctgagcggcctgggggacagcggggccgccggggctgctgccctgagcagcgccagcagcgagaccggcacccggcggctgagtgacctgcgggtgattgacctgcgggcagagctgaggaagagaaatgtggacagcagcggcaacaagtctgtgctgatggagcggctgaagaaggccattgaagatgaaggaggcaacccagatgaaattgagatcaccagcgagggcaacaagaagaccagcaagaggagcagcaaaggaaggaagccagaggaggagggcgtggaggacaatggcctggagccagaaaatgagaagatcctggacatcctgggggagacctgcaagtctgagcctgtgaaggaggagagcagcgagctggagcagccctttgcccaggacaccagctctgtgggccctgacaggaagctggccgaggaggaggacctgtttgacagcgcccaccctgaggagggggacctggacctggccagcgagagcacagcccacgcccagagcagcaaggctgacagcctgctggccgtggtgaagcgggagcctgctgagcagcctggagatggagagaggacagactgtgagcctgtgggcctggagcctgctgtggagcagagcagcgctgccagcgagctggccgaggccagcagcgaggagctggccgaggcccccacagaggcccccagccctgaggcccgggacagcaaagaagatggcaggaagtttgattttgatgcctgcaatgaggtgcccccagcccccaaggagagcagcaccagcgagggcgctgaccagaagatgagcagcccagaagatgacagcgacaccaagaggctgagcaaggaggagaagggccgcagcagctgtggcaggaacttctgggtgtctggcctgagcagcaccacccgggccacagacctgaagaacctcttcagcaaatatggcaaggtggtgggcgccaaggtggtgaccaatgcccggagccctggggcccgctgctacggctttgtgaccatgagcacagctgaggaggccaccaagtgcatcaaccacctgcacaagacagagctgcacggcaagatgatctctgtggagaaggccaagaatgaacctgtgggcaagaagaccagtgacaagagggacagtgatggcaagaaggagaagagcagcaacagcgacaggagcaccaacctgaagagagatgacaagtgtgacaggaaggatgatgccaagaagggagatgatggcagcggggagaagagcaaggaccaggatgaccagaagccaggccccagcgagaggagccgggccaccaagagcggcagccggggcacagagaggacagtggtgatggacaagagcaaaggagtgcctgtgatctctgtgaagaccagcggcagcaaggagcgggccagcaagagccaggacaggaagagcgccagccgggagaagaggtctgtggtgtcctttgacaaggtgaaggagcccaggaagagccgggacagcgagagccacagccgggtgcgggagaggtctgagcgggagcagaggatgcaggcccagtgggagcgggaggagcgggagcggctggagatcgcccgggagcggctggccttccagaggcagaggctggagcgggagaggatggagcgggagcggctggagcgggagaggatgcacgtggagcatgaaagaagaagagagcaggagcgcatccaccgggagcgggaggagctgcggcggcagcaggagctgcgctatgagcaggagaggaggcctgctgtgcggcggccctatgacctggacagaagagatgatgcctactggccagaggccaagagagctgccctggatgagcgctaccacagcgacttcaaccggcaggaccgcttccatgactttgaccaccgggaccggggccgctacccagaccacagcgtggacagaagagagggcagccgctccatgatgggagagcgggagggccagcactacccagagagacatggaggccctgagagacatggccgggacagcagagatggctggggcggctacggcagtgacaagaggatgtctgagggccggggcctgcccccaccaccccggggcagaagagactggggagaccatggaagaagagaagatgaccgctcctggcagggcacagcagatggcggcatgatggaccgggaccacaagcgctggcagggcggggagaggtccatgagcggccacagcggccctggccacatgatgaacagaggaggcatgagcggccggggcagctttgcccctgggggcgccagccggggccaccccatcccccatggaggcatgcagggcggctttggaggccagagccggggcagccggcccagtgatgcccgcttcacccggcgctactag

SEQ ID NO: 78993 - DNA, 1221 bp, Artificial Sequence
  derived and/or modified sequence
atggccgagaccctgcccggcagcggggacagcggccctggaacagccagcctgggccctggggtggccgagaccggcacccggcggctgtctgagctgcgggtcatcgacctgcgggcagagctgaagaagaggaacctggacacaggaggcaacaagtctgtgctgatggagcggctgaagaaggctgtgaaggaggagggccaggaccctgatgagatcggcatcgagctggaggccaccagcaagaagagcgccaagagatgtgtgaagggcctgaagatggaggaggagggcacagaagataatggcctggaggtggagaatgagaagatcctggacatcctgggggagacctgcaagtctgagcctgtgaaggaggagagcagcgagctggagcagccctttgcccaggacaccagctctgtgggccctgacaggaagctggccgaggaggaggacctgtttgacagcgcccaccctgaggagggggacctggacctggccagcgagagcacagcccacgcccagagcagcaaggctgacagcctgctggccgtggtgaagcgggagcctgctgagcagcctggagatggagagaggacagactgtgagcctgtgggcctggagcctgctgtggagcagagcagcgctgccagcgagctggccgaggccagcagcgaggagctggccgaggcccccacagaggcccccagccctgaggcccgggacagcaaagaagatggcaggaagtttgattttgatgcctgcaatgaggtgcccccagcccccaaggagagcagcaccagcgagggcgctgaccagaagatgagcagcttcaaggaggagaaggacatcaagcccatcatcaaggatgagaagggccgggtgggcagcggcagcggcaggaacctgtgggtgtctggcctgagcagcaccacccgggccacagacctgaagaacctcttcagcaaatatggcaaggtggtgggcgccaaggtggtgaccaatgcccggagccctggggcccgctgctacggctttgtgaccatgagcaccagtgatgaggccaccaagtgcatcagccacctgcacaggacagagctgcacggccgcatgatctctgtggagaaggccaagaatgaacctgctgggaagaagctgagtgacagaaaagaatgtgaggtgaagaaggagaagctgagctctgtggacagatag

SEQ ID NO: 78994 - DNA, 2547 bp, Artificial Sequence
  derived and/or modified sequence
atggccgagaccctgagcggcctgggcgacagcggcgccgccggcgcggctgcactcagctctgcatcctctgagaccgggacccggagactgtcagacctcagggtgattgatctgcgcgccgaactcaggaaaaggaacgtggactcatctgggaataagagcgtgctgatggaaagactcaagaaggctatagaagacgagggcgggaaccctgacgagatcgaaatcacctcagagggcaataaaaaaacctccaagcgctccagcaaagggcgaaaaccagaggaggaaggcgtggaggataacggtcttgaagagaatagcggcgatgggcagatcgaggataaggaaaccatcaataatctggacacatcatcctccgactttaccatcctccaggagatcgaagaaccctcactcgaacctgagaatgaaaaaattctggatatacttggggaaacttgtaaaagcgagcccgtgaaggaagagagctccgaattggagcagccattcgcccaggataccagctccgtggggccagaccggaaacttgcagaagaagaagatctgtttgacagcgcacatccagaagaaggggatctggacctggccagcgagagcaccgcccatgcacagtcatctaaagcagatagcttgctcgcggtcgttaaacgagagcctgccgaacaaccaggggatggggaaagaaccgactgcgaacctgttggactggagcctgcagtagagcagtcatccgccgcatcagagctcgccgaagcctcttcggaagaactggccgaggccccaacagaggccccctctccagaggcgcgtgacagtaaagaggatgggaggaagtttgactttgatgcttgcaacgaggtgcccccagccccgaaagagtccagcacatcagagggggcagatcagaagatgtccagtccggaggatgattctgacactaaacggttgagtaaagaagaaaagggtcggagctcctgtggaagaaatttttgggtgtctgggttgtcatcgacaacaagagccaccgatctgaaaaacctgttttctaaatacggcaaggtggtgggcgcgaaggtggtgaccaacgcacggtctccaggggctagatgttacggattcgtgacgatgtcaacggccgaggaggccactaagtgcattaaccacctccataaaacagagctgcatggtaagatgatatccgtggaaaaagccaaaaacgagccagtaggcaagaagacatccgacaagcgagactccgacggcaagaaggaaaagtccagcaattctgaccggagcactaaccttaaaagagatgataaatgcgatagaaaagacgacgccaagaaaggcgacgacggatcaggcgaaaagagcaaagaccaggacgaccagaagcctggcccctcagagagatccagggccacaaaaagcggctcacgtggaacagaaaggactgtggtgatggataagagcaaaggggttcctgttatcagtgtcaagaccagcggctccaaggaacgagctagcaaaagccaggataggaagagcgcatcccgcgaaaaaagatctgtggtttcatttgacaaggtgaaggagccccgcaagagccgcgactctgagagccatagtagggtcagggagcggtcggaaagagaacagcggatgcaggcccagtgggagcgggaggagcgcgaacgtctggaaatcgcaagggaaaggctagcattccaacgacagagactggaacgggagcggatggagcgcgaacggctcgagcgagagagaatgcacgtcgaacacgaacgccgcagggaacaggaaagaattcatcgggagagagaggaactaaggcgccagcaggagcttaggtacgagcaggagaggagaccagccgtgagacgtccttatgatctggatcggagggatgacgcatactggccagaggccaagagggctgctctcgacgagcgttatcacagcgacttcaaccggcaggaccggttccacgacttcgaccaccgggaccgggggcggtatccagatcactccgtggaccggagagagggaagccgctccatgatgggcgaacgagaggggcagcactaccctgagagacacggaggtccagaaaggcatggccgggacagccgtgatggctggggggggtacgggagtgacaagcgaatgtcagagggtcgggggttgcctcctccccctcgaggacggcgggattggggggatcatgggcgtcgcgaggacgatagaagctggcagggcactgcagacggcgggatgatggacagggaccacaagagatggcaaggcggagaacggtccatgagcgggcattctggccccggccacatgatgaataggggagggatgtcagggcgaggatcttttgcccccggcggtgcctctcggggccacccaatacctcatggcggaatgcagggcggctttggagggcagtcgcgcggcagccggccttccgatgccaggtttactcggagatactag

SEQ ID NO: 78995 - DNA, 2280 bp, Artificial Sequence
  derived and/or modified sequence
atgaaggtggtgatcctgaccaagctgaagctgcccccccgggagacgcgcaaacaccagagagggctggcaaaaattgaggataaggaaacaattaacaacttggatacctctagcagtgacttcacaatacttcaggagattgaggagcccagcctggagcccgaaaatgagaagatcctcgacattctgggagagacatgcaagtccgaacccgtgaaggaggagtcctccgagcttgagcaaccctttgcacaggatacatcttcagtaggacccgatcgcaagctggccgaggaggaagaccttttcgattcggctcaccccgaggaaggtgacctggacctcgcctcggaaagcaccgcccatgcccagtcgtcaaaggccgattcattacttgccgtggtgaagcgggagcctgcagaacaacccggagacggcgagcgcacagattgcgagcccgttggactggaacctgcggtggagcagtcctcggcagcctccgaactggcggaggcctcttctgaggaactagcggaggcaccgactgaagccccatcaccagaagcaagagactctaaggaggatggcagaaaattcgactttgacgcctgcaacgaggtccccccggctccgaaagaaagttcaacttccgaaggagccgaccagaagatgtcatcccccgaggatgactctgatacaaagcggctgagcaaggaggagaaaggtcgttccagctgcggtcggaacttctgggtgtccggcttaagcagtaccactagagccactgatctgaagaacctgttctccaaatatgggaaagtagttggtgcaaaagtggtgacaaacgcccggagccctggagcacgctgctacgggtttgtgactatgtctactgccgaagaagcaaccaagtgtatcaatcacctccacaagactgaactgcacggaaaaatgatctccgtggaaaaggccaaaaacgagcccgtgggtaagaagaccagtgacaaaagggattctgacggcaaaaaagagaagagcagtaactccgaccggagcactaatctcaaacgcgatgataagtgtgataggaaggacgatgcgaagaaaggcgacgatggcagcggagagaagtccaaggatcaagatgatcagaaaccggggccctccgagcgctcacgggcaaccaagagcggatctagaggaacagagaggaccgtggtgatggacaaaagtaagggggtgcccgtcataagcgtgaagactagcgggtcaaaagagagggcaagtaaatctcaagacagaaagtccgctagcagagaaaagagaagtgtggtgtcttttgataaggtcaaagaaccacgtaagtcacgtgattctgagtcacatcgggtaagagagcgatccgaacgtgagcagagaatgcaggcccagtgggagcgcgaagaaagggagagattggagattgcccgggagcgccttgctttccagagacagaggctggaaagagaaagaatggaacgtgagaggctcgaacgcgagaggatgcacgtggagcacgagagacgacgggagcaggagcggattcaccgtgagagagaggaactccggaggcagcaggaacttcgctatgaacaggaaaggcgaccagcggtgaggagaccctatgatttagatcggcgcgatgacgcctattggcccgaggctaagagggcggctctcgacgaaagatatcattctgatttcaaccgccaggaccgctttcacgacttcgaccacagagatcggggccgctatccggaccatagtgtagatagaagggagggaagcaggtccatgatgggcgaacgcgaaggtcagcactaccctgaacggcacggaggccccgagcgccatggccgtgattcgcgcgatggttggggtggttatggcagtgataaacgaatgagtgaggggcgaggtctgcccccaccccctcgggggcgcagggactggggcgatcacggaaggagagaagatgaccggtcatggcagggcaccgccgatggagggatgatggatagggatcacaagagatggcaaggaggcgaacgctccatgtccgggcattccggacccggccacatgatgaaccggggcggaatgtccggtagaggctccttcgccccaggaggcgcttcccgcggtcaccctatcccacatggcggtatgcagggggggtttggcgggcaaagcaggggatccagacctagcgacgcccgttttacccggagatactag

SEQ ID NO: 78996 - DNA, 2439 bp, Artificial Sequence
  derived and/or modified sequence
atggccgagaccctgagcggcctgggcgacagcggcgccgccggcgcggctgccctctcctcagcaagttcggagacaggcacaagacgactcagcgatctgagagtgattgatttacgcgccgaactgcgcaaaaggaatgttgacagttcagggaataagtccgttctgatggaacgcttgaaaaaggctattgaagatgagggtgggaacccagacgaaatcgagattacttccgaaggcaacaagaagactagtaagaggagcagcaaagggcgcaagccggaggaggagggggtcgaagataacggactagagcccgaaaacgagaaaattttagatattctcggggaaacatgtaagagtgagcctgtgaaagaggagtcctcggaactggaacagcctttcgcacaggatacctcttctgtggggcccgacaggaagctggccgaggaggaggatctgtttgattctgcacatcccgaagagggggatttagatctagcgagtgagtctacagcccatgctcagtcaagcaaggccgacagtctgttggcggtcgtgaaaagagaacccgcagagcagcctggcgatggtgagcgaacagattgtgaacctgtggggcttgagccagccgtggagcaatcatctgcagccagcgaactggcagaggcatcctcggaagagttagccgaggcacctaccgaggcccccagtcctgaagccagggatagcaaagaagatggcagaaaatttgacttcgatgcatgtaacgaggtccctcccgcacctaaagagtcaagcacaagcgagggagcagaccagaagatgagtagtcccgaggacgattccgacacaaagcgtttgtcaaaggaagagaaagggcgtagctcttgtggaaggaacttctgggttagtggtttgtcctccactactagggccacggatcttaaaaacctgttctccaaatatggaaaggtggtcggagccaaagttgttacaaatgctcggagcccaggagccaggtgttacggtttcgtaacgatgtcaacggctgaggaagcaacaaaatgtattaatcacctccataagacggaacttcacgggaaaatgataagcgtggagaaggctaaaaatgaaccagtcggaaagaagacttccgataagcgcgatagcgatggcaagaaggaaaaatcatcaaatagcgaccggagcaccaacttgaagagagacgataaatgcgataggaaggatgacgccaagaagggtgacgacgggtcaggcgagaagtccaaagaccaggatgaccaaaaacctgggccaagcgaacgcagtcgagccacgaagtctgggtctagaggaaccgagagaactgtggttatggacaagtccaagggcgtgccagttatctccgtgaagacgtcagggagtaaggagcgcgccagcaaatctcaggaccgaaaaagcgcctcaagggagaagcgatctgtggtctcattcgacaaggtgaaagagccgaggaagtctcgcgacagtgaaagccactcgcgggtgcgtgagcgctccgaacgggagcagcgcatgcaagcccagtgggaacgggaggaacgggagcgcctggagattgctcgcgagagactcgccttccagagacagcgattggagagggaaagaatggaaagggaacgattagaacgggaaaggatgcacgtggaacatgagcggagacgggagcaggaacggattcatcgggaacgcgaggagcttcgacgtcagcaggagctgcggtatgaacaggaacggagacccgccgtgagaaggccttatgacctggaccgtcgagatgacgcctactggcctgaagcgaaacgggctgcattagatgaaaggtaccatagcgatttcaatcgccaagaccgtttccatgatttcgaccaccgggaccggggaaggtaccccgatcactcagtggaccgcagagagggatctcgcagcatgatgggggagcgtgaaggacagcactatcccgagcggcacggtgggccagaacgacacggtcgcgactctcgggacgggtggggcggatacggatcagacaagagaatgtctgaaggtaggggactgccacctccccctagaggcagacgagattggggagaccatggaagaagagaggacgacagatcctggcagggaactgctgatggagggatgatggacagggaccacaagcgctggcagggcggcgagcgtagtatgtccggtcactcaggccccggccacatgatgaatagaggggggatgagcggaagagggtcctttgcccccggcggagcatcccgcggccatcctatcccccacggtggaatgcagggcggtttcggaggacaaagtaggggcagtcgaccctcagatgcgcgctttaccaggcggtattag

SEQ ID NO: 78997 - DNA, 1221 bp, Artificial Sequence
  derived and/or modified sequence
atggccgagaccctgcccggcagcggcgacagcggccccggcaccgccagtctcggaccaggagtggcagaaactggtacgagacgcctcagcgaactaagagtaatagacctgcgggcagaactgaagaagagaaacctggatactggtggaaataaaagcgtgctcatggaaaggttaaaaaaagccgtcaaggaggagggccaggatcctgatgaaattgggatcgagttggaagcgactagtaaaaaatccgctaaaaggtgtgtcaaaggtctgaaaatggaagaagaagggaccgaggacaacggtctggaggtggaaaacgagaaaatcctcgatatcctgggagaaacttgtaaaagtgagcctgtcaaagaggagtcctcggagctggagcagcccttcgcacaggatacctcttccgtaggacctgaccggaagctggccgaggaagaggacctctttgattccgcccaccccgaagagggcgatctcgacctagcttccgagagtacagcccacgcacagagctctaaagccgatagcctgcttgctgttgttaagcgcgagccggcggagcagccaggcgatggcgaaagaacagactgcgaacccgtgggcctcgagccggcagttgagcagtccagcgctgcctcggaactggctgaggcttcgtccgaggagctggccgaagcccctacagaggctcccagccccgaggcccgagactccaaggaggatggccgcaaatttgacttcgacgcctgtaacgaggtgccacccgcacccaaggaatccagcacgagcgaaggcgctgaccagaaaatgagcagctttaaggaagagaaggacatcaagcccatcattaaagacgagaaaggcagggtggggtctgggagtgggcggaatttgtgggtatcaggtctgagctctaccacgcgagcgactgacctcaagaatctattcagcaaatacggcaaggtcgtgggggccaaggtagtaacaaacgccaggtctcctggggccaggtgctatggttttgttaccatgtccacttccgatgaggccacgaaatgtatttcccacctccacagaacggagctgcatggtcgcatgatttccgtggagaaagcaaagaatgaacccgctggtaaaaaactgtccgacaggaaagaatgcgaggtgaaaaaagagaagttgagctccgtggatcggtag

SEQ ID NO: 78998 - DNA, 2547 bp, Artificial Sequence
  derived and/or modified sequence
atggcagagaccctgagcggccttggtgacagtggcgcagccggtgccgctgctctttcttcagcctcctcagagacgggtacacgtcggcttagcgatctgcgtgtaatagacctgcgcgctgagctgcgcaagaggaacgtggattcttctgggaataagtccgtgctcatggaaagactaaagaaagcaattgaggatgagggtggcaatccagatgagattgagataacctcggaaggcaataagaagacctctaagcgatcaagtaagggcaggaagccagaggaggagggcgtggaagacaacggcctggaggaaaacagcggagacgggcaaattgaggacaaagagactatcaataacttggatacgtccagttccgacttcacaattctccaggaaatcgaagaaccctccctggagccagagaacgaaaagatcctggatatcctcggtgaaacctgcaagtcggaacctgtaaaggaagaaagctctgagttggagcaacccttcgcccaggacacttcttcggtgggccctgatcgcaagttagccgaggaggaagatctctttgattctgcccatcctgaggagggcgatttagacctggcaagcgagtctacagcacacgcccagagcagtaaggcagatagtctcctcgccgttgtaaaacgtgaacccgcagaacagcccggagatggagaacgcactgattgcgaaccagtggggctcgaacctgcggttgagcagtccagtgctgcttctgaactggccgaagccagttctgaggaacttgctgaagcaccaaccgaagctccaagccctgaggcaagagactccaaagaggatggtcggaagtttgatttcgacgcctgtaacgaagttccgccagccccaaaagagtcttccaccagcgagggcgctgatcagaaaatgagctcgcctgaggatgatagtgataccaaaaggctctccaaggaagaaaagggcagatctagctgtggaagaaacttttgggtctccggcctatcttcaactacccgggcaacagaccttaagaatctgtttagcaagtatggcaaagttgtaggagcaaaggttgttacaaacgcgagatccccgggtgctaggtgttacggattcgttaccatgtctaccgcggaggaggcaactaaatgtatcaaccaccttcataagactgaactacacggaaaaatgataagcgtcgaaaaagcaaagaatgaaccagttggtaaaaagacctcggacaaacgggacagtgacggtaagaaggagaagagcagtaacagtgataggagcacaaaccttaaacgggacgacaagtgcgacaggaaagacgacgcaaaaaaaggtgacgatggctcaggggaaaaatctaaagaccaggacgaccagaaacccggtccatccgaaaggtcgagagctacaaaatctggcagtagaggcaccgagcggactgtggtgatggataaatctaagggagtcccagttatttcggtgaaaactagcggatcaaaggaacgagctagcaagtctcaagaccgcaaaagtgcaagcagggaaaaacgctctgtggtttcctttgacaaggtcaaagagccaagaaagagcagggatagcgagagccactcaagggttagagaacgttctgagcgcgagcagaggatgcaagcccagtgggaacgtgaagagcgggagcggctcgaaatcgctcgtgaacgactggcctttcaaagacagcggctggagcgagagcggatggaacgagagagacttgaacgagagaggatgcatgtggagcacgagagaagaagggagcaagagcgcatacatagagaaagggaggaactgcggaggcagcaagagcttagatacgaacaagagagaagaccggctgtgcgaaggccctatgacctcgacagacgcgatgatgcgtactggccagaagcaaaacgggctgcgctggacgagaggtatcacagcgactttaaccggcaggataggttccacgattttgatcatagggatcgcggaaggtacccagaccattcagtggataggagggagggctctcgttctatgatgggtgaaagggaaggacagcattacccagagcgacatgggggaccagaacgacatggccgtgattcccgagatggatggggaggatatgggtcagacaaaagaatgtctgaaggtcgtggcctaccacccccacctagaggcagaagggactggggagatcatggtaggagggaggacgatcggagctggcaaggaacggccgacggcggtatgatggacagagaccacaaacggtggcaggggggagagaggtcgatgtcagggcactcaggcccaggacacatgatgaacagggggggaatgtctgggcgaggatccttcgcaccaggaggcgcatcacgaggacaccccattcctcacggtggcatgcaaggtgggttcgggggtcaaagtcggggatcaagaccatccgacgctcggttcacgcgaagatactag

SEQ ID NO: 78999 - DNA, 2280 bp, Artificial Sequence
  derived and/or modified sequence
atgaaggtagtaattctcaccaagttgaaacttcccccacgggagacccgaaaacatcagagggggctggccaagattgaggacaaagagacaattaataatctggacacatcgagtagcgatttcactatactccaggaaatcgaggagccatcactggagcctgagaatgagaagatcttggatatactaggggagacgtgcaaatccgaaccggtaaaggaagaatcaagcgagctggaacagccatttgcccaagatacttctagcgtgggacctgatcgaaagctggctgaagaggaggacctgtttgattcagctcatccagaggaaggggacttggacctggccagcgaaagtacggcccacgctcagtcatctaaggctgattccctgctcgctgttgtcaagagggaacccgctgagcagccgggtgatggtgagcgaaccgactgtgagcccgtcgggctcgaaccagcagttgagcaatccagcgcagcaagcgaattggctgaggcatcatctgaagaactggcagaggctcccactgaggccccatcaccagaggctagagattcgaaagaggatgggagaaaattcgatttcgacgcttgcaacgaagtgcctcccgctcccaaggagagctcgacctctgagggtgcagaccagaagatgtcatctcccgaagacgactctgacactaagcgactctctaaagaagagaagggccgttctagctgcggacggaacttttgggtctcgggactgtcatccaccacccgggcaaccgacctcaagaacctctttagcaagtacggcaaggtcgtgggggcaaaggtcgtgacaaacgcacgctccccaggggctcgatgctacggttttgtaactatgagcacagcagaggaagcgactaagtgtataaaccaccttcacaagacggagctgcacggaaaaatgatttcagtcgaaaaagccaagaacgaacctgtcggtaagaagaccagcgacaaacgcgattccgatggtaaaaaagagaagagtagcaattcagaccgctcaaccaacctgaagcgagacgacaagtgcgatcggaaagatgacgcaaaaaagggagacgacggaagcggggagaaaagtaaggatcaggatgaccagaagcccggaccctcagaacggtcccgcgctaccaagagtgggtctagaggcaccgagcggaccgtggtcatggataaaagcaaaggggtcccggtgatcagcgtaaagacttctgggagtaaagaacgggcaagtaaatcacaagaccgcaagagcgcttctcgcgaaaaaaggagtgtagttagcttcgataaggttaaagagccaaggaaaagccgggacagcgaaagccatcgggtacgtgagcgctctgagagagaacagcgtatgcaggcccaatgggagcgcgaggaaagggaaaggctggaaatcgcacgtgagcgtctggccttccagagacagcgtctagagcgggaacgaatggagagggagaggctcgaaagagaacgtatgcacgtcgaacatgagcgccgacgagagcaggaacggattcatcgcgagagggaggaacttcgacgccagcaagaactgagatacgagcaggagcggaggcctgcagtgcgccgaccttatgaccttgatcgtagggatgacgcctattggcccgaagctaaaagagcggctctggacgagcgatatcactctgacttcaatcgacaggacaggttccacgatttcgaccatcgtgacagaggcagatacccagatcatagtgtggatagacgggaaggctcacgctccatgatgggtgaaagagaggggcagcactatccagaaaggcatggaggcccagagcgacacggtcgagattcacgagacggctgggggggatatggctctgataaacgaatgagcgaggggagggggctgccgccaccaccgagggggagaagagattggggcgatcatggtaggcgcgaggacgatagaagctggcagggcacggcagatggtggtatgatggacagagatcacaaacggtggcagggtggagaacggagcatgtcaggacacagcggcccaggtcatatgatgaatcggggaggcatgtcaggcagaggatcattcgccccaggcggtgccagtcgcggacatcccatcccccacggcggaatgcagggcggatttggaggtcagtctagaggaagccggcctagcgatgctagattcactcgtagatattag

SEQ ID NO: 79000 - DNA, 2439 bp, Artificial Sequence
  derived and/or modified sequence
atggccgagacacttagcggtctaggtgacagtggagcagctggagctgcggctctgtctagcgcctcctccgaaaccggtactaggaggctctcagacctgagggtgatcgatctgcgggcagaattgcgcaaaaggaacgtcgattcctcaggtaacaagtccgttctgatggagcggcttaaaaaagctatcgaagacgagggagggaatcctgacgagatcgaaattacctccgagggtaacaagaaaactagcaagagaagcagcaagggacgaaagcctgaggaggagggagtagaagataacggtcttgagcccgagaatgagaaaattttagacattctgggcgaaacctgtaaatctgagccagtcaaagaagaatcaagcgagctcgaacagccattcgcacaggatactagtagcgttggcccagatcggaagcttgctgaggaggaagatttgtttgactccgcacatcccgaggaaggggatttagatctggcctccgagtctaccgcccacgcccaatcttctaaagccgattcactactggccgtagtaaagcgtgaaccagcggagcaacctggcgacggcgagagaaccgattgtgaacccgtggggctcgagcctgcggttgaacagtcttcggccgctagtgagctggcagaagccagtagtgaagaattggccgaggctcctacagaagctccttcacccgaagccagagactccaaggaagatggtaggaagttcgatttcgacgcttgcaatgaggtgcccccagctcctaaggaaagctctaccagcgagggggcagaccagaaaatgtctagccctgaggacgatagtgacacgaagcgccttagtaaggaagaaaagggaaggtcatcctgcggtcgcaatttctgggttagcggactaagttcgactaccagagccactgatttaaagaacttattcagtaagtacggcaaagtagtgggtgctaaggtggttactaatgctagatcacccggagccagatgctatggctttgttaccatgtcgaccgccgaggaggccacaaagtgcattaaccaccttcacaaaactgagctccacggaaaaatgatttcggtggaaaaagctaaaaatgaacctgtcggtaaaaagacttccgacaaacgcgatagcgatggcaaaaaagaaaaatcttcaaattccgaccgcagcactaatctgaagagagacgacaagtgcgaccgtaaagatgacgcaaagaaaggtgacgacggaagcggcgagaaatccaaggaccaagacgaccagaagcctgggcctagtgagagaagtagggccaccaaatccggatctcgcggtactgaaaggaccgtggtcatggataagtctaagggcgtgccagtaatttcggtcaagacctccggaagcaaggagcgggcttctaaatcccaggatcggaagtccgcgtctcgagagaagcggtcagtagtaagtttcgataaagtgaaggagcccagaaaatccagagattcagagtcccatagccgggtccgtgagaggagcgaacgagaacagcgcatgcaggctcaatgggaaagggaagagcgtgagcgattggagattgctcgtgagcgtctggcattccaacgccagagactggagagagagagaatggagcgcgaacgtcttgaacgggaacgtatgcacgtagagcacgagagaaggagggaacaggagcgcattcacagggagagagaagagctgcgccgacagcaggagctgagatatgaacaggagcggcgacctgcggttcgcaggccgtatgatttggaccgcagagacgatgcatactggccagaagccaaaagagccgctctggacgagaggtatcactctgactttaaccgacaagaccgcttccacgatttcgaccacagggatcgcggacgctatcccgaccacagtgtggatcgacgcgagggcagtagatctatgatgggggaacgcgagggccaacattatccagagagacacggaggtccagaaaggcacggcagagactctagagacggctgggggggttatggatctgataagcggatgtctgagggcagggggctccccccaccccctcgcggacgccgtgactggggtgaccatggcagaagggaggatgatcgtagctggcagggcacagccgatgggggtatgatggacagggaccacaagaggtggcagggtggggagcgaagcatgtcggggcacagcgggccaggacacatgatgaaccggggagggatgagcggccgtggatcttttgctccgggaggggcttcgagaggacatcccatccctcatggcggaatgcagggtgggttcggaggccagtccaggggatcccgcccatctgacgctagatttacccgccgatactag

SEQ ID NO: 79001 - DNA, 1221 bp, Artificial Sequence
  derived and/or modified sequence
atggccgagacgttgcccggtagcggcgattctgggcctggcaccgcttctcttgggccaggagtggctgagaccggaacccgtagactctcagagctcagagttattgacctgcgggcagaattaaagaaaagaaatttagacaccggtggcaataaatcagtcctgatggagcggttgaaaaaagccgtgaaggaggaggggcaagaccctgacgagattgggatcgagctggaagccacttccaaaaaatcagccaagagatgtgtgaagggcctgaagatggaagaggagggtacagaagacaacggcctggaggtggagaatgaaaaaattttggatattttaggcgaaacatgtaaatccgagccagtgaaagaagagtcaagcgaactggagcagcccttcgctcaggatacttccagcgtgggccctgaccgaaagctagcagaggaggaagatctcttcgacagcgcccaccctgaagagggggatctcgatctagcatctgagtctaccgctcacgcccagagcagtaaggccgactcacttctggcagtggtaaagcgcgaacccgctgaacagcccggtgatggagagcgcacggactgcgaaccagtgggactagaaccggctgttgaacaatcctctgccgctagcgaactggccgaggccagtagtgaagagctcgccgaagcaccaaccgaggcaccttctcccgaggcccgtgattcaaaggaagatgggagaaaatttgacttcgatgcctgtaacgaggtaccgccagccccaaaggagtcgtcaactagcgagggggcagaccagaaaatgtcgagtttcaaggaggagaaggatatcaagccaataattaaagacgaaaaggggagggtgggctctggttcaggccgtaacctatgggtatccggattatcctctacaaccagggccaccgacttgaagaatttattttcaaagtacgggaaggttgtcggcgcaaaggtcgtgactaacgcaaggtcccctggagctcgctgttatggtttcgtgaccatgagtacttcagacgaggctacaaagtgtatcagccaccttcatagaacagaactgcatggacggatgatctctgtagaaaaagctaagaatgaaccagccggaaagaaattaagtgataggaaggagtgtgaagttaaaaaggaaaagttgtcatccgtcgacagatag

SEQ ID NO: 79002 - DNA, 2650 bp, Artificial Sequence
  derived and/or modified sequence
gtgctaggagcctgataaaaccggcccggttctgtggaaagtgggcggcggagccagggtccctggaatggcggagactctgtcaggcctaggtgattctggagcggcgggcgcggcggctctgagctccgcctcgtcagagaccgggacgcggcgcctcagcgacctgcgagtgatcgatctgcgggcggagctgaggaaacggaatgtggactcgagcggcaacaagagcgttttgatggagcggctgaagaaggcaattgaagatgaaggtggtaatcctgacgaaattgaaattacctccgagggaaacaagaaaacatcaaagaggtctagcaaagggcgcaaaccagaagaagagggtgtggaagataacgggctggaggaaaactctggggatggacagatagaggacaaagaaactataaacaatttagatacttcatcatctgacttcactatattacaggaaattgaagagccatccctggagccagaaaatgagaaaatactcgacattttgggggaaacttgtaaatctgagccagtaaaagaagaaagttccgagctggagcagccatttgcacaggacacaagtagcgtggggccagacagaaagcttgcggaggaagaggacctatttgacagcgcccatccggaagagggtgatttagatttggccagcgagtcaacagcacacgctcagtcgagcaaggcagacagcctgttagcggtagtgaaaagggagcccgcggagcagccaggcgatggcgagaggacggactgtgagcctgtagggctagagccggcagttgagcagagtagtgcggcctccgagctcgcggaggcctctagcgaggagctcgcagaagcacccacggaagccccaagcccagaagccagagatagcaaagaagacgggaggaagtttgattttgacgcttgtaatgaagtccctccggctcctaaagagtcctcaaccagtgagggcgctgatcagaaaatgagttctcccgaagatgactcggatacaaaaaggctttccaaagaggaaaagggtcgcagcagttgtggtagaaatttctgggttagtggactctcttctacaaccagagctacagatttgaagaatcttttcagcaaatatgggaaggtggtgggcgccaaggttgtgacaaatgcccggagtcctggagctcgctgttacggttttgtcacgatgtccacagcagaagaggccacaaaatgcattaaccacctgcacaagacggagctccacggaaagatgatctccgtggagaaagccaaaaatgaacctgtgggaaagaaaacctctgacaaaagagacagtgacgggaaaaaggagaagtcgagcaacagtgacagatctacaaaccttaagagggatgataaatgtgacagaaaagatgatgctaagaagggtgacgacggaagtggagaaaagagtaaggaccaagatgatcagaaacctggcccctcagagcgatctcgagccacaaagtcaggaagtcgagggaccgaacggactgtagtaatggataaatccaaaggggtgcctgtgattagtgtaaaaacgtccgggtccaaagagagagcttccaaaagccaggatcgcaaatcagccagcagagagaagcggtccgtcgtgtcctttgataaggtcaaggagcctcggaagtcaagagactcagagtcccatagcagggtgcgtgaacgcagtgaacgcgaacaacgcatgcaggcgcagtgggagcgcgaggagcgtgagcggctggagattgcccgagagaggctggccttccagcgccagcggctggagcgggagcgcatggagcgggaacggctggagcgcgaacgcatgcacgtggagcacgagcgcaggcgcgagcaggagcgcatccaccgtgagcgcgaggagctgaggcgccagcaggaactgcgctatgagcaggagcggcggcccgcggtgcggcggccctacgacctggaccggcgagatgatgcctattggccggaagccaagcgggccgccctggatgagcgctaccattctgactttaaccgccaggaccgcttccacgactttgaccacagggaccgcggccgctaccccgaccactcggtggacaggagagaaggttcaaggtcaatgatgggagaacgagaaggacagcattacccagaacgccatggaggaccagagcgccacggccgggactcccgcgatggctgggggggctatggctctgacaagaggatgagcgagggccgggggctgcctcctccccccaggggcagacgtgactggggggaccatggccgaagagaggatgaccggtcatggcagggcacggccgacgggggcatgatggacagggatcacaagaggtggcaaggtggcgagagaagcatgtccggtcactccgggcctggccacatgatgaaccgaggaggaatgtcagggcgcggcagctttgccccaggcggggcctcccggggccaccccatcccacacggtggcatgcagggcgggtttggaggccagagccgggggagcaggcccagcgatgcccgcttcactcgccgctactgagtacttggaatcctgtgtcctgtctcgtggcaacaa

SEQ ID NO: 79003 - DNA, 2433 bp, Artificial Sequence
  derived and/or modified sequence
agtgatcgatctgcgggcggagctgaggaaacggaatgtggactcgagcggcaacaagagcgttttgatggagcggctgaagaaggcaattgaagatgaaggtggtaatcctgacgaaattgaaattacctccgagggaaacaagaaaacatcaaagaggtctagcaaagatagaggacaaagaaactataaacaatttagatacttcatcatctgacttcactatattacaggaaattgaagagccatccctggagccagaaaatgagaaaatactcgacattttgggggaaacttgtaaatctgagccagtaaaagaagaaagttccgagctggagcagccatttgcacaggacacaagtagcgtggggccagacagaaagcttgcggaggaagaggacctatttgacagcgcccatccggaagagggtgatttagatttggccagcgagtcaacagcacacgctcagtcgagcaaggcagacagcctgttagcggtagtgaaaagggagcccgcggagcagccaggcgatggcgagaggacggactgtgagcctgtagggctagagccggcagttgagcagagtagtgcggcctccgagctcgcggaggcctctagcgaggagctcgcagaagcacccacggaagccccaagcccagaagccagagatagcaaagaagacgggaggaagtttgattttgacgcttgtaatgaagtccctccggctcctaaagagtcctcaaccagtgagggcgctgatcagaaaatgagttctcccgaagatgactcggatacaaaaaggctttccaaagaggaaaagggtcgcagcagttgtggtagaaatttctgggttagtggactctcttctacaaccagagctacagatttgaagaatcttttcagcaaatatgggaaggtggtgggcgccaaggttgtgacaaatgcccggagtcctggagctcgctgttacggttttgtcacgatgtccacagcagaagaggccacaaaatgcattaaccacctgcacaagacggagctccacggaaagatgatctccgtggagaaagccaaaaatgaacctgtgggaaagaaaacctctgacaaaagagacagtgacgggaaaaaggagaagtcgagcaacagtgacagatctacaaaccttaagagggatgataaatgtgacagaaaagatgatgctaagaagggtgacgacggaagtggagaaaagagtaaggaccaagatgatcagaaacctggcccctcagagcgatctcgagccacaaagtcaggaagtcgagggaccgaacggactgtagtaatggataaatccaaaggggtgcctgtgattagtgtaaaaacgtccgggtccaaagagagagcttccaaaagccaggatcgcaaatcagccagcagagagaagcggtccgtcgtgtcctttgataaggtcaaggagcctcggaagtcaagagactcagagtcccatagggtgcgtgaacgcagtgaacgcgaacaacgcatgcaggcgcagtgggagcgcgaggagcgtgagcggctggagattgcccgagagaggctggccttccagcgccagcggctggagcgggagcgcatggagcgggaacggctggagcgcgaacgcatgcacgtggagcacgagcgcaggcgcgagcaggagcgcatccaccgtgagcgcgaggagctgaggcgccagcaggaactgcgctatgagcaggagcggcggcccgcggtgcggcggccctacgacctggaccggcgagatgatgcctattggccggaagccaagcgggccgccctggatgagcgctaccattctgactttaaccgccaggaccgcttccacgactttgaccacagggaccgcggccgctaccccgaccactcggtggacaggagagaaggttcaaggtcaatgatgggagaacgagaaggacagcattacccagaacgccatggaggaccagagcgccacggccgggactcccgcgatggctgggggggctatggctctgacaagaggatgagcgagggccgggggctgcctcctccccccaggggcagacgtgactggggggaccatggccgaagagaggatgaccggtcatggcagggcacggccgacgggggcatgatggacagggatcacaagaggtggcaaggtggcgagagaagcatgtccggtcactccgggcctggccacatgatgaaccgaggaggaatgtcagggcgcggcagctttgccccaggcggggcctcccggggccaccccatcccacacggtggcatgcagggcgggtttggaggccagagccgggggagcaggcccagcgatgcccgcttcactcgccgctactgagtacttggaatcctgtgtcctgtctcgtggcaacaaggctatgttctgttaggagtta

SEQ ID NO: 79004 - DNA, 2681 bp, Artificial Sequence
  derived and/or modified sequence
gtgctaggagcctgataaaaccggcccggttctgtggaaagtgggcggcggagccagggtccctggaatggcggagactctgtcaggcctaggtgattctggagcggcgggcgcggcggctctgagctccgcctcgtcagagaccgggacgcggcgcctcagcgacctgcgagtgatcgatctgcgggcggagctgaggaaacggaatgtggactcgagcggcaacaagagcgttttgatggagcggctgaagaaggcaattgaagatgaaggtggtaatcctgacgaaattgaaattacctccgagggaaacaagaaaacatcaaagaggtctagcaaagggcgcaaaccagaagaagagggtgtggaagataacgggctggagccagaaaatgagaaaatactcgacattttgggggaaacttgtaaatctgagccagtaaaagaagaaagttccgagctggagcagccatttgcacaggacacaagtagcgtggggccagacagaaagcttgcggaggaagaggacctatttgacagcgcccatccggaagagggtgatttagatttggccagcgagtcaacagcacacgctcagtcgagcaaggcagacagcctgttagcggtagtgaaaagggagcccgcggagcagccaggcgatggcgagaggacggactgtgagcctgtagggctagagccggcagttgagcagagtagtgcggcctccgagctcgcggaggcctctagcgaggagctcgcagaagcacccacggaagccccaagcccagaagccagagatagcaaagaagacgggaggaagtttgattttgacgcttgtaatgaagtccctccggctcctaaagagtcctcaaccagtgagggcgctgatcagaaaatgagttctcccgaagatgactcggatacaaaaaggctttccaaagaggaaaagggtcgcagcagttgtggtagaaatttctgggttagtggactctcttctacaaccagagctacagatttgaagaatcttttcagcaaatatgggaaggtggtgggcgccaaggttgtgacaaatgcccggagtcctggagctcgctgttacggttttgtcacgatgtccacagcagaagaggccacaaaatgcattaaccacctgcacaagacggagctccacggaaagatgatctccgtggagaaagccaaaaatgaacctgtgggaaagaaaacctctgacaaaagagacagtgacgggaaaaaggagaagtcgagcaacagtgacagatctacaaaccttaagagggatgataaatgtgacagaaaagatgatgctaagaagggtgacgacggaagtggagaaaagagtaaggaccaagatgatcagaaacctggcccctcagagcgatctcgagccacaaagtcaggaagtcgagggaccgaacggactgtagtaatggataaatccaaaggggtgcctgtgattagtgtaaaaacgtccgggtccaaagagagagcttccaaaagccaggatcgcaaatcagccagcagagagaagcggtccgtcgtgtcctttgataaggtcaaggagcctcggaagtcaagagactcagagtcccatagcagggtgcgtgaacgcagtgaacgcgaacaacgcatgcaggcgcagtgggagcgcgaggagcgtgagcggctggagattgcccgagagaggctggccttccagcgccagcggctggagcgggagcgcatggagcgggaacggctggagcgcgaacgcatgcacgtggagcacgagcgcaggcgcgagcaggagcgcatccaccgtgagcgcgaggagctgaggcgccagcaggaactgcgctatgagcaggagcggcggcccgcggtgcggcggccctacgacctggaccggcgagatgatgcctattggccggaagccaagcgggccgccctggatgagcgctaccattctgactttaaccgccaggaccgcttccacgactttgaccacagggaccgcggccgctaccccgaccactcggtggacaggagagaaggttcaaggtcaatgatgggagaacgagaaggacagcattacccagaacgccatggaggaccagagcgccacggccgggactcccgcgatggctgggggggctatggctctgacaagaggatgagcgagggccgggggctgcctcctccccccaggggcagacgtgactggggggaccatggccgaagagaggatgaccggtcatggcagggcacggccgacgggggcatgatggacagggatcacaagaggtggcaaggtggcgagagaagcatgtccggtcactccgggcctggccacatgatgaaccgaggaggaatgtcagggcgcggcagctttgccccaggcggggcctcccggggccaccccatcccacacggtggcatgcagggcgggtttggaggccagagccgggggagcaggcccagcgatgcccgcttcactcgccgctactgagtacttggaatcctgtgtcctgtctcgtggcaacaaggctatgttctgttaggagttaccttaaactgtgtaaaaatatttttttttaatctgctgccatattgtagctcaatacaatgtgaatttgtttttcgttttggggttttttttttttgtaataaatgtgtttccgttc

SEQ ID NO: 79005 - DNA, 3005 bp, Artificial Sequence
  derived and/or modified sequence
gttgtgccggggaacccgcggttggtggacgcgcgagcgtccttgctgctaagtacgctagtgggggcggtgcgcgtgcgcgtgcgcggccgcaaagcggggcgggaggaaacgagtgcgttttcctcttaggcggcgccattttgtgttcagagccgctatagctgccggcggtgtgcgactgagtcggtggcgaagacgggaacgcgacgatggcggagactctgcccgggtcgggcgactcgggccctggcacggcttctctcggcccgggcgttgcggagactgggacgaggcggctcagcgagctgcgggtgatcgatctgcgggcggagctgaagaagcggaacctggacacgggcggcaacaagagcgtcctgatggagcggctcaagaaggcggttaaagaagaggggcaagatcctgatgaaattggcatcgagttagaagccaccagcaagaagtcagccaagagatgtgttaaaggactgaagatggaggaggaaggcacagaagataatggcctggaagtagaaaatgagaaaatactcgacattttgggggaaacttgtaaatctgagccagtaaaagaagaaagttccgagctggagcagccatttgcacaggacacaagtagcgtggggccagacagaaagcttgcggaggaagaggacctatttgacagcgcccatccggaagagggtgatttagatttggccagcgagtcaacagcacacgctcagtcgagcaaggcagacagcctgttagcggtagtgaaaagggagcccgcggagcagccaggcgatggcgagaggacggactgtgagcctgtagggctagagccggcagttgagcagagtagtgcggcctccgagctcgcggaggcctctagcgaggagctcgcagaagcacccacggaagccccaagcccagaagccagagatagcaaagaagacgggaggaagtttgattttgacgcttgtaatgaagtccctccggctcctaaagagtcctcaaccagtgagggcgctgatcagaaaatgagctcttttaaggaagaaaaagatataaagccaatcattaaagatgaaaaaggtcgggtcggcagcggttctggtcggaacctgtgggtcagcgggctgtcctccacaacacgcgctacggatctcaagaaccttttcagcaagtatgggaaggttgtcggggccaaagtggtaacgaacgcccgcagcccgggggctcgatgctatggattcgtcaccatgtcgacatctgacgaggcgaccaagtgcatcagccatctccacagaactgagctgcatggacgaatgatctccgtagagaaggccaaaaatgagcctgctgggaaaaagctttccgacagaaaagagtgcgaagtgaagaaggaaaaattatcgagtgtcgacagacatcattctgtggagatcaaaattgaaaaaactgtaattaagaaggaagagaagattgagaagaaggaggaaaaaaagcctgaagacattaagaaggaagaaaaagaccaggatgagctgaaacccggacctacaaatcggtctagagtcaccaaatcaggaagcagaggaatggagcggacggtcgtgatggataaatcgaaaggagagcccgtcattagcgtgaaaaccacaagcaggtccaaagagagaagctccaagagtcaggatcgcaagtcagaaagcaaagaaaagagagacatcttgtcgtttgataaaatcaaagaacaaagggagagagagcgccagaggcagcgggaacgggagatccgcgaaacggagaggcggcgggagcgcgagcagcgggagcgggagcaacgcctcgaggccttccatgagcggaaggagaaggcccggctacagcgggaacgcctgcagctcgagtgccagcgccagcggctggagcgggagcgcatggagcgggagcggctggagcgcgagcgcatgcgcgtggagcgtgagcgcaggaaggagcaggagcgcatccaccgcgagcgcgaggagctgcggcgccagcaggagcagctgcgttacgagcaggagcggcggcccgggcggaggccctacgacctggaccgacgagatgatgcctattggccagaaggaaagcgtgtggcaatggaggaccgatatcgtgcagactttccccggccagaccaccgctttcacgacttcgatcatcgagaccggggccagtaccaggaccacgccatcgacaggcgggagggttcgaggccaatgatgggagaccaccgggatgggcagcactatggagatgaccgccatggccacggaggacccccagagcgccacggccgggactcccgtgatggctgggggggctacggctccgacaagaggctgagtgaaggccgggggctgccccctccccccaggggtggccgtgactggggagagcacaaccagcggctagaggagcaccaggcacgcgcctggcagggtgccatggacgcaggcgcggctagccgggagcacgccaggtggcaaggtggcgagaggggcctgtctgggccctcggggccggggcacatggcaagccgcggtggagtggcggggcgaggcggctttgcacaaggtggacattcccagggccacgtggtgccaggtggcggactggaaggtggcggagtggccagccaggaccggggcagcagagtccctcacccacaccctcatccccccccgtacccccacttcacccgccgctactaagtcccactcgctgcgagttttcgggtgggcagacgcactgttgaatctggtagccagggttccctcgaacttgggggatctttttaaaagcaaagtaaatcctgccaccatgttgtagctcaatacaatgtgaactcactttttttttttttttaaataaatgtgttcttgttctgccatttttaaatcaaggtttctgttaacgaggcattccattttccattaataaagtttaccattcgc

SEQ ID NO: 79006 - DNA, 2547 bp, Artificial Sequence
  derived and/or modified sequence
atggccgagaccctgagcggcctgggcgacagcggcgccgccggcgccgccgccctgagcagcgccagcagcgagaccggcaccagaagactgagcgacctgagagtgatcgacctgagagccgagctgagaaagagaaacgtggacagcagcggcaacaagagcgtgctgatggagagactgaagaaggccatcgaggacgagggcggcaaccccgacgagatcgagatcaccagcgagggcaacaagaagaccagcaagagaagcagcaagggcagaaagcccgaggaggagggcgtggaggacaacggcctggaggagaacagcggcgacggccagatcgaggacaaggagaccatcaacaacctggacaccagcagcagcgacttcaccatcctgcaggagatcgaggagcccagcctggagcccgagaacgagaagatcctggacatcctgggcgagacctgcaagagcgagcccgtgaaggaggagagcagcgagctggagcagcccttcgcccaggacaccagcagcgtgggccccgacagaaagctggccgaggaggaggacctgttcgacagcgcccaccccgaggagggcgacctggacctggccagcgagagcaccgcccacgcccagagcagcaaggccgacagcctgctggccgtggtgaagagagagcccgccgagcagcccggcgacggcgagagaaccgactgcgagcccgtgggcctggagcccgccgtggagcagagcagcgccgccagcgagctggccgaggccagcagcgaggagctggccgaggcccccaccgaggcccccagccccgaggccagagacagcaaggaggacggcagaaagttcgacttcgacgcctgcaacgaggtgccccccgcccccaaggagagcagcaccagcgagggcgccgaccagaagatgagcagccccgaggacgacagcgacaccaagagactgagcaaggaggagaagggcagaagcagctgcggcagaaacttctgggtgagcggcctgagcagcaccaccagagccaccgacctgaagaacctgttcagcaagtacggcaaggtggtgggcgccaaggtggtgaccaacgccagaagccccggcgccagatgctacggcttcgtgaccatgagcaccgccgaggaggccaccaagtgcatcaaccacctgcacaagaccgagctgcacggcaagatgatcagcgtggagaaggccaagaacgagcccgtgggcaagaagaccagcgacaagagagacagcgacggcaagaaggagaagagcagcaacagcgacagaagcaccaacctgaagagagacgacaagtgcgacagaaaggacgacgccaagaagggcgacgacggcagcggcgagaagagcaaggaccaggacgaccagaagcccggccccagcgagagaagcagagccaccaagagcggcagcagaggcaccgagagaaccgtggtgatggacaagagcaagggcgtgcccgtgatcagcgtgaagaccagcggcagcaaggagagagccagcaagagccaggacagaaagagcgccagcagagagaagagaagcgtggtgagcttcgacaaggtgaaggagcccagaaagagcagagacagcgagagccacagcagagtgagagagagaagcgagagagagcagagaatgcaggcccagtgggagagagaggagagagagagactggagatcgccagagagagactggccttccagagacagagactggagagagagagaatggagagagagagactggagagagagagaatgcacgtggagcacgagagaagaagagagcaggagagaatccacagagagagagaggagctgagaagacagcaggagctgagatacgagcaggagagaagacccgccgtgagaagaccctacgacctggacagaagagacgacgcctactggcccgaggccaagagagccgccctggacgagagataccacagcgacttcaacagacaggacagattccacgacttcgaccacagagacagaggcagataccccgaccacagcgtggacagaagagagggcagcagaagcatgatgggcgagagagagggccagcactaccccgagagacacggcggccccgagagacacggcagagacagcagagacggctggggcggctacggcagcgacaagagaatgagcgagggcagaggcctgccccccccccccagaggcagaagagactggggcgaccacggcagaagagaggacgacagaagctggcagggcaccgccgacggcggcatgatggacagagaccacaagagatggcagggcggcgagagaagcatgagcggccacagcggccccggccacatgatgaacagaggcggcatgagcggcagaggcagcttcgcccccggcggcgccagcagaggccaccccatcccccacggcggcatgcagggcggcttcggcggccagagcagaggcagcagacccagcgacgccagattcaccagaagatactag

SEQ ID NO: 79007 - DNA, 2280 bp, Artificial Sequence
  derived and/or modified sequence
atgaaggtggtgatcctgaccaagctgaagctgccccccagagagaccagaaagcaccagagaggcctggccaagatcgaggacaaggagaccatcaacaacctggacaccagcagcagcgacttcaccatcctgcaggagatcgaggagcccagcctggagcccgagaacgagaagatcctggacatcctgggcgagacctgcaagagcgagcccgtgaaggaggagagcagcgagctggagcagcccttcgcccaggacaccagcagcgtgggccccgacagaaagctggccgaggaggaggacctgttcgacagcgcccaccccgaggagggcgacctggacctggccagcgagagcaccgcccacgcccagagcagcaaggccgacagcctgctggccgtggtgaagagagagcccgccgagcagcccggcgacggcgagagaaccgactgcgagcccgtgggcctggagcccgccgtggagcagagcagcgccgccagcgagctggccgaggccagcagcgaggagctggccgaggcccccaccgaggcccccagccccgaggccagagacagcaaggaggacggcagaaagttcgacttcgacgcctgcaacgaggtgccccccgcccccaaggagagcagcaccagcgagggcgccgaccagaagatgagcagccccgaggacgacagcgacaccaagagactgagcaaggaggagaagggcagaagcagctgcggcagaaacttctgggtgagcggcctgagcagcaccaccagagccaccgacctgaagaacctgttcagcaagtacggcaaggtggtgggcgccaaggtggtgaccaacgccagaagccccggcgccagatgctacggcttcgtgaccatgagcaccgccgaggaggccaccaagtgcatcaaccacctgcacaagaccgagctgcacggcaagatgatcagcgtggagaaggccaagaacgagcccgtgggcaagaagaccagcgacaagagagacagcgacggcaagaaggagaagagcagcaacagcgacagaagcaccaacctgaagagagacgacaagtgcgacagaaaggacgacgccaagaagggcgacgacggcagcggcgagaagagcaaggaccaggacgaccagaagcccggccccagcgagagaagcagagccaccaagagcggcagcagaggcaccgagagaaccgtggtgatggacaagagcaagggcgtgcccgtgatcagcgtgaagaccagcggcagcaaggagagagccagcaagagccaggacagaaagagcgccagcagagagaagagaagcgtggtgagcttcgacaaggtgaaggagcccagaaagagcagagacagcgagagccacagagtgagagagagaagcgagagagagcagagaatgcaggcccagtgggagagagaggagagagagagactggagatcgccagagagagactggccttccagagacagagactggagagagagagaatggagagagagagactggagagagagagaatgcacgtggagcacgagagaagaagagagcaggagagaatccacagagagagagaggagctgagaagacagcaggagctgagatacgagcaggagagaagacccgccgtgagaagaccctacgacctggacagaagagacgacgcctactggcccgaggccaagagagccgccctggacgagagataccacagcgacttcaacagacaggacagattccacgacttcgaccacagagacagaggcagataccccgaccacagcgtggacagaagagagggcagcagaagcatgatgggcgagagagagggccagcactaccccgagagacacggcggccccgagagacacggcagagacagcagagacggctggggcggctacggcagcgacaagagaatgagcgagggcagaggcctgccccccccccccagaggcagaagagactggggcgaccacggcagaagagaggacgacagaagctggcagggcaccgccgacggcggcatgatggacagagaccacaagagatggcagggcggcgagagaagcatgagcggccacagcggccccggccacatgatgaacagaggcggcatgagcggcagaggcagcttcgcccccggcggcgccagcagaggccaccccatcccccacggcggcatgcagggcggcttcggcggccagagcagaggcagcagacccagcgacgccagattcaccagaagatactag

SEQ ID NO: 79008 - DNA, 2439 bp, Artificial Sequence
  derived and/or modified sequence
atggccgagaccctgagcggcctgggcgacagcggcgccgccggcgccgccgccctgagcagcgccagcagcgagaccggcaccagaagactgagcgacctgagagtgatcgacctgagagccgagctgagaaagagaaacgtggacagcagcggcaacaagagcgtgctgatggagagactgaagaaggccatcgaggacgagggcggcaaccccgacgagatcgagatcaccagcgagggcaacaagaagaccagcaagagaagcagcaagggcagaaagcccgaggaggagggcgtggaggacaacggcctggagcccgagaacgagaagatcctggacatcctgggcgagacctgcaagagcgagcccgtgaaggaggagagcagcgagctggagcagcccttcgcccaggacaccagcagcgtgggccccgacagaaagctggccgaggaggaggacctgttcgacagcgcccaccccgaggagggcgacctggacctggccagcgagagcaccgcccacgcccagagcagcaaggccgacagcctgctggccgtggtgaagagagagcccgccgagcagcccggcgacggcgagagaaccgactgcgagcccgtgggcctggagcccgccgtggagcagagcagcgccgccagcgagctggccgaggccagcagcgaggagctggccgaggcccccaccgaggcccccagccccgaggccagagacagcaaggaggacggcagaaagttcgacttcgacgcctgcaacgaggtgccccccgcccccaaggagagcagcaccagcgagggcgccgaccagaagatgagcagccccgaggacgacagcgacaccaagagactgagcaaggaggagaagggcagaagcagctgcggcagaaacttctgggtgagcggcctgagcagcaccaccagagccaccgacctgaagaacctgttcagcaagtacggcaaggtggtgggcgccaaggtggtgaccaacgccagaagccccggcgccagatgctacggcttcgtgaccatgagcaccgccgaggaggccaccaagtgcatcaaccacctgcacaagaccgagctgcacggcaagatgatcagcgtggagaaggccaagaacgagcccgtgggcaagaagaccagcgacaagagagacagcgacggcaagaaggagaagagcagcaacagcgacagaagcaccaacctgaagagagacgacaagtgcgacagaaaggacgacgccaagaagggcgacgacggcagcggcgagaagagcaaggaccaggacgaccagaagcccggccccagcgagagaagcagagccaccaagagcggcagcagaggcaccgagagaaccgtggtgatggacaagagcaagggcgtgcccgtgatcagcgtgaagaccagcggcagcaaggagagagccagcaagagccaggacagaaagagcgccagcagagagaagagaagcgtggtgagcttcgacaaggtgaaggagcccagaaagagcagagacagcgagagccacagcagagtgagagagagaagcgagagagagcagagaatgcaggcccagtgggagagagaggagagagagagactggagatcgccagagagagactggccttccagagacagagactggagagagagagaatggagagagagagactggagagagagagaatgcacgtggagcacgagagaagaagagagcaggagagaatccacagagagagagaggagctgagaagacagcaggagctgagatacgagcaggagagaagacccgccgtgagaagaccctacgacctggacagaagagacgacgcctactggcccgaggccaagagagccgccctggacgagagataccacagcgacttcaacagacaggacagattccacgacttcgaccacagagacagaggcagataccccgaccacagcgtggacagaagagagggcagcagaagcatgatgggcgagagagagggccagcactaccccgagagacacggcggccccgagagacacggcagagacagcagagacggctggggcggctacggcagcgacaagagaatgagcgagggcagaggcctgccccccccccccagaggcagaagagactggggcgaccacggcagaagagaggacgacagaagctggcagggcaccgccgacggcggcatgatggacagagaccacaagagatggcagggcggcgagagaagcatgagcggccacagcggccccggccacatgatgaacagaggcggcatgagcggcagaggcagcttcgcccccggcggcgccagcagaggccaccccatcccccacggcggcatgcagggcggcttcggcggccagagcagaggcagcagacccagcgacgccagattcaccagaagatactag

SEQ ID NO: 79009 - DNA, 1221 bp, Artificial Sequence
  derived and/or modified sequence
atggccgagaccctgcccggcagcggcgacagcggccccggcaccgccagcctgggccccggcgtggccgagaccggcaccagaagactgagcgagctgagagtgatcgacctgagagccgagctgaagaagagaaacctggacaccggcggcaacaagagcgtgctgatggagagactgaagaaggccgtgaaggaggagggccaggaccccgacgagatcggcatcgagctggaggccaccagcaagaagagcgccaagagatgcgtgaagggcctgaagatggaggaggagggcaccgaggacaacggcctggaggtggagaacgagaagatcctggacatcctgggcgagacctgcaagagcgagcccgtgaaggaggagagcagcgagctggagcagcccttcgcccaggacaccagcagcgtgggccccgacagaaagctggccgaggaggaggacctgttcgacagcgcccaccccgaggagggcgacctggacctggccagcgagagcaccgcccacgcccagagcagcaaggccgacagcctgctggccgtggtgaagagagagcccgccgagcagcccggcgacggcgagagaaccgactgcgagcccgtgggcctggagcccgccgtggagcagagcagcgccgccagcgagctggccgaggccagcagcgaggagctggccgaggcccccaccgaggcccccagccccgaggccagagacagcaaggaggacggcagaaagttcgacttcgacgcctgcaacgaggtgccccccgcccccaaggagagcagcaccagcgagggcgccgaccagaagatgagcagcttcaaggaggagaaggacatcaagcccatcatcaaggacgagaagggcagagtgggcagcggcagcggcagaaacctgtgggtgagcggcctgagcagcaccaccagagccaccgacctgaagaacctgttcagcaagtacggcaaggtggtgggcgccaaggtggtgaccaacgccagaagccccggcgccagatgctacggcttcgtgaccatgagcaccagcgacgaggccaccaagtgcatcagccacctgcacagaaccgagctgcacggcagaatgatcagcgtggagaaggccaagaacgagcccgccggcaagaagctgagcgacagaaaggagtgcgaggtgaagaaggagaagctgagcagcgtggacagatag

SEQ ID NO: 79010 - protein, 149 aa, Artificial Sequence
  derived and/or modified sequence
MNLWLLACLVAGFLGAWAPAVHTQGVFEDCCLAYHYPIGWAVLRRAWTYRIQEVSGSCNLPAAIFYLPKRHRKVCGNPKSREVQRAMKLLDARNKVFAKLHHNTQTFQGPHAVKKLSSGNSKLSSSKFSNPISSSKRNVSLLISANSGL

SEQ ID NO: 79011 - DNA, 450 bp, Artificial Sequence
  derived and/or modified sequence
atgaatctctggctcctggcttgtctggtggcaggcttcctcggtgcctgggcccctgccgtgcacacacaaggcgtctttgaggattgttgcctggcatatcattatcccattgggtgggcagtcctgcgacgtgcgtggacatacaggatccaggaagttagtggatcatgcaaccttcctgccgcaatcttttacctgccaaagaggcacagaaaggtgtgcgggaaccccaaatcccgcgaggtgcagcgcgctatgaaattgttagacgctaggaataaggtgttcgcgaagctccatcataatactcagacattccagggaccacatgccgttaagaagctgtcgtctggcaacagcaaactcagctcttcaaaattttcgaaccccataagtagctccaagcgaaacgtctcactcctgatctctgcaaactccggcctgtag

SEQ ID NO: 79012 - DNA, 255 bp, Artificial Sequence
  derived and/or modified sequence
atgaacctgtggttgctcgcatgcctggtggcgggttttctcggggcttgggcacctgcagtccatacacagggagtctttgaggattgttgtctggcctatcattaccccatcgggtgggccgtgctcaggcgcgcctggacatatagaatccaggaagtctcaggaagttgtaatctcccagccgctattcgaccaagctgctgtaaggaggtagaattttggaaattacaggttatcatcgtccaggtatag

SEQ ID NO: 79013 - DNA, 450 bp, Artificial Sequence
  derived and/or modified sequence
atgaacctgtggctgctggcctgcctggtggccggcttcctgggcgcctgggccccagctgtgcacacccagggcgtgtttgaggactgctgcctggcctaccactaccccatcggctgggccgtgctgcggcgggcctggacctaccgcatccaggaggtgtctggcagctgcaacctgcctgctgccatcttctacctgcccaagaggcacaggaaggtgtgtggcaaccccaagagccgggaggtgcagagggccatgaagctgctggatgccaggaacaaggtgtttgccaagctgcaccacaacacccagaccttccagggcccccatgctgtgaagaagctgagcagcggcaacagcaagctgagcagcagcaagttcagcaaccccatcagcagcagcaagagaaatgtgtccctgctgatcagcgccaacagcggcctgtag

SEQ ID NO: 79014 - DNA, 255 bp, Artificial Sequence
  derived and/or modified sequence
atgaacctgtggctgctggcctgcctggtggccggcttcctgggcgcctgggccccagctgtgcacacccagggcgtgtttgaggactgctgcctggcctaccactaccccatcggctgggccgtgctgcggcgggcctggacctaccgcatccaggaggtgtctggcagctgcaacctgcctgctgccatccggcccagctgctgcaaggaggtggagttctggaagctgcaggtgatcatcgtgcaggtgtag

SEQ ID NO: 79015 - DNA, 450 bp, Artificial Sequence
  derived and/or modified sequence
atgaacctgtggctgctggcctgcctggtggccggcttcctgggcgcatgggcgcctgcagtccacacgcagggggtgtttgaggattgttgcttagcgtaccattatcccataggttgggcggtcctgcggcgtgcctggacatacagaatacaggaggtctctgggagctgtaacctgccagcggcgatcttttacctacctaagaggcatcggaaagtatgtggtaacccaaagagcagagaagtgcaaagggctatgaaacttctcgatgcccggaataaagtgtttgcaaagttacatcacaacactcagacgttccaaggcccgcacgccgtgaaaaaattgtcttcaggaaacagtaaactttcttcatccaaattttccaaccccatatcctcaagtaagcgtaatgtttctctgcttatctcagccaacagcggtctgtag

SEQ ID NO: 79016 - DNA, 255 bp, Artificial Sequence
  derived and/or modified sequence
atgaacctgtggctgctggcctgcctggtggccggcttcctgggcgcctgggccccagccgtccatactcagggtgtttttgaagattgttgtttagcataccattaccctatcggatgggctgtgctgcgtagagcgtggacataccggatccaggaggtgtccggatcatgtaatctgcctgccgccatccgtccatcatgttgtaaggaggtggagttctggaagttgcaggttatcatcgtccaggtatag

SEQ ID NO: 79017 - DNA, 450 bp, Artificial Sequence
  derived and/or modified sequence
atgaatctatggctcctggcatgcctggtggccggattcctgggagcctgggcgcctgctgttcacactcagggcgtgtttgaagattgctgcctcgcctaccactatcccatcggttgggccgtcttgcgcagggcctggacttatcgtattcaggaggtgagcgggtcctgcaatctgccagccgctatcttctacttgcccaagaggcaccgaaaagtctgcggaaaccccaagtcccgcgaggttcagcgcgctatgaagctcctggacgccaggaacaaggttttcgccaagttgcatcacaatactcaaacatttcagggtcctcatgcagtcaagaaattgtcgtccggcaactccaagctttcgtccagcaaattttccaaccccatcagcagcagcaagcgtaacgtgtctctgctcatatctgcaaacagcggcctttag

SEQ ID NO: 79018 - DNA, 255 bp, Artificial Sequence
  derived and/or modified sequence
atgaatctgtggctcctcgcgtgtttggtagccggttttctgggggcatgggccccagcagtccatacccagggtgttttcgaggattgctgtcttgcttatcactatcctatcggttgggctgttctgcgcagggcctggacatataggatccaggaggtatccggaagctgcaatctccctgcagccataagacctagttgttgtaaggaagtggaattctggaaactacaggtcatcattgttcaggtatag

SEQ ID NO: 79019 - DNA, 953 bp, Artificial Sequence
  derived and/or modified sequence
ggacagcttggcctacagcccggcgggcatcagctcccttgacccagtggatatcggtggccccgttattcgtccaggtgcccagggaggaggacccgcctgcagcatgaacctgtggctcctggcctgcctggtggccggcttcctgggagcctgggcccccgctgtccacacccaaggtgtctttgaggactgctgcctggcctaccactaccccattgggtgggctgtgctccggcgcgcctggacttaccggatccaggaggtgagcgggagctgcaatctgcctgctgcgatattctacctccccaagagacacaggaaggtgtgtgggaaccccaaaagcagggaggtgcagagagccatgaagctcctggatgctcgaaataaggtttttgcaaagctccaccacaacacgcagaccttccaaggccctcatgctgtaaagaagttgagttctggaaactccaagttatcatcgtccaagtttagcaatcccatcagcagcagtaagaggaatgtctccctcctgatatcagctaattcaggactgtgagccggctcatttctgggctccatcggcacaggaggggccggatctttctccgataaaaccgtcgccctacagacccagctgtccccacgcctctgtcttttgggtcaagtcttaatccctgcacctgagttggtcctccctctgcacccccaccacctcctgcccgtctggcaactggaaagagggagttggcctgattttaagccttttgccgctccggggaccagcagcaatcctgggcagccagtggctcttgtagagaagacttaggatacctctctcactttctgtttcttgccgtccaccccgggccatgccagtgtgtccctctgggtccctccaaaactctggtcagttcaaggatgcccctcccaggctatgcttttctataactttt

SEQ ID NO: 79020 - DNA, 361 bp, Artificial Sequence
  derived and/or modified sequence
ggacagcttggcctacagcccggcgggcatcagctcccttgacccagtggatatcggtggccccgttattcgtccaggtgcccagggaggaggacccgcctgcagcatgaacctgtggctcctggcctgcctggtggccggcttcctgggagcctgggcccccgctgtccacacccaaggtgtctttgaggactgctgcctggcctaccactaccccattgggtgggctgtgctccggcgcgcctggacttaccggatccaggaggtgagcgggagctgcaatctgcctgctgcgatcaggccctcatgctgtaaagaagttgagttctggaaactccaagttatcatcgtccaagtttag

SEQ ID NO: 79021 - DNA, 450 bp, Artificial Sequence
  derived and/or modified sequence
atgaacctgtggctgctggcctgcctggtggccggcttcctgggcgcctgggcccccgccgtgcacacccagggcgtgttcgaggactgctgcctggcctaccactaccccatcggctgggccgtgctgagaagagcctggacctacagaatccaggaggtgagcggcagctgcaacctgcccgccgccatcttctacctgcccaagagacacagaaaggtgtgcggcaaccccaagagcagagaggtgcagagagccatgaagctgctggacgccagaaacaaggtgttcgccaagctgcaccacaacacccagaccttccagggcccccacgccgtgaagaagctgagcagcggcaacagcaagctgagcagcagcaagttcagcaaccccatcagcagcagcaagagaaacgtgagcctgctgatcagcgccaacagcggcctgtag

SEQ ID NO: 79022 - DNA, 255 bp, Artificial Sequence
  derived and/or modified sequence
atgaacctgtggctgctggcctgcctggtggccggcttcctgggcgcctgggcccccgccgtgcacacccagggcgtgttcgaggactgctgcctggcctaccactaccccatcggctgggccgtgctgagaagagcctggacctacagaatccaggaggtgagcggcagctgcaacctgcccgccgccatcagacccagctgctgcaaggaggtggagttctggaagctgcaggtgatcatcgtgcaggtgtag

SEQ ID NO: 79023 - protein, 97 aa, Artificial Sequence
  derived and/or modified sequence
MADVEDGEETCALASHSGSSGSKSGGDKMFSLKKWNAVAMWSWDVECDTCAICRVQVMVVWGECNHSFHNCCMSLWVKQNNRCPLCQQDWVVQRIGK

SEQ ID NO: 79024 - DNA, 294 bp, Artificial Sequence
  derived and/or modified sequence
atggctgacgtcgaggatggcgaggaaacctgtgccctggcgagccacagcgggagctcggggtcaaagagtgggggtgataagatgttttccctgaagaaatggaatgccgtagccatgtggtcgtgggacgtggaatgcgacacctgtgctatctgcagggtgcaggtcatggtggtctggggcgagtgtaatcatagctttcataactgttgcatgagcctctgggtcaaacagaacaatcgctgtcccctgtgtcaacaggactgggtggtccaacggatcggtaaatag

SEQ ID NO: 79025 - DNA, 294 bp, Artificial Sequence
  derived and/or modified sequence
atggctgatgtggaggatggagaggagacctgtgccctggccagccacagcggcagcagcggcagcaagagcggcggggacaagatgttcagcctgaagaagtggaatgctgtggccatgtggagctgggatgtggagtgtgacacctgtgccatctgccgggtgcaggtgatggtggtgtggggcgagtgcaaccacagcttccacaactgctgcatgagcctgtgggtgaagcagaacaaccgctgccccctgtgccagcaggactgggtggtgcagagaattggcaagtag

SEQ ID NO: 79026 - DNA, 294 bp, Artificial Sequence
  derived and/or modified sequence
atggccgacgtggaggacggcgaggagacctgcgccctggccagccattctggcagcagcgggtctaaatctggaggagacaagatgttctcccttaaaaagtggaacgccgtagccatgtggagctgggacgtggaatgtgatacatgtgcaatttgcagagtgcaggtgatggtggtttggggcgagtgcaaccactcctttcacaactgttgcatgagtctgtgggttaaacagaacaaccgctgcccactgtgtcagcaggattgggtggtccaacggattggcaagtag

SEQ ID NO: 79027 - DNA, 294 bp, Artificial Sequence
  derived and/or modified sequence
atggccgatgttgaagacggggaggaaacctgtgcgctggcctcccacagtgggagctcagggtctaaatctggtggcgataaaatgtttagtctgaaaaagtggaacgcagtggcaatgtggtcatgggacgtcgaatgcgatacgtgcgccatatgccgcgtgcaagtgatggtcgtctggggcgagtgtaatcactcctttcacaattgctgcatgagcctgtgggttaaacaaaacaaccgatgcccactctgtcaacaggactgggttgtgcagcgcatcgggaagtag

SEQ ID NO: 79028 - DNA, 782 bp, Artificial Sequence
  derived and/or modified sequence
agagccgccctagccttccgccttccccaagccaacgtctccgccgtcggctccgcggcgccgccatggccgacgtggaagacggagaggaaacctgcgccctggcctctcactccgggagctcaggctccaagtcgggaggcgacaagatgttctccctcaagaagtggaacgcggtggccatgtggagctgggacgtggagtgcgatacgtgcgccatctgcagggtccaggtgatggtggtctggggagaatgtaatcattccttccacaactgctgcatgtccctgtgggtgaaacagaacaatcgctgccctctctgccagcaggactgggtggtccaaagaatcggcaaatgagagtggttagaaggcttcttagcgcagttgttcagagccctggtggatcttgtaatccagtgccctacaaaggctagaacactacaggggatgaattcttcaaataggagccgatggatctgtggtcctttgggactcatcaaagccttggtttagcattttgtcagttttatcttcagaaattctctgcgattaagaagataatttattaaaggtggtccttcctacctctgtggtgtgtgtcgcgcacacagcttagaagtgctataaaaaaggaaagagctccaaattgaatcacctttataatttacccatttctatacaacaggcagtggaagcagtttcagagaactttttgcatgcttatggttgatcagttaaaaaagaatgttacagtaacaaataaagtgcagtttaaaaccc

SEQ ID NO: 79029 - DNA, 294 bp, Artificial Sequence
  derived and/or modified sequence
atggccgacgtggaggacggcgaggagacctgcgccctggccagccacagcggcagcagcggcagcaagagcggcggcgacaagatgttcagcctgaagaagtggaacgccgtggccatgtggagctgggacgtggagtgcgacacctgcgccatctgcagagtgcaggtgatggtggtgtggggcgagtgcaaccacagcttccacaactgctgcatgagcctgtgggtgaagcagaacaacagatgccccctgtgccagcaggactgggtggtgcagagaatcggcaagtag

SEQ ID NO: 79030 - protein, 434 aa, Artificial Sequence
  derived and/or modified sequence
MEAGAGAGAGAAGWSCPGPGPTVTTLGSYEASEGCERKKGQRWGSLERRGMQAMEGEVLLPALYEEEEEEEEEEEEVEEEEEQVQKGGSVGSLSVNKHRGLSLTETELEELRAQVLQLVAELEETRELAGQHEDDSLELQGLLEDERLASAQQAEVFTKQIQQLQGELRSLREEISLLEHEKESELKEIEQELHLAQAEIQSLRQAAEDSATEHESDIASLQEDLCRMQNELEDMERIRGDYEMEIASLRAEMEMKSSEPSEELQELRERYHFLNEEYRALQESNSSLTGQLADLESERTQRATERWLQSQTLSMTSAESQTSEMDFLEPDPEMQLLRQQLRDAEEQMHGMKNKCQELCCELEELQHHRQVSEEEQRRLQRELKCAQNEVLRFQTSHSVTQSSPTPNPPIFSLPLVGLVVISALLWCWWAETSS

SEQ ID NO: 79031 - DNA, 1305 bp, Artificial Sequence
  derived and/or modified sequence
atggaggctggcgcaggagctggcgccggcgcggcgggatggtcttgccccggccccggccctactgttactacactgggctcctacgaggcctcagagggctgtgaaaggaagaagggacagcgttggggatcacttgaaagacgcggaatgcaggcaatggaaggcgaagtgctgctgcccgcactatatgaggaagaggaagaagaggaagaggaggaagaagaagtggaagaagaggaggaacaggtacagaaggggggctcagttggttccctctccgtgaacaaacaccgcggcctgtcactgaccgaaacagagcttgaggaactgagagcccaggtcctacagctggttgctgaattggaagaaacccgggagttagccgggcagcacgaggacgattccttggagctgcaggggttactggaagatgagagactggccagtgcccagcaggcggaggtgtttactaagcagattcagcagcttcagggcgaactgcgcagcctgcgcgaggagatctctctactagagcatgaaaaagaaagtgaactcaaagagatagaacaagagctccacctggcacaagctgaaatccagtccctccgccaggccgccgaggacagtgcaacagaacacgaatctgacattgcttctctgcaagaggatttatgccgtatgcagaatgagctagaagacatggaaagaatcagaggtgactatgagatggagattgcctcacttagggctgagatggaaatgaaatcatctgaaccatcagaagagttgcaggagctgcgggaaagataccattttcttaatgaggagtaccgtgccctgcaggagtctaattcttcgctgaccggacaactggcggatcttgagtctgaacggacacagagagccaccgagagatggctacagtcgcagacgttaagcatgacctctgcagagagtcagacgagcgaaatggattttctggaacctgatcctgagatgcagctgctgaggcagcaactgagagatgctgaagagcagatgcacggaatgaaaaataagtgtcaagagctgtgttgcgaattggaagaactccaacaccatcggcaggtgtctgaggaggaacaacgtcgcctgcagcgtgagctgaagtgtgcccaaaacgaggtcctgagatttcagacttcacacagtgtgacccagtcctctcccacgcccaatcctccaatcttctcactgcctttagttgggttggtggtgatcagcgcgctcctgtggtgctggtgggccgaaaccagcagctag

SEQ ID NO: 79032 - DNA, 309 bp, Artificial Sequence
  derived and/or modified sequence
atgcaggccatggagggcgaggtcttgttgcctgctctatacgaagaggaagaggaggaggaagaggaagaggaggaggtagaagaagaagaggagcaggtgcaaaaagggggctcagtaggctcattgtcagtgaataaacataggggtctttcattgacagaaactgaattggaggaactacgtgcccaggtactgcagctggtggccgagcttgaagagacaagagagctcgctggacagcacgaggacgacagcctcgaactgcagggtctgctggaagatgaacgcttggcttccgcccagtag

SEQ ID NO: 79033 - DNA, 414 bp, Artificial Sequence
  derived and/or modified sequence
atgcaggccatggagggggaggttctgctgcccgcactttacgaggaggaagaagaggaggaggaagaggaggaagaagtggaggaagaagaagagcaggtccaaaagggaggatctgtgggcagtttgtcagtgaataagcatcgagggctatccctgaccgagacagaattggaggaactccgggcccaagtgttgcagttggtcgctgagctggaagagactagggagctggctgggcaacacgaggacgatagcctggaactgcaagggcttctggaggacgaacggctggcgagcgcccagcaagcagaagtgttcacaaagcagattcagcaactacaaggcgagctcagaagtttacgagaagagataagcctcttggagcatgagaaagagtcagaactcaaatag

SEQ ID NO: 79034 - DNA, 192 bp, Artificial Sequence
  derived and/or modified sequence
atgcaggctatggaaggcgaggtactgctgccggccctgtacgaggaggaggaggaggaagaagaggaagaagaggaggtggaagaggaagaggagcaggttcagaaaggcgggtctgtcggttctctttccgtgaacaagcataggggactcagcctaactgaaactgagcttgaggaattacgggcttag

SEQ ID NO: 79035 - DNA, 1305 bp, Artificial Sequence
  derived and/or modified sequence
atggaggccggggccggggccggggccggggccgccggctggagctgccccggccctggccccaccgtgaccaccctgggcagctatgaggccagcgagggctgtgagaggaagaagggccagcgctggggcagcctggagcggcggggcatgcaggccatggagggggaggtgctgctgcctgccctgtatgaggaggaggaggaggaggaggaggaggaggaggaggtggaggaggaggaggagcaggtgcagaagggcggctctgtgggcagcctgtctgtgaacaagcaccggggcctgagcctgacagaaacagagctggaggagctgcgggcccaggtgctgcagctggtggccgagctggaggagacccgggagctggccggccagcatgaagatgacagcctggagctgcagggcctgctggaggatgagcggctggccagcgcccagcaggccgaggtgttcaccaagcagatccagcagctgcagggcgagctgcggagcctgcgggaggagatcagcctgctggagcacgagaaggagagcgagctgaaggagattgagcaggagctgcacctggcccaggccgagatccagagcctgcggcaggccgctgaggacagcgccacagagcacgagagtgacatcgccagcctgcaggaggacctgtgcaggatgcagaatgagctggaggacatggagcgcatccggggggactatgagatggagatcgccagcctgcgggcagagatggagatgaagagcagcgagcccagcgaggagctgcaggagctgcgggagcgctaccacttcctgaatgaggagtaccgggccctgcaggagagcaacagcagcctgaccggccagctggccgacctggagagcgagaggacccagagggccacagagcgctggctgcagagccagaccctgtccatgaccagcgctgagagccagaccagcgagatggacttcctggagccagaccctgagatgcagctgctgcggcagcagctgagagatgctgaggagcagatgcacggcatgaagaacaagtgccaggagctgtgctgtgagctggaggagctgcagcaccaccggcaggtgtctgaggaggagcagaggcggctgcagcgggagctgaagtgtgcccagaatgaggtgctgcgcttccagaccagccacagcgtgacccagagcagccccacccccaacccccccatcttcagcctgcccctggtgggcctggtggtgatcagcgccctgctgtggtgctggtgggccgagaccagcagctag

SEQ ID NO: 79036 - DNA, 309 bp, Artificial Sequence
  derived and/or modified sequence
atgcaggccatggagggggaggtgctgctgcctgccctgtatgaggaggaggaggaggaggaggaggaggaggaggaggtggaggaggaggaggagcaggtgcagaagggcggctctgtgggcagcctgtctgtgaacaagcaccggggcctgagcctgacagaaacagagctggaggagctgcgggcccaggtgctgcagctggtggccgagctggaggagacccgggagctggccggccagcatgaagatgacagcctggagctgcagggcctgctggaggatgagcggctggccagcgcccagtag

SEQ ID NO: 79037 - DNA, 414 bp, Artificial Sequence
  derived and/or modified sequence
atgcaggccatggagggggaggtgctgctgcctgccctgtatgaggaggaggaggaggaggaggaggaggaggaggaggtggaggaggaggaggagcaggtgcagaagggcggctctgtgggcagcctgtctgtgaacaagcaccggggcctgagcctgacagaaacagagctggaggagctgcgggcccaggtgctgcagctggtggccgagctggaggagacccgggagctggccggccagcatgaagatgacagcctggagctgcagggcctgctggaggatgagcggctggccagcgcccagcaggccgaggtgttcaccaagcagatccagcagctgcagggcgagctgcggagcctgcgggaggagatcagcctgctggagcacgagaaggagagcgagctgaagtag

SEQ ID NO: 79038 - DNA, 192 bp, Artificial Sequence
  derived and/or modified sequence
atgcaggccatggagggggaggtgctgctgcctgccctgtatgaggaggaggaggaggaggaggaggaggaggaggaggtggaggaggaggaggagcaggtgcagaagggcggctctgtgggcagcctgtctgtgaacaagcaccggggcctgagcctgacagaaacagagctggaggagctgcgggcctag

SEQ ID NO: 79039 - DNA, 1305 bp, Artificial Sequence
  derived and/or modified sequence
atggaggccggcgccggcgccggcgccggcgccgccggctggagctgtcccggccctggccccactgtcactacactggggagttatgaagcatcagaagggtgcgagaggaagaaagggcagcgttggggttccttggagcgcaggggtatgcaggccatggagggcgaggtactgctccccgctctatacgaggaagaggaagaggaggaggaagaggaagaggaggtcgaagaggaagaggagcaagtccaaaagggcggctccgtcggctcactctcagtgaataagcaccggggattgtcactgacagaaaccgaactagaagagcttagagcccaggtcctgcagcttgtggctgaactggaggaaactcgagaactcgccgggcaacatgaggacgactctctggagttacagggcctcctcgaggatgagcgccttgctagtgcacaacaggcagaggtgttcacaaagcagatccagcagctccagggcgagctccgcagtctgagagaggagattagtctgctggaacacgagaaggaaagcgaactcaaagagattgagcaggaattgcacctggcgcaggcggaaatacagagcttgcgacaagcagcagaggacagcgccacagagcatgagtccgatattgccagcttgcaagaagatctgtgccggatgcagaatgaactggaggatatggagcgcatccgaggagactacgaaatggaaatcgcttcactgcgagccgagatggagatgaaatcgtctgagccatctgaggagctacaagaattacgggaacgataccatttcctcaacgaggagtacagggcacttcaagaatctaactcatctctcacaggtcaactggccgatctggagtccgaaaggacacaacgcgccacagagaggtggttgcagtcacagacactctccatgacctcagctgagagtcagacctccgagatggattttttggaacctgatcctgaaatgcagctactacggcagcaacttcgggatgcagaggagcaaatgcacggtatgaagaataagtgccaggaactctgttgcgaactggaagagctgcagcaccatagacaggtctcggaggaagagcaacggcgcctacagagagaactcaagtgcgcccaaaacgaggtgctgcgctttcagactagccactctgtgacccaatcatcgcctacacctaatccccccatcttttccctcccactggtgggcctggtggtcatcagtgctcttctctggtgttggtgggcagagacctccagctag

SEQ ID NO: 79040 - DNA, 309 bp, Artificial Sequence
  derived and/or modified sequence
atgcaggccatggagggcgaggtgctgctgcccgccctgtacgaggaagaagaagaggaagaagaagaggaagaagaggttgaggaggaagaagagcaggtccagaaaggaggatccgttggctcattatccgtcaataaacaccgagggttgtcactgaccgagacagaactggaagagcttagggctcaagtcctccaactggttgctgaactggaagagacccgcgagttagcaggccagcacgaggacgattccttggaactccagggtctgctggaagatgagcgtttggcttccgcccagtag

SEQ ID NO: 79041 - DNA, 414 bp, Artificial Sequence
  derived and/or modified sequence
atgcaggccatggagggcgaggtgctgctgcccgccctgtacgaggaagaggaagaggaagaggaggaagaggaggaagttgaagaggaggaagagcaggtccagaagggtgggagcgtgggctccctgtcggtgaataaacaccgcggactcagcctgacagagaccgagctggaggaactccgggctcaggttctacaactggttgcggaactggaagagacaagggagctggctggccagcatgaagatgactcgcttgagctgcaggggctcttggaagatgaaagactggcaagcgcccagcaggccgaggtgttcacaaaacagattcagcaactgcagggcgagttgcgaagcctgcgggaagagatcagcctgctcgagcacgagaaggagagcgaactgaagtag

SEQ ID NO: 79042 - DNA, 192 bp, Artificial Sequence
  derived and/or modified sequence
atgcaggccatggagggcgaggtgctgctgcccgccctgtacgaggaagaagaagaagaggaggaagaggaagaggaggtcgaagaagaggaggaacaggtgcaaaagggaggctctgtgggatccctgagcgtcaataaacatcggggactatccctaaccgagacagagctcgaggaactccgagcctag

SEQ ID NO: 79043 - DNA, 1305 bp, Artificial Sequence
  derived and/or modified sequence
atggaggccggagcaggcgcaggggcaggcgcagccggttggtcatgcccagggcctgggccaaccgtgaccacactcggatcctacgaggccagcgagggctgtgaacgcaagaaagggcagaggtggggctccctcgagagacgcggaatgcaggcgatggaaggtgaggtcctgctccccgcactgtatgaagaggaggaggaagaagaggaagaagaagaagaggtcgaagaggaggaggagcaggtacagaagggaggatccgtgggctccctatccgtgaacaagcaccgtgggctgtccctaactgaaactgagctggaggaattgagagcccaggtgctacagctcgtggcagagcttgaagaaaccagagagcttgctggacagcatgaagacgacagcctggagctgcaggggctcctcgaagacgagcgcttagccagcgcacagcaggctgaagtgtttacaaagcagattcagcagctgcagggcgagctcaggagtctcagagaggagatctctttgttggaacacgaaaaggaatctgagctgaaagaaatcgagcaagaactgcacttggcacaggccgaaatacagagtctgagacaggccgcagaagattctgccactgaacacgaaagtgatatcgcctcactccaggaggacctgtgccgcatgcagaacgagctggaagacatggaaagaattcggggagattacgagatggaaatcgcatccttgcgggctgagatggagatgaagagctctgagccctcggaggaacttcaggaattgagagaacgttatcacttccttaatgaagaataccgagccctgcaggaatccaattccagtctcaccggacagctggcggacttggagagtgaaagaacacagagggccaccgagagatggttgcaatcgcaaacattatccatgacaagcgccgagagtcagacatcggagatggacttcctggaacccgatcccgaaatgcagctcctgcggcagcagctgagagacgctgaagaacaaatgcatggaatgaaaaacaagtgtcaggaattatgttgcgaactcgaggaactgcaacatcacagacaggtatctgaagaggaacagcgcaggctgcagcgggaactgaaatgcgcccagaatgaggttctcaggttccagacctcacacagtgtaacacagagcagccccactcccaacccaccaatctttagcctacccctagtgggcctggtggtaatctccgcactgctctggtgttggtgggccgagacatcctcatag

SEQ ID NO: 79044 - DNA, 309 bp, Artificial Sequence
  derived and/or modified sequence
atgcaagctatggagggcgaggttctgctcccggcactgtatgaggaggaggaggaggaggaagaagaggaggaagaagtggaagaagaagaggagcaagtccagaaagggggttccgtcgggtcactctctgttaataagcatcgaggattgtcactgactgagaccgaattggaagagttaagggcccaggtgttgcaattggttgctgagctggaggagacaagagaactggcaggtcaacacgaggacgactcactggaactccagggtctgctcgaggatgagagactagcctctgctcagtag

SEQ ID NO: 79045 - DNA, 414 bp, Artificial Sequence
  derived and/or modified sequence
atgcaggcaatggagggtgaagtcctgttacccgctctatacgaagaagaggaggaagaagaagaggaggaggaagaggtcgaggaagaagaagaacaggtgcagaaggggggtagcgtggggtccctatccgtgaacaaacatagaggattgagcctgaccgagacggagctggaggagctccgtgcccaggtccttcagttagtggccgagctggaagaaacccgggaactggctggacaacatgaggacgacagtttagaactacaaggcttacttgaggatgagcggctggccagtgcccagcaagctgaggtgtttactaaacagattcagcagctgcagggagagctgcgctctctacgggaggaaatttcactcctggaacatgaaaaggagagcgaattgaaatag

SEQ ID NO: 79046 - DNA, 192 bp, Artificial Sequence
  derived and/or modified sequence
atgcaggccatggaaggggaagtgttgctgccagcgctgtacgaagaagaggaggaggaagaagaggaggaagaggaggtggaagaagaggaagagcaggtccaaaagggagggagcgtcggatctcttagcgtcaataagcaccggggactgtcacttacggagacggaactggaggagctgagggcctag

SEQ ID NO: 79047 - DNA, 1689 bp, Artificial Sequence
  derived and/or modified sequence
gcggctgcggcttctgctcagggaggcggaaggcggcggcgggagcggtcatggaggcgggcgccggagccggcgcgggagccgcgggctggagctgcccgggcccaggacccacagtgaccactctaggctcctatgaggcttccgagggctgtgagaggaagaagggccaacgctgggggtccctggaacgacgggggatgcaagctatggagggggaggtgttactcccagctctctatgaggaggaagaggaagaggaagaggaggaagaagaggtggaagaagaagaagaacaagtgcagaaaggtggcagtgttggctctctgtcagtcaacaagcaccggggactgagcctcacggagacagagctggaggagctgcgggctcaggtgctgcagctggtggcagaactggaggagacccgggaactggcagggcagcatgaggatgactccttggagctacaggggctcctggaggatgaacggctagccagcgcccagcaggcagaggtgttcaccaagcagatccagcagctccaaggtgagctgcgttctctacgggaggagatttccctgttagagcatgagaaagaaagcgaacttaaggaaatagaacaggaattgcatttggcccaggctgagatccagagtctgcggcaagcagcagaggattccgcaactgaacatgagagtgacatagcatccctgcaggaggatctctgccggatgcagaatgaacttgaagacatggaacgcattcggggagattatgagatggagatcgcctccctccgtgcagaaatggaaatgaagagctctgaaccatccgaagaactgcaggagctgcgggaacgctaccatttcctgaatgaggaataccgggccctgcaggagagcaacagcagcctcacggggcagcttgcagatctggagagtgagaggacacagagagcaacagagagatggctgcagtcccaaacactgagtatgacgtcagcagagtctcagacttcagaaatggatttcttagagcctgatcctgaaatgcagttgttacggcagcagctacgggatgctgaagagcagatgcatggcatgaagaacaagtgtcaggaattgtgttgtgagttggaagagctacagcatcatcgccaggtcagtgaggaggagcagaggcggctgcagagggagctcaagtgtgctcagaatgaggtgcttcggtttcagacctcccacagtgtcacccagtcatcccctacccccaatccccccatcttctccttgcctcttgtaggcctggtggtcatctcggctttgctctggtgctggtgggctgagacgtcgtcctaatgcagaacatgtttgggttgtggaagcctatggtattcttggctattgcagctgtggctctgtatgtgttacccaacatgcgacagcaggagtcagagttctgcctcatggagtgatggcagaccttggccagcgcgagggcagatccccagtggccaccaccctcagctttgggcaggacacactgtgccagaaccctccccatatgttccatgtgtccccatctcctcagcctcagtcacccaggctgaaaaggcttgtggggagcggctgacttccatctcctgccttgtgtaagaacctgagttccttgtaattaaatatcaactgaatt

SEQ ID NO: 79048 - DNA, 624 bp, Artificial Sequence
  derived and/or modified sequence
cctccctgcgcacccggctcgggtccccgggctcgcggctgcggcttctgctcagggaggcggaaggcggcggcgggagcggtcatggaggcgggcgccggagccggcgcgggagccgcgggctggagctgcccgggcccagagggtcctggaacagcgggttctgaggaggctgggaggcagggctgagaggtggccgagagagaggagtcgcagagccgccagagacccacagtgaccactctaggctcctatgaggcttccgagggctgtgagaggaagaagggccaacgctgggggtccctggaacgacgggggatgcaagctatggagggggaggtgttactcccagctctctatgaggaggaagaggaagaggaagaggaggaagaagaggtggaagaagaagaagaacaagtgcagaaaggtggcagtgttggctctctgtcagtcaacaagcaccggggactgagcctcacggagacagagctggaggagctgcgggctcaggtgctgcagctggtggcagaactggaggagacccgggaactggcagggcagcatgaggatgactccttggagctacaggggctcctggaggatgaacggctagccagcgcccag

SEQ ID NO: 79049 - DNA, 253 bp, Artificial Sequence
  derived and/or modified sequence
tgctcagggaggcggaaggcggcggcgggagcggtcatggaggcgggcgccggagccggcgcgggagccgcgggctggagctgcccgggcccagcccgcagccagccccccaccccccagcccctcctttctccctgctctcaggacccacagtgaccactctaggctcctatgaggcttccgagggctgtgagaggaagaagggccaacgctgggggtccctggaacgacgggggatgcaagctatggaggg

SEQ ID NO: 79050 - DNA, 723 bp, Artificial Sequence
  derived and/or modified sequence
gggggtcttccggccctgaggcttgatggggccaccggagggctcctcctaagagggtccttggccctggctcggtggggggtcgcggaaagcggagaggtcagggccctgccgttcgcccatccgggcctcgacttccctcctccggcccccaggctgccgaggggccaccgggcaggggtgggcagggcctggggccggagtcagcgcggactgctaggacccacagtgaccactctaggctcctatgaggcttccgagggctgtgagaggaagaagggccaacgctgggggtccctggaacgacgggggatgcaagctatggagggggaggtgttactcccagctctctatgaggaggaagaggaagaggaagaggaggaagaagaggtggaagaagaagaagaacaagtgcagaaaggtggcagtgttggctctctgtcagtcaacaagcaccggggactgagcctcacggagacagagctggaggagctgcgggctcaggtgctgcagctggtggcagaactggaggagacccgggaactggcagggcagcatgaggatgactccttggagctacaggggctcctggaggatgaacggctagccagcgcccagcaggcagaggtgttcaccaagcagatccagcagctccaaggtgagctgcgttctctacgggaggagatttccctgttagagcatgagaaagaaagcgaacttaag

SEQ ID NO: 79051 - DNA, 552 bp, Artificial Sequence
  derived and/or modified sequence
agacccccaggtgctcccggcctccgcggctcccctttctccgcccaaagtcttcctccctccatcctggcctccaccggggcccggtctccatccttccggcctgggactgaggcttccgcgcaccggccgcatcctgcctggtggtccctccccagcgcgtctctccacttcagtccgacggtgcttccagccttcgggactgcagaccctacacctcctgcagccccggagactcctgagcgcggggcgagggtggggtgggcaaggacccacagtgaccactctaggctcctatgaggcttccgagggctgtgagaggaagaagggccaacgctgggggtccctggaacgacgggggatgcaagctatggagggggaggtgttactcccagctctctatgaggaggaagaggaagaggaagaggaggaagaagaggtggaagaagaagaagaacaagtgcagaaaggtggcagtgttggctctctgtcagtcaacaagcaccggggactgagcctcacggagacagagctggaggagctgcgggctca

SEQ ID NO: 79052 - DNA, 1305 bp, Artificial Sequence
  derived and/or modified sequence
atggaggccggcgccggcgccggcgccggcgccgccggctggagctgccccggccccggccccaccgtgaccaccctgggcagctacgaggccagcgagggctgcgagagaaagaagggccagagatggggcagcctggagagaagaggcatgcaggccatggagggcgaggtgctgctgcccgccctgtacgaggaggaggaggaggaggaggaggaggaggaggaggtggaggaggaggaggagcaggtgcagaagggcggcagcgtgggcagcctgagcgtgaacaagcacagaggcctgagcctgaccgagaccgagctggaggagctgagagcccaggtgctgcagctggtggccgagctggaggagaccagagagctggccggccagcacgaggacgacagcctggagctgcagggcctgctggaggacgagagactggccagcgcccagcaggccgaggtgttcaccaagcagatccagcagctgcagggcgagctgagaagcctgagagaggagatcagcctgctggagcacgagaaggagagcgagctgaaggagatcgagcaggagctgcacctggcccaggccgagatccagagcctgagacaggccgccgaggacagcgccaccgagcacgagagcgacatcgccagcctgcaggaggacctgtgcagaatgcagaacgagctggaggacatggagagaatcagaggcgactacgagatggagatcgccagcctgagagccgagatggagatgaagagcagcgagcccagcgaggagctgcaggagctgagagagagataccacttcctgaacgaggagtacagagccctgcaggagagcaacagcagcctgaccggccagctggccgacctggagagcgagagaacccagagagccaccgagagatggctgcagagccagaccctgagcatgaccagcgccgagagccagaccagcgagatggacttcctggagcccgaccccgagatgcagctgctgagacagcagctgagagacgccgaggagcagatgcacggcatgaagaacaagtgccaggagctgtgctgcgagctggaggagctgcagcaccacagacaggtgagcgaggaggagcagagaagactgcagagagagctgaagtgcgcccagaacgaggtgctgagattccagaccagccacagcgtgacccagagcagccccacccccaacccccccatcttcagcctgcccctggtgggcctggtggtgatcagcgccctgctgtggtgctggtgggccgagaccagcagctag

SEQ ID NO: 79053 - DNA, 309 bp, Artificial Sequence
  derived and/or modified sequence
atgcaggccatggagggcgaggtgctgctgcccgccctgtacgaggaggaggaggaggaggaggaggaggaggaggaggtggaggaggaggaggagcaggtgcagaagggcggcagcgtgggcagcctgagcgtgaacaagcacagaggcctgagcctgaccgagaccgagctggaggagctgagagcccaggtgctgcagctggtggccgagctggaggagaccagagagctggccggccagcacgaggacgacagcctggagctgcagggcctgctggaggacgagagactggccagcgcccagtag

SEQ ID NO: 79054 - DNA, 414 bp, Artificial Sequence
  derived and/or modified sequence
atgcaggccatggagggcgaggtgctgctgcccgccctgtacgaggaggaggaggaggaggaggaggaggaggaggaggtggaggaggaggaggagcaggtgcagaagggcggcagcgtgggcagcctgagcgtgaacaagcacagaggcctgagcctgaccgagaccgagctggaggagctgagagcccaggtgctgcagctggtggccgagctggaggagaccagagagctggccggccagcacgaggacgacagcctggagctgcagggcctgctggaggacgagagactggccagcgcccagcaggccgaggtgttcaccaagcagatccagcagctgcagggcgagctgagaagcctgagagaggagatcagcctgctggagcacgagaaggagagcgagctgaagtag

SEQ ID NO: 79055 - DNA, 192 bp, Artificial Sequence
  derived and/or modified sequence
atgcaggccatggagggcgaggtgctgctgcccgccctgtacgaggaggaggaggaggaggaggaggaggaggaggaggtggaggaggaggaggagcaggtgcagaagggcggcagcgtgggcagcctgagcgtgaacaagcacagaggcctgagcctgaccgagaccgagctggaggagctgagagcctag

SEQ ID NO: 79056 - protein, 532 aa, Artificial Sequence
  derived and/or modified sequence
MNKSTCLMAAETPSKRWRLHCLAFSQRFVRAGPACSSREACSSPRAGWNPAGFRLPGRWSPFVALHLVCQIREALKLRSGHRTPSGAGSSMQPPPSLCGRALVALVLACGLSRIWGEERGFPPDRATPLLQTAEIMTPPTKTLWPKGSNASLARSLAPAEVPKGDRTAGSPPRTISPPPCQGPIEIKETFKYINTVVSCLVFVLGIIGNSTLLRIIYKNKCMRNGPNILIASLALGDLLHIVIDIPINVYKLLAEDWPFGAEMCKLVPFIQKASVGITVLSLCALSIDRYRAVASWSRIKGIGVPKWTAVEIVLIWVVSVVLAVPEAIGFDIITMDYKGSYLRICLLHPVQKTAFMQFYKTAKDWWLFSFYFCLPLAITAFFYTLMTCEMLRKKSGMQIALNDHLKQRREVAKTVFCLVLVFALCWLPLHLSRILKLTLYNQNDPNRCELLSFLLVLDYIGINMASLNSCINPIALYLVSKRFKNCFKSCLCCWCQSFEEKQSLEEKQSCLKFKANDHGYDNFRSSNKYSSS

SEQ ID NO: 79057 - DNA, 1329 bp, Artificial Sequence
  derived and/or modified sequence
atgcagcccccccccagcctgtgcggcagagccctggtggccctggtgctggcctgcggcctgagcagaatctggggcgaggagagaggcttcccccccgacagagccacccccctgctgcagaccgccgagatcatgaccccccccaccaagaccctgtggcccaagggcagcaacgccagcctggccagaagcctggcccccgccgaggtgcccaagggcgacagaaccgccggcagcccccccagaaccatcagcccccccccctgccagggccccatcgagatcaaggagaccttcaagtacatcaacaccgtggtgagctgcctggtgttcgtgctgggcatcatcggcaacagcaccctgctgagaatcatctacaagaacaagtgcatgagaaacggccccaacatcctgatcgccagcctggccctgggcgacctgctgcacatcgtgatcgacatccccatcaacgtgtacaagctgctggccgaggactggcccttcggcgccgagatgtgcaagctggtgcccttcatccagaaggccagcgtgggcatcaccgtgctgagcctgtgcgccctgagcatcgacagatacagagccgtggccagctggagcagaatcaagggcatcggcgtgcccaagtggaccgccgtggagatcgtgctgatctgggtggtgagcgtggtgctggccgtgcccgaggccatcggcttcgacatcatcaccatggactacaagggcagctacctgagaatctgcctgctgcaccccgtgcagaagaccgccttcatgcagttctacaagaccgccaaggactggtggctgttcagcttctacttctgcctgcccctggccatcaccgccttcttctacaccctgatgacctgcgagatgctgagaaagaagagcggcatgcagatcgccctgaacgaccacctgaagcagagaagagaggtggccaagaccgtgttctgcctggtgctggtgttcgccctgtgctggctgcccctgcacctgagcagaatcctgaagctgaccctgtacaaccagaacgaccccaacagatgcgagctgctgagcttcctgctggtgctggactacatcggcatcaacatggccagcctgaacagctgcatcaaccccatcgccctgtacctggtgagcaagagattcaagaactgcttcaagagctgcctgtgctgctggtgccagagcttcgaggagaagcagagcctggaggagaagcagagctgcctgaagttcaaggccaacgaccacggctacgacaacttcagaagcagcaacaagtacagcagcagctag

SEQ ID NO: 79058 - DNA, 1599 bp, Artificial Sequence
  derived and/or modified sequence
atgaacaagagcacctgcctgatggccgccgagacccccagcaagagatggagactgcactgcctggccttcagccagagattcgtgagagccggccccgcctgcagcagcagagaggcctgcagcagccccagagccggctggaaccccgccggcttcagactgcccggcagatggagccccttcgtggccctgcacctggtgtgccagatcagagaggccctgaagctgagaagcggccacagaacccccagcggcgccggcagcagcatgcagcccccccccagcctgtgcggcagagccctggtggccctggtgctggcctgcggcctgagcagaatctggggcgaggagagaggcttcccccccgacagagccacccccctgctgcagaccgccgagatcatgaccccccccaccaagaccctgtggcccaagggcagcaacgccagcctggccagaagcctggcccccgccgaggtgcccaagggcgacagaaccgccggcagcccccccagaaccatcagcccccccccctgccagggccccatcgagatcaaggagaccttcaagtacatcaacaccgtggtgagctgcctggtgttcgtgctgggcatcatcggcaacagcaccctgctgagaatcatctacaagaacaagtgcatgagaaacggccccaacatcctgatcgccagcctggccctgggcgacctgctgcacatcgtgatcgacatccccatcaacgtgtacaagctgctggccgaggactggcccttcggcgccgagatgtgcaagctggtgcccttcatccagaaggccagcgtgggcatcaccgtgctgagcctgtgcgccctgagcatcgacagatacagagccgtggccagctggagcagaatcaagggcatcggcgtgcccaagtggaccgccgtggagatcgtgctgatctgggtggtgagcgtggtgctggccgtgcccgaggccatcggcttcgacatcatcaccatggactacaagggcagctacctgagaatctgcctgctgcaccccgtgcagaagaccgccttcatgcagttctacaagaccgccaaggactggtggctgttcagcttctacttctgcctgcccctggccatcaccgccttcttctacaccctgatgacctgcgagatgctgagaaagaagagcggcatgcagatcgccctgaacgaccacctgaagcagagaagagaggtggccaagaccgtgttctgcctggtgctggtgttcgccctgtgctggctgcccctgcacctgagcagaatcctgaagctgaccctgtacaaccagaacgaccccaacagatgcgagctgctgagcttcctgctggtgctggactacatcggcatcaacatggccagcctgaacagctgcatcaaccccatcgccctgtacctggtgagcaagagattcaagaactgcttcaagagctgcctgtgctgctggtgccagagcttcgaggagaagcagagcctggaggagaagcagagctgcctgaagttcaaggccaacgaccacggctacgacaacttcagaagcagcaacaagtacagcagcagctag

SEQ ID NO: 79059 - DNA, 4277 bp, Artificial Sequence
  derived and/or modified sequence
atcaggaaggagtttcgacccgcgctggcgagtcatgagcgccaagtttcccactggcgcgcaaacttgagttacttttgagcgtggatactggcgaagaggctgcgggcggtattagcgtttgcagcgacttggctcgggcagctgacccaagtgtcctgtcttccttcctctgcttgtctctaggctctgaaactgcggagcggccaccggacgccttctggagcaggtagcagcatgcagccgcctccaagtctgtgcggacgcgccctggttgcgctggttcttgcctgcggcctgtcgcggatctggggagaggagagaggcttcccgcctgacagggccactccgcttttgcaaaccgcagagataatgacgccacccactaagaccttatggcccaagggttccaacgccagtctggcgcggtcgttggcacctgcggaggtgcctaaaggagacaggacggcaggatctccgccacgcaccatctcccctcccccgtgccaaggacccatcgagatcaaggagactttcaaatacatcaacacggttgtgtcctgccttgtgttcgtgctggggatcatcgggaactccacacttctgagaattatctacaagaacaagtgcatgcgaaacggtcccaatatcttgatcgccagcttggctctgggagacctgctgcacatcgtcattgacatccctatcaatgtctacaagctgctggcagaggactggccatttggagctgagatgtgtaagctggtgcctttcatacagaaagcctctgtgggaatcactgtgctgagtctatgtgctctgagtattgacagatatcgagctgttgcttcttggagtagaattaaaggaattggggttccaaaatggacagcagtagaaattgttttgatttgggtggtctctgtggttctggctgtccctgaagccataggttttgatataattacgatggactacaaaggaagttatctgcgaatctgcttgcttcatcccgttcagaagacagctttcatgcagttttacaagacagcaaaagattggtggctattcagtttctatttctgcttgccattggccatcactgcatttttttatacactaatgacctgtgaaatgttgagaaagaaaagtggcatgcagattgctttaaatgatcacctaaagcagagacgggaagtggccaaaaccgtcttttgcctggtccttgtctttgccctctgctggcttccccttcacctcagcaggattctgaagctcactctttataatcagaatgatcccaatagatgtgaacttttgagctttctgttggtattggactatattggtatcaacatggcttcactgaattcctgcattaacccaattgctctgtatttggtgagcaaaagattcaaaaactgctttaagtcatgcttatgctgctggtgccagtcatttgaagaaaaacagtccttggaggaaaagcagtcgtgcttaaagttcaaagctaatgatcacggatatgacaacttccgttccagtaataaatacagctcatcttgaaagaagaactattcactgtatttcattttctttatattggaccgaagtcattaaaacaaaatgaaacatttgccaaaacaaaacaaaaaactatgtatttgcacagcacactattaaaatattaagtgtaattattttaacactcacagctacatatgacattttatgagctgtttacggcatggaaagaaaatcagtgggaattaagaaagcctcgtcgtgaaagcacttaattttttacagttagcacttcaacatagctcttaacaacttccaggatattcacacaacacttaggcttaaaaatgagctcactcagaatttctattctttctaaaaagagatttatttttaaatcaatgggactctgatataaaggaagaataagtcactgtaaaacagaacttttaaatgaagcttaaattactcaatttaaaattttaaaatcctttaaaacaacttttcaattaatattatcacactattatcagattgtaattagatgcaaatgagagagcagtttagttgttgcatttttcggacactggaaacatttaaatgatcaggagggagtaacagaaagagcaaggctgtttttgaaaatcattacactttcactagaagcccaaacctcagcattctgcaatatgtaaccaacatgtcacaaacaagcagcatgtaacagactggcacatgtgccagctgaatttaaaatataatacttttaaaaagaaaattattacatcctttacattcagttaagatcaaacctcacaaagagaaatagaatgtttgaaaggctatcccaaaagacttttttgaatctgtcattcacataccctgtgaagacaatactatctacaattttttcaggattattaaaatcttcttctttcactatcgtagcttaaactctgtttggttttgtcatctgtaaatacttacctacatacactgcatgtagatgattaaatgagggcaggccctgtgctcatagctttacgatggagagatgccagtgacctcataataaagactgtgaactgcctggtgcagtgtccacatgacaaaggggcaggtagcaccctctctcacccatgctgtggttaaaatggtttctagcatatgtataatgctatagttaaaatactatttttcaaaatcatacagattagtacatttaacagctacctgtaaagcttattactaatttttgtattatttttgtaaatagccaatagaaaagtttgcttgacatggtgcttttctttcatctagaggcaaaactgctttttgagaccgtaagaacctcttagctttgtgcgttcctgcctaatttttatatcttctaagcaaagtgccttaggatagcttgggatgagatgtgtgtgaaagtatgtacaagagaaaacggaagagagaggaaatgaggtggggttggaggaaacccatggggacagattcccattcttagcctaacgttcgtcattgcctcgtcacatcaatgcaaaaggtcctgattttgttccagcaaaacacagtgcaatgttctcagagtgactttcgaaataaattgggcccaagagctttaactcggtcttaaaatatgcccaaatttttactttgtttttcttttaataggctgggccacatgttggaaataagctagtaatgttgttttctgtcaatattgaatgtgatggtacagtaaaccaaaacccaacaatgtggccagaaagaaagagcaataataattaattcacacaccatatggattctatttataaatcacccacaaacttgttctttaatttcatcccaatcactttttcagaggcctgttatcatagaagtcattttagactctcaattttaaattaattttgaatcactaatattttcacagtttattaatatatttaatttctatttaaattttagattatttttattaccatgtactgaatttttacatcctgataccttttccttctccatgtcagtatcatgttctctaattatcttgccaaattttgaaactacacacaaaaagcatacttgcattatttataataaaattgcattcagtggctttttaaaaaaatgtttgattcaaaactttaacatactgataagtaagaaacaattataatttctttacatactcaaaaccaagatagaaaaaggtgctatcgttcaacttcaaaacatgtttcctagtattaaggactttaatatagcaacagacaaaattattgttaacatggatgttacagctcaaaagatttataaaagattttaacctattttctcccttattatccactgctaatgtggatgtatgttcaaacaccttttagtattgatagcttacatatggccaaaggaatacagtttatagcaaaacatgggtatgctgtagctaactttataaaagtgtaatataacaatgtaaaaaattatatatctgggaggattttttggttgcctaaagtggctatagttactgattttttattatgtaagcaaaaccaataaaaatttaagtttttttaacaactaccttatttttcactgtacagacactaattcattaaatactaattgattgtttaaaagaaatataaatgtgacaagtggacattatttatgttaaatatacaattatcaagcaagtatgaagttattcaattaaaatgccacatttctgg

SEQ ID NO: 79060 - DNA, 4471 bp, Artificial Sequence
  derived and/or modified sequence
aaacagccttttgggacctgtccccggacgaggactgcccccctccctcgggcaactactactgatgctgtccaggcatcgcccaaggggaaaggttgcagcggggtcggaaggcgcgggaggagtctggcggtgattgatgggaagggatgaatgaataaaagtacttgtctgatggcagcagagaccccgagcaaacggtggaggctacactgtctggcattctcgcagcgtttcgtcagagccggacccgcctgcagctcaagggaggcgtgctcctctcccagagcaggctggaacccagctgggttccgcctcccgggaaggtggtctccattcgtcgctctgcatctggtttgtcagatccgagaggctctgaaactgcggagcggccaccggacgccttctggagcaggtagcagcatgcagccgcctccaagtctgtgcggacgcgccctggttgcgctggttcttgcctgcggcctgtcgcggatctggggagaggagagaggcttcccgcctgacagggccactccgcttttgcaaaccgcagagataatgacgccacccactaagaccttatggcccaagggttccaacgccagtctggcgcggtcgttggcacctgcggaggtgcctaaaggagacaggacggcaggatctccgccacgcaccatctcccctcccccgtgccaaggacccatcgagatcaaggagactttcaaatacatcaacacggttgtgtcctgccttgtgttcgtgctggggatcatcgggaactccacacttctgagaattatctacaagaacaagtgcatgcgaaacggtcccaatatcttgatcgccagcttggctctgggagacctgctgcacatcgtcattgacatccctatcaatgtctacaagctgctggcagaggactggccatttggagctgagatgtgtaagctggtgcctttcatacagaaagcctctgtgggaatcactgtgctgagtctatgtgctctgagtattgacagatatcgagctgttgcttcttggagtagaattaaaggaattggggttccaaaatggacagcagtagaaattgttttgatttgggtggtctctgtggttctggctgtccctgaagccataggttttgatataattacgatggactacaaaggaagttatctgcgaatctgcttgcttcatcccgttcagaagacagctttcatgcagttttacaagacagcaaaagattggtggctattcagtttctatttctgcttgccattggccatcactgcatttttttatacactaatgacctgtgaaatgttgagaaagaaaagtggcatgcagattgctttaaatgatcacctaaagcagagacgggaagtggccaaaaccgtcttttgcctggtccttgtctttgccctctgctggcttccccttcacctcagcaggattctgaagctcactctttataatcagaatgatcccaatagatgtgaacttttgagctttctgttggtattggactatattggtatcaacatggcttcactgaattcctgcattaacccaattgctctgtatttggtgagcaaaagattcaaaaactgctttaagtcatgcttatgctgctggtgccagtcatttgaagaaaaacagtccttggaggaaaagcagtcgtgcttaaagttcaaagctaatgatcacggatatgacaacttccgttccagtaataaatacagctcatcttgaaagaagaactattcactgtatttcattttctttatattggaccgaagtcattaaaacaaaatgaaacatttgccaaaacaaaacaaaaaactatgtatttgcacagcacactattaaaatattaagtgtaattattttaacactcacagctacatatgacattttatgagctgtttacggcatggaaagaaaatcagtgggaattaagaaagcctcgtcgtgaaagcacttaattttttacagttagcacttcaacatagctcttaacaacttccaggatattcacacaacacttaggcttaaaaatgagctcactcagaatttctattctttctaaaaagagatttatttttaaatcaatgggactctgatataaaggaagaataagtcactgtaaaacagaacttttaaatgaagcttaaattactcaatttaaaattttaaaatcctttaaaacaacttttcaattaatattatcacactattatcagattgtaattagatgcaaatgagagagcagtttagttgttgcatttttcggacactggaaacatttaaatgatcaggagggagtaacagaaagagcaaggctgtttttgaaaatcattacactttcactagaagcccaaacctcagcattctgcaatatgtaaccaacatgtcacaaacaagcagcatgtaacagactggcacatgtgccagctgaatttaaaatataatacttttaaaaagaaaattattacatcctttacattcagttaagatcaaacctcacaaagagaaatagaatgtttgaaaggctatcccaaaagacttttttgaatctgtcattcacataccctgtgaagacaatactatctacaattttttcaggattattaaaatcttcttctttcactatcgtagcttaaactctgtttggttttgtcatctgtaaatacttacctacatacactgcatgtagatgattaaatgagggcaggccctgtgctcatagctttacgatggagagatgccagtgacctcataataaagactgtgaactgcctggtgcagtgtccacatgacaaaggggcaggtagcaccctctctcacccatgctgtggttaaaatggtttctagcatatgtataatgctatagttaaaatactatttttcaaaatcatacagattagtacatttaacagctacctgtaaagcttattactaatttttgtattatttttgtaaatagccaatagaaaagtttgcttgacatggtgcttttctttcatctagaggcaaaactgctttttgagaccgtaagaacctcttagctttgtgcgttcctgcctaatttttatatcttctaagcaaagtgccttaggatagcttgggatgagatgtgtgtgaaagtatgtacaagagaaaacggaagagagaggaaatgaggtggggttggaggaaacccatggggacagattcccattcttagcctaacgttcgtcattgcctcgtcacatcaatgcaaaaggtcctgattttgttccagcaaaacacagtgcaatgttctcagagtgactttcgaaataaattgggcccaagagctttaactcggtcttaaaatatgcccaaatttttactttgtttttcttttaataggctgggccacatgttggaaataagctagtaatgttgttttctgtcaatattgaatgtgatggtacagtaaaccaaaacccaacaatgtggccagaaagaaagagcaataataattaattcacacaccatatggattctatttataaatcacccacaaacttgttctttaatttcatcccaatcactttttcagaggcctgttatcatagaagtcattttagactctcaattttaaattaattttgaatcactaatattttcacagtttattaatatatttaatttctatttaaattttagattatttttattaccatgtactgaatttttacatcctgataccttttccttctccatgtcagtatcatgttctctaattatcttgccaaattttgaaactacacacaaaaagcatacttgcattatttataataaaattgcattcagtggctttttaaaaaaatgtttgattcaaaactttaacatactgataagtaagaaacaattataatttctttacatactcaaaaccaagatagaaaaaggtgctatcgttcaacttcaaaacatgtttcctagtattaaggactttaatatagcaacagacaaaattattgttaacatggatgttacagctcaaaagatttataaaagattttaacctattttctcccttattatccactgctaatgtggatgtatgttcaaacaccttttagtattgatagcttacatatggccaaaggaatacagtttatagcaaaacatgggtatgctgtagctaactttataaaagtgtaatataacaatgtaaaaaattatatatctgggaggattttttggttgcctaaagtggctatagttactgattttttattatgtaagcaaaaccaataaaaatttaagtttttttaacaactaccttatttttcactgtacagacactaattcattaaatactaattgattgtttaaaagaaatataaatgtgacaagtggacattatttatgttaaatatacaattatcaagcaagtatgaagttattcaattaaaatgccacatttctggtctctggg

SEQ ID NO: 79061 - DNA, 1329 bp, Artificial Sequence
  derived and/or modified sequence
atgcagccaccgccgtctctctgcgggagagctctcgtggcattggtcctcgcatgcggcctctctaggatatggggcgaggagcggggcttcccacctgatagggcaaccccccttctccagaccgcagagatcatgacacctcctacaaagaccctgtggccgaaaggtagtaacgcatccctcgctcggtcattagcacccgcagaggtgcctaagggggatagaacagctggctcccctccccgaacaattagcccccctccttgtcaagggcctatcgaaatcaaagagacttttaagtacatcaacactgtggtgtcttgccttgtcttcgtgctcggcatcatcgggaactccacactgctccggatcatctacaaaaacaaatgtatgcgcaacggtcctaacattctgatcgccagtctggccctgggcgacctgttgcacatcgtgatcgacattcccattaatgtgtacaagctcctcgctgaagactggcccttcggcgcagaaatgtgcaaactggtaccttttatacagaaagcatccgtcggaattacggtcttaagcctgtgtgccttgtccatcgatcgctaccgcgcggtggccagctggagtagaatcaaaggtataggcgtgcctaaatggaccgctgtagagatcgtgctaatctgggtcgttagtgtggtgctagcggttccagaggcaattggatttgatattattaccatggactacaagggcagctacctgaggatctgtctgctccatcctgttcaaaagaccgcatttatgcagttttataaaacggctaaggactggtggctgttcagtttctatttctgcttgcccctggctatcacagcctttttttataccctaatgacatgcgaaatgctccgcaaaaaaagcgggatgcagattgcactgaacgatcatttgaaacagagaagagaggtcgctaagacagtcttctgtctggtacttgtgttcgccctttgctggcttccactccatttgtcacggatcctcaaactcacgctttataaccagaacgaccctaacaggtgcgagcttctgagtttcctcctggtgcttgattatattgggattaatatggctagcttaaacagttgcatcaatccgattgcgctgtatctagtgtcaaaacgattcaagaactgtttcaaatcatgtctgtgctgctggtgccagtcctttgaagagaaacagtcccttgaggaaaaacagtcctgcctgaagtttaaggccaacgatcatggctatgataattttaggagttctaataagtactcctcctcctag

SEQ ID NO: 79062 - DNA, 1599 bp, Artificial Sequence
  derived and/or modified sequence
atgaacaagagcacctgtctgatggcggccgagacgccttccaagagatggagattgcattgtcttgcatttagtcaacgctttgtgagagctggccccgcatgctcctccagggaggcctgcagtagtccacgcgcaggctggaaccccgctggctttcgcctcccaggccggtggtccccgttcgtggccctccatctggtttgccagattagggaagccttgaagcttcggagcggacacagaaccccgtcgggtgctggcagcagtatgcagccccctccgtccctgtgcgggcgcgccctcgttgcattggtactggcctgtggactctccaggatttggggggaggaaagaggctttccccccgatagagcgacccccttgctccagactgcagaaattatgactccgcccactaagaccctgtggcctaagggctctaacgctagcctggctaggtccctcgctccggcagaagtccctaaaggggaccgtactgcagggagccccccacgaacgattagccctcccccatgtcagggaccaatcgagatcaaggaaacgttcaagtatataaacacagtggtctcttgtcttgtgttcgtgttgggcatcatcggcaactctacactgctgcgcattatctacaaaaataagtgcatgaggaacgggcccaacattctgatcgcgagcctggctctgggggacttactccacattgtcatagacatccccatcaatgtatacaagctgctggccgaggactggccatttggagccgagatgtgtaagctcgtaccattcatccagaaggcatccgtggggatcaccgttctatctctctgcgcattatccatcgaccggtaccgcgccgtcgcaagttggtcccgcatcaaggggatcggtgtgccaaagtggaccgccgtggaaattgttttgatctgggtggtgtcggtagtgctcgccgtacctgaggccatcgggttcgatatcattaccatggactacaaagggagctatctgagaatctgtttactgcatcccgtacaaaaaaccgcattcatgcaattctataagaccgctaaagactggtggctctttagtttctacttctgtctgcctctggctataaccgctttcttctacacactgatgacttgtgaaatgctacggaaaaagtccggaatgcagattgcattgaatgaccatttaaagcagcggcgagaggtcgccaagacagtgttctgtctggtgctggttttcgcgctgtgctggctacctttacacctgagccgaattctgaaacttacattgtataatcagaatgaccctaacagatgtgaactcctatccttccttttagtgcttgactatatcgggatcaatatggctagtcttaattcttgtataaatccgatcgctttgtatctcgtatccaagcggttcaagaattgctttaagagttgtctatgctgctggtgccagtcttttgaggagaaacagtctctcgaggagaaacagtcttgcctgaaatttaaggcaaatgatcatggctatgacaactttagatcatctaataaatatagcagttcttag

SEQ ID NO: 79063 - DNA, 1329 bp, Artificial Sequence
  derived and/or modified sequence
atgcagcccccacccagcctgtgtggccgggccctggtggccctggtgctggcctgtggcctgagccgcatctggggcgaggagcggggcttccccccagaccgggccacccccctgctgcagacagctgagatcatgaccccacccaccaagaccctgtggcccaagggcagcaatgccagcctggcccggagcctggccccagctgaggtgcccaagggggacagaacagctggcagcccccccaggaccatcagccccccaccctgccagggccccatcgagatcaaggagaccttcaagtacatcaacacagtggtgtcctgcctggtgtttgtgctgggcatcatcggcaacagcaccctgctgcgcatcatctacaagaacaagtgcatgagaaatggccccaacatcctgattgccagcctggccctgggggacctgctgcacatcgtgattgacatccccatcaacgtgtacaagctgctggccgaggactggccctttggagctgagatgtgcaagctggtgcccttcatccagaaggcctctgtgggcatcaccgtgctgagcctgtgtgccctgagcattgaccgctacagagctgtggcctcctggagccgcatcaagggcatcggcgtgcccaagtggacagctgtggagatcgtgctgatctgggtggtgtctgtggtgctggccgtgcctgaggccatcggctttgacatcatcaccatggactacaagggcagctacctgcgcatctgcctgctgcaccctgtgcagaagacagccttcatgcagttctacaagacagccaaggactggtggctgttctccttctacttctgcctgcccctggccatcacagccttcttctacaccctgatgacctgtgagatgctgaggaagaagagcggcatgcagatcgccctgaatgaccacctgaagcagaggcgggaggtggccaagacagtgttctgcctggtgctggtgtttgccctgtgctggctgcccctgcacctgagccgcatcctgaagctgaccctgtacaaccagaatgaccccaacagatgtgagctgctgtccttcctgctggtgctggactacatcggcatcaacatggccagcctgaacagctgcatcaaccccatcgccctgtacctggtgtccaagcgcttcaagaactgcttcaagagctgcctgtgctgctggtgccagagctttgaggagaagcagagcctggaggagaagcagagctgcctgaagttcaaggccaatgaccacggctatgacaacttccgcagcagcaacaagtacagcagcagctag

SEQ ID NO: 79064 - DNA, 1599 bp, Artificial Sequence
  derived and/or modified sequence
atgaacaagagcacctgcctgatggctgctgagacccccagcaagcgctggaggctgcactgcctggccttcagccagagatttgtgcgggccggccctgcctgcagcagccgggaggcctgcagcagcccccgggccggctggaacccagctggcttccggctgcccggccgctggagcccctttgtggccctgcacctggtgtgccagatccgggaggccctgaagctgcggagcggccacaggaccccatctggagctggcagctccatgcagcccccacccagcctgtgtggccgggccctggtggccctggtgctggcctgtggcctgagccgcatctggggcgaggagcggggcttccccccagaccgggccacccccctgctgcagacagctgagatcatgaccccacccaccaagaccctgtggcccaagggcagcaatgccagcctggcccggagcctggccccagctgaggtgcccaagggggacagaacagctggcagcccccccaggaccatcagccccccaccctgccagggccccatcgagatcaaggagaccttcaagtacatcaacacagtggtgtcctgcctggtgtttgtgctgggcatcatcggcaacagcaccctgctgcgcatcatctacaagaacaagtgcatgagaaatggccccaacatcctgattgccagcctggccctgggggacctgctgcacatcgtgattgacatccccatcaacgtgtacaagctgctggccgaggactggccctttggagctgagatgtgcaagctggtgcccttcatccagaaggcctctgtgggcatcaccgtgctgagcctgtgtgccctgagcattgaccgctacagagctgtggcctcctggagccgcatcaagggcatcggcgtgcccaagtggacagctgtggagatcgtgctgatctgggtggtgtctgtggtgctggccgtgcctgaggccatcggctttgacatcatcaccatggactacaagggcagctacctgcgcatctgcctgctgcaccctgtgcagaagacagccttcatgcagttctacaagacagccaaggactggtggctgttctccttctacttctgcctgcccctggccatcacagccttcttctacaccctgatgacctgtgagatgctgaggaagaagagcggcatgcagatcgccctgaatgaccacctgaagcagaggcgggaggtggccaagacagtgttctgcctggtgctggtgtttgccctgtgctggctgcccctgcacctgagccgcatcctgaagctgaccctgtacaaccagaatgaccccaacagatgtgagctgctgtccttcctgctggtgctggactacatcggcatcaacatggccagcctgaacagctgcatcaaccccatcgccctgtacctggtgtccaagcgcttcaagaactgcttcaagagctgcctgtgctgctggtgccagagctttgaggagaagcagagcctggaggagaagcagagctgcctgaagttcaaggccaatgaccacggctatgacaacttccgcagcagcaacaagtacagcagcagctag

SEQ ID NO: 79065 - DNA, 1329 bp, Artificial Sequence
  derived and/or modified sequence
atgcagcccccccccagcctgtgcggccgggccctggtggccctggtgctggcctgtggactatctcggatctggggggaagagcgaggcttccccccagatcgggccacacctctgttgcagaccgccgagatcatgacaccccccaccaagacgctctggccaaaggggtcaaacgcttcgttggctaggagtctggcaccagctgaggtgccaaaaggcgaccggaccgcagggagccctccccgtacaatcagtcctccgccctgccagggcccaattgagataaaggagacctttaagtacataaatactgtggtttcttgcctggtttttgtgttgggcatcatcgggaactccaccctgctgcgcatcatctacaagaacaagtgcatgcgcaatgggccaaatatcctcatagcctcccttgctctgggtgacctcctgcacattgtcatcgacattcctattaacgtgtataagctgctcgccgaagattggcctttcggcgccgagatgtgcaagcttgtgcccttcatccagaaggcctccgtggggattaccgtcttgtcactatgtgcactatctattgacaggtaccgcgcagtcgcctcatggtcccggattaaaggcataggagtaccaaaatggactgcagtcgagatcgtgctgatatgggttgttagtgtcgtcctggcggttcccgaagcaatcggctttgatatcataacaatggactataaggggtcgtacctgcggatctgtctgcttcacccagttcaaaaaacagcattcatgcagttctacaaaacggccaaagattggtggcttttttcgttctacttctgtttgccactggctatcacagccttcttttacaccctgatgacatgtgaaatgctgcgaaagaagagtggtatgcagatcgcactcaacgatcacctgaaacagcgacgggaagtggccaaaacagtgttttgtctggttctggtgtttgccctctgctggcttcctttgcacctgagcaggatcctgaagctaactctgtacaaccagaatgaccctaaccggtgcgaactactaagctttctgctcgtgttggattacataggaatcaacatggcgagtttaaactcgtgtataaacccaatagcattgtatttggtgtctaagcgatttaagaattgctttaagtcttgtctgtgttgttggtgtcagagttttgaggaaaagcagtcactggaggagaagcagtcatgcctgaagttcaaggccaatgaccatggctacgacaacttcagatcaagcaataagtatagttcttcctag

SEQ ID NO: 79066 - DNA, 1599 bp, Artificial Sequence
  derived and/or modified sequence
atgaacaagagcacctgcctgatggccgccgagacccccagcaagcgatggcggttgcactgcctggcattcagccaaaggtttgtaagggctggccccgcctgttccagccgtgaggcctgctcttcccccagagccggctggaatcctgccggatttcgactccccggcaggtggtctcctttcgttgccttacatctggtttgtcagattagggaagcacttaaactgagatccggccaccgcaccccatccggagctgggtcgagcatgcagcccccaccaagtttgtgtgggcgggctcttgtggcactggtcctggcgtgcggtctgtcccgcatctggggagaggaaaggggatttcccccagatcgagccactcccctcctccagacagctgagatcatgacaccaccaaccaagacgttgtggccaaagggctctaatgcatccttagcacgatctctagcccctgcagaagttcccaagggcgacaggacagccggatcaccacctcgtaccattagcccacccccttgtcagggaccaatcgagattaaggagacttttaagtatattaacacggtggtgagttgtctggttttcgtcctgggaatcatcgggaattctaccctgctccggattatttataagaataagtgcatgcgcaacggtcctaacatactgatcgcatccttagctctgggcgacctgctccacatcgtgatcgacattcctataaacgtatataagctcttggccgaagactggccatttggggccgagatgtgcaagctagttccatttatccagaaagcctcagtggggattactgtactgagcctgtgcgccctttcgattgatcgctatagggccgtggcctcttggtctagaatcaaaggaatcggagtaccaaaatggacggcagtggaaattgtccttatctgggtcgtttccgttgtgctcgccgtacctgaggctatcggcttcgatatcatcactatggattacaaggggtcttatctcagaatttgcctgttgcacccagtccagaaaactgcgtttatgcagttctacaagaccgccaaggactggtggctgttctcattctacttttgcctgccattggccataacggcgttcttttacacactgatgacatgcgaaatgctgcggaaaaagtccggtatgcagattgcattgaatgatcacctgaagcagcggcgagaggtggctaagaccgtgttttgtctggtcttagtctttgctttatgttggctgccactacacctgagtcgaatcctcaagcttactctgtacaatcagaatgatccaaatcgctgcgaactgctttctttcttgctcgtactggattatattggcattaatatggctagccttaatagctgtatcaatccaatcgcactgtacctggtgagtaagcgttttaagaattgttttaaatcctgtctgtgttgttggtgtcagtcctttgaggagaagcagagcctggaggaaaagcagtcctgtttgaaatttaaggcaaacgatcacggatacgataatttcaggagctcaaacaagtactcgtcgtcctag

SEQ ID NO: 79067 - DNA, 1329 bp, Artificial Sequence
  derived and/or modified sequence
atgcagcccccaccaagcctgtgcggcagggctctggtcgcacttgtactggcctgtggtctgtcccgtatctggggggaggaacgcggttttccaccggacagagccactcccctgctgcaaactgcagaaatcatgactccccctactaagaccctttggcctaaaggctccaacgcttctctcgctcgatccctggcccctgccgaggtgcctaaaggcgacagaaccgccggatcccctccgagaactatatctcccccaccatgtcagggcccaattgagattaaagagacgttcaaatatatcaacaccgtggttagctgcctggtcttcgtcctcggcatcattggcaactctacactattgcggatcatatataaaaataaatgtatgaggaacggaccgaacatcctcatagcgagcctcgctcttggggacctgttgcacattgtgatagacatccctataaacgtatacaagctgctagcggaagattggcctttcggggcagaaatgtgtaagctggtcccattcatccagaaagcatctgtagggataactgtactctccctatgtgctctctccatagatagatatagggccgttgcttcctggtcccggatcaaggggattggcgtgccgaaatggaccgcagtcgagatcgtgctcatctgggtggtctcagtagtgctagcagtgccggaagctattggcttcgatattatcaccatggattataagggatcgtacctgagaatttgtctgcttcatcccgtgcagaagacagcgttcatgcagttctataagacggccaaagactggtggctgttcagcttctacttttgtctgccactcgccatcacagcttttttctatacgctgatgacgtgcgaaatgcttagaaaaaaatctgggatgcagatcgctctgaacgatcacctgaagcagcggagagaggttgcgaagacagtgttctgtctggtgctggttttcgcactgtgttggctgccactccacctaagtagaattttaaaactgacactctacaaccagaatgaccctaataggtgtgagctgctgagctttctcctcgttctcgactacattggaatcaatatggctagcctgaattcgtgcatcaaccctatagccctgtacctggtcagcaaacggttcaaaaattgcttcaaatcttgcctctgttgttggtgccaatcattcgaagaaaagcagtctctggaagagaaacagagctgcttgaagttcaaggctaatgaccatggttatgacaatttccgttcgtcgaataagtattcttccagctag

SEQ ID NO: 79068 - DNA, 1599 bp, Artificial Sequence
  derived and/or modified sequence
atgaacaagtctacctgtttgatggccgctgagacaccctccaaaagatggcggctccattgcctcgcattttcccaaagattcgtcagggccggtcccgcatgcagctcgagagaggcctgctcttcaccaagggccggatggaatcctgccggattcagactccccggacggtggtcaccattcgtggccctgcacttagtgtgccagatacgggaggccctcaagcttcgatccggccataggaccccctccggtgcagggtccagcatgcagcctcctccttcactatgcggcagagccctcgttgcgctggtgcttgcctgcggtttgtcaaggatctggggcgaagaacggggatttcctccggatagggctaccccactcttgcagacagccgagatcatgacccccccaactaagacactgtggcctaagggatctaatgcctcactcgctagatcacttgccccagcagaagtacccaagggggacaggaccgcgggttccccacccaggaccatttcgcctcctccctgccaaggcccaattgagattaaagagacttttaagtacatcaacacagtagtgagctgtttggtgttcgtgctcggtattattggcaattccacattgctgcgcatcatctacaagaataagtgcatgagaaacggcccaaacattcttatcgcgtcccttgcgttaggcgatctcttacacatcgtcatcgacatcccgatcaatgtgtacaaactgctcgccgaggactggccatttggggctgagatgtgtaagctggtgccttttattcagaaagcctctgtgggcattactgtgctctccttatgtgccttgtctattgatcggtaccgggctgtcgctagctggagtcgcatcaaaggaataggagtacctaaatggactgcagtggagatcgtcctgatctgggtcgtctctgtagtgctagccgtgccggaagcgatcggcttcgacattattacaatggattacaagggctcttacctccggatctgtctactgcacccagtgcagaaaacggctttcatgcagttttacaagactgccaaagattggtggctgttctcattttatttctgtctgccactggcgatcaccgccttcttctacactctaatgacatgtgagatgctgcggaagaagtccggcatgcagatagcccttaatgatcacttgaaacagcgtagggaagtggcaaaaacagtcttctgcctggtgcttgtgttcgccctatgttggctccccctccacctcagcagaatccttaaactcacactatataaccagaatgatccgaacaggtgcgagctgttgagttttctgctggtactggactatatcggcatcaacatggccagtctgaattcttgcatcaatcctatcgccctttatcttgtgagtaagcggttcaagaactgcttcaaatcctgcctctgctgctggtgtcagagctttgaagagaagcagtcactggaagaaaagcaaagttgcctcaaattcaaggcaaacgatcacggttacgataatttccgaagtagtaacaagtactcctcttcgtag

SEQ ID NO: 79069 - protein, 662 aa, Artificial Sequence
  derived and/or modified sequence
MAEWLLSASWQRRAKAMTAAAGSAGRAAVPLLLCALLAPGGAYVLDDSDGLGREFDGIGAVSGGGPNFGASLHILKVEIGGDGQTTDGTEPSHMHYALDENYFRGYEWWLMKEAKKRNPNITLIGLPWSFPGWLGKGFDWPYVNLQLTAYYVVTWIVGAKRYHDLDIDYIGIWNERSYNANYIKILRKMLNYQGLQRVKIIASDNLWESISASMLLDAELFKVVDVIGAHYPGTHSAKDAKLTGKKLWSSEDFSTLNSDMGAGCWGRILNQNYINGYMTSTIAWNLVASYYEQLPYGRCGLMTAQEPWSGHYVVESPVWVSAHTTQFTQPGWYYLKTVGHLEKGGSYVALTDGLGNLTIIIETMSHKHSKCIRPFLPYFNVSQQFATFVLKGSFSEIPELQVWYTKLGKTSERFLFKQLDSLWLLDSDGSFTLSLHEDELFTLTTLTTGRKGSYPLPPKSQPFPSTYKDDFNVDYPFFSEAPNFADQTGVFEYFTNIEDPGEHHFTLRQVLNQRPITWAADASNTISIIGDYNWTNLTIKCDVYIETPDTGGVFIAGRVNKGGILIRSARGIFFWIFANGSYRVTGDLAGWIIYALGRVEVTAKKWYTLTLTIKGHFTSGMLNDKSLWTDIPVNFPKNGWAAIGTHSFEFAQFDNFLVEATR

SEQ ID NO: 79070 - DNA, 3828 bp, Artificial Sequence
  derived and/or modified sequence
actcaaaatggcggcggcggcgtcagcatcagcggcctcctgcccgtatctatcgtggcggcgacgggacccgcctccctgggcgccggagtcatgtgacccacacaatggctgagtggctactctcggcttcctggcaacgccgagcgaaagctatgactgcggccgcgggttcggcgggccgcgccgcggtgcccttgctgctgtgtgcgctgctggcgcccggcggcgcgtacgtgctcgacgactccgacgggctgggccgggagttcgacggcatcggcgcggtcagcggcggcgggccgaattttggtgcctctttgcatattttaaaagtggaaataggtggtgatgggcagacaacagacggcactgagccctcccacatgcattatgcactagatgagaattatttccgaggatacgagtggtggttgatgaaagaagctaagaagaggaatcccaatattacactcattgggttgccatggtcattccctggatggctgggaaaaggtttcgactggccttatgtcaatcttcagctgactgcctattatgtcgtgacctggattgtgggcgccaagcgttaccatgatttggacattgattatattggaatttggaatgagaggtcatataatgccaattatattaagatattaagaaaaatgctgaattatcaaggtctccagcgagtgaaaatcatagcaagtgataatctctgggagtccatctctgcatccatgctccttgatgccgaactcttcaaggtggttgatgttataggggctcattatcctggaacccattcagcaaaagatgcaaagttgactgggaagaagctttggtcttctgaagactttagcactttaaatagtgacatgggtgcaggctgctggggtcgcattttaaatcagaattatatcaatggctatatgacttccacaatcgcatggaatttagtggctagttactatgaacagttgccttatgggagatgcgggttgatgacggcccaggagccatggagtgggcactacgtggtagaatctcctgtctgggtatcagctcataccactcagtttactcaacctggctggtattacctgaagacagttggccatttagagaaaggaggaagctacgtagctctgactgatggcttagggaacctcaccatcatcattgaaaccatgagtcataaacattctaagtgcatacggccatttcttccttatttcaatgtgtcacaacaatttgccacctttgttcttaagggatcttttagtgaaataccagagctacaggtatggtataccaaacttggaaaaacatccgaaagatttctttttaagcagctggattctctatggctccttgacagcgatggcagtttcacactgagcctgcatgaagatgagctgttcacactcaccactctcaccactggtcgcaaaggcagctacccgcttcctccaaaatcccagcccttcccaagtacctataaggatgatttcaatgttgattacccattttttagtgaagctccaaactttgctgatcaaactggtgtatttgaatattttacaaatattgaagaccctggcgagcatcacttcacgctacgccaagttctcaaccagagacccattacgtgggctgccgatgcatccaacacaatcagtattataggagactacaactggaccaatctgactataaagtgtgatgtatacatagagacccctgacacaggaggtgtgttcattgcaggaagagtaaataaaggtggtattttgattagaagtgccagaggaattttcttctggatttttgcaaatggatcttacagggttacaggtgatttagctggatggattatatatgctttaggacgtgttgaagttacagcaaaaaaatggtatacactcacgttaactattaagggtcatttcacctctggcatgctgaatgacaagtctctgtggacagacatccctgtgaattttccaaagaatggctgggctgcaattggaactcactcctttgaatttgcacagtttgacaactttcttgtggaagccacacgctaatacttaacagggcatcatagaatactctggattttcttcccttctttttggttttggttcagagccaattcttgtttcattggaacagtatatgaggcttttgagactaaaaataatgaagagtaaaaggggagagaaatttatttttaatttaccctgtggaagattttattagaattaattccaaggggaaaactggtgaatctttaacattacctggtgtgttccctaacattcaaactgtgcattggccatacccttaggagtggtttgagtagtacagacctcgaagccttgctgctaacactgaggtagctctcttcatcttatttgcaagcggtcctgtagatggcagtaacttgatcatcactgagatgtatttatgcatgctgaccgtgtgtccaagtgagccagtgtcttcatcacaagatgatgctgccataatagaaagctgaagaacactagaagtagctttttgaaaaccacttcaacctgttatgctttatgctctaaaaagtatttttttattttcctttttaagatgatacttttgaaatgcaggatatgatgagtgggatgattttaaaaatgcctctttaataaactacctctaacactatttctgcagtaatagatattagcagattaattgggttatttgcattatttaatttttttgattccaagttttggtcttgtaaccactataactctctgtgaacgtttttccaggtggctggaagaaggaagaaaacctgatatagccaatgctgttgtagtcgtttcctcagcctcatctcactgtgctgtggtctgtcctcacatgtgcactggtaacagactcacacagctgatgaatgcttttctctccttatgtgtggaaggaggggagcacttagacatttgctaactcccagaattggatcatctcctaagatgtacttactttttaaagtccaaatatgtttatatttaaatatacgtgagcgtgttcatcatgttgtatgatttatactaagcattaatgtggctctatgtagcaaatcagttattcatgtaggtaaagtaaatctagaattatttataagaattactcattgaactaattctactatttaggaatttgtaagagtctaacataggcttagctacagtgaagttttgcattgcttttgaagacaagaagataagtgctagaataaataagattacagagaaaattttttgttaaaaccaagtgatttccagctgatgtatctaatattttttaaaacgaacattatagaggtgtaatttatttacaataaaatgttcctactttaaatatacaattcagtgagttttgataaattgatatacccatgtaaccaacactccagtcaagcttcagaatatttccatcaccccagaaggttctcttgtatacctgctcagtcagttcctttcactcccaattgttggcagccattgataggaattctatcactataggttagttttctttgttccagaacatcatgaaagcggcgtcatgtactgtgtattcttatgaatggtttctttccatcagcataatgatttgagatttgtccatgttgtgtgattcagtggtttgttccttcttatttctgaagagttttccattgtatgaatataccacaatttgtttcctccccaccagtttctgatactacaattaaaactgtctacatttacaaaaaaaaaaaaaaaa

SEQ ID NO: 79071 - DNA, 2054 bp, Artificial Sequence
  derived and/or modified sequence
atgtgacccacacaatggctgagtggctactctcggcttcctggcaacgccgagcgaaagctatgactgcggccgcgggttcggcgggccgcgccgcggtgcccttgctgctgtgtgcgctgctggcgcccggcggcgcgtacgtgctcgacgactccgacgggctgggccgggagttcgacggcatcggcgcggtcagcggcggcgggccgaattttggtgcctctttgcatattttaaaagtggaaataggtggtgatgggcagacaacagacggcactgagccctcccacatgcattatgcactagatgagaattatttccgaggatacgagtggtggttgatgaaagaagctaagaagaggaatcccaatattacactcattgggttgccatggtcattccctggatggctgggaaaaggtttcgactggccttatgtcaatcttcagctgactgcctattatgtcgtgacctggattgtgggcgccaagcgttaccatgatttggacattgattatattggaatttggaatgagaggtcatataatgccaattatattaagatattaagaaaaatgctgaattatcaaggtctccagcgagtgaaaatcatagcaagtgataatctctgggagtccatctctgcatccatgctccttgatgccgaactcttcaaggtggttgatgttataggggctcattatcctggaacccattcagcaaaagatgcaaagttgactgggaagaagctttggtcttctgaagactttagcactttaaatagtgacatgggtgcaggctgctggggtcgcattttaaatcagaattatatcaatggctatatgacttccacaatcgcatggaatttagtggctagttactatgaacagttgccttatgggagatgcgggttgatgacggcccaggagccatggagtgggcactacgtggtagaatctcctgtctgggtatcagctcataccactcagtttactcaacctggctggtattacctgaagacagttggccatttagagaaaggaggaagctacgtagctctgactgatggcttagggaacctcaccatcatcattgaaaccatgagtcataaacattctaagtgcatacggccatttcttccttatttcaatgtgtcacaacaatttgccacctttgttcttaagggatcttttagtgaaataccagagctacaggtatggtataccaaacttggaaaaacatccgaaagatttctttttaagcagctggattctctatggctccttgacagcgatggcagtttcacactgagcctgcatgaagatgagctgttcacactcaccactctcaccactggtcgcaaaggcagctacccgcttcctccaaaatcccagcccttcccaagtacctataaggatgatttcaatgttgattacccattttttagtgaagctccaaactttgctgatcaaactggtgtatttgaatattttacaaatattgaagaccctggcgagcatcacttcacgctacgccaagttctcaaccagagacccattacatgggctgccgatgcatccaacacaatcagtattataggagactacaactggaccaatctgactataaagtgtgatgtatacatagagacccctgacacaggaggtgtgttcattgcaggaagagtaaataaaggtggtattttgattagaagtgccagaggaattttcttctggatttttgcaaatggatcttacagggttacaggtgatttagctggatggattatatatgctttaggacgtgttgaagttacagcaaaaaaatggtatacactcacgttaactattaagggtcatttcacctctggcatgctgaatgacaagtctctgtggacagacatccctgtgaattttccaaagaatggctgggctgcaattggaactcactcctttgaatttgcacagtttgacaactttcttgtggaagccacacgctaatacttaacagggcatcatagaatactctggattttcttcccttctttttgg

SEQ ID NO: 79072 - DNA, 1989 bp, Artificial Sequence
  derived and/or modified sequence
atggccgagtggctactaagcgcaagttggcaaaggagagctaaagctatgaccgccgctgctggatcagctggaagagcagcagtcccattgttgctgtgcgccctcctggcgcctggaggcgcctatgtgctcgacgattctgatggcctggggcgggagtttgacggcataggcgctgtaagcgggggaggccctaacttcggcgcaagtttgcacatcctcaaggtggaaatcgggggagatgggcagaccaccgatggtaccgaaccatctcacatgcattatgccctggacgagaactattttcgaggatatgagtggtggctcatgaaagaagcaaagaaaagaaaccctaacatcactctaatcgggcttccgtggtctttcccgggatggctcggcaaagggttcgactggccctacgtgaatctgcagctgactgcctactatgtcgtgacatggatcgttggggccaaacggtatcatgatttagacattgactacataggcatttggaacgaacgctcttataacgctaattatattaaaatcctccggaaaatgctgaattaccagggattgcaacgcgtgaagataattgcgagtgataatctctgggagagcatcagtgcaagcatgcttctagatgccgaattattcaaggtcgtggacgtaataggagcccattatcccgggacacacagtgctaaggatgccaaacttaccggcaagaaactttggtcttccgaggacttctcaacactgaatagtgatatgggggccgggtgctggggccgaatactgaaccagaactatataaacgggtatatgactagcacaatagcgtggaaccttgtcgcgagctactatgaacagctgccctacgggaggtgtgggttgatgactgcccaggagccctggtcaggccactatgtggtggagagcccggtgtgggtgtcagctcacaccacccagtttacccagcccggatggtattacctgaaaaccgtggggcatctggagaagggcggtagttatgtggctttgaccgacggactcgggaacctgactataataatagagactatgtctcataagcatagcaaatgtatacggccattccttccgtactttaatgtcagccagcagttcgcaacttttgtgctcaaaggcagctttagtgaaatacccgagctgcaggtgtggtacacaaagctgggtaaaacctccgaacgatttctgtttaaacaattagactcactctggcttctcgactcggatggcagttttacattatcgctgcatgaagacgagctctttacactgactacactcacaacgggacgcaagggtagctatcctctcccccccaagtcacaacctttcccaagcacttacaaggacgactttaacgtcgactatccgttctttagcgaagcgcctaacttcgctgaccaaactggggtctttgagtactttaccaacatcgaggatcccggagaacaccatttcaccctgcgccaagttctcaaccagcgccctatcacatgggccgctgatgccagcaacacaatctcaatcatcggagactataattggaccaatctgaccataaagtgtgatgtttacatcgaaaccccggacaccgggggtgtttttatcgcagggcgcgtcaacaaaggcggcatcttgatcagatcagctagagggatcttcttttggattttcgcaaacggatcatatcgcgtgacaggtgacctcgcgggatggatcatctatgcccttggacgagtggaggtgacagcaaagaagtggtatacgttaacattgaccattaaaggccacttcacctcaggaatgctaaatgataagagtctctggaccgacatcccagtcaacttccctaagaatggttgggctgctatcggcactcattccttcgaatttgctcaatttgataattttctggtcgaagctacaagatag

SEQ ID NO: 79073 - DNA, 1989 bp, Artificial Sequence
  derived and/or modified sequence
atggccgagtggctgctgagcgcctcctggcagaggcgggccaaggccatgacagctgctgctggcagcgctggccgggctgctgtgcccctgctgctgtgtgccctgctggcccctggaggagcctacgtgctggatgacagtgatggcctgggccgggagtttgatggcatcggggctgtgtctgggggcggccccaactttggagccagcctgcacatcctgaaggtggagattggaggagatggccagaccacagatggaacagagcccagccacatgcactacgccctggatgagaactacttccggggctatgagtggtggctgatgaaggaggccaagaagaggaaccccaacatcaccctcatcggcctgccctggagcttccctggctggctgggcaagggctttgactggccctacgtgaacctgcagctgacagcctactacgtggtgacctggatcgtgggcgccaagcgctaccatgacctggacatcgactacatcggcatctggaatgaaagaagctacaatgccaactacatcaagatcctgaggaagatgctgaactaccagggcctgcagagggtgaagatcatcgccagtgacaacctgtgggagagcatcagcgcctccatgctgctggatgctgagctgttcaaggtggtggatgtgattggagcccactacccaggcacccacagcgccaaggatgccaagctgaccgggaagaagctgtggagcagcgaggacttcagcaccctgaacagcgacatgggcgccggctgctggggccgcatcctgaaccagaactacatcaatggctacatgaccagcaccatcgcctggaacctggtggccagctactatgagcagctgccctacggccgctgtggcctgatgacagcccaggagccctggagcggccactacgtggtggagagccctgtgtgggtgtctgcccacaccacccagttcacccagcccggctggtactacctgaagacagtgggccacctggagaagggcggcagctatgtggccctgacagatggcctgggcaacctgaccatcatcatcgagaccatgagccacaagcacagcaagtgcatccggcccttcctgccctacttcaacgtgtcccagcagtttgccacctttgtgctgaagggcagcttcagcgagatccctgagctgcaggtgtggtacaccaagctgggcaagaccagcgagcgcttcctgttcaagcagctggacagcctgtggctgctggacagtgatggcagcttcaccctgagcctgcatgaagatgagctgttcaccctgaccaccctgaccaccggcaggaagggcagctaccccctgccccccaagagccagcccttccccagcacctacaaggatgacttcaacgtggactaccccttcttcagcgaggcccccaactttgctgaccagacaggagtgtttgagtacttcaccaacatcgaggaccccggggagcaccacttcaccctgcggcaggtgctgaaccagaggcccatcacctgggccgcagatgccagcaacaccatcagcatcattggagactacaactggaccaacctgaccatcaagtgtgatgtgtacatcgagaccccagacaccggcggcgtcttcatcgccggccgggtgaacaagggcggcatcctgatccgcagcgcccggggcatcttcttctggatctttgccaacggcagctacagagtgactggagacctggccggctggatcatctatgccctgggccgggtggaggtgacagccaagaagtggtacaccctgaccctgaccatcaagggccacttcaccagcggcatgctgaatgacaagagcctgtggacagacatccctgtgaacttccccaagaatggctgggccgccatcggcacccacagctttgaatttgcccagtttgacaacttcctggtggaggccaccaggtag

SEQ ID NO: 79074 - DNA, 1989 bp, Artificial Sequence
  derived and/or modified sequence
atggccgagtggctgctgagcgccagctggcagcggcgggccaaggctatgaccgcagccgccggctcagcaggacgagctgcagttcccttactgctgtgcgcccttctcgctcccgggggagcatacgtgcttgatgacagtgacggtctggggcgggagttcgacggaattggcgccgtaagtggcggaggccctaatttcggcgcaagccttcacatactgaaagtggagatcgggggtgatggccagacaactgatggaacagagccaagtcatatgcattacgctttggacgaaaattatttcagagggtatgaatggtggctgatgaaggaagcaaaaaaacgaaacccaaatattacactgattggattaccttggagcttccccgggtggttgggaaagggatttgattggccttacgtcaatctgcagcttacagcttattacgtggtgacctggatcgtgggagctaaaaggtaccacgatctggatatcgattacatcgggatttggaatgagcggtcatacaacgccaactatatcaaaatactaagaaagatgctcaactatcaaggcttgcagagagtgaagattatagcgtctgataatctctgggaaagcatctccgccagtatgctgttagacgctgaactgtttaaagttgtcgacgtgattggtgctcactatcccgggacccacagcgctaaggatgctaaacttacagggaaaaaattgtggtccagcgaggattttagcactttgaattctgacatgggtgctggctgttgggggagaattctgaatcagaactatataaacggctatatgacgagcaccatcgcttggaatctcgtagcatcatactatgagcaactcccctatggccgctgcgggcttatgacagctcaggagccctggtccggccattatgttgtcgaaagcccagtgtgggtctctgcacatacaacccagttcacacagccaggatggtactatctcaagaccgtgggccacctggagaaagggggatcctatgtggccttaactgacggcctcggtaacctcacaataatcattgagaccatgtctcacaaacattcaaaatgtattcggcctttcctgccctactttaacgtatcgcaacaatttgccactttcgtgctgaaaggatcattctctgaaatccctgagctgcaagtatggtacacaaagctgggaaaaacgagcgaaaggttcctcttcaagcagctcgattctctgtggctgctagattcagacggtagctttacattgtcactgcatgaagacgaactgttcaccctgaccaccctcaccacaggacgaaagggatcctatcccttgccaccaaaatcgcagccattcccctccacctacaaggacgactttaacgtggactacccattcttctcagaagcaccaaactttgctgaccagacaggtgtgtttgaatattttaccaacatcgaggaccccggagagcaccacttcacacttcgccaggtgctgaatcagcgcccaataacctgggcagcagacgctagtaataccatatcaatcatcggagactacaactggacaaacttgacgatcaagtgtgatgtgtatattgaaactccagataccggtggcgtgtttatagcaggtagggtgaacaagggaggcattctgatccggtccgctcgaggcatatttttctggattttcgctaacgggagctatcgggtaaccggagacctggcaggctggatcatctatgcgctaggacgagtagaggtaactgccaaaaaatggtacactctcacactgacaatcaaggggcactttactagcggtatgctgaatgacaaatctctgtggacagatataccagttaatttccctaaaaatgggtgggcggccattggcacccattctttcgaatttgctcaatttgataatttcctcgtagaagcgactcgctag

SEQ ID NO: 79075 - DNA, 1989 bp, Artificial Sequence
  derived and/or modified sequence
atggctgaatggctcctgagcgcttcttggcagagaagggcgaaggccatgactgccgcagccggaagcgctgggagagccgctgtgcctctgctcctctgcgccctgctagcacccggtggagcttatgtcctggacgacagtgatggattagggagggaatttgacggaatcggtgctgtatcaggtgggggacctaactttggcgcatcccttcacatcttaaaggtcgaaattggcggagacggacagacgactgacggaactgagccttcccacatgcattatgctctcgatgagaactacttccggggatatgaatggtggctgatgaaagaggctaagaaaagaaaccctaacatcacacttatcggcctgccatggtcgtttccaggctggcttggtaaagggtttgactggccgtacgtcaatttgcaactgactgcctattacgtggttacctggatcgtgggcgcaaagaggtaccacgatctggacatcgactacattggaatatggaacgagcgcagttataatgccaattatattaagattctgaggaaaatgttgaactatcagggattacagagagtaaaaataatagcgtcagacaacttgtgggaaagcatctcagcctccatgctccttgatgcagaactctttaaggtcgtcgacgttataggggctcattaccccggtacacacagcgcgaaagatgctaaactgaccggaaagaagctgtggagttcagaagacttcagcactttaaactccgatatgggggctggttgttggggaaggattctgaaccagaactacattaacggctacatgaccagtactattgcctggaatcttgtggcttcctactacgaacagcttccctacggtcgttgtgggctcatgaccgcccaggagccttggtcaggacactatgtggttgagtccccggtctgggtgtctgcccatacaacgcagtttacacagcccggttggtattatcttaagactgttggacatctcgaaaagggcggatcctacgtggctcttactgacggcctgggaaacctgacaattatcatcgaaaccatgtcacataagcactccaagtgcatacggcctttcctgccctacttcaacgtgagccaacaattcgccacttttgtcctgaagggcagtttttctgagattcctgaactccaggtgtggtacacaaaactcggtaagacatcggagcgttttttatttaaacagctggattccctctggctgctcgactctgatggatcttttaccttatcacttcacgaggatgaactttttaccctcactaccttaaccaccggacgcaaaggctcatacccactgccacccaaaagccaaccattcccaagcacatataaggatgactttaacgttgactatcctttcttttctgaggcccctaactttgcagaccagaccggtgtatttgagtacttcacaaatattgaggatccaggcgaacatcactttaccctccggcaggtactgaatcagagacctataacttgggctgccgatgcgagcaacacaatttccatcattggtgactataattggactaacttgacaataaaatgtgatgtgtacatcgaaactcctgacaccggaggagtgttcatcgcaggtcgagtcaacaaaggcggtatcttgatcaggtccgcccgtggaatctttttctggatctttgctaacggctcctaccgggtcaccggggacctcgcaggatggataatctacgcattaggcagagtggaggtgacagccaaaaagtggtatacccttaccctgactattaaggggcactttacctccggaatgctgaatgataagtcgctttggacagatattcccgtcaacttccctaagaacggatgggcagctattggcacgcatagctttgagttcgcccagtttgacaatttccttgtggaggccacaaggtag

SEQ ID NO: 79076 - DNA, 1989 bp, Artificial Sequence
  derived and/or modified sequence
atggccgagtggctgctgagcgccagctggcagagaagagccaaggccatgaccgccgccgccggcagcgccggcagagccgccgtgcccctgctgctgtgcgccctgctggcccccggcggcgcctacgtgctggacgacagcgacggcctgggcagagagttcgacggcatcggcgccgtgagcggcggcggccccaacttcggcgccagcctgcacatcctgaaggtggagatcggcggcgacggccagaccaccgacggcaccgagcccagccacatgcactacgccctggacgagaactacttcagaggctacgagtggtggctgatgaaggaggccaagaagagaaaccccaacatcaccctgatcggcctgccctggagcttccccggctggctgggcaagggcttcgactggccctacgtgaacctgcagctgaccgcctactacgtggtgacctggatcgtgggcgccaagagataccacgacctggacatcgactacatcggcatctggaacgagagaagctacaacgccaactacatcaagatcctgagaaagatgctgaactaccagggcctgcagagagtgaagatcatcgccagcgacaacctgtgggagagcatcagcgccagcatgctgctggacgccgagctgttcaaggtggtggacgtgatcggcgcccactaccccggcacccacagcgccaaggacgccaagctgaccggcaagaagctgtggagcagcgaggacttcagcaccctgaacagcgacatgggcgccggctgctggggcagaatcctgaaccagaactacatcaacggctacatgaccagcaccatcgcctggaacctggtggccagctactacgagcagctgccctacggcagatgcggcctgatgaccgcccaggagccctggagcggccactacgtggtggagagccccgtgtgggtgagcgcccacaccacccagttcacccagcccggctggtactacctgaagaccgtgggccacctggagaagggcggcagctacgtggccctgaccgacggcctgggcaacctgaccatcatcatcgagaccatgagccacaagcacagcaagtgcatcagacccttcctgccctacttcaacgtgagccagcagttcgccaccttcgtgctgaagggcagcttcagcgagatccccgagctgcaggtgtggtacaccaagctgggcaagaccagcgagagattcctgttcaagcagctggacagcctgtggctgctggacagcgacggcagcttcaccctgagcctgcacgaggacgagctgttcaccctgaccaccctgaccaccggcagaaagggcagctaccccctgccccccaagagccagcccttccccagcacctacaaggacgacttcaacgtggactaccccttcttcagcgaggcccccaacttcgccgaccagaccggcgtgttcgagtacttcaccaacatcgaggaccccggcgagcaccacttcaccctgagacaggtgctgaaccagagacccatcacctgggccgccgacgccagcaacaccatcagcatcatcggcgactacaactggaccaacctgaccatcaagtgcgacgtgtacatcgagacccccgacaccggcggcgtgttcatcgccggcagagtgaacaagggcggcatcctgatcagaagcgccagaggcatcttcttctggatcttcgccaacggcagctacagagtgaccggcgacctggccggctggatcatctacgccctgggcagagtggaggtgaccgccaagaagtggtacaccctgaccctgaccatcaagggccacttcaccagcggcatgctgaacgacaagagcctgtggaccgacatccccgtgaacttccccaagaacggctgggccgccatcggcacccacagcttcgagttcgcccagttcgacaacttcctggtggaggccaccagatag

SEQ ID NO: 79077 - protein, 659 aa, Artificial Sequence
  derived and/or modified sequence
MLGKSHGRATHGPLPLADLGIHLPCVKVLHQVTPEEKPAATSRLLVNYPEPYRSQILDYLFKPNFGASLHILKVEIGGDGQTTDGTEPSHMHYALDENYFRGYEWWLMKEAKKRNPNITLIGLPWSFPGWLGKGFDWPYVNLQLTAYYVVTWIVGAKRYHDLDIDYIGIWNERSYNANYIKILRKMLNYQGLQRVKIIASDNLWESISASMLLDAELFKVVDVIGAHYPGTHSAKDAKLTGKKLWSSEDFSTLNSDMGAGCWGRILNQNYINGYMTSTIAWNLVASYYEQLPYGRCGLMTAQEPWSGHYVVESPVWVSAHTTQFTQPGWYYLKTVGHLEKGGSYVALTDGLGNLTIIIETMSHKHSKCIRPFLPYFNVSQQFATFVLKGSFSEIPELQVWYTKLGKTSERFLFKQLDSLWLLDSDGSFTLSLHEDELFTLTTLTTGRKGSYPLPPKSQPFPSTYKDDFNVDYPFFSEAPNFADQTGVFEYFTNIEDPGEHHFTLRQVLNQRPITWAADASNTISIIGDYNWTNLTIKCDVYIETPDTGGVFIAGRVNKGGILIRSARGIFFWIFANGSYRVTGDLAGWIIYALGRVEVTAKKWYTLTLTIKGHFTSGMLNDKSLWTDIPVNFPKNGWAAIGTHSFEFAQFDNFLVEATR

SEQ ID NO: 79078 - DNA, 3878 bp, Artificial Sequence
  derived and/or modified sequence
gtgcttattaacttttctctcagtccctcactctgctgctcttctcgcctcatctcacataagggaaaactcaggctccaaaagcaaagtgattccaccaagatgacaatggaatcgggacctggtgtccaagcctggtcctcgcacgaggtagatactccctgagatgctggggaagagccatggtagggccactcatggccctcttcctttggcggaccttggaatccaccttccctgcgttaaagtgctccaccaggtgacgccggaagagaagccagcagcaacctcccgacttctagtaaattacccagagccctatcgttctcagatattggattatctctttaagccgaattttggtgcctctttgcatattttaaaagtggaaataggtggtgatgggcagacaacagacggcactgagccctcccacatgcattatgcactagatgagaattatttccgaggatacgagtggtggttgatgaaagaagctaagaagaggaatcccaatattacactcattgggttgccatggtcattccctggatggctgggaaaaggtttcgactggccttatgtcaatcttcagctgactgcctattatgtcgtgacctggattgtgggcgccaagcgttaccatgatttggacattgattatattggaatttggaatgagaggtcatataatgccaattatattaagatattaagaaaaatgctgaattatcaaggtctccagcgagtgaaaatcatagcaagtgataatctctgggagtccatctctgcatccatgctccttgatgccgaactcttcaaggtggttgatgttataggggctcattatcctggaacccattcagcaaaagatgcaaagttgactgggaagaagctttggtcttctgaagactttagcactttaaatagtgacatgggtgcaggctgctggggtcgcattttaaatcagaattatatcaatggctatatgacttccacaatcgcatggaatttagtggctagttactatgaacagttgccttatgggagatgcgggttgatgacggcccaggagccatggagtgggcactacgtggtagaatctcctgtctgggtatcagctcataccactcagtttactcaacctggctggtattacctgaagacagttggccatttagagaaaggaggaagctacgtagctctgactgatggcttagggaacctcaccatcatcattgaaaccatgagtcataaacattctaagtgcatacggccatttcttccttatttcaatgtgtcacaacaatttgccacctttgttcttaagggatcttttagtgaaataccagagctacaggtatggtataccaaacttggaaaaacatccgaaagatttctttttaagcagctggattctctatggctccttgacagcgatggcagtttcacactgagcctgcatgaagatgagctgttcacactcaccactctcaccactggtcgcaaaggcagctacccgcttcctccaaaatcccagcccttcccaagtacctataaggatgatttcaatgttgattacccattttttagtgaagctccaaactttgctgatcaaactggtgtatttgaatattttacaaatattgaagaccctggcgagcatcacttcacgctacgccaagttctcaaccagagacccattacgtgggctgccgatgcatccaacacaatcagtattataggagactacaactggaccaatctgactataaagtgtgatgtatacatagagacccctgacacaggaggtgtgttcattgcaggaagagtaaataaaggtggtattttgattagaagtgccagaggaattttcttctggatttttgcaaatggatcttacagggttacaggtgatttagctggatggattatatatgctttaggacgtgttgaagttacagcaaaaaaatggtatacactcacgttaactattaagggtcatttcacctctggcatgctgaatgacaagtctctgtggacagacatccctgtgaattttccaaagaatggctgggctgcaattggaactcactcctttgaatttgcacagtttgacaactttcttgtggaagccacacgctaatacttaacagggcatcatagaatactctggattttcttcccttctttttggttttggttcagagccaattcttgtttcattggaacagtatatgaggcttttgagactaaaaataatgaagagtaaaaggggagagaaatttatttttaatttaccctgtggaagattttattagaattaattccaaggggaaaactggtgaatctttaacattacctggtgtgttccctaacattcaaactgtgcattggccatacccttaggagtggtttgagtagtacagacctcgaagccttgctgctaacactgaggtagctctcttcatcttatttgcaagcggtcctgtagatggcagtaacttgatcatcactgagatgtatttatgcatgctgaccgtgtgtccaagtgagccagtgtcttcatcacaagatgatgctgccataatagaaagctgaagaacactagaagtagctttttgaaaaccacttcaacctgttatgctttatgctctaaaaagtatttttttattttcctttttaagatgatacttttgaaatgcaggatatgatgagtgggatgattttaaaaatgcctctttaataaactacctctaacactatttctgcagtaatagatattagcagattaattgggttatttgcattatttaatttttttgattccaagttttggtcttgtaaccactataactctctgtgaacgtttttccaggtggctggaagaaggaagaaaacctgatatagccaatgctgttgtagtcgtttcctcagcctcatctcactgtgctgtggtctgtcctcacatgtgcactggtaacagactcacacagctgatgaatgcttttctctccttatgtgtggaaggaggggagcacttagacatttgctaactcccagaattggatcatctcctaagatgtacttactttttaaagtccaaatatgtttatatttaaatatacgtgagcgtgttcatcatgttgtatgatttatactaagcattaatgtggctctatgtagcaaatcagttattcatgtaggtaaagtaaatctagaattatttataagaattactcattgaactaattctactatttaggaatttgtaagagtctaacataggcttagctacagtgaagttttgcattgcttttgaagacaagaagataagtgctagaataaataagattacagagaaaattttttgttaaaaccaagtgatttccagctgatgtatctaatattttttaaaacgaacattatagaggtgtaatttatttacaataaaatgttcctactttaaatatacaattcagtgagttttgataaattgatatacccatgtaaccaacactccagtcaagcttcagaatatttccatcaccccagaaggttctcttgtatacctgctcagtcagttcctttcactcccaattgttggcagccattgataggaattctatcactataggttagttttctttgttccagaacatcatgaaagcggcgtcatgtactgtgtattcttatgaatggtttctttccatcagcataatgatttgagatttgtccatgttgtgtgattcagtggtttgttccttcttatttctgaagagttttccattgtatgaatataccacaatttgtttcctccccaccagtttctgatactacaattaaaactgtctacatttacaaaaaaaaaaaaaaaa

SEQ ID NO: 79079 - DNA, 2547 bp, Artificial Sequence
  derived and/or modified sequence
gtgcttattaacttttctctcagtccctcactctgctgctcttctcgcctcatctcacataagggaaaactcaggctccaaaagcaaagtgattccaccaagatgacaatggaatcgggacctggtgtccaagcctggtcctcgcacgaggtagatactccctgagatgctggggaagagccatggtagggccactcatggccctcttcctttggcggaccttggaatccaccttccctgcgttaaagtgctccaccaggtgacgccggaagagaagccagcagcaacctcccgacttctagtaaattacccagagccctatcgttctcagatattggattatctctttaagccgaattttggtgcctctttgcatattttaaaagtggaaataggtggtgatgggcagacaacagacggcactgagccctcccacatgcattatgcactagatgagaattatttccgaggatacgagtggtggttgatgaaagaagctaagaagaggaatcccaatattacactcattgggttgccatggtcattccctggatggctgggaaaaggtttcgactggccttatgtcaatcttcagctgactgcctattatgtcgtgacctggattgtgggcgccaagcgttaccatgatttggacattgattatattggaatttggaatgagaggtcatataatgccaattatattaagatattaagaaaaatgctgaattatcaaggtctccagcgagtgaaaatcatagcaagtgataatctctgggagtccatctctgcatccatgctccttgatgccgaactcttcaaggtggttgatgttataggggctcattatcctggaacccattcagcaaaagatgcaaagttgactgggaagaagctttggtcttctgaagactttagcactttaaatagtgacatgggtgcaggctgctggggtcgcattttaaatcagaattatatcaatggctatatgacttccacaatcgcatggaatttagtggctagttactatgaacagttgccttatgggagatgcgggttgatgacggcccaggagccatggagtgggcactacgtggtagaatctcctgtctgggtatcagctcataccactcagtttactcaacctggctggtattacctgaagacagttggccatttagagaaaggaggaagctacgtagctctgactgatggcttagggaacctcaccatcatcattgaaaccatgagtcataaacattctaagtgcatacggccatttcttccttatttcaatgtgtcacaacaatttgccacctttgttcttaagggatcttttagtgaaataccagagctacaggtatggtataccaaacttggaaaaacatccgaaagatttctttttaagcagctggattctctatggctccttgacagcgatggcagtttcacactgagcctgcatgaagatgagctgttcacactcaccactctcaccactggtcgcaaaggcagctacccgcttcctccaaaatcccagcccttcccaagtacctataaggatgatttcaatgttgattacccattttttagtgaagctccaaactttgctgatcaaactggtgtatttgaatattttacaaatattgaagaccctggcgagcatcacttcacgctacgccaagttctcaaccagagacccattacatgggctgccgatgcatccaacacaatcagtattataggagactacaactggaccaatctgactataaagtgtgatgtatacatagagacccctgacacaggaggtgtgttcattgcaggaagagtaaataaaggtggtattttgattagaagtgccagaggaattttcttctggatttttgcaaatggatcttacagggttacaggtgatttagctggatggattatatatgctttaggacgtgttgaagttacagcaaaaaaatggtatacactcacgttaactattaagggtcatttcacctctggcatgctgaatgacaagtctctgtggacagacatccctgtgaattttccaaagaatggctgggctgcaattggaactcactcctttgaatttgcacagtttgacaactttcttgtggaagccacacgctaatacttaacagggcatcatagaatactctggattttcttcccttctttttggttttggttcagagccaattcttgtttcattggaacagtatatgaggcttttgagactaaaaataatgaagagtaaaaggggagagaaatttatttttaatttaccctgtggaagattttattagaattaattccaaggggaaaactggtgaatctttaacattacctggtgtgttccctaacattcaaactgtgcattggccatacccttaggagtggtttgagtagtacagacctcgaagccttgctgctaacactgaggtagctctcttcatcttatttgcaagcggtcctgtagatggcagtaacttgatcatcactgagatgtatttatgcatgctgaccgtgtgt

SEQ ID NO: 79080 - DNA, 1980 bp, Artificial Sequence
  derived and/or modified sequence
atgctcggcaaaagccatggtagagctactcatggccccttgccactggcagacctcgggattcatttgccttgtgttaaagtgttgcaccaagtgacgcctgaagaaaaacccgccgctacctcaagattgcttgtgaactacccggaaccttatcggagccaaattttggattacctcttcaaaccaaattttggagctagccttcacatcctgaaggtcgaaatcggcggagacgggcagaccacggatggcacagaaccctcccacatgcactatgcattggacgaaaattatttcagaggatacgagtggtggctcatgaaggaagcaaaaaaaagaaatcctaacatcactttgataggcctaccctggagtttcccggggtggttaggaaaaggattcgactggccatatgtgaacctacagttgacggcctattatgtcgtgacatggatcgtgggagcaaaacgctaccacgatctggatattgactacatagggatctggaacgagcggtcctacaacgcgaattacatcaaaatcctgcgaaagatgctgaattaccaggggctgcaaagggtaaagatcatcgcatcagataatctctgggagagcatcagtgcttccatgctgttggatgctgaactgttcaaggttgtcgatgtcatcggtgctcattatcccgggacacacagcgccaaagacgccaagctcactggcaagaagctgtggtcctctgaagatttctcaacactgaacagcgacatgggggctggctgttggggcaggattcttaaccagaattatattaatggctatatgacctcaaccattgcttggaatctcgttgctagctattatgagcagttgccttacgggagatgtggcctgatgaccgcacaggagccatggtcggggcactacgtcgtagaaagtcctgtgtgggtgtctgcccataccacacagtttactcaaccaggctggtattaccttaagacagtcggtcacctcgagaaaggtggaagctacgtggccctgacagatgggttaggtaatttgacgattattatcgaaacaatgtctcataagcattcaaaatgcattcgtccttttctcccatactttaacgtgtcacaacagtttgccacgtttgtcctcaagggaagtttctccgagattccagagctgcaggtctggtacacaaagcttgggaagaccagcgagcgttttttgtttaagcagcttgactctctgtggctcctcgatagcgacgggtcctttacactgtctttgcacgaggacgaactgttcaccctgaccacactgacgaccggccgaaaaggctcctacccgctcccgcccaaatcacagccatttccatccacatataaggatgacttcaacgtggactacccattcttttccgaggctccaaactttgccgaccagaccggggtctttgagtacttcactaacatagaggaccccggggagcatcatttcacgttacgacaggtgctcaaccagcgcccaatcacttgggccgcagatgcctcaaatacaatctcgatcattggagactataattggacgaaccttaccattaaatgtgacgtgtacattgagaccccagacactggcggagtgttcattgcgggaagagttaacaaaggagggatcctgatccggtcggcgagaggcatctttttctggattttcgccaacgggagttatcgggtgactggcgatctggctggatggattatctatgccctgggccgcgtcgaagttacagccaaaaaatggtataccctaactctcactatcaagggtcacttcaccagtggtatgctgaacgacaagtccttatggaccgatatcccggtgaacttccccaaaaacggctgggcggctatcggaacccattcctttgagtttgcccaattcgacaattttctggtggaggccactcgctag

SEQ ID NO: 79081 - DNA, 1980 bp, Artificial Sequence
  derived and/or modified sequence
atgctgggcaagagccacggccgggccacccacggccccctgcccctggccgacctgggcatccacctgccctgtgtgaaggtgctgcaccaggtgaccccagaggagaagccagctgccaccagccggctgctggtgaactacccagagccctaccgcagccagatcctggactacctgttcaagcccaactttggagccagcctgcacatcctgaaggtggagattggaggagatggccagaccacagatggaacagagcccagccacatgcactacgccctggatgagaactacttccggggctatgagtggtggctgatgaaggaggccaagaagaggaaccccaacatcaccctgattggcctgccctggagcttccctggctggctgggcaaaggatttgactggccctacgtgaacctgcagctgacagcctactacgtggtgacctggatcgtgggcgccaagcgctaccatgacctggacatcgactacatcggcatctggaatgaaagaagctacaatgccaactacatcaagatcctgaggaagatgctgaactaccagggcctgcagagggtgaagatcatcgccagtgacaacctgtgggagagcatcagcgcctccatgctgctggatgctgagctgttcaaggtggtggatgtgattggagcccactacccaggcacccacagcgccaaggatgccaagctgaccgggaagaagctgtggagcagcgaggacttcagcaccctgaacagcgacatgggcgccggctgctggggccgcatcctgaaccagaactacatcaatggctacatgaccagcaccatcgcctggaacctggtggccagctactatgagcagctgccctacggccgctgtggcctgatgacagcccaggagccctggagcggccactacgtggtggagagccctgtgtgggtgtctgcccacaccacccagttcacccagcccggctggtactacctgaagacagtgggccacctggagaagggcggcagctatgtggccctgacagatggcctgggcaacctgaccatcatcatcgagaccatgagccacaagcacagcaagtgcatccggcccttcctgccctacttcaacgtgtcccagcagtttgccacctttgtgctgaagggcagcttcagcgagatccctgagctgcaggtgtggtacaccaagctgggcaagaccagcgagcgcttcctgttcaagcagctggacagcctgtggctgctggacagtgatggcagcttcaccctgagcctgcatgaagatgagctgttcaccctgaccaccctgaccactggaaggaagggcagctaccccctgccccccaagagccagcccttccccagcacctacaaggatgacttcaacgtggactaccccttcttcagcgaggcccccaactttgctgaccagacaggagtgtttgagtacttcaccaacattgaagatcctggagagcaccacttcaccctgcggcaggtgctgaaccagaggcccatcacctgggccgcagatgccagcaacaccatcagcatcatcggggactacaactggaccaacctgaccatcaagtgtgatgtgtacatcgagaccccagacacaggaggagtcttcatcgccggccgggtgaacaagggcggcatcctgatccgcagcgcccggggcatcttcttctggatctttgccaacggcagctacagagtgactggagacctggccggctggatcatctatgccctgggccgggtggaggtgacagccaagaagtggtacaccctgaccctgaccatcaagggccacttcaccagcggcatgctgaatgacaagagcctgtggacagacatccctgtgaacttccccaagaatggctgggccgccatcggcacccacagctttgaatttgcccagtttgacaacttcctggtggaggccaccaggtag

SEQ ID NO: 79082 - DNA, 1980 bp, Artificial Sequence
  derived and/or modified sequence
atgctgggcaagagccacggccgggccacccacggccccctgcccttggcggatctgggtatccacctgccctgcgtcaaagtgttacatcaggttactcccgaagaaaaaccagctgccacctcgcggctgctcgtgaactaccccgaaccttatcggagtcagattctggattacctctttaaacccaacttcggcgccagtttacacattctgaaagtggaaattggcggggatggacagacaactgatgggacagaaccgtctcacatgcactacgctctggacgagaactactttcgaggatatgagtggtggctgatgaaggaagcgaagaagagaaacccgaatatcactctcattggactgccatggagctttcctggatggctgggtaaaggattcgattggccgtacgtcaatctgcagctgactgcctattacgtggtgacatggatcgtcggcgccaagcggtatcacgatctggatatcgactacattgggatctggaacgaaaggagctataacgcaaactacataaagatcctgaggaagatgctaaactaccagggcctccaacgcgtgaagatcatcgcatcagacaacctctgggagagcatttcagcctccatgctgctcgatgccgagctgttcaaggtggtggacgtaattggtgcccattaccccggcactcacagcgccaaggacgcgaaactaactgggaaaaagctgtggtcctccgaagattttagtactctcaacagcgacatgggagccgggtgttggggtcgaatactgaaccagaactacattaatggctatatgacctctacaatcgcctggaacctcgtcgcttcttactacgagcagctcccatacggccgctgcggcctcatgacagcgcaagagccttggtcgggacattatgttgtggagtccccagtgtgggtgtctgcccacaccactcagttcacgcagccaggctggtactatttaaagacagtcggccacctcgagaagggagggtcttatgtcgcgctcacagatgggctcggtaatctaaccattataattgagactatgagtcataagcacagcaaatgcatacgtccttttctgccctattttaacgtttcccaacaattcgccacgttcgttcttaagggcagcttttccgaaattcccgaactgcaggtgtggtataccaagctgggcaaaacctccgagcggttcctttttaagcagttagacagcctttggttgcttgattccgatggctcttttacgctctctctgcacgaggatgagctgttcacgctgactactttgacaacgggcaggaagggcagttaccctctgccgcctaagtcacagccctttccttccacctataaggatgacttcaacgttgattatccattcttcagtgaagccccaaatttcgcagaccagactggcgtctttgaatatttcaccaacatcgaggatccaggtgaacatcacttcaccctccggcaggttttgaaccagaggcccatcacctgggctgctgacgcgagtaacacaatctctattatcggcgattataactggactaacttgaccatcaagtgtgatgtgtatattgagactccagataccggtggcgtcttcatagccggccgggtgaacaaaggtggcatcttgattcggagcgctcgcgggatctttttttggatttttgccaacgggtcatatagagtcaccggggatttggctggctggatcatctatgctctgggtagagtcgaggtgactgccaagaaatggtacactctgacattgactattaaaggccactttacaagcggtatgctgaatgacaaaagcctctggaccgacattccagtaaatttccccaagaacggttgggcggcaattgggacgcatagttttgagttcgcacagttcgataattttcttgtagaggctacgcgctag

SEQ ID NO: 79083 - DNA, 1980 bp, Artificial Sequence
  derived and/or modified sequence
atgctgggcaagtcacacggcagagccacccatggacctcttccccttgcagatctgggtattcatctcccatgcgtaaaggtgcttcatcaggtgaccccagaagaaaagccggctgctactagtcgcttgctcgtgaactatcctgagccctaccgtagtcaaattctagattacctgtttaaacccaactttggagcgtccctccacatcttgaaagttgaaatagggggagacggccagacaacagatggcacagaaccatcccacatgcactatgccttagacgagaactattttcggggatatgaatggtggctgatgaaagaggctaaaaaacggaaccctaatattacacttattgggttgccatggtccttcccaggttggttgggcaaaggattcgattggccttacgtgaacttgcagcttactgcctactatgtcgtcacctggattgtgggtgctaagcgctatcatgatctcgatattgactatatcggcatatggaacgagcgctcttataacgcaaattatatcaagatacttcggaagatgctgaactaccagggcttgcagcgcgtcaagattatcgctagcgataacctgtgggaatctatatccgcaagcatgctgctggatgcagaattatttaaagtcgttgacgtgattggcgctcattaccccggaactcacagtgcaaaggacgcaaaactgacgggtaagaagctatggtctagcgaagacttctccaccttaaatagcgacatgggagccggttgctgggggcgtatattaaatcaaaattatataaatggatatatgacctcaaccatagcctggaatttagtcgcgtcctattatgagcaactgccctacggtcggtgtgggttgatgaccgcccaggaaccttggtcgggtcactacgttgtagaatcgcccgtctgggttagcgcacacacaactcaatttacacaaccgggatggtactatctgaagacagtgggacacctggagaagggtggatcatacgtggctctgaccgatgggctaggaaatctaactattatcattgagacaatgagtcataaacacagcaaatgcataagacccttcctgccctatttcaacgtgtctcaacagttcgccacatttgtactgaaagggagcttttctgaaatccctgagcttcaagtctggtacacgaaactcggtaagacctcggaaaggttcctgtttaaacagctggactccctctggctgctcgattcagatgggtcgttcactctcagcctgcacgaggatgagttgttcactctgacaactctgactaccggcagaaaaggatcttatccacttcctcccaaaagtcaaccgtttcctagcacctacaaagacgatttcaatgtggactaccctttcttctctgaggccccaaacttcgccgatcagacgggcgtcttcgaatacttcacaaatatcgaagaccccggtgaacaccactttaccctgaggcaggtgctgaaccagcgtccaataacttgggcagctgatgcaagcaacacaatcagcatcattggagattataactggacgaacctcacaatcaagtgcgacgtctatattgaaaccccagatactggcggtgtttttatcgccggtcgtgtcaataagggaggcatcctgatccgaagcgctcgtggcatcttcttctggatttttgccaatgggtcatacagggtgactggggatcttgctgggtggattatttacgctctgggcagagtcgaagtgacagcaaagaagtggtatactctgactctcaccatcaagggacatttcacatctggcatgctgaacgacaaaagtctgtggacagatattcctgtcaattttcccaagaatggctgggccgcaatcgggacccactccttcgaattcgctcagttcgataatttcctggtcgaggcaacgcgttag

SEQ ID NO: 79084 - DNA, 1980 bp, Artificial Sequence
  derived and/or modified sequence
atgctgggcaagagccacggcagagccacccacggccccctgcccctggccgacctgggcatccacctgccctgcgtgaaggtgctgcaccaggtgacccccgaggagaagcccgccgccaccagcagactgctggtgaactaccccgagccctacagaagccagatcctggactacctgttcaagcccaacttcggcgccagcctgcacatcctgaaggtggagatcggcggcgacggccagaccaccgacggcaccgagcccagccacatgcactacgccctggacgagaactacttcagaggctacgagtggtggctgatgaaggaggccaagaagagaaaccccaacatcaccctgatcggcctgccctggagcttccccggctggctgggcaagggcttcgactggccctacgtgaacctgcagctgaccgcctactacgtggtgacctggatcgtgggcgccaagagataccacgacctggacatcgactacatcggcatctggaacgagagaagctacaacgccaactacatcaagatcctgagaaagatgctgaactaccagggcctgcagagagtgaagatcatcgccagcgacaacctgtgggagagcatcagcgccagcatgctgctggacgccgagctgttcaaggtggtggacgtgatcggcgcccactaccccggcacccacagcgccaaggacgccaagctgaccggcaagaagctgtggagcagcgaggacttcagcaccctgaacagcgacatgggcgccggctgctggggcagaatcctgaaccagaactacatcaacggctacatgaccagcaccatcgcctggaacctggtggccagctactacgagcagctgccctacggcagatgcggcctgatgaccgcccaggagccctggagcggccactacgtggtggagagccccgtgtgggtgagcgcccacaccacccagttcacccagcccggctggtactacctgaagaccgtgggccacctggagaagggcggcagctacgtggccctgaccgacggcctgggcaacctgaccatcatcatcgagaccatgagccacaagcacagcaagtgcatcagacccttcctgccctacttcaacgtgagccagcagttcgccaccttcgtgctgaagggcagcttcagcgagatccccgagctgcaggtgtggtacaccaagctgggcaagaccagcgagagattcctgttcaagcagctggacagcctgtggctgctggacagcgacggcagcttcaccctgagcctgcacgaggacgagctgttcaccctgaccaccctgaccaccggcagaaagggcagctaccccctgccccccaagagccagcccttccccagcacctacaaggacgacttcaacgtggactaccccttcttcagcgaggcccccaacttcgccgaccagaccggcgtgttcgagtacttcaccaacatcgaggaccccggcgagcaccacttcaccctgagacaggtgctgaaccagagacccatcacctgggccgccgacgccagcaacaccatcagcatcatcggcgactacaactggaccaacctgaccatcaagtgcgacgtgtacatcgagacccccgacaccggcggcgtgttcatcgccggcagagtgaacaagggcggcatcctgatcagaagcgccagaggcatcttcttctggatcttcgccaacggcagctacagagtgaccggcgacctggccggctggatcatctacgccctgggcagagtggaggtgaccgccaagaagtggtacaccctgaccctgaccatcaagggccacttcaccagcggcatgctgaacgacaagagcctgtggaccgacatccccgtgaacttccccaagaacggctgggccgccatcggcacccacagcttcgagttcgcccagttcgacaacttcctggtggaggccaccagatag

SEQ ID NO: 79085 - DNA, 2064 bp, Artificial Sequence
  derived and/or modified sequence
atgctggagaactacgagaacctggccagcgtgggccaccacctgttccagcccagcgtgatctactggctggagcaggaggaggagctgagagccggcagaagagccgtgctgcaggagtggagactgaagaccaagggccccgccctgagacaggacagaagctggttcagagccagcaacgagacccagaccgccagaagccacaacggcggccagctgtgcgacagaacccagtgcggcgaggccttcagcgagcacagcggcctgagcacccacgtgagaacccagaacaccggcgacagctgcgtgagcaaccactacgagagagacttcttcatcccctgccagaagaccctgttcaagatcggcgagcagttcagcgtgctgggccagtgcggcaaggccttcagcagcacccccaacgtggtgagccagcaggcctgcaccagagacagaagcctggactacagcagctgcggcgaggtgttcctgaaccagagctacctgcaggccagagccggcagccacaacggcgaggagacctggaagtggaagccctgcggcaaggccctgacccacagcatgggctgcgccacccccgtggagatgcacgccgtgagaaacccccacgtgtgcagagagtgcggcaaggccttcagatacaccgcctacctgaccggcagagtgcaggtgcaccccggcgagaagccctgcgagctggaggagtgcggcaaggccagccccgtgagcagcagcctgacccagcacgtgagaatccacgccgccgagaagccctgcgagtgcaaggagtgcggcaaggccttcaccggcctgagcggcctgagcaagcacgtgcagaccgaccccggccagaagccctacgagtgcaaggactgcggcaaggcctgcggcggcttctacctgctgaacgagcacggcaagacccacaccagagagaagcccttcgcctgcgtggtgtgcggcaagtacttcagaaacagcagctgcctgaacaaccacgtgagaatccacaccggcatcaagccctacacctgcagctactgcggcaaggccttcaccgtgagatgcggcctgaccagacacgtgagaacccacaccggcgagaagccctacacctgcaaggactgcggcaaggccttctgcaccagcagcggcctgaccgagcacgtgagaacccacaccggcgagaagccctacgagtgcaaggactgcggcaagagcttcaccgtgagcagcagcctgaccgagcacgccagaatccacaccggcgagaagccctacgagtgcaagcagtgcggcaaggccttcaccggcagaagcggcctgaccaagcacatgagaacccacaccggcgagaagccctacgagtgcaaggactgcggcaaggcctacaacagagtgtacctgctgaacgagcacgtgaagacccacaccgaggagaagcccttcatctgcaccgtgtgcagaaagagcttcagaaacagcagctgcctgaacaagcacatccagatccacaccggcatcaagccctacgagtgcaaggactgcggcaagaccttcaccgtgagcagcagcctgaccgagcacatcagaacccacaccggcgagaagccctacgagtgcaaggtgtgcggcaaggccttcaccaccagcagccacctgatcgtgcacatcagaacccacaccggcgagaagccctacatctgcaaggagtgcggcaaggccttcgccagcagcagccacctgatcgagcacagaagaacccacaccggcgagaagccctacatctgcaacgagtgcggcaaggccttcagagccagcagccacctgcacaagcacggcagaatccacaccggccagaagccctacaagtgcaaggagtgcggcaaggcctacaacagattctacctgctgaaggagcacctgaagacctacaccgaggagcaggtgttcgtgtgcaaggactgcggcaagagcttcaagaacagcagctgcctgaaccaccacacccagatccacaccgacgagaagcccttctag

SEQ ID NO: 79086 - DNA, 2064 bp, Artificial Sequence
  derived and/or modified sequence
atgctcgagaattacgagaacctggcaagcgtgggccaccacctctttcagccttccgtgatttactggcttgagcaagaagaagagctgagagcaggccggcgagccgttctgcaagagtggaggctgaaaaccaagggccccgctctcagacaggataggtcatggtttcgggcatccaacgaaacacaaacagctaggtctcacaatgggggacagctgtgtgatcgtacgcagtgcggtgaagccttcagcgagcatagtggtttatccacacatgttcggacccagaatactggcgatagttgtgtctctaaccactacgaaagagacttttttatcccttgccagaaaaccctttttaaaatcggcgagcaattctccgtgctggggcagtgcgggaaggcctttagcagtacacctaatgtagtttcgcaacaggcctgcacacgggatcgaagtttggattactcatcttgcggtgaggttttccttaatcagtcttacctgcaggccagagcaggctcccacaacggagaggagacatggaagtggaagccttgtggaaaggccctcacacattccatgggttgcgctactccggttgagatgcatgctgtgagaaatccccacgtctgcagggagtgcggcaaggcctttagatatacagcttaccttaccggaagagttcaggtacatccaggcgagaagccatgcgagctggaagaatgtggcaaagcttctcctgtctccagttctctcactcagcacgtgcgaatccatgcagccgagaagccatgcgaatgtaaagaatgtgggaaagcattcaccggattaagcggactgtcaaagcacgtgcagactgatccaggccagaagccctatgagtgcaaggactgtggaaaggcttgtggtggcttttatctgctgaacgagcacggcaagacccacactagagagaaacccttcgcttgcgtagtttgcggtaaatatttccgtaattcctcctgtttgaacaaccacgtgaggattcatactgggattaagccgtacacttgtagctactgtgggaaggcttttacggtccgttgcggactcacgcggcatgtgcgaactcacaccggggaaaagccgtacacatgcaaggactgtggcaaggccttctgtaccagcagtggactgacagagcatgttagaactcacacgggtgagaagccctacgaatgtaaagattgtggaaagtcattcactgtttcctcctccctgacggaacacgcacgaattcacacgggcgaaaagccatacgaatgcaaacagtgcggcaaggcttttacgggacgctcgggactcacaaagcacatgcgtacccatacaggcgagaaaccctatgagtgcaaagattgcggaaaggcatacaaccgggtgtatctgctcaatgagcacgtgaaaacacacaccgaagaaaaacccttcatctgcaccgtgtgccgaaagagttttcgcaactcgagttgccttaacaagcacatccagattcatactggcatcaagccctacgagtgcaaggactgtggcaaaacttttactgtctcatcatccctcaccgagcatattcgtacgcacactggcgaaaagccttacgaatgtaaagtgtgcgggaaggcctttactacaagtagccacttgatcgtgcacatacggacccatacaggtgaaaaaccttacatctgcaaagagtgtggaaaggccttcgcctcatccagtcatctgatcgagcacagacgcacccatactggtgagaagccttatatatgtaacgagtgtggcaaggccttccgggccagttcccacctacacaaacatggacgaatccacacaggccagaagccatacaaatgtaaggagtgtggcaaagcatataaccggttttatctgctcaaggaacatctgaaaacctataccgaggagcaagtattcgtgtgtaaggactgtggaaagtcattcaagaactcctcatgtctcaaccaccacactcagatccacaccgacgagaaacctttttag

SEQ ID NO: 79087 - DNA, 2064 bp, Artificial Sequence
  derived and/or modified sequence
atgctggagaactatgagaacctggcctctgtgggccaccacctgttccagcccagcgtcatctactggctggagcaggaggaggagctgcgggccggccggcgggctgtgctgcaggagtggaggctgaagaccaagggccctgccctgcggcaggaccgctcctggttccgggccagcaatgagacccagacagcccggagccacaacggcggccagctgtgtgacaggacccagtgtggggaggccttcagcgagcacagcggcctgagcacccacgtgaggacccagaacacaggagacagctgtgtgagcaaccactatgaaagagacttcttcatcccctgccagaagaccctcttcaagattggagagcagttctctgtgctgggccagtgtgggaaggccttcagcagcacccccaacgtggtgtcccagcaggcctgcacccgggacaggagcctggactacagcagctgtggggaggtgttcctgaaccagagctacctgcaggcccgggccggcagccacaacggggaggagacctggaagtggaagccctgtgggaaggccctgacccacagcatgggctgtgccacccctgtggagatgcatgctgtgaggaacccccacgtgtgcagagaatgtgggaaggccttccgctacacagcctacctgaccggccgggtgcaggtgcaccctggagagaagccctgtgagctggaggagtgtgggaaggccagccctgtgagcagcagcctgacccagcacgtgcgcatccacgccgctgagaagccctgtgagtgcaaggaatgtgggaaggccttcaccggcctgagcggcctgagcaagcacgtgcagacagaccccggccagaagccctatgagtgcaaggactgtgggaaggcctgtggcggcttctacctgctgaatgaacatggcaagacccacacccgggagaagccctttgcctgtgtggtgtgtgggaagtacttcaggaacagcagctgcctgaacaaccacgtgcgcatccacacaggcatcaagccctacacctgcagctactgtgggaaggccttcaccgtgcgctgtggcctgaccaggcatgtgaggacccacactggagagaagccctacacctgcaaggactgtgggaaggccttctgcaccagcagcggcctgacagaacatgtgaggacccacactggagagaagccctatgagtgcaaggactgtgggaagagcttcaccgtgagcagcagcctgacagaacatgcccgcatccacactggagagaagccctatgagtgcaagcagtgtgggaaggccttcaccggccgcagcggcctgaccaagcacatgaggacccacactggagagaagccctatgagtgcaaggactgtgggaaggcctacaacagagtgtacctgctgaatgaacatgtgaagacccacacagaggagaagcccttcatctgcaccgtgtgcaggaagagcttcaggaacagcagctgcctgaacaagcacatccagatccacacaggcatcaagccctatgagtgcaaggactgtgggaagaccttcaccgtgagcagcagcctgacagagcacatccgcacccacactggagagaagccctatgagtgcaaggtgtgtgggaaggccttcaccaccagcagccacctgattgtgcacatccgcacccacactggagagaagccctacatctgcaaggaatgtgggaaggcctttgccagcagcagccacctgattgagcacaggaggacccacactggagagaagccctacatctgcaatgaatgtgggaaggccttccgggccagcagccacctgcacaagcacggccgcatccacacaggccagaagccctacaagtgcaaggaatgtgggaaggcctacaaccgcttctacctgctgaaggagcacctgaagacctacacagaggagcaggtgtttgtgtgcaaggactgtgggaagagcttcaagaacagcagctgcctgaaccaccacacccagatccacacagatgagaagcccttctag

SEQ ID NO: 79088 - DNA, 2064 bp, Artificial Sequence
  derived and/or modified sequence
atgctggagaactacgagaacctggccagcgtgggccaccacctgttccagcccagtgttatctattggctcgaacaagaagaagaattacgggcagggcgacgcgcggtgcttcaggagtggcggctgaaaacaaaaggacctgcccttcggcaggatcggagctggttccgggcatcaaatgagacacagactgcgcgaagccacaacggcggccaactctgtgacaggacccagtgtggggaggcgttctcagagcactccgggctgtccactcatgtgcgaactcaaaatacaggggattcctgcgtatctaaccattatgaacgggacttttttatcccatgccagaagacgctgttcaagattggagagcagttttctgtcttggggcagtgtggaaaggccttttcatccactccaaatgtggttagtcagcaggcctgcaccagagacagaagcctggattacagcagctgtggggaagtcttcctgaaccagagttatctacaagctagagctggttctcacaatggggaagagacctggaaatggaaaccctgcggcaaagcgctcactcattccatggggtgcgcaacgcctgttgagatgcacgcagtgaggaacccccatgtttgtcgtgagtgtgggaaggctttccgctatactgcatatcttaccgggagagtccaggttcatcccggcgaaaagccctgtgaacttgaggaatgcggcaaggcaagtcctgtcagtagttcactcactcaacatgttcgaatccatgccgctgaaaagccgtgtgaatgcaaggagtgtgggaaagcatttaccgggctgagcggactaagtaagcacgtccaaacagatcctggtcaaaaaccctatgaatgcaaagattgtggtaaagcctgtggcgggttttatcttttgaatgagcacggaaagactcatactcgcgagaaaccattcgcatgcgtggtttgcggtaagtactttcgaaattcttcatgccttaataatcatgttcgtatacacaccggcattaaaccctacacatgctcctattgtgggaaagcctttaccgtacgctgtggccttacccggcatgtgcgcacccacactggcgaaaagccctatacatgtaaagactgcggaaaggcattctgtacatcgagtggcctgactgaacacgtacggacccatacaggtgaaaaaccttatgaatgtaaagactgtggcaagagctttacagtgagttcctcgctgactgaacacgcaaggattcacaccggagaaaagccatacgaatgcaagcagtgtggtaaggcttttaccggaagatccggactgacaaagcatatgcgcactcacacaggagaaaagccttacgaatgcaaagattgcggtaaggcgtataaccgggtgtatctattaaatgaacatgtcaagacgcacactgaggagaagccgttcatttgtaccgtctgcaggaagtccttcagaaactctagttgtctgaacaagcacattcagattcatacaggaatcaagccttatgagtgtaaagattgtggaaagaccttcaccgtcagctcatcacttacagagcatatccggacacacacaggagaaaagccttacgaatgcaaggtttgtggtaaagcattcactacctcctcccatttaatcgtacacatcagaacccataccggcgaaaagccctatatctgcaaagagtgtggaaaggccttcgcaagttcaagccatctgatcgaacaccgcagaacacatacaggtgaaaaaccctatatttgcaacgaatgcgggaaggctttcagagcttccagccatttgcacaagcatggccgtatccatacgggacagaaaccctacaagtgcaaagagtgtgggaaagcttacaaccgcttctatctgctcaaagaacatctgaagacctatacagaggagcaagtgttcgtctgcaaggattgcggtaagtctttcaaaaacagctcttgcctgaaccatcatacgcagattcatactgacgagaaacccttctag

SEQ ID NO: 79089 - DNA, 2064 bp, Artificial Sequence
  derived and/or modified sequence
atgctagaaaactatgagaatctcgcgtcggtcggacaccacttgtttcagcctagcgtgatttactggcttgaacaggaagaagagcttagggccggacgccgtgccgtgttacaggaatggaggctcaagacgaagggcccagccctacgtcaagatcgatcatggtttagggccagcaacgagacgcagacagcgagatcccacaatggaggtcaattgtgtgatagaacccagtgtggagaggccttttctgagcactcaggactgtctacccatgtgcggacacagaataccggagactcatgcgtaagcaatcactatgagcgcgacttcttcattccctgtcagaagaccctgtttaaaatcggcgaacagtttagcgtcctcggccagtgcggcaaggcgttcagcagcaccccaaatgtcgtgagtcagcaggcatgtactagggaccggtccctcgactacagctcctgcggagaggttttcctgaaccaatcatatctgcaggcgcgtgcagggagccacaacggcgaggagacatggaagtggaaaccctgtgggaaggctctaactcactccatgggctgtgcgactccagtcgagatgcatgctgtgcgcaatcctcatgtttgccgagaatgcggtaaagcattccgctacacggcctacctgacaggccgtgtacaggtgcaccccggtgaaaaaccttgcgagttggaagagtgcgggaaggcatcacctgtgagctcaagcctgacacagcacgtgcgtattcacgcagccgagaagccctgtgaatgtaaagaatgtggcaaggcattcaccggacttagcgggttgtccaaacatgtgcagaccgatcctggccagaaaccttatgaatgcaaagactgtgggaaagcctgcggaggattttacctcctcaacgagcatggaaaaacacatactcgagagaagccttttgcttgcgtggtctgcggcaaatattttagaaacagcagctgtctcaataaccatgtgcgaattcatacaggcattaaaccctacacttgctcctattgtgggaaagcattcactgtccggtgtgggttgacaagacacgttcggacgcatactggagagaagccatacacttgcaaggactgcggtaaagctttttgcacctcaagcggtcttaccgagcacgtacggacgcatactggggaaaagccctatgagtgcaaggattgtggcaagtcgtttacagtgagtagcagccttaccgagcatgcacggattcatacaggggagaaaccatacgagtgcaagcaatgtggaaaagccttcactggaagaagtggcctcaccaaacatatgcggacacatacgggagagaagccttacgaatgtaaggattgtggcaaagcttacaaccgggtgtatctgctgaatgagcatgtgaaaacacatactgaggaaaagccattcatctgcacggtgtgcagaaagagcttcagaaattctagttgcctgaacaaacacatacagatccacacgggaatcaaaccgtatgaatgcaaggactgtgggaaaacatttacggtgagctcgtcgttgacagagcatataaggacccataccggagagaaaccatacgagtgtaaagtctgcgggaaagcctttactacttcttctcacctcattgtgcacatacggacccatacgggcgagaagccctacatctgcaaggagtgtggaaaggcttttgcttcgtctagccacttaatcgagcataggagaacccacactggcgaaaaaccctatatttgtaatgagtgcggtaaggcctttcgggctagttcacacttgcataagcacggacggatccataccgggcaaaagccttacaaatgtaaggagtgcgggaaggcctacaatcgattctatctcctgaaggaacatctgaagacctataccgaggagcaggttttcgtgtgcaaggactgcggcaagtcttttaagaattccagctgtctgaaccatcacacccagatccacaccgacgagaagccattctag

SEQ ID NO: 79090 - protein, 1068 aa, Artificial Sequence
  derived and/or modified sequence
MAPRKRSHHGLGFLCCFGGSDIPEINLRDNHPLQFMEFSSPIPNAEELNIRFAELVDELDLTDKNREAMFALPPEKKWQIYCSKKKEQEDPNKLATSWPDYYIDRINSMAAMQSLYAFDEEETEMRNQVVEDLKTALRTQPMRFVTRFIELEGLTCLLNFLRSMDHATCESRIHTSLIGCIKALMNNSQGRAHVLAQPEAISTIAQSLRTENSKTKVAVLEILGAVCLVPGGHKKVLQAMLHYQVYAAERTRFQTLLNELDRSLGRYRDEVNLKTAIMSFINAVLNAGAGEDNLEFRLHLRYEFLMLGIQPVIDKLRQHENAILDKHLDFFEMVRNEDDLELARRFDMVHIDTKSASQMFELIHKKLKYTEAYPCLLSVLHHCLQMPYKRNGGYFQQWQLLDRILQQIVLQDERGVDPDLAPLENFNVKNIVNMLINENEVKQWRDQAEKFRKEHMELVSRLERKERECETKTLEKEEMMRTLNKMKDKLARESQELRQARGQVAELVAQLSELSTGPVSSPPPPGGPLTLSSSMTTNDLPPPPPPLPFACCPPPPPPPLPPGGPPTPPGAPPCLGMGLPLPQDPYPSSDVPLRKKRVPQPSHPLKSFNWVKLNEERVPGTVWNEIDDMQVFRILDLEDFEKMFSAYQRHQKELGSTEDIYLASRKVKELSVIDGRRAQNCIILLSKLKLSNEEIRQAILKMDEQEDLAKDMLEQLLKFIPEKSDIDLLEEHKHEIERMARADRFLYEMSRIDHYQQRLQALFFKKKFQERLAEAKPKVEAILLASRELVRSKRLRQMLEVILAIGNFMNKGQRGGAYGFRVASLNKIADTKSSIDRNISLLHYLIMILEKHFPDILNMPSELQHLPEAAKVNLAELEKEVGNLRRGLRAVEVELEYQRRQVREPSDKFVPVMSDFITVSSFSFSELEDQLNEARDKFAKALMHFGEHDSKMQPDEFFGIFDTFLQAFSEARQDLEAMRRRKEEEERRARMEAMLKEQRERERWQRQRKVLAAGSSLEEGGEFDDLVSALRSGEVFDKDLCKLKRSRKRSGSQALEVTRERAINRLNY

SEQ ID NO: 79091 - DNA, 3207 bp, Artificial Sequence
  derived and/or modified sequence
atggctcctcggaaacgttcccatcatggcctaggattcctgtgctgctttggagggagtgacatacctgagattaacctgcgggacaaccacccgctgcagtttatggagttcagctctccaatccccaatgccgaggagctgaacattagattcgctgagctcgtggacgagctggacctgacggataaaaaccgagaggccatgtttgcgttgccccctgagaaaaaatggcaaatatattgctccaagaagaaggaacaggaggaccccaacaagttggctaccagctggcccgattattacatcgaccggattaattcaatggcagccatgcagagcctatatgcttttgatgaagaagagaccgaaatgcgaaaccaagtggtcgaagacctaaaaaccgcgctgagaactcaaccgatgcggttcgtgacacggtttatcgagttggagggtttaacctgcctcctgaactttctgcgaagcatggaccatgcaacctgtgagtcacggatccacacctctctgatcggctgcataaaagcgttgatgaacaattctcagggacgtgcccacgtgttggcacagcccgaagccattagcaccatagctcaaagtctccgaaccgagaacagcaagactaaggtggctgtcctcgaaattctgggagcagtttgccttgtgcctggcggacataaaaaggttctccaggccatgctccactatcaagtgtacgctgctgagcggactagattccaaactttactgaacgagcttgaccgaagccttggtcgatatagagacgaagtgaacctcaagacagccattatgtcattcattaacgcagttttgaatgctggcgcaggtgaggacaatctcgaatttagactgcatctgaggtacgaattcctaatgttgggcatccagcctgtgatagataagctcaggcagcacgagaatgctatactggataaacaccttgactttttcgaaatggtgaggaatgaagatgacctcgagttagccaggcggtttgacatggtccatattgatactaagagtgcctctcagatgtttgaactgattcataagaaactgaaatacaccgaggcttatccttgcctgctaagcgttttgcatcattgcttgcagatgccttataaacgaaatggaggctactttcagcagtggcagctgctggaccgaatccttcagcagatcgtactacaggacgaacggggcgtggaccccgatttggctcccctggagaattttaatgtgaagaatatcgtgaacatgctcatcaacgaaaatgaggtgaagcagtggcgggaccaggcggaaaagttcagaaaggagcacatggagctggtttcaagacttgagagaaaagagagagagtgtgaaaccaaaacattagagaaagaggagatgatgaggactctgaacaagatgaaagacaaattggcgcgggagagtcaagagctccgacaggcccgcggccaggtggcggaactcgtggcacagctaagtgaactgagcacaggccctgtgagttctcccccccctcccgggggaccacttaccctctcaagctccatgactaccaacgacctaccccccccacctccacctctgccttttgcttgttgtccccctccccccccgccacccctaccacctggaggtccaccaacaccgccaggtgcacctccttgcctggggatggggctccctctgccgcaggatccttacccctccagtgacgtgcctttgcggaaaaaacgcgtgccccagccctcacacccattgaaaagtttcaactgggtgaagctgaacgaggaacgcgtcccaggcactgtgtggaatgaaattgacgacatgcaggtcttcagaattctggatctagaagatttcgaaaagatgttctccgcgtatcagaggcatcagaaggagctcgggtcaacggaggacatttacttagccagtcgcaaagtcaaggagctgagtgttatcgatgggagacgtgcccaaaattgtatcatcctattaagcaaactgaaactgagcaacgaagagattcggcaggccatcttaaagatggatgaacaggaggacctggctaaagacatgctcgaacagctcctgaagtttatccctgagaaatcagatattgatctgcttgaggaacataagcacgaaatcgagagaatggcccgtgctgaccgctttctgtatgagatgtctaggatcgatcactatcaacaaaggctccaggcactcttcttcaaaaagaagttccaggagcgactggccgaggctaaaccgaaggtggaggccattttgctggcaagccgagagctcgtacggtccaaaagattgaggcagatgctggaggtaattctcgctatcgggaactttatgaacaaaggtcaacgggggggtgcctacggctttagagtcgccagcctgaacaagatagccgacaccaaatcctccatagacaggaacatatccctattgcattacctgatcatgattttagagaaacatttccccgatatactaaatatgccaagcgagcttcagcatctgccagaagccgccaaagtgaacttggccgagctagagaaagaagtggggaatctgcgacgggggctgcgtgcagtcgaggtcgagcttgaataccagcgccggcaggttagagaaccttcagataaattcgtccccgttatgagcgattttataaccgtgtcctcctttagctttagcgaacttgaagatcagcttaacgaggcccgcgataaatttgcgaaggcactgatgcacttcggggaacacgattctaagatgcaacccgacgaattctttggaatcttcgatacctttttacaggcattctccgaagctaggcaggatctggaagccatgaggcgtaggaaggaggaggaggaaaggcgtgcccggatggaagcaatgctcaaagaacagcgcgagagagaacgctggcagaggcagcgtaaagtgctggctgctggatcctcccttgaggagggtggagaatttgatgatctagtcagtgctttacggtcaggcgaagtcttcgacaaggacctgtgcaagttgaaaaggagtcgcaaacgctcaggctcccaggcccttgaagttactcgagaacgcgccatcaatcgcttaaactattag

SEQ ID NO: 79092 - DNA, 3207 bp, Artificial Sequence
  derived and/or modified sequence
atggcccccagaaaaaggtctcaccacggcctggggttcctgtgttgcttcggggggtcggacattcccgaaatcaatctccgcgataaccatcccctgcagtttatggagtttagcagtcccattccaaacgccgaggagctgaacatccgcttcgccgagctggtggatgagctcgacctcacggataagaatagggaagctatgttcgccttaccccccgagaagaagtggcagatttactgcagtaaaaaaaaagagcaggaggacccaaataaactggctacctcatggcctgactactacatcgaccgtatcaatagcatggccgcgatgcaaagcctctatgctttcgacgaggaggaaaccgaaatgcgaaaccaggtggtggaagaccttaagacagcactacgtacccagccgatgcggttcgtcaccaggttcatagagctggaaggcctgacctgtttgctcaacttcttgcggtccatggaccatgcgacctgtgagtcccgaatccacacttctctgataggatgtatcaaagctcttatgaataatagccagggcagggcacacgtgctcgcccagccggaagctatttctaccatcgcccagtcgctgagaacagagaacagcaaaacaaaagttgctgtcttagaaatcttgggagctgtctgtctggttccagggggccacaagaaagttctgcaggcgatgctccattatcaggtgtatgcagccgagaggaccagattccagaccctcttaaacgagctggatagatctttggggagatatagggacgaggtcaacctgaagaccgccatcatgtcgtttataaatgctgtattgaacgccggcgccggagaagacaatttagagttcaggctccacctcagatacgaatttctgatgttgggaatacaaccagtgatcgataagctccggcagcacgaaaatgctatccttgataaacatctggatttcttcgagatggttcgtaatgaggacgacctcgagctggcaaggagattcgatatggtccacattgatactaagtccgcctctcagatgtttgagctgattcacaagaaactgaagtacaccgaggcgtacccctgtctgctgtctgtgctgcaccactgcctgcagatgccctacaagagaaacggcggttattttcagcagtggcagcttctcgatcggattctgcagcagatagtgctgcaagacgagcgaggagtagaccctgacctcgcccctctcgaaaacttcaatgtcaaaaatatcgttaacatgcttatcaacgaaaacgaggtgaagcagtggcgcgaccaggctgaaaagtttcgtaaagagcacatggaactggtgtcccgcctggagcgaaaagagcgggagtgcgagacaaaaacccttgaaaaagaagagatgatgagaacactgaacaagatgaaagataaactggcccgggagtcgcaggagctgcgacaagcacgcggtcaggtcgccgaattggtggcccagctgtcagaattaagtaccgggccagtgagctcaccgccaccacccgggggacccttgactctctctagttccatgactaccaacgatctccctccacccccaccccctctcccttttgcttgttgtcctcctccgcctcctccccccctaccaccagggggcccacctactcctccaggtgccccgccctgccttgggatgggcctccctcttcctcaggacccctatcccagtagcgacgtaccccttcgaaaaaagcgggtccctcaaccctcccaccctttaaagagtttcaactgggttaagttgaacgaggaacgagtgccaggtactgtgtggaacgaaatcgacgatatgcaggtgttcaggatactggacctggaggatttcgagaagatgttttcagcataccagaggcatcagaaggagctggggagcactgaagatatttacctcgcttcacggaaggtcaaggaactgagcgtgattgacgggagaagagcccaaaactgcattatcctgcttagcaagctcaagctgtccaatgaggaaattagacaagcgatcttgaagatggacgagcaggaggacttggctaaagacatgcttgagcaattgttgaaattcatcccggagaaaagtgacattgatttgctcgaagaacacaagcacgaaatcgaaagaatggctagggccgacaggttcctctacgaaatgtctcggattgaccattatcaacagaggctgcaggccctgttttttaagaaaaaattccaagagcgtctggccgaggctaagccaaaagtggaggcgattttgttagcatctcgcgaattagtcaggtctaaaaggctgagacagatgctggaggtgattctggcaatagggaatttcatgaacaagggacaaaggggaggtgcctacggattccgagttgcttccctgaacaaaattgctgataccaagagcagtatagataggaatatttccttgctccactacctgattatgatcctggaaaagcactttcccgacatattaaatatgcccagcgagctccagcatttgcccgaagcagccaaggttaacctagccgaactcgaaaaagaagtcgggaatctaagaagaggcctgcgcgccgtcgaagttgaactggaataccagagacgtcaggtcagagaaccttcggataaattcgttcccgttatgagtgactttatcacagtgagttccttcagtttttctgagctggaagaccagcttaatgaggcccgtgacaagtttgcgaaggctcttatgcactttggggagcatgattctaagatgcagccggacgaattctttggtatcttcgatacttttctccaggctttctcagaggcccgccaggacctggaagcaatgcgcaggaggaaagaggaggaggagcgacgcgctagaatggaagctatgctgaaagaacagcgcgagcgggagaggtggcagaggcagcggaaagtgctggctgccggtagctctctggaagaaggaggcgagtttgatgatctggtgtccgccttaagatctggggaagtctttgataaggatctgtgcaagcttaagcggagtaggaagcggtctgggtcccaggccctggaagttacaagggagagagctataaataggctcaactattag

SEQ ID NO: 79093 - DNA, 3207 bp, Artificial Sequence
  derived and/or modified sequence
atggcccccaggaagaggagccaccacggcctgggcttcctgtgctgctttggaggcagtgacatccctgagatcaacctgcgggacaaccaccccctgcagttcatggagttcagcagccccatccccaatgctgaggagctgaacatccgctttgctgagctggtggatgagctggacctgacagacaagaaccgggaggccatgtttgccctgcccccagagaagaagtggcagatctactgcagcaagaagaaggagcaggaggaccccaacaagctggccacctcctggccagactactacatcgaccgcatcaacagcatggccgccatgcagagcctgtatgcctttgatgaggaggagacagagatgaggaaccaggtggtggaggacctgaagacagccctgcggacccagcccatgagatttgtgacccgcttcatcgagctggagggcctgacctgcctgctgaacttcctgcgctccatggaccacgccacctgtgagagccgcatccacaccagcctcatcggctgcatcaaggccctgatgaacaacagccagggccgggcccacgtgctggcccagcctgaggccatcagcaccatcgcccagagcctgaggacagagaacagcaagaccaaggtggccgtgctggagatcctgggcgctgtgtgcctggtgcctgggggccacaagaaggtgctgcaggccatgctgcactaccaggtgtatgctgctgagaggacccgcttccagaccctgctgaatgagctggacaggagcctgggccgctacagagatgaggtgaacctgaagacagccatcatgtccttcatcaatgctgtgctgaatgctggagctggggaggacaacctggagttccggctgcacctgcgctatgagttcctgatgctgggcatccagcctgtgattgacaagctgcggcagcatgaaaatgccatcctggacaagcacctggacttctttgagatggtgagaaatgaagatgacctggagctggccaggagatttgacatggtgcacatcgacaccaagagcgccagccagatgtttgagctgatccacaagaagctgaagtacacagaggcctacccctgcctgctgtctgtgctgcaccactgcctgcagatgccctacaagagaaatggaggctacttccagcagtggcagctgctggaccgcatcctgcagcagatcgtgctgcaggatgagcggggcgtggaccctgacctggcccccctggagaacttcaacgtgaagaacatcgtgaacatgctgatcaatgaaaatgaggtgaagcagtggagggaccaggccgagaagttcaggaaggagcacatggagctggtgtcccggctggagaggaaggagcgggagtgtgagaccaagaccctggagaaggaggagatgatgaggaccctgaacaagatgaaggacaagctggcccgggagagccaggagctgcggcaggcccggggccaggtggccgagctggtggcccagctgtctgagctgagcacaggccctgtgagcagccccccacctcctgggggccccctgaccctgagcagctccatgaccaccaatgacctgcccccacctcctccacccctgccctttgcctgctgccccccacctcctcctccacccctgcccccaggcggcccccccaccccacctggggccccaccctgcctgggcatgggcctgcccctgccccaggacccctaccccagcagtgatgtgcccctgaggaagaagagggtgccccagcccagccaccccctgaagagcttcaactgggtgaagctgaatgaggagcgggtgcccggcaccgtgtggaatgaaattgatgacatgcaggtgttccgcatcctggacctggaggactttgagaagatgttttctgcctaccagaggcaccagaaggagctgggcagcacagaggacatctacctggccagcaggaaggtgaaggagctgtctgtgattgatggccggcgggcccagaactgcatcatcctgctgagcaagctgaagctgagcaatgaggagatccggcaggccatcctgaagatggatgagcaggaggacctggccaaggacatgctggagcagctgctgaagttcatccctgagaagagtgacatcgacctgctggaggagcacaagcatgaaattgaaagaatggcccgggctgaccgcttcctgtatgagatgagcagaattgaccactaccagcagaggctgcaggccctcttcttcaagaagaagttccaggagcggctggccgaggccaagcccaaggtggaggccatcctgctggccagccgggagctggtgcgcagcaagaggctgcggcagatgctggaggtgatcctggccatcggcaacttcatgaacaagggccagagaggaggagcctacggcttccgggtggccagcctgaacaagattgctgacaccaagagcagcattgacaggaacatcagcctgctgcactacctgatcatgatcctggagaagcacttcccagacatcctgaacatgcccagcgagctgcagcacctgcctgaggccgccaaggtgaacctggccgagctggagaaggaggtgggcaacctgcggcggggcctgcgggctgtggaggtggagctggagtaccagaggcggcaggtgcgggagcccagcgacaagtttgtgcctgtgatgtctgacttcatcaccgtgtcctccttctccttcagcgagctggaggaccagctgaatgaggcccgggacaagtttgccaaggccctgatgcactttggagaacatgacagcaagatgcagccagatgagttcttcggcatctttgacaccttcctgcaggccttcagcgaggcccggcaggacctggaggccatgagaagaaggaaggaggaggaggagcggcgggccaggatggaggccatgctgaaggagcagcgggagcgggagcgctggcagaggcagaggaaggtgctggccgccggcagcagcctggaggagggcggggagtttgatgacctggtgtctgccctgcggagcggggaggtgtttgacaaggacctgtgcaagctgaagaggagcaggaagaggagcggcagccaggccctggaggtgacccgggagcgggccatcaaccggctgaactactag

SEQ ID NO: 79094 - DNA, 3207 bp, Artificial Sequence
  derived and/or modified sequence
atggccccccggaagcggagccaccacggcctgggcttcctgtgctgtttcgggggatccgatatacccgagataaatctcagggacaaccatcccctgcaattcatggaattttcaagcccaataccaaacgcagaggaacttaatattagatttgctgaactggtggatgagctcgacctgaccgataaaaaccgcgaggccatgtttgccctcccgccggaaaagaaatggcagatctactgcagtaaaaaaaaggagcaagaagaccccaataagttggccacctcctggccagactactatatcgatcggattaacagcatggctgcaatgcagtctctctatgccttcgatgaggaggagaccgagatgagaaatcaggtggtggaagatctgaagaccgccctcagaacccaaccgatgaggttcgttacacggtttatcgagctcgagggactgacatgcctgctgaacttcctgaggtctatggaccatgcaacttgtgagagcaggatccacaccagcctgatcggctgcatcaaggcactgatgaataattcacaggggagggctcacgtgctcgcgcagcccgaagctatctccacaatcgcccaatctctaagaaccgaaaactccaaaaccaaggtggctgtgctcgaaattttgggcgccgtatgcctggtgcccggtggtcacaagaaggtgctacaggccatgctgcactaccaggtgtacgcagcagaaaggacgaggttccagacgctcctgaacgaattggacaggtctttaggtaggtaccgagatgaagtgaacctcaagacagcgataatgagcttcattaatgcagtactcaacgcaggcgccggggaggacaatttggaatttcgactgcacctacgttacgaattcctcatgctgggaatccaacccgtaatagataagttacgacagcacgagaatgcaattttagacaagcacctggattttttcgagatggtgcggaatgaagacgatctggagctggcgagacggttcgacatggtgcacattgacacaaagtctgcctctcaaatgttcgaactgattcacaaaaagctcaaatataccgaggcctacccgtgcctgctgtctgtgcttcatcactgcctgcagatgccctacaagcgcaacggcggctacttccagcaatggcagttgctcgatcgtattctgcagcaaatagtgctgcaggatgagagaggcgttgatccagatctggccccactcgaaaacttcaatgtgaaaaacatcgtgaacatgctcatcaatgagaatgaggtcaaacagtggcgggatcaggccgagaagttccgcaaggaacacatggagctggtttctcggctggagaggaaggagcgggaatgtgaaacgaagacactggagaaggaggaaatgatgcgtaccttaaataagatgaaggacaaacttgctcgcgaaagccaggaattacggcaggcacgcggacaagtggcagagctcgttgcccagttgagtgagctgagcacgggcccagttagcagtccgccccccccaggggggcccttaacactcagttcatctatgactaccaacgacctgcctccgccccccccaccattgcctttcgcctgttgccctccgcctcctccaccaccgctaccccctgggggaccgcccactcctcctggcgctccaccttgcttaggaatggggctccccttaccccaggatccctatcccagctctgatgtgccactgagaaagaagagggtgcctcagccatctcaccctttaaaatcttttaattgggtgaaactgaacgaagagcgcgtgcctgggaccgtgtggaacgagatcgacgacatgcaagtgttccgaatcctagatctggaggactttgaaaagatgttctccgcttaccaacgccaccagaaggagctaggaagtaccgaagatatttatttggcatctaggaaagtcaaagagctgagcgttatcgatggccgccgcgctcagaactgcattatactcctttcaaaactaaaactgtccaacgaggaaatccgacaggcaattttgaaaatggatgaacaagaggatctggcaaaagacatgctcgagcagctgctgaaatttatcccagaaaaaagcgacattgacctactggaagaacacaagcacgaaattgagagaatggcaagagccgacagattcctgtatgagatgtctaggattgatcactaccaacagcggttgcaggccctattcttcaaaaaaaagttccaggagcggctggccgaagcgaagccaaaagtagaggctatcctgctagcatcacgtgaactggtgcgttcgaaaaggcttcgccagatgctagaagtgattttggctatcggcaactttatgaacaaaggccagcggggtggggcttacggcttccgggttgctagcttaaacaagatcgcagacacaaagtcaagtatagaccgtaatatatcactgctgcactatctaatcatgattcttgaaaaacacttccctgacattcttaatatgccatccgagcttcaacacttgcccgaagctgctaaagttaacctggccgaattggaaaaagaggtgggcaatctgagaagagggttgagagctgttgaggtggaactggaatatcagagaaggcaggttagagagccatccgataaatttgtgcccgtgatgagcgactttattaccgtgtcaagtttctctttctccgagttggaggaccagctgaacgaggctagggataaatttgccaaggcccttatgcattttggcgagcacgattctaaaatgcagccagacgaattcttcggcattttcgacacattcctgcaggccttttctgaagctcgacaagatctggaagcaatgaggcggcgcaaggaagaggaagaacgacgcgccaggatggaggccatgctgaaagaacagagagaaagggaacgatggcaacgtcaacgcaaggtgctcgcagccggctcctctctggaggagggtggagaattcgacgacctggtttctgccctgcggagcggagaagtgttcgacaaagacctttgtaaactgaagaggtctcgcaaacgcagcggctctcaggcactcgaggtgacgcgagagagggccatcaaccggcttaactactag

SEQ ID NO: 79095 - DNA, 3207 bp, Artificial Sequence
  derived and/or modified sequence
atggccccccggaagcggagccaccacggcctgggcttcctgtgctgttttggtggttcagatatccctgagatcaacctgcgtgacaaccatcctctccaatttatggaattctcctccccgatccccaatgcagaagagctcaatatacgctttgctgagctggtggatgaactggaccttaccgataaaaatcgcgaagccatgtttgctctccctcctgagaaaaagtggcagatctactgctctaaaaagaaggagcaagaggaccctaataagcttgctacatcttggcccgattactacatcgaccggatcaactctatggccgccatgcagtcgctctatgcattcgacgaggaagagacagagatgaggaatcaggtcgtcgaagatctgaaaaccgccctaaggacccagccaatgcgcttcgttacacggtttattgagttagaaggcttgacatgtttgctgaatttcctgaggtctatggaccatgccacctgcgagagcagaatccatactagtttgatcggatgcatcaaggcccttatgaacaattcccagggcagggcgcacgtcctggcccagcccgaggctattagtacaatcgcacagagtctgcgcacagagaactccaaaacaaaagtagctgtgctggaaatactcggagccgtttgcctggtcccaggcggtcacaagaaggtgctgcaggccatgctccactatcaggtttacgcagccgagagaacccgtttccagacactcctcaatgaactggaccggagcctcgggaggtacagggatgaagtgaatctgaagacagcaatcatgtccttcattaatgcagttctgaatgcaggggccggcgaagacaatcttgagtttcgcttacatttacggtatgaattccttatgctggggatccaacccgtgattgacaagctgcgccagcacgagaacgccatactcgataagcacctcgatttttttgagatggttcgcaacgaggacgacttggaattagctcgacggttcgatatggtacacattgacaccaagtctgcctcacagatgttcgaattaatacataagaaactaaagtacacagaagcctatccctgcctgctgtctgttctgcaccattgtttgcagatgccctataagcgcaacgggggctactttcagcagtggcagcttctggataggattctacagcagattgtgctccaggacgagcggggcgtcgatcctgatctagccccacttgagaattttaacgtcaagaacatcgtgaatatgctgatcaacgagaatgaagtgaagcaatggcgagatcaggccgagaaatttagaaaggagcatatggaacttgtctctaggctcgagcggaaagagagggaatgtgagacaaaaactctggaaaaggaggagatgatgcgaacactcaataaaatgaaggacaaactggccagagaatcccaggagctgcggcaagctcggggacaggtagccgagcttgtagctcagctcagcgaactgtctacaggtcctgtgtcttcaccccccccaccaggcggaccacttacccttagttcttcaatgacaacaaacgacttacccccccccccccccccactgccgttcgcctgctgtccaccaccaccgccccctccgctgccacccggaggccctcctactcctcctggggcaccaccgtgcctcgggatggggctgccacttcctcaggacccctacccaagttctgacgtacctctaaggaagaaacgggtcccccagccaagccaccctcttaagtcgtttaactgggtgaaacttaacgaggaaagggtgccaggtaccgtgtggaacgagatagacgacatgcaggtcttccggattctggacctcgaggacttcgaaaagatgttctcagcctatcagcgccaccagaaagaactggggtcaaccgaggatatatatttggcttcacgcaaggtgaaggagctctccgtaatcgacggacggcgagcacagaattgtattatcctcttgtctaaactgaagctatcaaatgaagaaatccggcaggcaatattaaagatggatgaacaggaggatttggcgaaagacatgttagagcagttacttaagtttattccagaaaagagtgatatagacttactcgaggagcataagcacgaaattgaacgcatggccagagccgatagattcctttatgagatgtcaaggatagaccactatcagcagcgactgcaggcgctgttcttcaagaaaaagttccaagaacgcttggctgaagcaaaacccaaagtcgaagcaatcttgctggccagccgcgaactggtccggtccaaacgcctgagacagatgctggaagttattctggccatagggaacttcatgaataaaggtcaacgcggtggcgcttatgggttccgcgttgcaagcctgaacaagatcgctgacactaagtcatccatcgatcgaaacatttccctgttacactatcttatcatgatcctagagaagcactttccggatatcctgaatatgccttcagaattacagcatctacccgaagctgcaaaggtaaacctggcagagctcgagaaagaagtgggaaacctccgccgaggtttgagagccgtggaggtcgagcttgaatatcagcggcgtcaagtgcgcgagcctagcgataaatttgtgcccgtgatgtctgacttcatcactgtaagcagttttagtttttctgaattggaggaccagttaaatgaggccagagataagtttgccaaggcactgatgcactttggggagcacgacagtaaaatgcagcctgacgaatttttcggcattttcgacaccttccttcaagcatttagtgaagctagacaggatcttgaagccatgagaagacgcaaagaggaggaggaacgcagagctcgaatggaggcgatgctgaaagagcagcgtgagagggagcggtggcagcggcaacggaaggtcttagccgcggggtcttcccttgaggaagggggtgagttcgacgatctggtgtcagctctgcgctccggcgaagtgtttgataaggatctgtgtaagctcaagaggtctcgtaaacgctcaggctctcaggccctggaggtaacccgtgaacgcgcaatcaataggctgaactattag

SEQ ID NO: 79096 - DNA, 3207 bp, Artificial Sequence
  derived and/or modified sequence
atggctccacggaaacgctcacatcacgggctcggcttcctgtgctgttttggcggttccgacataccggagataaatctcagggacaaccaccctctgcagttcatggaattttcgtcaccgattcctaatgctgaagagctcaatattcgattcgccgaacttgtcgacgagctggatttgaccgacaagaatagagaggctatgttcgctctgccccctgaaaagaagtggcagatttactgtagcaagaaaaaagagcaggaggatcccaacaagctggccaccagttggccagactattacatcgaccgaattaatagcatggccgctatgcagagcctatatgcctttgacgaggaggaaacggagatgaggaatcaggtagtggaggacctgaaaacagctctgaggacacaacctatgagattcgtcacacggtttatcgagctggagggcttgacctgtctgctgaatttccttcgctctatggatcacgcaacttgtgaaagtaggatccacaccagtctcatcgggtgtatcaaggcactgatgaataactcacaaggccgagcccatgtcctcgcccagccagaggcaatttccaccattgctcagagccttcgtactgagaactcaaagaccaaggtcgctgtgcttgaaattcttggcgctgtctgtctcgttcccggaggccacaaaaaagtgctgcaggccatgttacattaccaggtctatgcggctgagcgtacacgcttccagacgctgctcaacgaactggaccgctctctgggtcggtatcgcgatgaggtaaatctgaagaccgcaattatgtcttttataaacgcggtattaaacgccggagccggagaggataacttggagttcaggctgcacctccggtatgaatttctcatgctgggaatacagcctgtcattgacaagttgcgtcagcatgagaatgcaatcctggataaacaccttgacttctttgagatggtcagaaatgaagacgatcttgagctcgctaggcgttttgatatggtgcacatcgacactaagtccgcctcacaaatgttcgagctgatccacaaaaagttaaaatacacagaggcttatccctgcctgctgtcggtgctgcaccactgcctccagatgccttataagcgtaacgggggatactttcagcaatggcaactgctggaccgcattctccagcagatcgttctccaggatgagcgcggagtcgaccctgacttggctccactggagaatttcaatgtcaagaatatcgttaacatgctcatcaatgagaatgaggtgaagcaatggcgagatcaggcagaaaagtttcgcaaagagcacatggaactagtgagccgcttggaacgcaaggaaagagagtgtgaaaccaaaacactggagaaggaagaaatgatgagaaccctgaataaaatgaaggacaaattggctagggagtctcaggagctaaggcaggcacgaggacaggtggctgagctagttgctcagctgagtgagctgtctacgggaccagtgtcctcaccaccaccaccagggggtcctctgaccctttcttcctccatgacaaccaatgacctgcccccaccaccgcctcctctgccctttgcgtgctgccccccacctccgccaccgcctttgccccctggcggacctcctacaccccctggggctcccccttgcctgggcatgggcctgcccttgccacaagatccttatccttccagtgacgtgccactccgcaagaagagggtgccgcagccctctcatccactcaaatcatttaactgggttaagctgaatgaagaaagagttccagggaccgtctggaacgagatcgacgacatgcaggtttttcgcatcctcgatttagaggatttcgaaaaaatgttttcagcttaccagcgccaccagaaagagctggggtcgacggaggatatttacctggcttccagaaaggttaaggagctcagtgtgatcgatgggagacgcgcacagaattgcatcattctcctgtctaagttaaagctctcaaatgaggagatccggcaggccatcctgaaaatggacgagcaggaagacctggccaaggatatgttggagcaactactgaaattcatccccgaaaaaagtgatatcgacctcctcgaggagcacaagcacgagattgagcgaatggcacgtgccgaccgtttcctgtacgagatgtcccgtatcgatcactatcagcagcggctccaagctcttttttttaaaaaaaaattccaggagcgcctggcagaggccaagcccaaagtggaggctatactgctagcctctcgagaattagtccggtcaaagagactcaggcagatgctagaggttatccttgcgatcggcaatttcatgaataaagggcagcgaggcggagcatatgggttccgggtcgcctcactcaataaaatcgctgatacaaaatcctctatcgatagaaacatcagtttgctgcactacctgattatgatcctcgagaagcacttcccagacattctgaacatgcctagcgaattgcagcatctgcctgaagcagctaaagtgaatttggccgaactggagaaagaagtgggaaatctgcggagaggcctccgcgcagtggaggtcgaactggaataccaacggcgacaagtcagggagcccagtgataagtttgtccccgtgatgagcgattttataactgtgagttcgtttagcttctccgagctcgaagatcagctgaacgaagccagggacaaatttgcaaaagctttgatgcactttggcgaacacgatagtaagatgcagcctgatgagttttttggcatttttgatacttttctgcaagcttttagcgaagctaggcaggacctggaagccatgcgtcggcgtaaagaggaagaagaaaggcgagctaggatggaagctatgttaaaggagcagcgagaaagggagcgatggcagagacagagaaaagtgctggccgctggttcttcgctggaagaaggcggtgagtttgatgatctagtgtcagctctgaggtcaggtgaagtgtttgataaggacctgtgcaaattaaaaagatctcgcaaacggtccggctctcaggcgctggaagttactcgcgagagggcgattaataggttgaattattag

SEQ ID NO: 79097 - DNA, 3207 bp, Artificial Sequence
  derived and/or modified sequence
atggctcctaggaaaaggagccaccatgggctggggtttctgtgttgctttgggggatcggacataccagagatcaatttacgcgataatcaccctctccagtttatggaattcagctctccaatccccaatgccgaggagctgaatatacgctttgctgaacttgtggatgagctggatcttactgataaaaaccgggaagcaatgtttgcccttccgccagaaaagaagtggcagatttattgttccaagaagaaggagcaggaagatccgaacaagctggcaaccagctggcctgactactacattgatcgcatcaactccatggccgcaatgcaaagtctgtatgcctttgatgaggaggaaaccgagatgcggaaccaggtggtggaggatctgaaaactgccttgcgtacacaaccaatgcgatttgtcactcggttcattgaactcgaagggcttacatgcctgctgaactttctcagatcgatggaccacgctacatgtgaatctaggattcacacatctctcatcgggtgcatcaaggcacttatgaataactcacaggggagagctcacgtattagcccagcccgaagctatctccacaatcgctcagagtctcagaacagagaactcgaaaactaaggtggctgtgctggagatcctaggagcggtgtgcctcgtaccaggcggacacaagaaagttctccaggccatgctccactaccaagtttatgcagctgagcggactagattccaaacactgttaaacgagttggatcgcagtctcggcaggtaccgcgacgaagtgaacctgaagacagccattatgtcttttatcaacgctgtgctcaacgccggagccggtgaggacaatctggagtttaggctccacctaagatacgagttcttgatgttggggatacagccggtcattgacaagctacgccagcatgaaaatgccatccttgataagcacctggatttttttgagatggttagaaacgaagatgacctggaacttgccagacgttttgacatggtgcacatagacacgaagtccgcatcacagatgttcgagttgatccataagaagctcaagtataccgaagcgtatccttgccttttgagtgttctgcaccactgcctgcagatgccttataaacgaaatggtggttacttccaacagtggcaactgctggatcggatattgcaacagatcgttttgcaggacgagcgaggcgtcgacccagaccttgcgcctctggaaaatttcaacgtcaagaatatcgtcaacatgctcattaatgagaatgaggtgaagcaatggcgagatcaggccgaaaagtttcgcaaggaacacatggagctggtgtcaagattggagcggaaagagcgggagtgcgagactaagacattggagaaggaagagatgatgagaaccctcaacaagatgaaggacaaactggccagagagtcacaggagctgcggcaagctcgcggtcaggttgccgaactagtggcccaactgtcagaactctcaacaggaccagtatctagccccccaccccctggcggaccacttactctgtcgtctagcatgaccactaacgacctacctccccctccgccacccctgcctttcgcatgctgccctcctcctccacccccaccgctgccgcctggaggtcccccaacacctcccggagcacctccctgcctggggatgggactgcccctgccccaggatccctacccaagcagcgacgtgccactccgcaaaaaaagggtaccacagccctcacaccctctgaaaagcttcaattgggtcaagctgaacgaggaaagagtccccggtaccgtgtggaacgaaattgatgacatgcaggtgttcaggatcctggatctagaagactttgaaaagatgttttccgcctatcagcgtcatcagaaggaactcggctccactgaagacatatatttagcctctagaaaagtgaaggagttgtccgtcatagacggacgacgagcgcagaactgcataatactgctttctaagctcaaactgagtaacgaggaaatacggcaagcaatactaaagatggacgagcaggaagaccttgctaaggacatgttagaacaactgctgaagtttatcccagagaaaagcgacattgacctgttggaagagcataagcacgaaattgaaagaatggctagggccgatcgcttcttgtatgagatgagcaggattgatcattaccaacaacggttacaggccctcttttttaagaagaagtttcaggaaaggctcgctgaggcgaagcccaaggtcgaggcaattctcttggccagccgggaactggttaggtccaagcgcttacggcaaatgctggaagtcattttggccatagggaacttcatgaacaagggccaacggggaggcgcttacgggttcagagtcgcatctctgaacaagattgccgatacgaagtcaagcatcgatcgcaacatctccctgctccactacctgattatgatcttggagaaacatttcccagacatactcaatatgccatcagaactccaacatttgcctgaagcagccaaggtcaatctcgccgagctagaaaaggaggtaggtaaccttagaagaggtctaagagccgttgaggtggagcttgagtaccagcgccgacaggtgagggaaccatccgataagtttgtacccgtgatgtctgacttcataacagtcagtagcttcagtttctcagagctggaagatcaacttaacgaagcccgagacaaatttgcaaaagccttgatgcacttcggagagcatgactctaagatgcagcctgatgaattctttggtatcttcgatacttttctgcaagcgttttccgaggcaaggcaggacctggaagctatgcggaggcgcaaagaggaggaggaacgtagggcacggatggaagccatgttgaaggaacagagagagagggagcggtggcagagacagaggaaggtgctggctgcaggtagcagtctggaagaaggcggagaattcgatgatcttgtctcagcactgcggtcaggggaagtgtttgacaaggacttatgtaaactgaaaaggtcccgcaaacgctccggctcccaagcactggaagtgaccagagagcgcgcaatcaaccggctgaattactag

SEQ ID NO: 79098 - DNA, 3207 bp, Artificial Sequence
  derived and/or modified sequence
atggcccccagaaagagaagccaccacggcctgggcttcctgtgctgcttcggcggcagcgacatccccgagatcaacctgagagacaaccaccccctgcagttcatggagttcagcagccccatccccaacgccgaggagctgaacatcagattcgccgagctggtggacgagctggacctgaccgacaagaacagagaggccatgttcgccctgccccccgagaagaagtggcagatctactgcagcaagaagaaggagcaggaggaccccaacaagctggccaccagctggcccgactactacatcgacagaatcaacagcatggccgccatgcagagcctgtacgccttcgacgaggaggagaccgagatgagaaaccaggtggtggaggacctgaagaccgccctgagaacccagcccatgagattcgtgaccagattcatcgagctggagggcctgacctgcctgctgaacttcctgagaagcatggaccacgccacctgcgagagcagaatccacaccagcctgatcggctgcatcaaggccctgatgaacaacagccagggcagagcccacgtgctggcccagcccgaggccatcagcaccatcgcccagagcctgagaaccgagaacagcaagaccaaggtggccgtgctggagatcctgggcgccgtgtgcctggtgcccggcggccacaagaaggtgctgcaggccatgctgcactaccaggtgtacgccgccgagagaaccagattccagaccctgctgaacgagctggacagaagcctgggcagatacagagacgaggtgaacctgaagaccgccatcatgagcttcatcaacgccgtgctgaacgccggcgccggcgaggacaacctggagttcagactgcacctgagatacgagttcctgatgctgggcatccagcccgtgatcgacaagctgagacagcacgagaacgccatcctggacaagcacctggacttcttcgagatggtgagaaacgaggacgacctggagctggccagaagattcgacatggtgcacatcgacaccaagagcgccagccagatgttcgagctgatccacaagaagctgaagtacaccgaggcctacccctgcctgctgagcgtgctgcaccactgcctgcagatgccctacaagagaaacggcggctacttccagcagtggcagctgctggacagaatcctgcagcagatcgtgctgcaggacgagagaggcgtggaccccgacctggcccccctggagaacttcaacgtgaagaacatcgtgaacatgctgatcaacgagaacgaggtgaagcagtggagagaccaggccgagaagttcagaaaggagcacatggagctggtgagcagactggagagaaaggagagagagtgcgagaccaagaccctggagaaggaggagatgatgagaaccctgaacaagatgaaggacaagctggccagagagagccaggagctgagacaggccagaggccaggtggccgagctggtggcccagctgagcgagctgagcaccggccccgtgagcagcccccccccccccggcggccccctgaccctgagcagcagcatgaccaccaacgacctgccccccccccccccccccctgcccttcgcctgctgccccccccccccccccccccccctgccccccggcggcccccccaccccccccggcgcccccccctgcctgggcatgggcctgcccctgccccaggacccctaccccagcagcgacgtgcccctgagaaagaagagagtgccccagcccagccaccccctgaagagcttcaactgggtgaagctgaacgaggagagagtgcccggcaccgtgtggaacgagatcgacgacatgcaggtgttcagaatcctggacctggaggacttcgagaagatgttcagcgcctaccagagacaccagaaggagctgggcagcaccgaggacatctacctggccagcagaaaggtgaaggagctgagcgtgatcgacggcagaagagcccagaactgcatcatcctgctgagcaagctgaagctgagcaacgaggagatcagacaggccatcctgaagatggacgagcaggaggacctggccaaggacatgctggagcagctgctgaagttcatccccgagaagagcgacatcgacctgctggaggagcacaagcacgagatcgagagaatggccagagccgacagattcctgtacgagatgagcagaatcgaccactaccagcagagactgcaggccctgttcttcaagaagaagttccaggagagactggccgaggccaagcccaaggtggaggccatcctgctggccagcagagagctggtgagaagcaagagactgagacagatgctggaggtgatcctggccatcggcaacttcatgaacaagggccagagaggcggcgcctacggcttcagagtggccagcctgaacaagatcgccgacaccaagagcagcatcgacagaaacatcagcctgctgcactacctgatcatgatcctggagaagcacttccccgacatcctgaacatgcccagcgagctgcagcacctgcccgaggccgccaaggtgaacctggccgagctggagaaggaggtgggcaacctgagaagaggcctgagagccgtggaggtggagctggagtaccagagaagacaggtgagagagcccagcgacaagttcgtgcccgtgatgagcgacttcatcaccgtgagcagcttcagcttcagcgagctggaggaccagctgaacgaggccagagacaagttcgccaaggccctgatgcacttcggcgagcacgacagcaagatgcagcccgacgagttcttcggcatcttcgacaccttcctgcaggccttcagcgaggccagacaggacctggaggccatgagaagaagaaaggaggaggaggagagaagagccagaatggaggccatgctgaaggagcagagagagagagagagatggcagagacagagaaaggtgctggccgccggcagcagcctggaggagggcggcgagttcgacgacctggtgagcgccctgagaagcggcgaggtgttcgacaaggacctgtgcaagctgaagagaagcagaaagagaagcggcagccaggccctggaggtgaccagagagagagccatcaacagactgaactactag

SEQ ID NO: 79099 - protein, 1497 aa, Artificial Sequence
  derived and/or modified sequence
MSRAVRLPVPCPVQLGTLRNDSLEAQLHEYVKQGNYVKVKKILKKGIYVDAVNSLGQTALFVAALLGLRKFVDVLVDYGSDPNHRCFDGSTPVHAAAFSGNQWILSKLLDAGGDLRLHDERGQNPKTWALTAGKERSTQIVEFMQRCASHMQAIIQGFSYDLLKKIDSPQRLVYSPSWCGGLVQGNPNGSPNRLLKAGVISAQNIYSFGFGKAMPWFQFYLTGATQMAYLGSLPVIGEKEVIQADDEPTFSFFSGPYMVMTNLVWNGSRVTVKELNLPTHPHCSRLRLADLLIAEQEHSSKLRHPYLLQLMAVCLSQDLEKTRLVYERITIGTLFSVLHERRSQFPVLHMEVIVHLLLQISDALRYLHFQGFIHRSLSSYAVHIISPGEARLTNLEYMLESEDRGVQRDLTRVPLPTQLYNWAAPEVILQKAATVKSDIYSFSMIMQEILTDDIPWKGLDGSVVKKAVVSGNYLEADVRLPKPYYDIVKSGIHVKQKDRTMNLQDIRYILKNDLKDFTGAQRTQPTESPRVQRYGLHPDVNVYLGLTSEHPRETPDMEIIELKEMGSQPHSPRVHSLFTEGTLDPQAPDPCLMARETQNQDAPCPAPFMAEEASSPSTGQPSLCSFEINEIYSGCLILEDDIEEPPGAASSLEADGPNQVDELKSMEEELDKMEREACCFGSEDESSSKAETEYSFDDWDWQNGSLSSLSLPESTREAKSNLNNMSTTEEYLISKCVLDLKIMQTIMHENDDRLRNIEQILDEVEMKQKEQEERMSLWATSREFTNAYKLPLAVGPPSLNYIPPVLQLSGGQKPDTSGNYPTLPRFPRMLPTLCDPGKQNTDEQFQCTQGAKDSLETSRIQNTSSQGRPRESTAQAKATQFNSALFTLSSHRQGPSASPSCHWDSTRMSVEPVSSEIYNAESRNKDDGKVHLKWKMEVKEMAKKAATGQLTVPPWHPQSSLTLESEAENEPDALLQPPIRSPENTDWQRVIEYHRENDEPRGNGKFDKTGNNDCDSDQHGRQPRLGSFTSIRHPSPRQKEQPEHSEAFQASSDTLVAVEKSYSHQSMQSTCSPESSEDITDEFLTPDGEYFYSSTAQENLALETSSPIEEDFEGIQGAFAQPQVSGEEKFQMRKILGKNAEILPRSQFQPVRSTEDEQEETSKESPKELKEKDISLTDIQDLSSISYEPDSSFKEASCKTPKINHAPTSVSTPLSPGSVSSAASQYKDCLESITFQVKTEFASCWNSQEFIQTLSDDFISVRERAKKLDSLLTSSETPPSRLTGLKRLSSFIGAGSPSLVKACDSSPPHATQRRSLPKVEAFSQHHIDELPPPSQELLDDIELLKQQQGSSTVLHENTASDGGGTANDQRHLEEQETDSKKEDSSMLLSKETEDLGEDTERAHSTLDEDLERWLQPPEESVELQDLPKGSERETNIKDQKVGEEKRKREDSITPERRKSEGVLGTSEEDELKSCFWKRLGWSESSRIIVLDQSDLSD

SEQ ID NO: 79100 - DNA, 4494 bp, Artificial Sequence
  derived and/or modified sequence
atgagcagagccgtgagactgcccgtgccctgccccgtgcagctgggcaccctgagaaacgacagcctggaggcccagctgcacgagtacgtgaagcagggcaactacgtgaaggtgaagaagatcctgaagaagggcatctacgtggacgccgtgaacagcctgggccagaccgccctgttcgtggccgccctgctgggcctgagaaagttcgtggacgtgctggtggactacggcagcgaccccaaccacagatgcttcgacggcagcacccccgtgcacgccgccgccttcagcggcaaccagtggatcctgagcaagctgctggacgccggcggcgacctgagactgcacgacgagagaggccagaaccccaagacctgggccctgaccgccggcaaggagagaagcacccagatcgtggagttcatgcagagatgcgccagccacatgcaggccatcatccagggcttcagctacgacctgctgaagaagatcgacagcccccagagactggtgtacagccccagctggtgcggcggcctggtgcagggcaaccccaacggcagccccaacagactgctgaaggccggcgtgatcagcgcccagaacatctacagcttcggcttcggcaaggccatgccctggttccagttctacctgaccggcgccacccagatggcctacctgggcagcctgcccgtgatcggcgagaaggaggtgatccaggccgacgacgagcccaccttcagcttcttcagcggcccctacatggtgatgaccaacctggtgtggaacggcagcagagtgaccgtgaaggagctgaacctgcccacccacccccactgcagcagactgagactggccgacctgctgatcgccgagcaggagcacagcagcaagctgagacacccctacctgctgcagctgatggccgtgtgcctgagccaggacctggagaagaccagactggtgtacgagagaatcaccatcggcaccctgttcagcgtgctgcacgagagaagaagccagttccccgtgctgcacatggaggtgatcgtgcacctgctgctgcagatcagcgacgccctgagatacctgcacttccagggcttcatccacagaagcctgagcagctacgccgtgcacatcatcagccccggcgaggccagactgaccaacctggagtacatgctggagagcgaggacagaggcgtgcagagagacctgaccagagtgcccctgcccacccagctgtacaactgggccgcccccgaggtgatcctgcagaaggccgccaccgtgaagagcgacatctacagcttcagcatgatcatgcaggagatcctgaccgacgacatcccctggaagggcctggacggcagcgtggtgaagaaggccgtggtgagcggcaactacctggaggccgacgtgagactgcccaagccctactacgacatcgtgaagagcggcatccacgtgaagcagaaggacagaaccatgaacctgcaggacatcagatacatcctgaagaacgacctgaaggacttcaccggcgcccagagaacccagcccaccgagagccccagagtgcagagatacggcctgcaccccgacgtgaacgtgtacctgggcctgaccagcgagcaccccagagagacccccgacatggagatcatcgagctgaaggagatgggcagccagccccacagccccagagtgcacagcctgttcaccgagggcaccctggacccccaggcccccgacccctgcctgatggccagagagacccagaaccaggacgccccctgccccgcccccttcatggccgaggaggccagcagccccagcaccggccagcccagcctgtgcagcttcgagatcaacgagatctacagcggctgcctgatcctggaggacgacatcgaggagccccccggcgccgccagcagcctggaggccgacggccccaaccaggtggacgagctgaagagcatggaggaggagctggacaagatggagagagaggcctgctgcttcggcagcgaggacgagagcagcagcaaggccgagaccgagtacagcttcgacgactgggactggcagaacggcagcctgagcagcctgagcctgcccgagagcaccagagaggccaagagcaacctgaacaacatgagcaccaccgaggagtacctgatcagcaagtgcgtgctggacctgaagatcatgcagaccatcatgcacgagaacgacgacagactgagaaacatcgagcagatcctggacgaggtggagatgaagcagaaggagcaggaggagagaatgagcctgtgggccaccagcagagagttcaccaacgcctacaagctgcccctggccgtgggcccccccagcctgaactacatcccccccgtgctgcagctgagcggcggccagaagcccgacaccagcggcaactaccccaccctgcccagattccccagaatgctgcccaccctgtgcgaccccggcaagcagaacaccgacgagcagttccagtgcacccagggcgccaaggacagcctggagaccagcagaatccagaacaccagcagccagggcagacccagagagagcaccgcccaggccaaggccacccagttcaacagcgccctgttcaccctgagcagccacagacagggccccagcgccagccccagctgccactgggacagcaccagaatgagcgtggagcccgtgagcagcgagatctacaacgccgagagcagaaacaaggacgacggcaaggtgcacctgaagtggaagatggaggtgaaggagatggccaagaaggccgccaccggccagctgaccgtgcccccctggcacccccagagcagcctgaccctggagagcgaggccgagaacgagcccgacgccctgctgcagccccccatcagaagccccgagaacaccgactggcagagagtgatcgagtaccacagagagaacgacgagcccagaggcaacggcaagttcgacaagaccggcaacaacgactgcgacagcgaccagcacggcagacagcccagactgggcagcttcaccagcatcagacaccccagccccagacagaaggagcagcccgagcacagcgaggccttccaggccagcagcgacaccctggtggccgtggagaagagctacagccaccagagcatgcagagcacctgcagccccgagagcagcgaggacatcaccgacgagttcctgacccccgacggcgagtacttctacagcagcaccgcccaggagaacctggccctggagaccagcagccccatcgaggaggacttcgagggcatccagggcgccttcgcccagccccaggtgagcggcgaggagaagttccagatgagaaagatcctgggcaagaacgccgagatcctgcccagaagccagttccagcccgtgagaagcaccgaggacgagcaggaggagaccagcaaggagagccccaaggagctgaaggagaaggacatcagcctgaccgacatccaggacctgagcagcatcagctacgagcccgacagcagcttcaaggaggccagctgcaagacccccaagatcaaccacgcccccaccagcgtgagcacccccctgagccccggcagcgtgagcagcgccgccagccagtacaaggactgcctggagagcatcaccttccaggtgaagaccgagttcgccagctgctggaacagccaggagttcatccagaccctgagcgacgacttcatcagcgtgagagagagagccaagaagctggacagcctgctgaccagcagcgagaccccccccagcagactgaccggcctgaagagactgagcagcttcatcggcgccggcagccccagcctggtgaaggcctgcgacagcagccccccccacgccacccagagaagaagcctgcccaaggtggaggccttcagccagcaccacatcgacgagctgcccccccccagccaggagctgctggacgacatcgagctgctgaagcagcagcagggcagcagcaccgtgctgcacgagaacaccgccagcgacggcggcggcaccgccaacgaccagagacacctggaggagcaggagaccgacagcaagaaggaggacagcagcatgctgctgagcaaggagaccgaggacctgggcgaggacaccgagagagcccacagcaccctggacgaggacctggagagatggctgcagccccccgaggagagcgtggagctgcaggacctgcccaagggcagcgagagagagaccaacatcaaggaccagaaggtgggcgaggagaagagaaagagagaggacagcatcacccccgagagaagaaagagcgagggcgtgctgggcaccagcgaggaggacgagctgaagagctgcttctggaagagactgggctggagcgagagcagcagaatcatcgtgctggaccagagcgacctgagcgactag

SEQ ID NO: 79101 - DNA, 4494 bp, Artificial Sequence
  derived and/or modified sequence
atgtcccgcgccgtccgtctgcctgtgccctgcccagttcagctagggacacttcgaaatgactccctcgaggcacaattacacgaatacgttaaacaggggaactacgttaaggtgaaaaagatcctcaagaagggtatttatgtggacgccgtgaacagcctaggtcagaccgctttgttcgtggccgctcttttgggactgcgaaaattcgtcgacgtcctggttgactacggctctgatcctaatcatagatgttttgacggaagcactcccgtgcatgccgctgctttcagcgggaaccagtggattctgtccaagctccttgacgccgggggtgatctcaggctccacgacgagagggggcagaacccaaagacctgggctcttaccgcaggcaaggaaaggtctacccagatcgtagaattcatgcaacgttgtgcttcccacatgcaggcaataatccaaggattttcttacgacctcctgaagaaaatcgacagcccgcaacgccttgtgtattccccaagctggtgtggcggcctggtgcaggggaatccaaatggctctcctaatcggctgctgaaagcaggggtgatctctgcacagaacatctattcatttgggtttggaaaagcgatgccttggtttcaattctatttgacaggggctacacaaatggcctacctgggatccttgcctgtaatcggggagaaggaagtgattcaagccgatgacgaacccaccttttcatttttcagtgggccctacatggtcatgacaaaccttgtgtggaatggctctagagtcaccgtgaaggagttgaatttgcccacccaccctcactgctctcgccttcgactggccgacctattgatagccgagcaggagcactcaagtaaactgcggcacccttacctgctgcagctaatggcagtgtgtctatctcaggacctggaaaaaacaaggctcgtatacgagcggatcaccatcggaactctcttcagcgtcttgcatgagaggcgaagccaattccctgtgctgcatatggaggtgatcgtccatttgctcttgcagataagtgatgctctccggtacctccacttccagggattcatacacagatcgttgtcctcttacgctgtacatatcatcagtcccggtgaggcccgcttgactaacttggagtatatgctcgagtctgaggacagaggggtccagcgcgatctcacacgcgtgcctctgcccacacagctttacaattgggcggctccagaagtgatcctgcagaaggccgctactgttaaaagcgacatctacagtttctccatgattatgcaggaaatcctgacagacgacattccctggaaggggctggacggctccgtggtgaaaaaggcagttgtgtcgggcaattaccttgaggcagatgtccgcttgcctaagccgtattatgacatcgttaaatctggcattcacgtgaaacaaaaagacagaaccatgaatctgcaggatataaggtacattctgaagaacgacctgaaggacttcacgggtgctcagcgcacgcagcctaccgagagcccacgggtccaaaggtatggccttcaccctgatgtgaacgtgtacctggggctcacctccgagcatccacgggaaactccagatatggagatcatcgaacttaaggagatgggcagtcagcctcattcaccaagggtgcacagcctcttcacggaaggaaccctggacccccaggcccctgacccatgtctcatggcacgcgagacccagaaccaagacgccccttgcccagccccattcatggctgaagaggccagctccccctcaacaggtcagccttccctctgtagctttgaaataaacgagatatactctggctgcctgatcctggaggacgacatcgaggagccaccaggtgctgcttcatccttggaagctgacggccccaatcaggttgatgagctgaagtccatggaggaggaactcgacaagatggaacgtgaggcttgttgttttggatctgaagacgagagcagttcaaaggcagagacagaatatagcttcgacgattgggactggcagaatggcagcttgtccagcctttctttgcccgagagcacacgtgaagctaagagcaatttgaataacatgtcaacaaccgaagagtatcttatcagcaaatgcgttctcgatcttaagatcatgcagacaatcatgcacgaaaatgatgataggctccggaatatcgaacagattttagacgaggtcgaaatgaagcagaaggagcaggaggagaggatgagcttatgggctacatccagggaattcacgaatgcctataaactaccactggcagtgggtccaccctcgctcaattatattcccccggtgttgcaactgagcggtggccagaaaccagacaccagcggtaactaccctactctgccccggttcccccgcatgctccctacgttgtgtgaccctggtaaacaaaacactgacgagcagttccagtgtacacagggagctaaggactccctcgagacaagcaggatacagaataccagttctcagggccggcccagggagtcaaccgcccaggccaaggcgacacagtttaatagcgctctcttcaccctcagttctcacagacagggcccttcagctagcccaagttgccactgggattccacccgaatgtcggtcgaaccagtgtccagcgaaatttacaatgccgaaagccggaacaaggacgatgggaaagtgcacctgaaatggaagatggaggtgaaagagatggccaaaaaggcggccactgggcaactgaccgtgcctccctggcatccccagtcgtccctgacactggagagcgaggccgagaacgagcctgatgctctgttgcagcctcccatcagatcgccagagaatacagattggcagcgggttatagaataccacagggagaacgatgaacccaggggaaacggtaagttcgataaaactggcaataacgactgcgacagcgatcagcatgggaggcagcctagactcggatcttttacttccattcggcacccgtctccgcggcaaaaggagcaacctgagcactcagaagcctttcaggcatcttcggacacgctggtcgccgtggagaagtcctatagccatcagagcatgcagtcaacgtgttcaccagagtcctcagaggacatcaccgatgagttcttaacaccagacggagagtacttctacagctctactgctcaggagaacctggctcttgagacatccagtcccatcgaggaagactttgaagggattcagggcgccttcgcacaaccacaagtgagcggagaagagaagttccaaatgcggaaaattttgggtaaaaacgctgagatcctgcctagaagccaatttcagccagtgcggtccacagaagatgagcaggaagaaacatccaaagagtccccaaaagaactgaaagagaaagatatctccctgactgacatccaagacttaagcagtattagttacgagcctgattcttcttttaaagaggcgagttgtaaaacgcccaagattaatcacgcacccacctctgtctccacccccctgtcgccaggcagcgtgtcaagcgcagccagccagtataaagactgtctggagtccataacatttcaagtgaaaactgaattcgcttcctgctggaattctcaggagttcatacagactctgtccgacgattttataagcgttcgagagagagccaaaaaactggacagcctgctaacttctagcgaaacccccccaagtaggttaaccggactcaaaaggctgtcgtctttcatcggtgccgggtcaccatcactggtgaaggcctgcgactcttcaccaccacacgctacacagcggaggagcctcccaaaggtggaggctttttcccagcaccacatcgatgaattgcctccaccttcacaggaactgctggacgacatcgaactgctcaaacagcagcaaggatcctccaccgtgctgcatgagaacactgcatctgatggcggcgggacagccaacgaccagaggcacctggaagaacaggagacagacagtaagaaggaagatagcagcatgctcctttctaaagagactgaggatctcggagaggacaccgagcgggcgcactccaccctggacgaggacctggaacgatggttacaaccccccgaagaaagcgtggagctgcaggacttgccaaagggctctgagcgggaaacgaacatcaaggatcagaaagtgggtgaggaaaaacgcaaaagagaagattctatcacgccggaacggcgcaaaagcgagggggtcttaggcaccagcgaggaggatgagcttaagtcttgcttctggaagcgtctcggttggagcgagagcagtcgtattattgttctggatcaatcagacctatccgactag

SEQ ID NO: 79102 - DNA, 4494 bp, Artificial Sequence
  derived and/or modified sequence
atgagcagagctgtgcggctgcctgtgccctgccctgtgcagctgggcaccctgagaaatgacagcctggaggcccagctgcacgagtatgtgaagcagggcaactacgtgaaggtgaagaagatcctgaagaagggcatctacgtggatgctgtgaacagcctgggccagacagccctgtttgtggccgccctgctgggcctgaggaagtttgtggatgtgctggtggactatggcagtgaccccaaccaccgctgctttgatggcagcacccctgtgcatgctgctgccttcagcggcaaccagtggatcctgagcaagctgctggatgctggaggagacctgcggctgcatgatgagcggggccagaaccccaagacctgggccctgacagctgggaaggagaggagcacccagatcgtggagttcatgcagagatgtgccagccacatgcaggccatcatccagggcttctcctatgacctgctgaagaagattgacagcccccagaggctggtgtacagccccagctggtgtggcggcctggtgcagggcaaccccaacggcagccccaaccggctgctgaaggccggggtcatcagcgcccagaacatctacagctttggatttgggaaggccatgccctggttccagttctacctgaccggggccacccagatggcctacctgggcagcctgcccgtcatcggggagaaggaggtgatccaggctgatgatgagcccaccttctccttcttcagcggcccctacatggtgatgaccaacctggtgtggaatggcagccgggtgacagtgaaggagctgaacctgcccacccacccccactgcagccggctgcggctggccgacctgctgattgctgagcaggagcacagcagcaagctgcggcacccctacctgctgcagctgatggctgtgtgcctgagccaggacctggagaagacccggctggtgtatgaaagaatcaccatcggcaccctcttctctgtgctgcatgaaagaagaagccagtttcctgtgctgcacatggaggtgattgtgcacctgctgctgcagatcagtgatgccctgcgctacctgcacttccagggcttcatccacaggagcctgagcagctatgctgtgcacatcatcagccctggagaggcccggctgaccaacctggagtacatgctggagagcgaggacagaggagtgcagagggacctgaccagggtgcccctgcccacccagctgtacaactgggccgcccctgaggtgatcctgcagaaggccgccaccgtgaagagtgacatctacagcttctccatgatcatgcaggagatcctgacagatgacatcccctggaagggcctggatggctctgtggtgaagaaggctgtggtgtctggcaactacctggaggctgatgtgcggctgcccaagccctactatgacatcgtgaagagcggcatccacgtgaagcagaaggacaggaccatgaacctgcaggacatccgctacatcctgaagaatgacctgaaggacttcaccggggcccagaggacccagcccacagagagcccccgggtgcagagatatggcctgcacccagatgtgaatgtgtacctgggcctgaccagcgagcacccccgggagaccccagacatggagatcatcgagctgaaggagatgggcagccagccccacagcccccgggtgcacagcctcttcacagagggcaccctggacccccaggccccagacccctgcctgatggcccgggagacccagaaccaggatgccccctgcccagcccccttcatggccgaggaggccagcagccccagcacaggccagcccagcctgtgcagctttgagatcaatgagatctacagcggctgcctgatcctggaggatgacatcgaggagcccccaggggccgccagcagcctggaggctgatggccccaaccaggtggatgagctgaagtccatggaggaggagctggacaagatggagcgggaggcctgctgcttcggctctgaagatgagagcagcagcaaggccgagacagagtacagctttgatgactgggactggcagaatggcagcctgagcagcctgagcctgcctgagagcacccgggaggccaagagcaacctgaacaacatgagcaccacagaggagtacctgatcagcaaatgtgtgctggacctgaagatcatgcagaccatcatgcatgaaaatgatgaccggctgagaaatattgagcagatcctggatgaggtggagatgaagcagaaggagcaggaggagaggatgagcctgtgggccaccagccgggagttcaccaatgcctacaagctgcccctggccgtgggcccccccagcctgaactacatcccccctgtgctgcagctgagcggcggccagaagccagacaccagcggcaactaccccaccctgccccgcttccccaggatgctgcccaccctgtgtgaccccgggaagcagaacacagatgagcagttccagtgcacccagggcgccaaggacagcctggagaccagccgcatccagaacaccagcagccagggccggccccgggagagcacagcccaggccaaggccacccagttcaacagcgccctcttcaccctgagcagccaccggcagggccccagcgccagccccagctgccactgggacagcaccaggatgtctgtggagcctgtgtcctctgagatctacaatgctgagagcaggaacaaggatgatggcaaggtgcacctgaagtggaagatggaggtgaaggagatggccaagaaggccgccaccggccagctgactgtgcccccctggcacccccagagcagcctgaccctggagagcgaggccgagaatgaaccagatgccctgctgcagccccccatccgcagcccagaaaatacagactggcagagggtgattgagtaccaccgggagaatgatgagcccagaggaaatggcaagtttgacaagacaggcaacaatgactgtgacagcgaccagcacggccggcagccccggctgggcagcttcaccagcatccgccaccccagcccccggcagaaggagcagcctgagcacagcgaggccttccaggccagcagtgacaccctggtggccgtggagaagagctacagccaccagagcatgcagagcacctgcagccctgagagcagcgaggacatcacagatgagttcctgaccccagatggagagtacttctacagcagcacagcccaggagaacctggccctggagaccagcagccccatcgaggaggactttgagggcatccagggcgcctttgcccagccccaggtgtctggagaggagaagttccagatgaggaagatcctgggcaagaatgctgagatcctgcccaggagccagttccagcctgtgcgcagcacagaagatgagcaggaggagaccagcaaggagagccccaaggagctgaaggagaaggacatcagcctgacagacatccaggacctgagcagcatctcctatgagccagacagcagcttcaaggaggccagctgcaagacccccaagatcaaccacgcccccacctctgtgtccacccccctgagccctggctctgtgtcctctgctgccagccagtacaaggactgcctggagagcatcaccttccaggtgaagacagaatttgccagctgctggaacagccaggagttcatccagaccctgagtgatgacttcatctctgtgcgggagcgggccaagaagctggacagcctgctgaccagcagcgagaccccacccagccggctgaccggcctgaagaggctgagcagcttcatcggggccggcagccccagcctggtgaaggcctgtgacagcagcccccctcatgccacccagaggaggagcctgcccaaggtggaggccttcagccagcaccacattgatgagctgcccccacccagccaggagctgctggatgacatcgagctgctgaagcagcagcagggcagcagcacagtgctgcacgagaacacagccagtgatggcggcggcacagccaatgaccagaggcacctggaggagcaggagacagacagcaagaaggaggacagctccatgctgctgagcaaggagacagaggacctgggggaggacacagagcgggcccacagcaccctggatgaggacctggagcgctggctgcagcccccagaggagagcgtggagctgcaggacctgcccaagggcagcgagcgggagaccaacatcaaggaccagaaggtgggggaggagaagaggaagagagaagattccatcaccccagagaggaggaagtcagaaggagtgctgggcaccagcgaggaggatgagctgaagagctgcttctggaagaggctgggctggagcgagagcagccgcatcatcgtgctggaccagagcgacctgagtgactag

SEQ ID NO: 79103 - DNA, 4494 bp, Artificial Sequence
  derived and/or modified sequence
atgagccgggccgtgcggctgcccgtgccctgccccgtgcagctgggcactctacgaaatgacagcctggaagctcaactccatgagtatgttaagcagggcaattacgtgaaggtgaagaaaatactgaagaagggtatttacgtagacgcagtaaattcacttggtcagacagctttgttcgtggctgcccttctaggccttcgcaaattcgtggacgtgttggtggactacggaagtgaccctaaccatagatgttttgatggctctacacccgttcacgcagcagcattctctgggaaccagtggattctgagcaaacttctggatgctggtggggacttgaggctccacgatgagcgcggccaaaatccaaaaacctgggcgctcactgcaggaaaagagcgctctacccagatagtggaatttatgcagcgatgtgcctcgcacatgcaggctattattcagggtttctcttatgatctgctgaagaaaattgacagtccacagcgactcgtgtacagcccaagttggtgcggcgggttggtgcaggggaaccctaacggaagcccaaatagattgctgaaagcgggagttattagtgcgcagaacatttactcatttgggtttggaaaagcaatgccatggttccagttctaccttactggagcaacccagatggcttatcttggaagcttaccagtgatcggagagaaggaagtgattcaagcagatgatgaacctaccttcagcttcttttctggcccttacatggtcatgaccaatttggtatggaacggatccagggtgacagttaaggaacttaatctgccaacccacccccattgcagccgattaaggctggctgatctgcttatagccgaacaggagcacagcagcaaactgaggcacccttacctcctgcagctgatggcagtgtgcctgagccaggatttggagaagacccgcctcgtctatgagagaatcacgatcggtacgctgttctctgtgctgcacgaaagacgctcacagttccctgttttacatatggaagttatcgtgcacctgctcttacagatttctgacgccttgcggtatctgcattttcaaggtttcatccatcgctccctgagctcttatgccgtgcacatcatttccccaggagaggcccggttgacgaatctggaatatatgctagagtcggaagaccgcggggtgcaacgggatctgacccgcgtaccgttaccaactcagttatataactgggccgcccccgaggtgattctccagaaagccgcgacagtgaagagcgacatctacagcttctcgatgatcatgcaggaaattcttactgatgatataccctggaaggggctagatggtagcgtggtcaaaaaagccgtggtgagcggaaattacctcgaggccgacgtgcgtctccccaagccctattacgacatagtgaagagcggcatccacgtcaaacagaaagacagaactatgaacctccaggatatccggtacattctcaagaatgatcttaaagactttaccggagctcaaaggacccaacctacagagtcccctagagtgcagcggtatggattacatccagacgtgaatgtgtatttgggactcacgtccgagcaccccagagagactccggacatggaaataatcgaattgaaagaaatggggagtcagcctcatagccctagggtccactccctgttcacagaaggtacgctggacccacaggccccagatccgtgtctgatggcacgtgagacccaaaatcaggacgcaccatgtccggccccctttatggcagaggaggctagctctccaagtactgggcaaccctctctctgtagtttcgagataaatgagatctattctggctgcctcatccttgaggacgatatcgaggaacccccaggcgccgcctcctcactggaagcagacggcccaaaccaagtggatgagctcaagagcatggaagaggagctggacaaaatggagagggaagcctgttgttttggctcagaagatgaaagctcttcaaaggccgagactgaatatagctttgatgactgggactggcagaacggtagcttgtcaagcctttcccttccagaatctacaagggaagcgaagtcgaacttaaacaacatgtccactaccgaggagtatctgatctcgaagtgtgttctggacttgaaaatcatgcagaccattatgcacgaaaatgatgataggttgcggaacatcgaacagatcctcgatgaggtggaaatgaaacagaaggagcaagaggagaggatgtccttgtgggctacatcacgagagtttactaacgcctataagttaccacttgccgtgggccccccatctttgaattacattcctccagtgctccaactgagcggcggacagaagcccgatactagtggaaattaccccacactcccgaggtttccgcgcatgctgccaaccctgtgcgaccctgggaagcagaacactgatgagcaatttcagtgtacacagggtgccaaggattctttagagacctcccggatacagaacacgtcttcccaggggaggcctcgcgaaagcacagcacaggccaaggccacccagttcaatagtgctctgtttactttatcttcgcataggcaggggccatcggccagtccttcctgtcattgggacagcacgagaatgagcgtcgagccagtctccagcgaaatatacaacgccgagtctcggaataaggatgacggtaaggtgcacctaaagtggaaaatggaggtgaaggagatggctaaaaaggcagccacaggacagctcacggtcccaccttggcacccacagagtagtctgacactggagtcagaggcagagaatgaaccagacgcactccttcagccccccatccgcagtcccgagaatactgattggcagcgtgtgattgagtaccatagagagaacgacgagccaagaggcaacggaaaatttgacaagaccgggaataacgactgtgactccgatcagcacggccgacagccaaggctcggctcatttacatcaattcgtcatccgtccccaaggcaaaaggaacagccagagcattccgaagctttccaggctagcagcgacaccttggtcgcagtggagaagtcctacagccaccaaagtatgcaatccacctgtagtcccgagtctagcgaggatataacggatgaatttttgacgccagatggtgaatatttctactcctctacagctcaggaaaatttggcactggaaacaagctcgccgatcgaagaagacttcgaggggatccagggagccttcgctcagccacaagtgagtggagaagaaaagttccaaatgcggaagatcctgggtaagaatgccgaaattcttcccagaagccagtttcagcccgtccggtccacagaagacgagcaggaggagaccagtaaagaatcacccaaagaacttaaagaaaaggacattagtttaactgatatccaggacctgtcttctatctcctacgaaccagactcttcctttaaagaggcatcatgcaaaacaccaaagataaaccatgctcctacatccgtgagcacaccactgagccctggaagcgtcagctcagccgcctcccagtacaaggactgccttgagtctatcactttccaggttaagacggagttcgccagctgctggaattcccaagagtttatccagacactgtcagatgacttcatcagcgtgagggagagggccaaaaaacttgactcactgcttacctcgtctgaaacgccacccagcaggctgaccgggctaaagagactgtcctccttcatcggggcaggcagtccttcactggtcaaagcctgcgactcttcacccccccacgccacccagaggcggtctctgcccaaggtggaagctttctctcagcaccatatagacgagcttccacccccctctcaggagctgttggatgatattgaactgctgaagcaacagcaggggtcttccactgtgcttcacgagaacaccgcctcagacggtggaggtactgccaacgatcagcgccacctcgaagagcaagagaccgatagcaaaaaagaagacagttcaatgttgctgtcaaaagagacagaggacctgggcgaagataccgagcgggctcacagcacattggacgaggatctcgagcggtggctgcaacccccggaggagtcagttgaactccaggacctgccgaaggggtctgagcgcgaaacaaacatcaaggatcagaaagtcggggaagagaagcgaaaaagagaggatagtattacgcccgaacgacgtaagtctgaaggagtcctcggaacctctgaggaggacgagttgaagtcctgcttctggaagaggttagggtggagcgaatctagccggataatcgttctggatcaaagcgatctgagcgactag

SEQ ID NO: 79104 - DNA, 4494 bp, Artificial Sequence
  derived and/or modified sequence
atgtcccgggctgtgcgccttcccgtgccctgtcctgtgcagctcgggacattgcgcaatgattcactggaggcccaactgcatgaatatgttaagcaagggaactacgtcaaagtgaaaaagattcttaagaaggggatctacgtggacgcggtaaacagcctggggcaaacagctctgttcgtggccgcacttttaggactgagaaagtttgttgacgtgctggtggactacggaagtgatcctaaccacaggtgttttgacggctctacgcctgtacacgcagcagcattcagcggaaaccagtggatcctgtctaagttacttgacgctgggggagatttgcggcttcacgacgaacgtggacagaacccaaagacctgggcactgaccgccggtaaggagaggtctactcagatcgtggagttcatgcagcgctgcgcttcacatatgcaagccataatccagggatttagctacgacctgctgaaaaaaatcgacagcccacaacgactggtctattcccccagctggtgtggtgggctcgtgcagggtaacccaaacggatcccccaaccggctcttgaaggccggtgtcatcagcgcccagaacatttacagctttggtttcgggaaggcaatgccatggtttcaattctacctgaccggggctacgcagatggcctatctcggcagtcttcccgtgatcggcgaaaaagaggtgattcaggctgacgacgagcctacgttctcattcttcagcggcccttatatggttatgacaaatttagtgtggaatgggtcaagagtaaccgtaaaagaactcaacctgcccacccatcctcactgtagtcgattgaggctggcggatctactgatcgccgagcaggagcattcttctaagctgcgacatccgtacttgcttcagctgatggccgtgtgtctgtcacaggacctggagaaaactcgcctcgtgtacgaacgcattacaattggcaccttgtttagcgtgctccacgaacgtcggtcgcaattccctgtgctgcatatggaggtgatcgtacacctgttgcttcagatttctgacgcactgcgatacctccacttccagggcttcatacaccggtctctgtccagttacgcggtgcacattatctcacctggcgaggctaggctgactaacctcgaatacatgctggagtcagaggaccgcggagtccaacgtgatcttacccgcgtacccctgccgacacagctgtacaattgggccgcacccgaggttattctccagaaagccgcaactgttaagtctgatatctacagcttctcaatgattatgcaggagattctcacggatgatattccctggaaaggacttgacggttctgtggtcaagaaggctgtagtgagcggaaactacctagaggcggacgtcaggctaccaaagccttattacgatatcgtcaaatccgggatccatgtgaaacagaaggaccgcactatgaaccttcaggatatcagatatatcctcaagaacgatctcaaagatttcacaggtgcccagagaacccagcctaccgagtcgccacgcgtgcagagatacggactacaccctgacgtgaacgtgtatctgggccttacctccgaacacccccgtgaaactcctgacatggagataatcgaactaaaggaaatggggagtcagcctcattcgccgcgtgtgcattccctgttcacagaagggaccctggacccgcaggcccctgatccctgcctcatggctagagagacccaaaatcaggatgccccatgccctgcgccattcatggccgaggaggcgagctcaccctccacaggtcagcctagtctgtgttccttcgaaattaatgagatctatagcggttgcttaatacttgaggacgatattgaggaaccacccggtgccgcaagcagtctagaggcagatggacctaatcaggtggacgaattgaagtcgatggaagaggaactagacaaaatggagagagaggcttgctgtttcggcagcgaagacgaatccagcagtaaagccgaaacagagtattcatttgacgactgggattggcaaaatggttccctgagcagtctgtccctcccagagagcacgagggaagccaaatctaacctcaacaacatgtcgaccaccgaggagtatctgatcagcaagtgcgtgctggatctcaaaataatgcagacaatcatgcacgagaatgacgacaggttgcggaatattgaacaaattctcgacgaagtggagatgaaacagaaggagcaggaggagcgaatgtctctctgggccacctccagggaatttacaaacgcttacaaattgccactcgccgtcgggccaccttctctcaattacattccaccggtgttacaactttcaggcggacaaaaaccagacacaagcggtaactaccctaccctccccaggtttcctcgaatgcttccaacactttgtgatccagggaagcaaaacaccgacgagcagtttcagtgtacccagggagctaaggattccttggagacatccaggatacagaacacatcttcccagggaaggcctcgggagtccaccgcacaggccaaggctactcagtttaactccgctctcttcacactgagctcacatcgccaaggaccgtccgcgagtccatcttgtcactgggattcaacccggatgagcgtcgagcctgtttcttccgagatttataacgccgagtctaggaacaaggacgacggcaaggtccatttaaaatggaagatggaggtgaaggagatggcaaaaaaggcagcaaccggtcaactgacagtgccaccatggcacccacagtcttccttgacactggagtccgaggccgaaaacgagcctgatgctttattgcagccgccaatccgttctccagagaacacagactggcagagagtgatcgagtatcaccgtgagaacgatgaaccgcgaggcaatggaaaatttgataagaccgggaacaacgattgcgattccgatcaacacggccgacaaccccgacttggaagcttcacatcaattcggcatccatcccctagacagaaagaacagcccgagcactcggaagcttttcaggcttcctctgacacgcttgtggcagtcgaaaagagctactcccaccagtcgatgcaatcaacctgcagcccagaaagctcagaagatattacagatgagtttctgacacctgacggcgaatatttttacagctctactgctcaggagaacctggccctcgaaacgagtagccccatagaggaggattttgagggcatccagggcgcatttgcacagcctcaggtgagcggcgaggagaaatttcagatgcggaagattcttggcaaaaatgccgagatcctaccacgctcccaatttcaaccagttagaagcactgaggacgagcaggaagagacctccaaggagagcccgaaggagttaaaggagaaggatattagtctaacagatatacaagacctctcaagcatatcgtacgagcccgattcttcttttaaagaagcctcctgtaaaacccccaagattaatcatgcccctacatcggtgagtacccctctgtcccccggaagcgtctcctccgccgctagtcagtataaagactgtctggaatcgatcacatttcaggtcaaaaccgagtttgcttcatgttggaactcccaagagttcatccagactttgtctgacgacttcatctccgtccgggagcgggctaagaagcttgactccttattaaccagcagcgaaacgcccccatctagactgaccggactcaaacgcctatcgagcttcattggagccggatccccttctctggtgaaggcttgcgatagcagcccgccacatgcaacacagagaagatcgttacctaaggtagaagcgttctctcagcaccatatcgacgagctcccaccaccttcccaagagttactggacgacattgagctgttgaaacaacagcagggctcatctactgtgcttcatgaaaacacggcctctgacggcggaggaactgcaaatgaccaacggcatttggaagaacaggagacggattccaagaaagaagactcaagcatgcttctgtcaaaggagaccgaggacttaggtgaagatacggaacgggcacattctacgttagacgaggacctggagcggtggcttcagccacccgaagagtcagtggaactgcaagatcttccaaagggaagcgagcgcgagactaatatcaaagaccagaaggtgggcgaagaaaagagaaagagggaagacagtataacacccgagagacggaagtccgagggtgtgttgggtacctccgaagaggacgaactgaagtcctgtttttggaagcggctgggctggagcgagtcttctaggatcattgtgctagatcagtcagacctgtcggactag

SEQ ID NO: 79105 - DNA, 4942 bp, Artificial Sequence
  derived and/or modified sequence
atcagtccgcattccccgcacccacccacgtcttcccgggagtcgtatcccgagcatggaggttactgagaccgttatttcttcatggcctgcctagcttaagcagtagctggaaaagatgtctcgggctgttcgtcttccagtcccctgtcctgttcaacttggtaccttaagaaatgactccctggaagctcagcttcatgagtatgtcaaacaagggaactatgtgaaagtgaagaaaattcttaagaaaggaatttatgttgatgcagttaactccttgggccaaacagcactttttgttgcggcgttattgggccttaggaaattcgttgatgttctggtggattatggatcagatccaaatcaccgctgctttgatgggagcacccctgtccatgcagcagcattttcgggcaatcagtggatccttagcaaactgctggatgcaggaggtgacctgcgactccacgatgagaggggtcaaaacccgaagacttgggctttgacagcaggaaaggagcgtagcacccagatagtggagttcatgcagcgctgtgcctcacacatgcaggccatcatccagggcttctcttacgacctcctgaagaagatagactccccgcagcggcttgtctacagcccgtcctggtgtgggggcctcgtgcagggaaaccctaatggctctcctaaccgactgcttaaagctggagtcatttctgctcaaaatatctacagctttggttttgggaaggctatgccttggtttcagttttatcttactggggcgacacagatggcctatctaggatctcttccggtcattggagaaaaggaagtgattcaagctgatgatgagcccaccttctctttcttcagcggcccctacatggtcatgaccaacctagtgtggaatgggagcagggtcacagtgaaagagctgaatctccccacccacccacactgcagcaggctgcggctggccgacttgttaattgccgagcaggaacacagcagcaagctgcggcacccctacttgctacagttgatggctgtgtgtctctcccaggacctagagaaaacccgccttgtgtacgagcgcatcactatcggcacattgttcagtgtccttcatgaacgacggtcccagttcccagtgctgcacatggaggtgattgtgcacctgctgctccagatatctgatgccctgagatacctgcatttccaggggtttatccaccgctccctcagctcctatgctgtccatatcatctccccaggtgaagcgaggctgaccaacctggagtacatgttggaaagcgaggacagaggtgtacagagggacctgactcgagtgccccttcctacgcagctatacaactgggccgcaccagaagtgatcttacagaaggcagccacagtgaaatcagacatctacagcttttctatgatcatgcaggagattttaacagatgacataccctggaagggcttagatggctcagttgttaaaaaagccgtagtctcggggaattatttagaagctgatgtcaggcttccgaaaccttactatgatattgttaagtcaggcatccacgtcaagcagaaagaccgaactatgaaccttcaagatatccggtatattctgaagaatgacttaaaggattttactggagcccagagaactcaaccaaccgagagccccagagtgcagagatacggactccatcccgatgtcaatgtctatctaggactgacttcagaacaccccagagagacacctgacatggaaatcatagaactaaaggaaatgggcagtcaacctcattcaccaagggttcactctttattcactgaggggacactagatcctcaggccccagatccatgtctgatggccagggagactcagaatcaagatgctccttgccctgctccatttatggcagaagaggccagcagccccagcacaggtcagccaagcctctgcagtttcgaaatcaacgagatctactcaggctgcttgattttggaagatgacatagaagagcctccaggagctgcttcatctttggaggcagacggacctaaccaggtagatgaactgaaatccatggaagaagagctggataagatggagagagaggcgtgttgttttggcagtgaggatgagagctcttcaaaagctgagacagagtactcttttgatgactgggactggcaaaacggttcactcagttcactcagccttcctgagtcaaccagagaagccaagagcaatttgaacaacatgtccacgactgaggagtatctcatcagtaagtgtgtgctggatctaaagattatgcagacaataatgcacgagaatgatgataggctgaggaatatcgagcagatattagatgaagtcgagatgaaacagaaggaacaggaagagcgcatgtctttatgggccacttcaagagagtttacaaatgcctacaagttacctctggccgtgggccctccatctttaaactatattcctcctgtcctacagctttcagggggtcagaagccagacaccagtggcaactacccaaccctaccaagatttccaagaatgctgccgactctttgtgaccctggaaaacagaacacagatgaacaatttcagtgcactcaaggagccaaggacagtttggaaacaagcaggatccaaaataccagtagccagggaagacctagagagtccactgcccaagccaaagccacacagtttaatagtgcactcttcactctgtcaagccaccggcagggaccttctgcatcacccagctgtcactgggactctaccaggatgagtgtggaacctgtttcttctgaaatctataatgcagagtccagaaataaagatgatggaaaggtacacttaaaatggaaaatggaggtgaaagaaatggcaaagaaagcagctactggacagctcacagtacctccttggcatcctcagagtagtctgactttagagagcgaggctgaaaatgagcccgacgccctgctgcagccccccattaggagcccagaaaacacggattggcagcgagttattgagtatcatagggaaaatgatgagcccagaggaaatggcaagtttgacaagacgggcaacaatgactgtgacagtgaccagcatggcagacagcccaggcttggaagcttcaccagtatcaggcacccatctcccagacaaaaggagcaaccagagcatagtgaagccttccaagcaagttctgacacattggtggctgtagagaaatcttacagtcatcagtccatgcaatcaacttgttcaccagagtcttctgaggatataacagatgaatttttaactccagacggtgaatatttttactcctcgactgctcaagaaaacttagctctagagacctcgagtcccatagaagaggactttgaaggaatacaaggtgcatttgcccaacctcaagtctctggtgaggaaaagttccaaatgagaaaaattcttggaaagaatgctgagattttgcccaggtctcaatttcaacctgtacgaagtactgaagatgaacaagaagagacatcaaaggagtcaccaaaggaactgaaagagaaagacatatcattgacggatattcaagacctgtctagtatctcctatgaaccagacagctcttttaaggaagcttcatgcaaaacacccaaaataaaccatgcacctaccagtgtcagcactccactcagcccagggtccgtttcttcagctgccagtcagtataaagactgccttgaaagtatcacatttcaggttaagacagagtttgcctcttgctggaacagtcaagaatttattcaaactttgtctgatgactttataagtgtccgagagagagcaaagaaactggattctctccttacttcctctgaaactcccccttcaagactgactggtcttaaaagattgtcttcatttattggggctggatcccccagccttgttaaggcatgtgactcatcaccaccccatgccacccagagaaggagcctgcctaaagtagaagccttctcacagcatcacattgatgagctgccaccaccatctcaggagctacttgatgacattgagctcttgaaacagcagcagggctcatccacggtgttgcatgagaacacagcaagtgatggaggaggcactgcaaatgatcaaaggcacttagaagaacaagaaactgacagtaaaaaagaagatagtagtatgcttttgtccaaagaaactgaagatcttggagaggacacagagagagctcactctactctggatgaggacctggaaagatggctgcagccacctgaggagagcgtggagctacaagaccttcccaagggctctgaaagggagacaaatatcaaagatcaaaaagttggtgaagagaaaagaaaaagggaagatagcattacaccagaaagaaggaaatcagagggtgttctagggacttctgaagaagatgaactaaaatcctgtttttggaagcgactaggttggtccgaatcatccaggataatcgtgctggatcagagtgacttgtcagactgattggaattggatcatagacggactcctggcctgagtttgagtgtcctggttgtaagctcctttcttctctttctgcttcagttgctgtcagggcagcagttccagttctgtaagtctcactttgttcagctgccacaatagacatcatcgtttggccctctctgttagcagcacattcaaccatttgttttcagtcagatttctgaaaagtgagaggtagttttgatagtaaaaatttttggttgtgcctagaatggctttggttttgttgatgttaattttcaaaaactttaactcttgttatataataaaatgtttaattttaataac

SEQ ID NO: 79106 - DNA, 1440 bp, Artificial Sequence
  derived and/or modified sequence
atgggcttcgagagagacagcgagggcgacagcctgggcgccagacccggcctgccctacggcctgagcgacgacgagagcggcggcggcagagccctgagcgccgagagcgaggtggaggagcccgccagaggccccggcgaggccagaggcgagagacccggccccgcctgccagctgtgcggcggccccaccggcgagggcccctgctgcggcgccggcggccccggcggcggccccctgctgccccccagactgctgtacagctgcagactgtgcaccttcgtgagccactacagcagccacctgaagagacacatgcagacccacagcggcgagaagcccttcagatgcggcagatgcccctacgccagcgcccagctggtgaacctgaccagacacaccagaacccacaccggcgagaagccctacagatgcccccactgccccttcgcctgcagcagcctgggcaacctgagaagacaccagagaacccacgccggcccccccacccccccctgccccacctgcggcttcagatgctgcacccccagacccgccagaccccccagccccaccgagcaggagggcgccgtgcccagaagacccgaggacgccctgctgctgcccgacctgagcctgcacgtgccccccggcggcgccagcttcctgcccgactgcggccagctgagaggcgagggcgagggcctgtgcggcaccggcagcgagcccctgcccgagctgctgttcccctggacctgcagaggctgcggccaggagctggaggagggcgagggcagcagactgggcgccgccatgtgcggcagatgcatgagaggcgaggccggcggcggcgccagcggcggcccccagggccccagcgacaagggcttcgcctgcagcctgtgccccttcgccacccactaccccaaccacctggccagacacatgaagacccacagcggcgagaagcccttcagatgcgccagatgcccctacgccagcgcccacctggacaacctgaagagacaccagagagtgcacaccggcgagaagccctacaagtgccccctgtgcccctacgcctgcggcaacctggccaacctgaagagacacggcagaatccacagcggcgacaagcccttcagatgcagcctgtgcaactacagctgcaaccagagcatgaacctgaagagacacatgctgagacacaccggcgagaagcccttcagatgcgccacctgcgcctacaccaccggccactgggacaactacaagagacaccagaaggtgcacggccacggcggcgccggcggccccggcctgagcgccagcgagggctgggcccccccccacagcccccccagcgtgctgagcagcagaggcccccccgccctgggcaccgccggcagcagagccgtgcacaccgacagcagctag

SEQ ID NO: 79107 - DNA, 1440 bp, Artificial Sequence
  derived and/or modified sequence
atggggttcgagcgggattctgaaggcgactcactgggcgcccgaccagggctaccttacgggctgtctgacgacgagtccggtggcggtagggccctgagtgccgagtctgaggtagaggagcccgcccgaggcccaggcgaggcaaggggcgagcgacctggacccgcctgtcagctgtgcggtggaccaactggagaaggcccttgttgtggcgccggcgggcctggtggtggaccactgttgccacctcgcctgctgtacagctgtagactttgcacattcgtctctcactactcatcgcatctaaagcgccacatgcagacacattctggtgagaagcctttccgatgtggccgctgtccatacgctagcgcccagctggtgaatctaacacggcacacacgaacacataccggggaaaagccctaccgatgtccacactgtccatttgcctgctcatcacttggcaatctgcgacgtcaccagcgtactcacgctggcccacccactcctccatgccccacctgtggattccggtgctgtaccccacgccctgcccggccaccatctcctactgaacaggagggcgctgtacctcgcaggcccgaagacgccttgttactgcctgatcttagcctgcacgtcccacccggcggtgcttcgtttctgcccgactgcggccagttacgcggggagggagaagggctatgcggtactggttctgagcctttgccggagcttctctttccatggacctgtcgggggtgcggccaggagctcgaagaaggcgaaggcagccggctcggcgccgccatgtgtggacggtgcatgcgcggggaggccggcggcggcgcaagtggcggaccacaagggccatcagacaagggtttcgcgtgttccctatgcccctttgcaactcattacccgaatcatctggcccgccacatgaagacacactcgggtgaaaagccctttaggtgcgcacggtgcccctacgctagtgctcacctcgacaatcttaagcgccatcaaagggtgcataccggtgagaagccctacaagtgcccactgtgcccttacgcttgtggaaacctggctaacttgaaaagacacggtcgcattcattctggagacaagccatttcgatgcagcctgtgtaattattcttgcaaccagtctatgaatctgaagcgacatatgctccggcataccggggagaaaccctttcggtgcgccacctgtgcttacacaacgggccactgggataactacaaaaggcaccagaaagttcacggccacggcggagccggaggccccgggctgtccgcgtctgaaggctgggccccgccgcactccccaccctcggtgctctccagccgaggacctcctgccctggggaccgcgggtagtcgagccgtgcacacggactcttcttag

SEQ ID NO: 79108 - DNA, 1440 bp, Artificial Sequence
  derived and/or modified sequence
atgggctttgagcgggacagcgagggggacagcctgggcgcccggcccggcctgccctacggcctgagtgatgatgaaagtggcggcggccgggccctgtctgctgagagcgaggtggaggagcccgcccggggccctggagaggcccggggggagcggcccggccctgcctgccagctgtgtggcggccccactggagagggcccctgctgcggggccggcggccctgggggcggccccctgctgcccccccggctgctgtacagctgccgcctgtgcacctttgtgagccactacagcagccacctgaagaggcacatgcagacccacagcggggagaagcccttccgctgtggccgctgcccctatgccagcgcccagctggtgaacctgaccaggcacaccaggacccacactggagagaagccctaccgctgcccccactgcccctttgcctgcagcagcctgggcaacctgcggcggcaccagaggacccatgctggcccccccaccccaccctgccccacctgtggcttccgctgctgcacccccaggcctgcccggccccccagccccacagagcaggagggcgctgtgcccaggaggccagaagatgccctgctgctgcctgacctgagcctgcacgtgcccccaggaggagccagcttcctgcctgactgtggccagctgcggggggagggggagggcctgtgtggcaccggcagcgagcccctgcctgagctgctcttcccctggacctgccggggctgcggccaggagctggaggagggggagggcagccggctgggcgccgccatgtgtggccgctgcatgagaggagaggccggcggcggggccagcggcggcccccagggccccagcgacaagggctttgcctgcagcctgtgcccctttgccacccactaccccaaccacctggcccggcacatgaagacccacagcggggagaagcccttccgctgtgcccgctgcccctatgccagcgcccacctggacaacctgaagaggcaccagagggtgcacactggagagaagccctacaagtgccccctgtgcccctatgcctgtggcaacctggccaacctgaagagacatggccgcatccacagcggggacaagcccttccgctgcagcctgtgcaactacagctgcaaccagagcatgaacctgaagaggcacatgctgcggcacactggagagaagcccttccgctgtgccacctgtgcctacaccaccggccactgggacaactacaagaggcaccagaaggtgcacggccacggcggggccggcggccctggcctgagcgccagcgagggctgggccccaccccacagcccccccagcgtgctgagcagccggggccccccagccctgggcacagctggcagcagagctgtgcacacagacagcagctag

SEQ ID NO: 79109 - DNA, 1440 bp, Artificial Sequence
  derived and/or modified sequence
atgggcttcgagcgggacagcgagggcgacagcctgggcgcccggcccgggctcccgtacggcctatcagatgacgagtccggcggagggagggctcttagcgcggaatccgaggtggaagaacctgcgcgaggtccaggcgaagccagaggagaacgacctggacctgcatgtcagctgtgcgggggacccactggagaaggaccctgttgcggtgccggagggcccggggggggtcccttgttacctccaagactgctgtattcctgccggctctgcacatttgtgagtcactattcctctcatctgaaacggcacatgcagacacatagtggagagaagcccttcaggtgtggccgctgcccttacgccagcgcacagctcgttaatctgacccgccatactaggactcatacaggcgagaagccctaccggtgcccccattgccctttcgcgtgctcctcccttgggaaccttcgtaggcaccagaggacccacgctgggccccctactcctccatgcccaacatgcggcttccggtgctgcacacctcgccctgcccgaccaccatcacctactgaacaggagggcgcggtgcccaggaggcctgaggacgccctcctgctgccagaccttagtctgcacgtaccgcctgggggggctagtttcctgcccgattgtggacagctcagaggggagggggaaggactgtgtgggactgggtccgagccactcccggagctgctgtttccctggacttgtcggggctgcgggcaggaactggaagaaggggagggttctcgcctaggcgccgcaatgtgcggcagatgtatgcggggcgaggcaggcggaggcgcgtcaggaggacctcaggggccatcggataaaggtttcgcatgctcgctgtgtccattcgctacgcattacccaaaccatttagcaaggcacatgaagacccactctggcgagaagccattccgatgtgcccggtgcccctacgcctcagcccatctggataacctgaaacgacatcagcgggtgcacactggcgagaagccttacaagtgtcccctgtgcccatatgcatgtggaaacctcgcgaatcttaaaaggcatggcaggatccattccggggataagccctttcgctgcagtctgtgcaactattcctgcaatcaatcaatgaatctgaagcgccacatgcttcgacacactggtgagaagccattccgatgtgccacttgtgcttatacaactgggcattgggataactataagcgccaccaaaaggttcacggacatggcggagcagggggtcctggcctctctgcctctgaggggtgggcgccaccccattcccccccctcagtgctgagttctcgcggtccacctgctctgggaactgcaggttcccgcgctgtacatacagactccagctag

SEQ ID NO: 79110 - DNA, 1440 bp, Artificial Sequence
  derived and/or modified sequence
atgggatttgaaagggactctgaaggcgacagcttaggtgcccgacctggcttaccctatgggctgagcgatgacgaatctggcggtggaagagcacttagtgctgaaagtgaggtagaggaacccgctcggggacctggcgaggccaggggtgagagaccgggacccgcatgtcagctgtgtgggggtcccacaggggaaggcccatgctgtggagctggcggaccaggcggtggacctcttttgcctccacgacttctctacagttgtaggctatgtacttttgtctcacactattcatcacaccttaaaagacatatgcaaactcacagtggcgaaaagccattcagatgcggcagatgtccctatgcctccgcccaactcgttaacctgactaggcatacgcgcactcataccggggagaaaccctacagatgccctcactgtcccttcgcctgttcctccttagggaatctgcggcgacaccaacggactcatgcaggccctccaacacccccttgccctacctgcggttttcgatgctgcaccccacgtccggcaaggccaccaagcccaaccgagcaggagggggcagtgccacgtagaccagaagacgcactattgttacccgacctcagtttgcatgtgcctcccggtggggctagcttcctacccgactgtggtcagctgagaggcgagggggagggattgtgtggcaccggcagcgaacctttgcctgaacttttgttcccctggacctgcaggggttgcggacaggagcttgaggagggtgagggctccagattaggggcagccatgtgcggtcgctgtatgagaggagaagccggaggaggggcttctggtggcccacaggggccatccgataaagggtttgcctgttccctttgcccttttgcaacccactaccctaaccatttggcccgacacatgaagactcacagtggcgaaaaaccgttccggtgtgctagatgcccctacgcctcagctcacctcgataatctcaaaaggcaccagcgggtccacacaggggagaaaccttataagtgtcctctgtgcccttacgcctgtggtaacttggctaatctcaagaggcatggcagaatccatagtggggataagccctttagatgtagcctttgtaattacagctgcaaccaatcgatgaacctgaaacgccacatgttgagacatactggagagaagccatttaggtgtgcaacctgcgcatacaccaccgggcactgggataactataagagacatcaaaaggtgcatgggcacggtggggctgggggaccaggattatcggcttccgagggatgggcccctcctcattcacccccaagcgtgctgtcatcccgtggcccacccgctttgggcactgcaggctcaagggctgtgcacacggactcatcctag

SEQ ID NO: 79111 - protein, 451 aa, Artificial Sequence
  derived and/or modified sequence
MGAPPGYRPSAWVHLLHQLPRADFQLRPVPSVFAPQEQEYQQALLLVAALAGLGLGLSLIFIAVYLIRFCCCRPPEPPGSKIPSPGGGCVTWSCIVALLAGCTGIGIGFYGNSETSDGVSQLSSALLHANHTLSTIDHLVLETVERLGEAVRTELTTLEEVLEPRTELVAAARGARRQAEAAAQQLQGLAFWQGVPLSPLQVAENVSFVEEYRWLAYVLLLLLELLVCLFTLLGLAKQSKWLVIVMTVMSLLVLVLSWGSMGLEAATAVGLSDFCSNPDPYVLNLTQEETGLSSDILSYYLLCNRAVSNPFQQRLTLSQRALANIHSQLLGLEREAVPQFPSAQKPLLSLEETLNVTEGNFHQLVALLHCRSLHKDYGAALRGLCEDALEGLLFLLLFSLLSAGALATALCSLPRAWALFPPSDDYDDTDDDDPFNPQQESKRFVQWQSSI

SEQ ID NO: 79112 - DNA, 74 bp, Artificial Sequence
  derived and/or modified sequence
atcgaatggaatcaacatcagacggaaaaaaacggaattatcaaatggaatcgaagagaatcatcgaatggacc

SEQ ID NO: 79113 - DNA, 1356 bp, Artificial Sequence
  derived and/or modified sequence
atgggcgccccccccggctacagacccagcgcctgggtgcacctgctgcaccagctgcccagagccgacttccagctgagacccgtgcccagcgtgttcgccccccaggagcaggagtaccagcaggccctgctgctggtggccgccctggccggcctgggcctgggcctgagcctgatcttcatcgccgtgtacctgatcagattctgctgctgcagaccccccgagccccccggcagcaagatccccagccccggcggcggctgcgtgacctggagctgcatcgtggccctgctggccggctgcaccggcatcggcatcggcttctacggcaacagcgagaccagcgacggcgtgagccagctgagcagcgccctgctgcacgccaaccacaccctgagcaccatcgaccacctggtgctggagaccgtggagagactgggcgaggccgtgagaaccgagctgaccaccctggaggaggtgctggagcccagaaccgagctggtggccgccgccagaggcgccagaagacaggccgaggccgccgcccagcagctgcagggcctggccttctggcagggcgtgcccctgagccccctgcaggtggccgagaacgtgagcttcgtggaggagtacagatggctggcctacgtgctgctgctgctgctggagctgctggtgtgcctgttcaccctgctgggcctggccaagcagagcaagtggctggtgatcgtgatgaccgtgatgagcctgctggtgctggtgctgagctggggcagcatgggcctggaggccgccaccgccgtgggcctgagcgacttctgcagcaaccccgacccctacgtgctgaacctgacccaggaggagaccggcctgagcagcgacatcctgagctactacctgctgtgcaacagagccgtgagcaaccccttccagcagagactgaccctgagccagagagccctggccaacatccacagccagctgctgggcctggagagagaggccgtgccccagttccccagcgcccagaagcccctgctgagcctggaggagaccctgaacgtgaccgagggcaacttccaccagctggtggccctgctgcactgcagaagcctgcacaaggactacggcgccgccctgagaggcctgtgcgaggacgccctggagggcctgctgttcctgctgctgttcagcctgctgagcgccggcgccctggccaccgccctgtgcagcctgcccagagcctgggccctgttcccccccagcgacgactacgacgacaccgacgacgacgaccccttcaacccccagcaggagagcaagagattcgtgcagtggcagagcagcatctag

SEQ ID NO: 79114 - DNA, 1356 bp, Artificial Sequence
  derived and/or modified sequence
atgggggctccacccggatatagacccagtgcttgggtgcaccttctacatcagctgcccagggccgactttcaactccgcccggtccctagcgtgttcgccccccaggagcaggagtaccaacaggcactactgttggttgctgctctggctggcctgggcttggggctctctcttattttcattgctgtttacctgataaggttttgttgttgtcggcctcccgaacctcccggtagcaaaatcccctcccccggtggggggtgtgtgacatggtcatgcattgtcgccctgcttgccggctgtacaggcatcggtatcggcttctacggtaactctgagacaagcgatggtgtatcccagctgagctccgcactgctgcatgcaaaccacaccctgtctacaattgaccatctcgtactcgagacagtcgaacggctgggcgaggcagttcggactgagctgactacactggaggaagtgctcgaacccaggacagagctcgttgccgccgctcgaggcgcccgcagacaggcagaggcagcagcgcagcaattgcaggggctggcgttttggcagggcgtcccactgtccccactccaagtggccgagaatgtgagcttcgtcgaagagtataggtggttggcatatgtgctcctcttgctccttgagctgttggtgtgtctgtttacactattaggattggccaagcagtccaaatggttggtgatcgttatgactgttatgagcctcctcgtcttagtgctcagttggggctcaatgggcttggaagccgcaaccgctgtgggactatctgacttctgttctaatcccgatccatacgttctcaacctcactcaagaggagaccggactatcttctgatattctttcgtattatctattatgtaatcgggctgttagcaaccccttccaacagcgattgaccctatctcaacgggctctggccaatatccactcccagctactgggtcttgagcgggaagctgtgccacagttccctagtgctcagaagccattattgagccttgaggagacgctgaatgtcacggaggggaacttccaccaactggtggcactcctccactgccgtagtctccataaggattacggcgctgcgttgcgcggcctgtgtgaggatgcgttagaagggttgctgttcctgctgttgttcagtctcttaagtgctggcgctctcgcaaccgcactgtgctctttaccgagggcctgggccctattccccccatctgacgattatgacgatactgatgatgacgaccccttcaatcctcagcaggagtcaaaaaggttcgtccagtggcagtcaagcatatag

SEQ ID NO: 79115 - DNA, 1356 bp, Artificial Sequence
  derived and/or modified sequence
atgggcgcccctcctggctaccggcccagcgcctgggtgcacctgctgcaccagctgcccagggctgacttccagctgcggcctgtgcccagcgtgtttgccccccaggagcaggagtaccagcaggccctgctgctggtggccgccctggccggcctgggcctgggcctgagcctcatcttcatcgctgtgtacctgatccgcttctgctgctgccggcccccagagcccccaggcagcaagatccccagccctgggggcggctgtgtgacctggagctgcatcgtggccctgctggccggctgcacaggaattggaattggcttctacggcaacagcgagaccagtgatggagtgtcccagctgagcagcgccctgctgcacgccaaccacaccctgagcaccatcgaccacctggtgctggagaccgtggagcggctgggggaggccgtgaggacagagctgaccaccctggaggaggtgctggagcccaggacagagctggtggccgccgcccggggggcccggcggcaggccgaggccgccgcccagcagctgcagggcctggccttctggcagggcgtgcccctgagccccctgcaggtggccgagaatgtgtcctttgtggaggagtaccgctggctggcctacgtgctgctgctgctgctggagctgctggtgtgcctcttcaccctgctgggcctggccaagcagagcaagtggctggtgattgtgatgacagtgatgagcctgctggtgctggtgctgtcctggggctccatgggcctggaggccgccacagctgtgggcctgagtgacttctgcagcaacccagacccctacgtgctgaacctgacccaggaggagaccggcctgagcagtgacatcctgagctactacctgctgtgcaacagagctgtgagcaaccccttccagcagaggctgaccctgagccagagggccctggccaacatccacagccagctgctgggcctggagcgggaggccgtgccccagttccccagcgcccagaagcccctgctgagcctggaggagaccctgaatgtgacagagggcaacttccaccagctggtggccctgctgcactgccgcagcctgcacaaggactatggagctgccctgcggggcctgtgtgaagatgccctggagggcctgctcttcctgctgctcttcagcctgctgtctgctggggccctggccacagccctgtgcagcctgccccgggcctgggccctcttccccccatctgatgattatgatgacacagatgatgatgaccccttcaacccccagcaggagagcaagagatttgtgcagtggcagagcagcatctag

SEQ ID NO: 79116 - DNA, 1356 bp, Artificial Sequence
  derived and/or modified sequence
atgggcgccccccccggctaccggcccagcgcctgggtgcacctgttgcatcagctgcctagagccgactttcaactgaggcccgtcccgtccgttttcgctccacaggaacaggaataccagcaggcccttctgctagttgccgctctcgccggactggggctgggcctgagtctgatcttcatagcagtctatctcatccgcttttgttgctgtaggcctcctgaaccacccggttcaaagatcccaagccccggcgggggctgcgtgacatggtcgtgtattgtggcattactcgcggggtgcacagggataggcattgggttctatgggaatagtgaaacttccgacggtgtatcccagctgtctagcgcactgctgcacgcgaatcacactctgtccactatcgaccacctggtcctcgagactgtggaaaggcttggtgaagctgttagaacggagctgactacgcttgaggaggtgctggaaccccgcacggaactggtggcagcagctcgaggtgctcgcaggcaggcggaggctgcagcccaacaactccagggacttgccttctggcaaggcgtcccattatcaccactgcaagttgccgaaaacgtctctttcgtggaagagtaccgctggctcgcttacgtgctgcttcttctcctggagctcctggtgtgtttatttactctgctcggccttgccaaacagtctaagtggcttgttattgtgatgaccgtcatgtccctgcttgtgctggtgttgtcgtggggaagcatgggccttgaagcagcgacagccgtagggttaagcgatttctgctcaaatcctgatccctatgttttgaatttaactcaagaagaaacaggtttatcctcggacatcctaagctactaccttctgtgcaacagggctgtttcaaacccctttcagcagagactgactttatcccagcgagcacttgccaacattcatagccagctgctcgggcttgaaagggaagcagtaccccagttcccctccgcccagaagcctctgttgtccctagaggagaccctaaacgttactgaaggaaactttcatcagttggttgccctcctgcactgccggtctcttcacaaagattacggagcagctctgagaggcctgtgcgaagatgccctggagggattactgttcctcctgctcttctcactgttaagcgctggggccctggccaccgccctgtgctcgctgcccagagcctgggcgctcttccctccaagcgatgattacgatgatacagacgacgacgatcccttcaatccccagcaggagtcaaaacgcttcgtgcagtggcaaagcagtatctag

SEQ ID NO: 79117 - DNA, 1356 bp, Artificial Sequence
  derived and/or modified sequence
atgggggctcccccagggtatcgcccttcagcctgggtacacctgttgcaccaactcccacgagcagactttcagctgcgcccagtccctagcgtatttgccccacaggaacaggagtaccagcaagccctgctgcttgtcgctgcactcgccggactcgggctcgggctaagcctgattttcattgcagtgtacctgatccgtttttgttgttgtagaccacccgagcctccaggatccaagatcccctctccaggaggaggctgcgtgacttggtcatgtattgtggcacttttagccggttgtactggtataggtatcggtttctatggtaactccgagaccagcgacggagtgtctcagctaagctctgctttgctccatgcaaatcatacactcagcaccatcgatcaccttgtgttagagactgtggagagattgggtgaagctgtgagaactgaactgacaacactggaggaggtcctggaaccaaggactgagctggtggccgctgcaaggggggctcggagacaggctgaggccgcagctcagcagttacaaggactggccttctggcagggcgtgccactgagccctctccaggtcgccgaaaacgtgagcttcgtcgaggaatacaggtggctggcatacgtgctgctgcttctgctcgagctgctggtctgtctctttactctgttgggcctggccaaacagagcaaatggcttgtgatcgtgatgaccgttatgagcctgttagtgctggtgttgtcatgggggagcatgggactcgaggccgctaccgccgtcggactctccgatttctgctctaatcctgatccttacgtgctgaatctcacccaagaggagacaggcctgagttcagacatcctgtcttattacctcctgtgcaatcgagccgtgagcaatccatttcagcagagactgaccttaagccagagagctctggctaatattcactcgcagttactggggcttgaaagagaggctgtgcctcagtttccgtcagctcaaaagcccctcctatctctggaggaaaccctgaatgtgactgagggcaattttcatcagctggtggcattactgcattgtcgaagcctccacaaggactacggggcagccctgcggggactctgcgaggatgcgctcgagggcctgttgtttctcctactgttttctctgctgagtgctggcgctctggccacagcactctgctctttacccagagcctgggccctgtttcctccatcagatgattatgatgacacagatgacgatgatcccttcaacccgcagcaggaatctaagagatttgtccagtggcagtctagcatctag

SEQ ID NO: 79118 - DNA, 1538 bp, Artificial Sequence
  derived and/or modified sequence
gctcgactccggaggctcccgcagccccggcgtccgccccgctgccccctcccccgggggccatgggggcgcccccgggctaccggccctcagcttgggtgcatctcctccaccagctgccccgcgccgacttccagctccgcccggtgcccagcgttttcgcgccccaagagcaggaataccagcaggatcagagcagcctcgcggttacacaacggccacctccaacaacgccgctccaccggctccggcctcggcccagactcacgcccgctctggcccggagacctcccgaagccgcacgcggggatccgcggccccagtcaccgccagaggccttgttgctggtggcggccttggcgggcctgggcttgggcctgagcctcattttcatcgctgtctacctcatccgcttctgctgctgccggccccccgagccccccgggtccaagatcccctcgcccgggggaggctgcgtcacctggagctgcattgtcgcccttctcgccggctgcactggcattggcatcggtttctatggcaacagtgagaccagtgatggggtgtcccagctcagctctgcgctgctgcacgccaaccacacactcagcaccattgaccacctggtgttggagacggtggagaggctgggcgaggcggtgaggacagagctgaccaccctggaggaggtgctcgagccgcgcacggagctggtggctgccgcccgaggggctcgacggcaggcggaggctgcggcccagcagctgcaggggctggccttctggcagggagtgcccctgagccccctgcaggtggctgaaaatgtgtcctttgtggaggagtacaggtggctggcctacgtcctcctgctgctcctggagctgctggtctgcctcttcaccctcctgggcctggcgaagcagagcaagtggctggtgatcgtgatgacagtcatgagtctcctggttctcgtcctgagctggggctccatgggcctggaggcagccacggccgtgggcctcagtgacttctgctccaatccagacccttatgttctgaacctgacccaggaggagacagggctcagctcagaggctgactctgtcccagcgagctctggccaacatccactcccagctgctgggcctggagcgagaagctgtgcctcagttcccttcagcgcagaagcctctgctgtccttggaggagactctgaatgtgacagaaggaaatttccaccagttggtggcactgctacactgccgcagcctgcacaaggactatggtgcagccctgcggggcctgtgcgaagacgccctggaaggcctgctcttcctgctactcttctccctgctgtctgcaggagcgctggccactgccctctgcagcctgccccgagcctgggccctcttcccacccagtgacgactacgatgacacagacgatgacgaccctttcaaccctcagcaggaatccaagcgctttgtgcagtggcagtcgtctatctgagcccctcctcccggctggactggagcctg

SEQ ID NO: 79119 - DNA, 2088 bp, Artificial Sequence
  derived and/or modified sequence
ctgcctcccccccgctcccgctcccctgagcccagccagaccccgcgccgcccgcgccccgctcgactccggaggctcccgcagccccggcgtccgccccgctgccccctcccccgggggccatgggggcgcccccgggctaccggccctcagcttgggtgcatctcctccaccagctgccccgcgccgacttccagctccgcccggtgcccagcgttttcgcgccccaagagcaggaataccagcaggccttgttgctggtggcggccttggcgggcctgggcttgggcctgagcctcattttcatcgctgtctacctcatccgcttctgctgctgccggccccccgagccccccgggtccaagatcccctcgcccgggggaggctgcgtcacctggagctgcattgtcgcccttctcgccggctgcactggcattggcatcggtttctatggcaacagtgagaccagtgatggggtgtcccagctcagctctgcgctgctgcacgccaaccacacactcagcaccattgaccacctggtgttggagacggtggagaggctgggcgaggcggtgaggacagagctgaccaccctggaggaggtgctcgagccgcgcacggagctggtggctgccgcccgaggggctcgacggcaggcggaggctgcggcccagcagctgcaggggctggccttctggcagggagtgcccctgagccccctgcaggtggctgaaaatgtgtcctttgtggaggagtacaggtggctggcctacgtcctcctgctgctcctggagctgctggtctgcctcttcaccctcctgggcctggcgaagcagagcaagtggctggtgatcgtgatgacagtcatgagtctcctggttctcgtcctgagctggggctccatgggcctggaggcagccacggccgtgggcctcagtgacttctgctccaatccagacccttatgttctgaacctgacccaggaggagacagggctcagctcagacatcctgagctattatctcctctgcaaccgggccgtctccaaccccttccaacagaggctgactctgtcccagcgagctctggccaacatccactcccagctgctgggcctggagcgagaagctgtgcctcagttcccttcagcgcagaagcctctgctgtccttggaggagactctgaatgtgacagaaggaaatttccaccagttggtggcactgctacactgccgcagcctgcacaaggactatggtgcagccctgcggggcctgtgcgaagacgccctggaaggcctgctcttcctgctactcttctccctgctgtctgcaggagcgctggccactgccctctgcagcctgccccgagcctgggccctcttcccacccagtgacgactacgatgacacagacgatgacgaccctttcaaccctcagcaggaatccaagcgctttgtgcagtggcagtcgtctatctgagcccctcctcccggctggactggagcctggctcccctcttcgttccttccctggctgccggaggagaccccactaacccagcctgcctgggctctgaccactaacactcttggccatggacagcctgcacaggaccgcctccctgctcttggccactgtgctcccatttctgtccttggccttgggagtagctgagggggcagactagggagtagggctggcaggggagggggcagacagcctcgcctcgcacccttcatccctggctgccggtcccatccttggagggactaagctgggggtgggggacatgagtccccctgctgcccctgccacatcccagtgggctctgaccccctgatctcaactcgtggcactaacttggaaaagggttgatttaaaataaaagggaagactattttacaagcagctgggtcctccttatttctcctctcccttgattcggcctcctggccagggctgggacatcctccctgctgtcctctctcccccggcctcccagctgccaggaatttctgcgcctgtccaggctcagcaaggggtccaaagacattgttctttaaaaaaaaaaaaaaaaaaatcaaaaaac

SEQ ID NO: 79120 - protein, 840 aa, Artificial Sequence
  derived and/or modified sequence
MNRFRVSKFRHTEARPPRRESWISDIRAGTAPSCRNHIKSSCSLIAFNSDRPGVLGIVPLQGQGEDKRRVAHLGCHSELAAHGDLVQSAVWSRDGALVGTACKDKQLRIFDPRTKPRASQSTQAHENSRDSRLAWMGTWEHLVSTGFNQMREREVKLWDTRFFSSALASLTLDTSLGCLVPLLDPDSGLLVLAGKGERQLYCYEVVPQQPALSPVTQCVLESVLRGAALVPRQALAVMSCEVLRVLQLSDTAIVPIGYHVPRKAVEFHEDLFPDTAGCVPATDPHSWWAGDNQQVQKVSLNPACRPHPSFTSCLVPPAEPLPDTAQPAVMETPVGDADASEGFSSPPSSLTSPSTPSSLGPSLSSTSGIGTSPSLRSLQSLLGPSSKFRHAQGTVLHRDSHITNLKGLNLTTPGESDGFCANKLRVAVPLLSSGGQVAVLELRKPGRLPDTALPTLQNGAAVTDLAWDPFDPHRLAVAGEDARIRLWRVPAEGLEEVLTTPETVLTGHTEKICSLRFHPLAANVLASSSYDLTVRIWDLQAGADRLKLQGHQDQIFSLAWSPDGQQLATVCKDGRVRVYRPRSGPEPLQEGPGPKGGRGARIVWVCDGRCLLVSGFDSQSERQLLLYEAEALAGGPLAVLGLDVAPSTLLPSYDPDTGLVLLTGKGDTRVFLYELLPESPFFLECNSFTSPDPHKGLVLLPKTECDVREVELMRCLRLRQSSLEPVAFRLPRVRKEFFQDDVFPDTAVIWEPVLSAEAWLQGANGQPWLLSLQPPDMSPVSQAPREAPARRAPSSAQYLEEKSDQQKKEELLNAMVAKLGNREDPLPQDSFEGVDEDEWD

SEQ ID NO: 79121 - DNA, 2523 bp, Artificial Sequence
  derived and/or modified sequence
atgaacagattcagagtgagcaagttcagacacaccgaggccagaccccccagaagagagagctggatcagcgacatcagagccggcaccgcccccagctgcagaaaccacatcaagagcagctgcagcctgatcgccttcaacagcgacagacccggcgtgctgggcatcgtgcccctgcagggccagggcgaggacaagagaagagtggcccacctgggctgccacagcgagctggccgcccacggcgacctggtgcagagcgccgtgtggagcagagacggcgccctggtgggcaccgcctgcaaggacaagcagctgagaatcttcgaccccagaaccaagcccagagccagccagagcacccaggcccacgagaacagcagagacagcagactggcctggatgggcacctgggagcacctggtgagcaccggcttcaaccagatgagagagagagaggtgaagctgtgggacaccagattcttcagcagcgccctggccagcctgaccctggacaccagcctgggctgcctggtgcccctgctggaccccgacagcggcctgctggtgctggccggcaagggcgagagacagctgtactgctacgaggtggtgccccagcagcccgccctgagccccgtgacccagtgcgtgctggagagcgtgctgagaggcgccgccctggtgcccagacaggccctggccgtgatgagctgcgaggtgctgagagtgctgcagctgagcgacaccgccatcgtgcccatcggctaccacgtgcccagaaaggccgtggagttccacgaggacctgttccccgacaccgccggctgcgtgcccgccaccgacccccacagctggtgggccggcgacaaccagcaggtgcagaaggtgagcctgaaccccgcctgcagaccccaccccagcttcaccagctgcctggtgccccccgccgagcccctgcccgacaccgcccagcccgccgtgatggagacccccgtgggcgacgccgacgccagcgagggcttcagcagcccccccagcagcctgaccagccccagcacccccagcagcctgggccccagcctgagcagcaccagcggcatcggcaccagccccagcctgagaagcctgcagagcctgctgggccccagcagcaagttcagacacgcccagggcaccgtgctgcacagagacagccacatcaccaacctgaagggcctgaacctgaccacccccggcgagagcgacggcttctgcgccaacaagctgagagtggccgtgcccctgctgagcagcggcggccaggtggccgtgctggagctgagaaagcccggcagactgcccgacaccgccctgcccaccctgcagaacggcgccgccgtgaccgacctggcctgggaccccttcgacccccacagactggccgtggccggcgaggacgccagaatcagactgtggagagtgcccgccgagggcctggaggaggtgctgaccacccccgagaccgtgctgaccggccacaccgagaagatctgcagcctgagattccaccccctggccgccaacgtgctggccagcagcagctacgacctgaccgtgagaatctgggacctgcaggccggcgccgacagactgaagctgcagggccaccaggaccagatcttcagcctggcctggagccccgacggccagcagctggccaccgtgtgcaaggacggcagagtgagagtgtacagacccagaagcggccccgagcccctgcaggagggccccggccccaagggcggcagaggcgccagaatcgtgtgggtgtgcgacggcagatgcctgctggtgagcggcttcgacagccagagcgagagacagctgctgctgtacgaggccgaggccctggccggcggccccctggccgtgctgggcctggacgtggcccccagcaccctgctgcccagctacgaccccgacaccggcctggtgctgctgaccggcaagggcgacaccagagtgttcctgtacgagctgctgcccgagagccccttcttcctggagtgcaacagcttcaccagccccgacccccacaagggcctggtgctgctgcccaagaccgagtgcgacgtgagagaggtggagctgatgagatgcctgagactgagacagagcagcctggagcccgtggccttcagactgcccagagtgagaaaggagttcttccaggacgacgtgttccccgacaccgccgtgatctgggagcccgtgctgagcgccgaggcctggctgcagggcgccaacggccagccctggctgctgagcctgcagccccccgacatgagccccgtgagccaggcccccagagaggcccccgccagaagagcccccagcagcgcccagtacctggaggagaagagcgaccagcagaagaaggaggagctgctgaacgccatggtggccaagctgggcaacagagaggaccccctgccccaggacagcttcgagggcgtggacgaggacgagtgggactag

SEQ ID NO: 79122 - DNA, 2826 bp, Artificial Sequence
  derived and/or modified sequence
attgggtcccgggtggggccgaggcagcgggagtcgcggttgctcagcgtgcacctgagacccgacgcccggggtcctcgaagacgcgtccgccgccgtgcccgtcgccatgaaccgcttcagggtgtccaagttccggcacaccgaggctcggccgccccgccgcgagtcctggatcagtgacattcgagcaggaaccgccccttcatgcaggaaccacatcaaatcaagctgcagcttgatcgccttcaactccgaccgtcctggtgtactgggcattgtgcctctgcaaggccaaggagaggacaagcgacgcgtggcccacctgggctgccattcagagctggcagcccatggggacctggtgcagagcgccgtctggagccgagatggagccctggtgggcacggcgtgcaaggacaagcagctgcggatctttgaccccagaacaaagccgcgggcctctcagagcacgcaggcccatgagaacagcagggatagccggctggcatggatgggcacctgggagcaccttgtgtctactggattcaaccagatgcgtgagcgcgaagtgaagctgtgggacacgcggttcttctccagcgccctggcctccctcaccttggacacctcgcttgggtgtctcgtgcctctgctggaccctgactctgggctcctggtcctggcaggaaagggcgagaggcagctgtactgttacgaggtggtcccgcagcagccggcgctgagcccagtgacccagtgtgtcctggagagcgtgctgcgtggggctgcccttgtgccccggcaggcgctggccgtcatgagctgcgaggtactccgcgtcctacagctgagcgacacagccatcgtgcccatcggctaccatgtgccccgcaaggctgtggagttccacgaggacctgttcccggacactgccggctgtgtgcctgccaccgacccccatagctggtgggctggggacaaccagcaggtgcagaaggtcagcctcaaccccgcctgccggccccacccgagcttcacttcctgtctggtgccccctgcggagcccctccctgacacagcccagcctgcggtgatggagacacccgtgggtgatgcagacgcaagcgagggtttctcttcccctcccagttcgctgacctcgccctccacgccctccagcctggggccctcactctccagcaccagtggcatcgggaccagccccagtttgaggtcgctgcagagcctgctgggccccagttccaagttccgccatgctcagggcactgtcctgcaccgagacagccacatcaccaacctcaaggggctcaacctcaccacacctggtgagagtgacggcttctgtgccaacaagctgcgtgtggccgtgccgctgctcagcagcgggggacaggtggctgtgcttgagctacggaagcctggccgcctgcccgacacggcactgcccacgctgcagaatggggcagctgtgactgatctggcctgggacccctttgacccccatcgcctcgctgtggctggtgaggacgccaggatccgactgtggcgggtacccgcagagggcctggaagaggtgctcaccacgccagagactgtgctcacaggccacacggagaagatctgctccctgcgcttccacccactggcagccaatgtgctggcctcgtcctcctatgacctcactgttcgcatctgggaccttcaggctggagctgatcggctgaagctgcagggccaccaagaccagatcttcagcctggcctggagtcctgatgggcagcagctggccactgtctgcaaggatgggcgtgtgcgggtctacaggccccggagtggccctgagcccctgcaggaaggcccagggcccaagggaggacgcggagctcgcattgtctgggtatgtgatggtcgctgtctgctggtgtctggctttgacagccaaagtgagcgccagctgctcctatatgaagctgaggccctggccggcggacccttggcagtgttgggcctggacgtggctccctcaaccctgctgcccagctacgacccagacactggcctggtgctcctgaccggcaagggcgacacccgtgtattcctgtacgagctgctccccgagtcccctttcttcctggagtgcaacagcttcacgtcgcctgacccccacaagggcctcgtcctcctgcctaagacggagtgcgacgtgcgggaagtggagctgatgcggtgcctgcggctgcgtcagtcctccctggagcctgtggccttccggctgccccgagtccggaaagagttcttccaggatgacgtgttcccagacacggctgtgatctgggagcctgtgctcagtgccgaggcctggctgcaaggcgctaatgggcagccctggcttctcagcctgcagcctcctgacatgagcccagtgagccaagccccccgagaggcccctgctcgtcgggccccatcctcagcgcagtacctggaagaaaagtctgaccagcaaaagaaggaggagctgctgaatgccatggtggcaaaactggggaaccgggaggacccactcccccaggactcctttgaaggcgtggacgaggacgagtgggactagcctgcgcccccgtcacctccacctcacctgtgctgccacttcctagtgcacacctcacggctcatcctcaagctggaagatacctctctggccccggcacatgtcacccctgcactcctgccttcccgtgggcacttccacatcctctgggcctctggcagttcccagggactgttttcacctctgctgtctct

SEQ ID NO: 79123 - DNA, 2523 bp, Artificial Sequence
  derived and/or modified sequence
atgaatcgcttcagggtgagcaaatttaggcacactgaagccagacctcctcgcagagaaagctggatctccgatattagggctggaacggcgccttcctgtagaaaccacatcaaaagcagctgctcactgatcgccttcaactccgatcgcccgggtgtgctagggatcgtgccactacaggggcaaggagaggataagcggcgcgtagcgcacctgggttgccatagtgaactggccgcgcatggagacctcgttcagagtgcagtttggtcaagagacggtgccctagtggggaccgcgtgcaaagacaagcagctaaggatttttgatccaaggaccaaaccccgagcgagccagtctacccaggctcacgagaactcccgtgattcacggttggcgtggatggggacgtgggagcacctggtgtctacaggcttcaaccagatgcgagaaagagaagtcaaattgtgggacactcggtttttttcctccgcactggcctcactcactctcgatacgtccctgggctgcttggtcccattattagacccggatagtggcctgctggtcctggccggtaagggggaaagacagctgtactgttatgaagtcgtgccacaacaacccgctctttccccagttacacaatgcgtgctcgaatccgtgcttcgcggtgcggcactggtcccaagacaggccctggcggtcatgtcgtgcgaggtgctaagggtccttcaactttctgatacagccatcgtgccaattggctatcacgtccctcgcaaggccgtggaattccacgaggacctcttccctgacaccgcaggatgcgttccggccactgatccccatagctggtgggcaggagacaatcaacaggtccagaaggtctctctgaatccggcctgtagaccacatcccagttttacctcatgtcttgtgcctccagcggaaccacttcctgacactgctcagcccgccgtgatggagacacccgtgggagatgcagacgcatccgaaggtttttcttcccccccatcttcgctcaccagcccttcaacacctagtagcctggggccgtccttatccagcaccagtggaataggcacttctcccagtctccgttctttacagtctctgctcgggcccagttctaaattccgtcacgcacagggcactgtgctgcatagggacagtcacatcacaaacttgaaagggcttaatctgacaacacctggcgaaagtgacgggttttgtgctaataagctgagggtggctgtgccgctactgtcttccggaggccaggtggccgtgctcgaattaagaaagccaggacgcctgccagacacggcacttcctacactgcagaatggagcagcagtaacagatctagcgtgggacccattcgacccccatcgccttgctgtggccggggaggacgctaggatcaggttgtggcgggtgccagctgaagggctggaggaagtgcttacaacccctgagaccgtcctcactggccataccgagaagatttgctccctgaggtttcaccccctggccgcaaatgtcctggcctcctcttcctacgacttaactgtgaggatctgggatctgcaagcaggcgctgatcgcttaaagctgcaggggcaccaggaccagatttttagtctcgcctggagcccggatggccagcagctagcgactgtatgtaaggacggcagagttcgcgtctacagaccccggtctggccctgagccactccaggagggccccgggccaaagggaggcaggggggctcggatcgtatgggtgtgcgatggaagatgccttttggtgtccggcttcgacagccaaagtgagaggcaattgctcctttatgaggccgaagccttggcaggggggccgctcgctgtcctgggactggacgtggcgcccagcaccctcctgcctagctacgatccagacacaggtcttgtgttactgacgggcaaaggggacacacgagtgttcttgtatgagctcctccccgaatccccgttcttcctggaatgtaattcctttacatctccagacccccacaaaggattggtccttcttcccaaaactgaatgcgacgtgcgggaagttgagttgatgcgctgtttgcggctacgccagtcttcgcttgaacctgtagcattccgactgccacgggtgagaaaagaattctttcaggacgacgttttccccgatactgccgttatatgggagccagtcctgtcagctgaggcctggttacagggggctaacggacaaccttggcttctgagcctccagcctcctgatatgtcgccagtgtctcaggcgccacgcgaggcccccgctcgacgcgccccttcatcagcgcaatacctcgaagagaaatcagatcagcaaaagaaggaagaactgttgaatgcaatggtggctaaactcggtaaccgcgaagatcctctgccccaggattcttttgaaggagttgatgaggacgaatgggactag

SEQ ID NO: 79124 - DNA, 2523 bp, Artificial Sequence
  derived and/or modified sequence
atgaaccgcttccgggtgtccaagttccgccacacagaggcccggcccccccggcgggagagctggatcagtgacatccgggccggcacagcccccagctgcaggaaccacatcaagagcagctgcagcctgattgccttcaacagcgacaggcctggggtgctgggcatcgtgcccctgcagggccagggcgaggacaagagaagagtggcccacctgggctgccacagcgagctggccgcccacggggacctggtgcagagcgctgtgtggagcagagatggagccctggtgggcacagcctgcaaggacaagcagctgcgcatctttgaccccaggaccaagccccgggccagccagagcacccaggcccacgagaacagccgggacagccggctggcctggatgggcacctgggagcacctggtgtccacaggcttcaaccagatgagggagcgggaggtgaagctgtgggacacccgcttcttcagcagcgccctggccagcctgaccctggacaccagcctgggctgcctggtgcccctgctggaccctgattctggcctgctggtgctggccgggaaaggagagcggcagctgtactgctatgaggtggtgccccagcagcctgccctgagccctgtgacccagtgtgtgctggagagcgtgctgcggggagctgccctggtgccccggcaggccctggccgtgatgagctgtgaggtgctgcgggtgctgcagctgagtgacacagccatcgtgcccatcggctaccacgtgcccaggaaggctgtggagttccatgaagatctcttcccagacacagctggctgtgtgcctgccacagacccccacagctggtgggccggggacaaccagcaggtgcagaaggtgtccctgaacccagcctgccggccccaccccagcttcaccagctgcctggtgcccccagctgagcccctgcctgacacagcccagcctgctgtgatggagacccctgtgggagatgctgatgccagcgagggcttcagcagcccccccagcagcctgaccagccccagcacccccagcagcctgggccccagcctgagcagcaccagcggcatcggcaccagccccagcctgcggagcctgcagagcctgctgggccccagcagcaagttcagacatgcccagggcaccgtgctgcaccgggacagccacatcaccaacctgaagggcctgaacctgaccaccccaggagagagtgatggcttctgtgccaacaagctgcgggtggccgtgcccctgctgagcagcggcggccaggtggccgtgctggagctgaggaagccaggccgcctgcctgacacagccctgcccaccctgcagaatggagctgctgtgacagacctggcctgggacccctttgacccccaccggctggccgtggccggggaggatgcccgcatccggctgtggagggtgcctgctgagggcctggaggaggtgctgaccaccccagagaccgtgctgaccggccacacagagaagatctgcagcctgcgcttccaccccctggccgccaacgtgctggccagcagcagctatgacctgactgtgcgcatctgggacctgcaggccggggctgaccggctgaagctgcagggccaccaggaccagatcttcagcctggcctggagcccagatggccagcagctggccaccgtgtgcaaggatggccgggtgcgggtgtaccggcccaggagcggccctgagcccctgcaggagggccctggccccaagggcggccgcggggcccgcatcgtgtgggtgtgtgatggccgctgcctgctggtgtctggctttgacagccagagcgagcggcagctgctgctgtatgaagctgaggccctggccggcggccccctggccgtgctgggcctggatgtggcccccagcaccctgctgcccagctatgaccctgacaccggcctggtgctgctgactggaaaaggagacaccagggtcttcctgtatgagctgctgcctgagagccccttcttcctggagtgcaacagcttcaccagcccagacccccacaagggcctggtgctgctgcccaagacagaatgtgatgtgcgggaggtggagctgatgcgctgcctgcggctgcggcagagcagcctggagcctgtggccttccggctgccccgggtgaggaaggagttcttccaggatgatgtgtttcctgacacagctgtgatctgggagcctgtgctgtctgctgaggcctggctgcagggcgccaacggccagccctggctgctgagcctgcagcccccagacatgagccctgtgtcccaggccccccgggaggccccagcccggcgggcccccagcagcgcccagtacctggaggagaagagtgaccagcagaagaaggaggagctgctgaatgccatggtggccaagctgggcaaccgggaggaccccctgccccaggacagctttgaaggagtggatgaagatgagtgggactag

SEQ ID NO: 79125 - DNA, 2523 bp, Artificial Sequence
  derived and/or modified sequence
atgaaccggttccgggtgagcaagttccggcacaccgaggcccggcctcctagacgggagtcatggatcagcgacattagagccggcacggctccctcatgccggaaccatattaagtctagctgttccctgatagctttcaactcagatcgccctggagttctggggatcgtgcctctccaggggcagggtgaggataagcgccgggtagctcatctgggttgtcattccgaactcgccgctcatggagatttggtccagtcagctgtgtggagtcgcgacggcgccttagttggcacagcctgtaaagacaaacagttaagaatatttgatcctagaacgaagccccgagcctctcagtcaacccaagcccacgagaatagcagagatagcagactggcatggatgggaacctgggaacatctagtctccacggggttcaaccagatgcgcgagcgtgaagtgaagttgtgggatacaaggttctttagctctgcccttgcttcgctgaccctcgacacaagcttaggatgtcttgttccactgcttgatcctgattcaggtctactggttctcgccggtaagggcgagaggcagctgtactgttatgaagtggttcctcagcagccagccctctcgccagtcacccagtgtgttctggaatcggtccttagaggggcagccctcgtgccccgtcaggccctcgcggtcatgtcatgcgaagtcttgagggtcctgcagctgtccgatacggctattgtacctatcggctatcacgttcccagaaaggcggtggagttccacgaagatctcttcccagatactgctggctgtgtcccggccactgaccctcactcatggtgggcaggcgataaccagcaggtgcagaaggtatcgcttaatccggcttgccgaccacatccaagctttacaagttgtcttgtgccacctgctgagcccctgcctgacaccgctcagccagccgtgatggagactcccgtcggagatgcggacgctagcgaaggtttttcttctcccccgtcctctttgacctccccctctacacctagctcactgggaccttccctttcttcaaccagtgggattggcacatctccatctttgcggtctctgcagtcgctattaggaccgtctagtaaatttcgacacgctcagggcactgtcctgcaccgcgactcacacatcactaacctgaagggactcaacttgacgacacccggagaaagcgacggtttctgtgctaataagctacgggtggccgtgccgctgctgtcatccggggggcaggtggcagttctggagttgagaaagccgggcagactccctgatacagcactacccaccctccaaaatggcgccgcagtgacagatcttgcttgggaccccttcgacccccaccgcttagctgtggccggtgaagatgcacgaatacggttgtggagggtcccggcggaggggcttgaagaagtcttgaccaccccggagacagtcctgacaggacatactgaaaagatttgttcattgagattccaccctttggccgcaaacgtactcgcgtcgagttcgtacgatctgacagtaaggatatgggacctccaggccggcgctgacaggctcaaattgcaggggcatcaggaccaaatattctctctcgcatggagtccagatgggcagcagcttgcaaccgtgtgcaaggacggccgtgtcagggtgtacagaccacgcagtgggccagagcctctacaggaggggccaggtcccaagggaggcaggggagcccgaatcgtgtgggtgtgcgacgggcggtgtctcctggttagtggtttcgactcccagtcagagaggcagttactgctgtacgaggcagaagccctggccggggggccactggcggtgttgggtctggacgtagcccctagcacccttctcccatcttatgaccccgacactggcctggtacttttaactggaaagggtgacactcgggtgttcctatatgagcttctgcctgaatcccctttcttcctggagtgtaattcattcactagtcctgatccacacaagggcctggtgctcttgcccaagacggagtgcgacgtgcgagaagttgagctcatgcgctgtttacgacttcgccagagcagcctggaacccgtcgcattccgcttacctcgagttcggaaggaattttttcaggatgacgtctttcctgacactgccgtgatctgggagcctgtgctttccgccgaggcttggctgcaaggagcgaacggccaaccttggcttttgagtctccagccaccagacatgagcccagtttcccaagctccccgtgaggctccggcccgacgtgccccgagctcagctcagtacttagaagagaagtccgaccaacagaaaaaggaggagttgctgaatgcaatggttgccaagctcggaaaccgagaggacccacttcctcaggactctttcgagggagttgacgaggacgagtgggattag

SEQ ID NO: 79126 - DNA, 2523 bp, Artificial Sequence
  derived and/or modified sequence
atgaacagatttcgcgtctctaaattccgccacacagaagcccgtcccccacggagagaaagctggatctccgatatcagggcgggaacagctccatcatgcaggaatcatattaaaagcagctgttccctgatcgcttttaacagcgatcgcccaggcgttttaggaatagtgccgttgcagggtcagggcgaggacaagcggagagtggcacatctggggtgtcactcagaactggccgcacatggggatctggtgcagtccgccgtctggtcgagggacggagccctggtcggcaccgcatgtaaagacaagcagttacgcatcttcgaccccaggaccaaaccccgagcgagccagtccacccaggcccacgaaaacagtcgcgacagccgactggcttggatgggaacgtgggaacacctggtatccactggctttaatcaaatgagagagagagaggtgaaattatgggacacaagattcttctcatcagccctggcctctcttactctcgacacttcattgggatgcttagttcctctcctcgacccagattccggcctcctcgtcctagcaggaaagggcgaacgccaactttattgctatgaagtggtgccccagcagcccgctttgtcacctgtaacacagtgtgttttggagagtgttttgagaggcgcagctctcgtgcctcgccaggccctagccgtcatgtcatgcgaagtgttacgggtcttacagctctcagataccgcaatcgtacctatcgggtatcacgtgccgagaaaggccgttgagtttcatgaggacctttttccagataccgccggttgcgtcccagcgacagatccccattcctggtgggctggcgataatcaacaggtgcagaaggtgagcctcaacccagcttgtagaccgcatccatcctttactagttgcttggttcctccggctgaaccactgccggacacggcccaaccggctgtgatggaaacaccggtcggcgatgcagacgcatcagaaggcttctccagtccaccctcatctcttacatcacctagtactcctagttctttaggtccttcactgagctctacatcgggcatagggacatctccaagcctgcgctcactgcaatctctgttaggtccatcgagcaagttccgccacgcacaaggcaccgtcctccatagagactctcatatcaccaatttaaaagggctgaatctgactacacctggtgaatccgacggcttctgcgctaataagctaagggtagcggtgcccctgctgagcagcggcggacaggtagccgtcctggagctcagaaaacccggtcgcctgcccgacacagcgctgcccacactgcagaacggggctgcagtgacggacttagcgtgggacccgtttgatcctcataggttggccgtggccggtgaagacgcaaggatccgcctatggagagtccctgctgaggggttggaggaggtgctcaccacacctgagacagtcctgaccggacacacggaaaaaatatgcagtctgcgctttcaccctctggctgcaaatgtcctggcttcttcatcttacgacctgactgtgaggatctgggatctccaggcaggagcggatagactgaaacttcaggggcaccaggatcaaattttctccctagcatggtcccccgatggacagcaactggcgactgtgtgcaaggatggtagagtgcgagtgtataggcctcgctccggacccgagccactgcaggagggtccaggcccaaaaggaggtcgtggtgcacgaattgtatgggtatgcgatggtcgttgtctcctggtttcaggatttgattctcagagcgaacgccagctgctcctctatgaggccgaagcgctagcaggcggaccacttgcagtcctgggcttagacgtagcccctagcacacttctgccgtcatatgaccctgataccgggctggtactgcttacggggaaaggcgacacccgagtgttcttatatgaactgctccctgagtcaccgttctttttagaatgcaatagcttcacctcaccagatccccacaaaggtttggtactgttgcccaaaacagaatgtgacgtgcgtgaagtcgagctgatgaggtgcctgcgcctccggcagagttctctggaaccggttgcttttcgtcttcccagagtcagaaaagaattctttcaagatgatgtatttcccgatacagcagttatttgggagccagttcttagcgcagaggcttggctacagggcgctaatggccagccatggttactctctctccagcctccggatatgagtccggttagccaggcacctcgagaggcccctgcccgaagagctccatcttccgcacagtacctggaggaaaaaagcgaccagcagaaaaaggaagaactgctgaatgctatggtcgccaaactcgggaacagagaagaccccctgcctcaggactctttcgaaggagtcgatgaggatgagtgggactag

SEQ ID NO: 79127 - DNA, 1104 bp, Artificial Sequence
  derived and/or modified sequence
atgaaccggttcagggtgtctaaatttaggcacactgaggcccgaccaccaagacgggaggacaagcagctccgaatttttgatccgcgtacaaaacctagggcctcccaatcgacccaggctcacgaaaacagcagggattctcggctggcttggatgggcacatgggaacatttggtctccactggattcaatcagatgagggagcgggaagtcaagctttgggacactcgcttctttagtagcgccctggcatccctgacactagatacctcattgggctgtctggttcctctgctggacccggatagcgggctgctcgttttggccggaaagggcgagagacagctttattgctatgaggtggtcccccagcagcccgctctgagccccgtgacacagtgtgtcctggaaagcgtgctacggggcgccgccctggtaccaaggcaagctctggcggttatgtcgtgtgaggttttgcgtgtcctccagctgagcgatacagcaatcgtccccatcggttatcatgtgcctcggaaggccgtagagtttcatgaagatctgttccccgatacggctgggtgtgtgcctgccaccgacccacatagctggtgggcgggcgacaatcagcaggtgcagaaggtgtcactcaacccagcttgccggcctcatccatccttcacttcttgtcttgtgcctccggccgagccactgccagacaccgctcagcccgccgtgatggagaccccggtcggagatgctgatgctagcgaaggattctcatctcctcccagcagccttacatcaccaagcacaccttcatccttgggaccgtctttgtcctctacaagtgggattggcacctcacctagcttgcgctcactccagtccttgctgggcccttctagcaaattccgccatgctcaggggaccgtgcttcaccgtgattcacacatcacaaacctgaaagggctgaacctgaccacaccaggggagagcgatgggttctgtgctaataagctccgcgtggctgtgcctcttctctcttccgggggccaagttgcagtgcttgaaatgagggagaaaagacaccgagaagtgtag

SEQ ID NO: 79128 - DNA, 2523 bp, Artificial Sequence
  derived and/or modified sequence
atgaatagattcagagtgagtaaatttaggcacaccgaagcgcggccgccaaggcgcgaaagctggattagtgacatcagagccggcactgctccaagttgtcggaaccatattaaatcgagctgttcattgattgcttttaattcagacagaccaggcgtgctcggcattgttcctcttcaagggcagggggaagataaaagacgcgtagcccacttgggatgccactccgagctcgcagctcatggagacctggtccaatcagccgtgtggtccagggatggagctctcgtgggcaccgcttgcaaggacaagcagttacggatatttgatcctcggaccaaaccccgcgcctctcagtccacccaggcccatgaaaactcaagagattccagacttgcctggatgggaacctgggaacatttggtgtccacaggctttaaccagatgagagagagagaagtaaagttatgggatacaagattctttagttcggcactcgcctccctgactctggacaccagtctggggtgcctggtgcccttattagacccagattccggcctactggtcctagctggaaagggggagaggcaactgtactgctacgaagtcgtcccacagcaacctgctctgagtccagtgacgcagtgtgtactggaatccgtcctgaggggtgcagcactagtgcccaggcaagccttggccgtgatgtcatgcgaggtgctgcgagtgctgcagctgagtgacacagctattgtacctataggttaccatgttccccggaaagccgtggagttccatgaagatctttttcccgacactgccgggtgtgtccctgcaacagatcctcactcgtggtgggccggtgataaccagcaggtacagaaagtgtcacttaacccagcgtgccgccctcaccctagcttcacttcctgtctagtgccccctgcagagcctcttcccgatactgcccaacccgccgtcatggagacccctgttggagatgcagacgcaagtgagggtttctccagcccaccaagtagcctcacgtcccctagcactcccagcagcctggggccatcactcagctccactagtggcattggaacgtccccgagcctgaggtccctgcagtcactgctgggcccgagcagcaaattccgccacgcgcaaggaacggtgttacacagggatagccatatcacaaacctgaagggcttgaatctgaccactcctggtgaatctgacgggttctgcgccaacaaactccgcgtggccgtgccgctactgagcagcggaggccaggtcgccgtactcgaactgcgcaaacccggtagactgcctgatacagctctgccaacccttcagaacggagctgcagtgactgacctcgcctgggaccccttcgatccccatcggctggccgtggcgggcgaggatgcccgaattcgactttggagagtcccagcagagggcctggaggaagtgcttaccactcctgaaactgtgctgacaggccatactgaaaagatctgctccctgcggtttcatcctctggccgccaacgttttagcctcgtctagctatgacttgaccgtgcgtatctgggacctgcaggctggggcagacagacttaaactgcagggccaccaggaccaaatcttctctttggcttggtccccggatggtcagcagttggctacagtgtgcaaagatggcagagtacgggtgtaccgcccgcgctctgggcccgaacccttgcaggaaggcccagggcccaagggggggaggggagctcgtatagtctgggtgtgtgatggtcggtgcctgctggtcagcggatttgactcccagtctgagaggcagcttctgttatacgaggccgaggcactggcaggaggacccttagcggtcctcggattggacgtcgcccccagtacccttttaccaagctatgaccccgatacagggctggtgctcttgacaggaaagggggacacccgtgtgtttctgtacgagctgctgcccgagtctcccttttttctcgagtgcaactcattcacaagccctgatcctcataagggcctcgtcctcctgcccaagacagagtgtgatgtccgggaggtagaactgatgcgatgccttcgtctccggcagtcaagcctggagccagtggccttccggttgccgagggtgaggaaagaattttttcaagatgatgtgttccccgacacagcagtgatctgggaacctgtgttgtctgctgaagcctggctgcagggcgctaacgggcagccatggctcctgagcctgcagccaccagacatgtcgcccgtgtcacaggcacctcgggaagctcccgccaggagggcaccttccagcgctcaatacctggaggagaaatccgaccaacagaaaaaggaggaactgctaaacgccatggtggccaagttgggtaacagggaggaccctctgccccaagatagtttcgaaggcgtggatgaagatgaatgggattag

SEQ ID NO: 79129 - DNA, 2118 bp, Artificial Sequence
  derived and/or modified sequence
atgggcacctgggagcacctggtttctaccggcttcaaccaaatgcgggagcgtgaagttaaactgtgggatacccgattcttttcgtcggccctggcgagcttgaccctggatacctccctgggctgcctagttcctctactggaccctgatagcggcctcctggttctcgccggcaagggtgaaagacagctgtactgttacgaagtggtcccacaacagcctgcgctgagtcccgtgacccagtgtgtgctcgaaagcgtgctacggggagcggccctggtaccgcgccaggcattagctgttatgtcttgtgaagttctccgagttttgcagctgtccgacaccgccatcgtgcccattggttatcacgtaccccggaaggcagtggaattccacgaagatctgtttcccgatactgccggttgtgtcccggccacagatccacactcatggtgggctggtgataaccagcaggtgcagaaagtaagtctcaaccccgcctgcagaccacacccttcttttacaagctgcctggtgccacccgctgagccattaccagacaccgctcagcccgccgtgatggaaacgcctgttggcgatgccgatgctagcgaagggttttccagcccgcctagcagtcttacgagcccatcaacaccatcctcactgggcccatctctttcttcgaccagcggtattggtacaagtccttcactgcgatcccttcagagcctgttgggaccctccagcaagttccgacatgcccaggggaccgtcctgcacagagactcacatatcactaacttgaaaggtctaaaccttaccacccccggtgagtctgacggattctgcgccaacaagctgcgcgtggctgtacctttactcagtagtggagggcaagtggcagttcttgaactacggaaaccaggccgactgcccgatacagccctccctaccctccaaaacggcgccgccgtgactgaccttgcgtgggatccatttgacccacatcgcctggccgttgcgggagaggacgccagaatccggctgtggcgggtccctgctgagggccttgaagaggtgctcactacccccgagacagttttaactggccacaccgagaaaatttgtagcctgcgcttccatcccttggccgctaatgtcttagcatcttcatcttacgatctaacggtcagaatttgggaccttcaggccggcgccgatcggctcaagctgcagggtcatcaggaccagattttcagccttgcctggtcaccagatggccaacagcttgccacagtctgtaaagacggaagggtaagagtttatagacctcgctcagggcccgagcccctgcaagaaggtcctggtccaaaggggggccggggggccagaattgtgtgggtatgcgacgggcggtgtcttttggtgtccggatttgattctcagagcgagcggcaactgctgctatacgaagctgaggcgctggccggaggaccattggccgtccttggattagatgtagcgccaagcacgctacttccttcttacgaccccgacactggactggtgcttcttactggaaaaggagatactcgggttttcctgtacgaattgcttcccgaaagtccttttttcttggagtgcaattcattcacctcaccagatccacacaaaggtctggtcctcctaccaaaaaccgagtgcgatgtccgagaggtcgagctaatgagatgcctgaggctccgccagtcgagcctggaacccgtcgcttttagacttcctcgcgtccgtaaagaattcttccaggatgatgtgtttcccgataccgctgtgatctgggaaccggttctaagcgccgaagcctggttgcagggggctaacggtcagccgtggctgctcagcctgcaacccccagatatgagccctgtgagtcaggctccacgcgaggctcccgctagacgagcccccagcagtgcccagtacctcgaggagaaatctgatcagcagaagaaggaggaactgctcaacgccatggttgccaagctgggaaatagggaagatcccctgccccaagactcattcgagggtgtggatgaagatgaatgggattag

SEQ ID NO: 79130 - DNA, 1104 bp, Artificial Sequence
  derived and/or modified sequence
atgaaccgcttccgggtgtccaagttccgccacacagaggcccggcccccccggcgggaggacaagcagctgcgcatctttgaccccaggaccaagccccgggccagccagagcacccaggcccacgagaacagccgggacagccggctggcctggatgggcacctgggagcacctggtgtccacaggcttcaaccagatgagggagcgggaggtgaagctgtgggacacccgcttcttcagcagcgccctggccagcctgaccctggacaccagcctgggctgcctggtgcccctgctggaccctgacagcggcctgctggtgctggccggcaagggggagcggcagctgtactgctatgaggtggtgccccagcagcctgccctgagccctgtgacccagtgtgtgctggagagcgtgctgcggggggccgccctggtgccccggcaggccctggccgtgatgagctgtgaggtgctgcgggtgctgcagctgagtgacacagccatcgtgcccatcggctaccacgtgcccaggaaggctgtggagttccacgaggacctcttcccagacacagctggctgtgtgcctgccacagacccccacagctggtgggccggggacaaccagcaggtgcagaaggtgtccctgaacccagcctgccggccccaccccagcttcaccagctgcctggtgcccccagctgagcccctgcctgacacagcccagcctgctgtgatggagacccctgtgggagatgctgatgccagcgagggcttcagcagcccccccagcagcctgaccagccccagcacccccagcagcctgggccccagcctgagcagcaccagcggcatcggcaccagccccagcctgcggagcctgcagagcctgctgggccccagcagcaagttcagacatgcccagggcaccgtgctgcaccgggacagccacatcaccaacctgaagggcctgaacctgaccaccccaggagagagtgatggcttctgtgccaacaagctgcgggtggccgtgcccctgctgagcagcggcggccaggtggccgtgctggagatgagggagaagaggcaccgggaggtgtag

SEQ ID NO: 79131 - DNA, 2118 bp, Artificial Sequence
  derived and/or modified sequence
atgggcacctgggagcacctggtgtccacaggcttcaaccagatgagggagcgggaggtgaagctgtgggacacccgcttcttcagcagcgccctggccagcctgaccctggacaccagcctgggctgcctggtgcccctgctggaccctgacagcggcctgctggtgctggccggcaagggggagcggcagctgtactgctatgaggtggtgccccagcagcctgccctgagccctgtgacccagtgtgtgctggagagcgtgctgcggggggccgccctggtgccccggcaggccctggccgtgatgagctgtgaggtgctgcgggtgctgcagctgagtgacacagccatcgtgcccatcggctaccacgtgcccaggaaggctgtggagttccacgaggacctcttcccagacacagctggctgtgtgcctgccacagacccccacagctggtgggccggggacaaccagcaggtgcagaaggtgtccctgaacccagcctgccggccccaccccagcttcaccagctgcctggtgcccccagctgagcccctgcctgacacagcccagcctgctgtgatggagacccctgtgggagatgctgatgccagcgagggcttcagcagcccccccagcagcctgaccagccccagcacccccagcagcctgggccccagcctgagcagcaccagcggcatcggcaccagccccagcctgcggagcctgcagagcctgctgggccccagcagcaagttcagacatgcccagggcaccgtgctgcaccgggacagccacatcaccaacctgaagggcctgaacctgaccaccccaggagagagtgatggcttctgtgccaacaagctgcgggtggccgtgcccctgctgagcagcggcggccaggtggccgtgctggagctgaggaagccaggccgcctgcctgacacagccctgcccaccctgcagaatggagctgctgtgacagacctggcctgggacccctttgacccccaccggctggccgtggccggagaagatgcccgcatccggctgtggagggtgcctgctgagggcctggaggaggtgctgaccaccccagagaccgtgctgaccggccacacagagaagatctgcagcctgcgcttccaccccctggccgccaacgtgctggccagcagcagctatgacctgactgtgcgcatctgggacctgcaggccggggctgaccggctgaagctgcagggccaccaggaccagatcttcagcctggcctggagcccagatggccagcagctggccaccgtgtgcaaggatggccgggtgcgggtgtaccggcccaggagcggccctgagcccctgcaggagggccctggccccaagggcggccgcggggccagaattgtgtgggtgtgtgatggccgctgcctgctggtgtctggctttgacagccagagcgagcggcagctgctgctgtatgaggccgaggccctggccggcggccccctggccgtgctgggcctggatgtggcccccagcaccctgctgcccagctatgaccctgacaccggcctggtgctgctgaccgggaagggggacaccagggtcttcctgtatgagctgctgcctgagagccccttcttcctggagtgcaacagcttcaccagcccagacccccacaagggcctggtgctgctgcccaagacagaatgtgatgtgcgggaggtggagctgatgcgctgcctgcggctgcggcagagcagcctggagcctgtggccttccggctgccccgggtgaggaaggagttcttccaggatgatgtgtttcctgacacagctgtgatctgggagcctgtgctgtctgctgaggcctggctgcagggcgccaacggccagccctggctgctgagcctgcagcccccagacatgagccctgtgtcccaggccccccgggaggccccagcccggcgggcccccagcagcgcccagtacctggaggagaagagtgaccagcagaagaaggaggagctgctgaatgccatggtggccaagctgggcaaccgggaggaccccctgccccaggacagctttgagggcgtggatgaagatgagtgggactag

SEQ ID NO: 79132 - DNA, 1104 bp, Artificial Sequence
  derived and/or modified sequence
atgaaccggttccgggtgagcaagttccggcacaccgaggcccggccacctcggagggaagacaagcagctgcgtatatttgatccccgaacaaaacccagagcctcgcagtccactcaggcccacgagaacagccgcgattccaggctcgcctggatggggacttgggagcatctggtgtctacaggatttaatcagatgagagaacgggaggtgaaactgtgggacacccggttcttttcttctgccctggcgtccctgacccttgacacatccctcgggtgtctggtgcctcttctggatccagactccggactgctggtgctcgccggaaagggagaacgtcagctttattgctatgaagtggtgccccagcagcctgccctgagtccagtcacacagtgtgtcttagagagcgtactccgtggcgcagccctggtacctcggcaagccctcgctgtgatgtcgtgcgaagtcctcagagttcttcaactctcagataccgctatcgtgccaattgggtatcacgtgcctcgaaaagcggtcgaatttcatgaggatctgtttcctgacaccgcaggatgcgtacctgccacagaccctcactcttggtgggcaggcgataatcagcaggtccagaaggtgtccctcaatccagcctgtagacctcacccaagcttcacctcctgcctcgtgcccccagctgagccactcccagatacagcccagcccgctgttatggagacccccgtaggcgatgcagacgcttccgaaggttttagcagcccgccttcttcgctaactagcccaagtaccccatcttccctcggacccagcctgagctcaacatccggcatcggaacttccccttcccttagatctctccagagtctgttaggcccctcatcaaaatttaggcacgcacagggcaccgtgttgcatagagattcccatatcaccaatttaaaaggcctcaacttgaccacccctggcgagtctgacgggttctgcgcgaataagttacgggttgccgtgcccttgttgtcctctggtggtcaggtggcagttctcgaaatgagagagaaaaggcaccgggaggtgtag

SEQ ID NO: 79133 - DNA, 2523 bp, Artificial Sequence
  derived and/or modified sequence
atgaaccggttccgggtgagcaagttccggcacaccgaggcccggccacctcgcagagagtcctggatatcagatatcagagcaggcactgctccatcttgtagaaatcacattaaatcatcgtgtagcctgatcgctttcaacagcgatcggcccggcgtgctcggaatagtgcctctccagggccagggggaggataagcgcagggtggcccacctgggctgccattctgagctggctgcacatggggacctagtccaaagcgctgtgtggtccagggatggagcccttgttgggactgcctgtaaggacaaacagctgcggattttcgacccacgaacaaaacctcgagcctctcagagcactcaagcccatgagaactcaagggactcacgcctcgcctggatgggaacatgggagcacctggtctctaccggctttaatcagatgcgggagagagaagtgaagctgtgggatacgagatttttttctagcgcattggcttctcttacattggatacatcactgggctgcctcgtccctttgcttgaccctgattcagggctgctggtgcttgccgggaagggagagagacaactgtattgctatgaagtggtgccacagcaacctgctttgagcccagtgactcagtgcgtgctcgaaagtgtgctgcggggggctgccctagttccccgccaggctttggcagtgatgtcttgtgaagtgctgcgggtgctgcagctgtccgacaccgctattgttcctataggctaccatgtaccgagaaaggccgtggaatttcatgaggatctcttcccggatactgcgggctgcgtacctgctacagacccgcattcctggtgggccggagacaatcagcaagtgcagaaagttagcctgaatcccgcctgtcggccccacccaagcttcacatcttgcctggtcccacctgcagaacctctgccggacacagcccagcccgctgtgatggagaccccagttggcgatgcagatgcatcagaggggttcagctcccctcctagctccctgacttctccgagcacaccctcctctcttgggcccagcttatcgtctactagcggaataggtacctcaccgagtctgcgcagtttgcagagccttctcggtcctagctcaaagtttcggcacgctcaaggtacggtgctgcaccgggactcgcacattacgaacctgaaaggcctgaatctcaccactcctggggagtctgacgggttctgtgcaaacaagttacgcgtcgctgtcccccttctgtcatccggtggccaggtggccgtcctggagctgcgcaaacctggacgactccccgacacagcccttcccactctgcagaacggcgccgctgttacggatcttgcttgggacccttttgatccccatcggctggctgtggctggagaagacgctcggattcgcttgtggcgggtgcccgccgagggcctcgaagaagtcctaaccactcccgagacagttctgactggtcacactgaaaagatttgtagtctcaggttccacccccttgccgccaacgtccttgcaagctcgtcttatgacctaactgtgcgaatctgggacctgcaagctggggcggatcgactcaaactgcagggccaccaagatcagatcttttccctggcatggtcaccagatggccagcagctggcaacggtctgtaaagacgggagggttcgagtttaccgaccacgtagtggacccgagcctctgcaggaggggcccggtccaaaaggcggcagaggtgccagaattgtgtgggtctgtgatggccgctgccttctggtgtctggattcgatagccagtccgaacgtcaactcctcttgtatgaggctgaagctttggctggaggtcctttggccgtccttggtttggacgtagcaccatctactcttttacccagctacgacccagatacgggcttagtcttgctcactggcaaaggcgacacccgcgtgttcctgtatgagcttctgccagaatcgccctttttcttagagtgtaacagcttcacctctccagacccccacaagggcctggtgctgctgccgaaaaccgagtgcgatgtccgggaagtggaactcatgaggtgcctgcgactccggcaatcctctctcgagcctgtagcctttagactgccgagagtgcgaaaagagttcttccaggatgacgttttccctgatactgctgttatttgggagcctgtcctgtccgccgaagcttggctgcaaggcgccaatggtcagccatggttgctgtccttacagccacccgacatgtctcccgtgtcacaggcccccagggaggcaccagccagaagggcaccatccagcgctcaatacctggaagagaagtctgatcagcagaagaaggaggagctgctcaatgccatggtggcaaaactagggaacagggaagacccccttccacaggactcattcgagggagttgatgaggatgagtgggactag

SEQ ID NO: 79134 - DNA, 2118 bp, Artificial Sequence
  derived and/or modified sequence
atgggcacctgggagcacctggtgagcaccggcttcaaccagatgagggaaagggaggtgaaactctgggataccaggttcttttcctccgccctggcatctctgacactggacacgtcgttggggtgtctggttccactgctggaccccgactcgggactgctggtcctggctgggaagggagaaaggcagctatattgttatgaagttgtgcctcagcagccggccctatctcctgttacacagtgtgtactggaatctgttctgcgcggggccgccctggttccaaggcaggctctggctgtaatgtcctgcgaagtcttgcgagtattgcaactctcagacacggctatcgtgccaattggatatcatgtgcccagaaaagccgtggagttccacgaggacctcttccctgacacggcgggctgtgtccccgcgaccgacccccatagctggtgggcaggggacaatcagcaggtgcaaaaggtgtccctgaaccccgcctgtcgacctcatccttccttcacgtcgtgcctggtcccgccagccgagccactcccggacacagcccaaccggccgtgatggaaaccccggtgggagatgccgacgcctccgagggcttctcttctcccccaagctcactcacaagcccaagcacaccctctagtctcggaccaagtctgtcttccacatcaggaataggaactagccccagtttgcggtccctgcagtcccttctcggacccagctcaaaatttcggcatgcccaggggacagtccttcatcgggactctcatattacaaatctcaaaggcctgaatcttacaaccccaggcgaatctgacggattttgtgcgaataaactgagggtggcggttccactcctgtctagcggaggccaggtggctgtgctggaactgagaaaaccaggccgacttcccgacacagccctgccaacactccaaaatggggcagctgtgacagacctagcttgggatccatttgacccacacagactcgctgtggccggcgaagacgcaaggatccggctatggcgcgtgcccgccgagggcttagaagaagtactcaccaccccggaaactgtcctgacagggcatactgaaaagatctgcagccttagatttcatcctctcgcagccaacgttctggcgtcatccagttatgatctgaccgtgcgcatctgggatctgcaggccggggctgatcgcctaaagttacagggacatcaggaccaaatattctcgctcgcatggtcacccgacgggcagcaactggccactgtgtgtaaggacggcagagtccgcgtctataggcctcggagtggcccagagccgctgcaggagggaccggggccgaaaggcggccggggtgcaagaatcgtgtgggtgtgcgatggcaggtgtttgctggtctccggcttcgactcccagtccgagcggcagcttttgctctatgaagctgaggctctggcaggcggaccgctggccgtgctcggactggacgtggccccatccacactcctgccaagctacgatccagacaccgggctggtgttactaacaggcaaaggggatacacgagtgttcctgtacgaactactgcccgagagtccatttttcctcgagtgcaactcttttacttcccccgatccccacaaaggtttggtcttgctccctaagaccgaatgtgacgtgcgcgaggttgagctaatgaggtgtttgcgcctgcggcagtcttccctggagccggtggcattccgcctgcctcgcgttcgaaaagagtttttccaggatgatgttttcccagatacggccgtcatctgggaacctgtgctgtctgccgaagcctggctacagggtgccaacggtcaaccttggttactctcgctccaacctcccgatatgtccccggtgtctcaggcgcccagggaggccccggcacgcagggcccccagcagtgcgcagtacctggaggagaaaagtgaccagcagaagaaggaggagctcttaaacgctatggtggccaaactgggcaacagggaagaccccttgccccaggatagtttcgagggggtcgatgaggatgaatgggattag

SEQ ID NO: 79135 - DNA, 1104 bp, Artificial Sequence
  derived and/or modified sequence
atgaaccgtttccgcgtgagtaagttccggcatactgaagcaagacctccgcgacgcgaggacaaacagctgagaatttttgaccctcgtaccaagccacgggctagccagtccactcaagcgcatgagaacagcagagacagtcgacttgcctggatgggcacctgggagcaccttgtgagcactggctttaaccagatgcgcgaacgggaggtgaaactttgggacacaagatttttcagcagcgcactggccagcctcaccctggacacctctctaggttgcctggtccccctgctggatccagattctggcctgttggtattggctggcaaaggagaaaggcagctttactgttatgaggtcgtgccgcagcaacccgcacttagccccgttacgcagtgcgtcctggaatcagtactgcggggtgcagccttagtgcccaggcaggccttggccgttatgtcatgtgaagttctcagggttctgcaactttcagacaccgcaatagtgcctattgggtatcacgttcctcgaaaggcggtcgaattccatgaggatctattcccggatacagcgggatgtgttccggctaccgacccccattcttggtgggctggggataaccagcaagtacagaaggtgtcccttaatcccgcttgtaggccacatcccagtttcacttcctgtctggtgccacccgcagagccactgccagatactgcgcagccggcagtgatggagacaccggttggggacgctgacgcgtccgaagggttctcatcccctccttcaagcctgacctccccctcgacaccaagttcacttggaccatccttgtcaagcacctctggaataggcacgtctccgtcacttcgcagcctccagagccttctagggccttccagcaagttccggcatgcacaaggcactgtgctgcacagagactcccacatcaccaaccttaagggcctgaatttaacaacacccggagagtctgacggcttctgcgccaataagttacgagtcgcagtgcctctgctgtctagcgggggtcaggtggctgtgttggaaatgcgtgaaaagcgccacagagaggtgtag

SEQ ID NO: 79136 - DNA, 2523 bp, Artificial Sequence
  derived and/or modified sequence
atgaaccggttcagggtaagcaagttccgccacaccgaagcacgtcctccacgtcgcgaatcctggatatcagatatcagagcaggaacggccccatcatgccgtaatcatattaagtcctcctgctccttgatcgcctttaactcagatcggcctggggtcttggggattgtacccctgcaggggcagggagaggacaagcgacgcgtcgcccacttaggctgtcactctgaactcgccgcacacggggatttggtgcagtcagccgtgtggtcacgcgatggcgctttggtggggacagcgtgcaaggacaagcaactcagaatttttgatccccgaacaaagccacgcgcaagccaaagtactcaggcacacgaaaattcccgcgattcacgtctcgcctggatggggacctgggaacacctggtctctacagggtttaaccagatgcgtgaaagagaagttaagctgtgggacacgcgattcttcagttccgcccttgcctctcttaccttggacacatccctgggctgcctggtgcctctgttagacccagatagcgggcttctggttctcgcagggaagggagagagacagctatattgctacgaggttgttccacagcaacccgctttatcaccagtcacccagtgtgtgctcgagagcgttctgagaggggcagctctcgttcctagacaggccctggccgtgatgtcttgcgaggtactgagggttctccagctctctgacactgcaattgtccccatcggatatcacgtgcctcgaaaggcggtggagttccacgaggatttgtttcctgatacagccggttgcgtgcctgctaccgatccccactcgtggtgggccggagataatcagcaggtgcagaaagtctccctcaaccctgcctgtcgcccacatccatcattcacatcttgtctggttccgccagccgaaccactgcccgacactgcacaacccgctgttatggagacccccgtaggtgacgcagatgcaagtgaggggttcagtagcccaccatcgtccctcacctccccctcgacaccatcaagcttgggaccaagcctgtctagtacgtccggcattggcacctcgcctagcctcaggagtctccagagtctacttgggcctagcagcaaattccgtcatgcccaagggacggtcttacaccgtgattctcatatcaccaatctcaaaggcctgaacctgacaacccccggagagtctgacggattttgcgcgaacaagctgagagttgcggtccccctcctctctagtggaggtcaggtggccgtgttggagctgcgaaagccaggaagattgcccgatacggccctgcccacactgcagaacggcgcagctgtcaccgatttggcttgggatccttttgacccacataggctggctgttgccggagaagatgcaagaatacgcttatggcgggtgccagctgaaggtctcgaggaagtgctgaccacacctgaaacggtgttgaccggccataccgaaaagatatgctctcttcgtttccaccccctcgccgcaaatgtgctcgccagcagttcctacgatttgaccgtccgtatttgggacctacaggctggagctgaccggctgaaacttcagggtcatcaggatcagatttttagcttggcttggagcccagacgggcagcagcttgccacagtatgtaaggacggcagggtgcgggtgtaccgcccaagatcaggcccagaaccgttgcaagagggcccaggaccaaaaggaggccgaggggctcgcattgtgtgggtgtgtgacgggcgatgcctcctcgtgtccggtttcgactctcagtctgaacggcagttacttctttatgaagctgaagcgcttgccggaggccctttagcagtgctgggcttagacgtagccccatctaccctcctcccaagctacgaccctgatactgggctagtgctcctgacaggcaagggagatacaagggtgttcctgtatgaactcctgccagaatcacccttcttcctggaatgcaactcatttacatcaccagaccctcacaagggcctcgttctcctgcccaaaacagagtgcgacgtgagggaggtcgaacttatgagatgccttaggctgcgacaatcctcactcgaacctgttgcatttcgtctgccacgtgtgcgaaaggagttcttccaggacgatgtgtttccagataccgccgtgatttgggaacccgtcctgagcgcggaagcttggctacagggggctaacggccaaccctggttactgagccttcagcctccagacatgtcacctgtttcccaggctcctcgggaagcccctgctcggagggcaccgagtagcgcgcagtacctcgaagaaaaaagcgatcagcaaaaaaaggaggaacttctgaatgctatggtcgccaagctcggaaacagggaggacccactgccccaggattctttcgaaggggtcgacgaggacgagtgggactag

SEQ ID NO: 79137 - DNA, 2118 bp, Artificial Sequence
  derived and/or modified sequence
atgggcacttgggagcatctcgtgtctactggcttcaatcagatgcgggagagggaggtcaaactgtgggacacccgcttttttagcagcgcactggcctccctgactctcgatacgtcgttgggctgcttagtgcccctgttggaccccgactccggacttcttgttctggccggtaagggtgagaggcagctttattgttatgaagtggtgcctcaacagcctgcattgtctccggtgacacaatgcgtgctggagtccgtcctgagaggcgcagcactggttcccaggcaggctctggccgtgatgagctgcgaagttctgcgcgttcttcagctcagcgataccgcaatcgtgcctattggctaccacgtcccaagaaaagctgtggaatttcacgaggacctgtttcccgataccgcaggatgtgtgcctgcgaccgatcctcactcttggtgggccggtgacaaccagcaagtgcagaaggttagtctgaatccagcatgtcggcctcacccttctttcacatcctgtttggtgcctcccgcagaacccttaccagacactgcccagccagcagttatggagacgcctgtcggtgacgctgacgcttcggaaggattcagcagccctccatcgtcattgacatcccctagcacgccctccagtctgggcccaagtttgtcatcaacttccggcatcgggacttctccctcactgaggtctttgcagtccctgctcgggccatcctcgaagttcaggcacgcccagggaacagtgctgcaccgggactcacacatcacaaatctgaagggtttgaatcttaccacacctggcgagagcgacggtttttgcgcaaataagctccgcgtggccgttccactgctttcttcaggaggccaggtggcagtgctggaattacgtaagcccggacgactcccagataccgctttgccaacacttcagaacggtgccgcagtcacagatctggcctgggatccattcgacccccatcgcctcgcagtggctggtgaggacgctcgtatcaggctgtggcgggtcccagcggagggcctggaggaagttctgactactcccgaaacagtccttaccggccacactgagaaaatctgttctctgagattccatccattggccgcaaacgtgctcgcctcatcttcctacgacctgaccgtgcggatttgggacctccaggcaggcgcagatcggctcaagctgcaaggccaccaagaccagatcttctcactggcttggagccccgacggacagcagctagcgactgtttgtaaggacggcagggtacgggtgtaccgaccccgatccgggcctgagccgctgcaagagggaccgggtcctaaaggcggacgcggagcacgaattgtgtgggtgtgtgatggcaggtgtctcctggtgtcgggcttcgactcacagagtgaaagacagcttctcctgtatgaagccgaggctctagcgggaggtcccctggctgttttgggacttgatgttgccccatccaccctgttgccctcatatgatcccgacaccggtttagtgctgttaacaggcaaaggggacacaagggtattcctgtatgagcttctgccagaaagcccctttttcctcgaatgtaattcgttcacttctcctgaccctcacaaagggttggtactgttgccaaaaaccgagtgcgacgtgagagaggtagaacttatgagatgtttgcgccttcgccaaagcagtctggagcccgtcgcgttccgcctgccgagggttcgcaaagaatttttccaggatgacgtgtttccagataccgcggtcatctgggagcctgttctgagcgcagaggcttggttacaaggggctaatggccagccctggctcctgagccttcagcccccagacatgtccccagtgagccaggcgcctcgcgaggccccagccaggcgagcacccagtagtgcccagtacttggaggaaaagagcgaccagcagaaaaaagaggagttgctgaatgctatggttgccaagctgggcaaccgcgaagacccattaccccaggactcatttgagggggtagatgaggacgaatgggactag

SEQ ID NO: 79138 - DNA, 3258 bp, Artificial Sequence
  derived and/or modified sequence
gtgaccgcggcattgggtcccgggtggggccgaggcagcgggagtcgcggttgctcagcgtgcacctgagacccgacgcccggggtcctcgaagacgcgtccgccgccgtgcccgtcgccatgaaccgcttcagggtgtccaagttccggcacaccgaggctcggccgccccgccgcgagtcctggatcagtgacattcgagcaggaaccgccccttcatgcaggaaccacatcaaatcaagctgcagcttgatcgccttcaactccgaccgtcctggtgtactgggcattgtgcctctgcaaggccaaggagaggacaagcgacgcgtggcccacctgggctgccattcagagctggcagcccatggggacctggtgcagagcgccgtctggagccgagatggagccctggtgggcacggcgtgcaaggacaagcagctgcggatctttgaccccagaacaaagccgcgggcctctcagagcacgcaggcccatgagaacagcagggatagccggctggcatggatgggcacctgggagcaccttgtgtctactggattcaaccagatgcgtgagcgcgaagtgaagctgtgggacacgcggttcttctccagcgccctggcctccctcaccttggacacctcgcttgggtgtctcgtgcctctgctggaccctgactctgggctcctggtcctggcaggaaagggcgagaggcagctgtactgttacgaggtggtcccgcagcagccggcgctgagcccagtgacccagtgtgtcctggagagcgtgctgcgtggggctgcccttgtgccccggcaggcgctggccgtcatgagctgcgaggtactccgcgtcctacagctgagcgacacagccatcgtgcccatcggctaccatgtgccccgcaaggctgtggagttccacgaggacctgttcccggacactgccggctgtgtgcctgccaccgacccccatagctggtgggctggggacaaccagcaggtgcagaaggtcagcctcaaccccgcctgccggccccacccgagcttcacttcctgtctggtgccccctgcggagcccctccctgacacagcccagcctgcggtgatggagacacccgtgggtgatgcagacgcaagcgagggtttctcttcccctcccagttcgctgacctcgccctccacgccctccagcctggggccctcactctccagcaccagtggcatcgggaccagccccagtttgaggtcgctgcagagcctgctgggccccagttccaagttccgccatgctcagggcactgtcctgcaccgagacagccacatcaccaacctcaaggggctcaacctcaccacacctggtgagagtgacggcttctgtgccaacaagctgcgtgtggccgtgccgctgctcagcagcgggggacaggtggctgtgcttgagctacggaagcctggccgcctgcccgacacggcactgcccacgctgcagaatggggcagctgtgactgatctggcctgggacccctttgacccccatcgcctcgctgtggctggtgaggacgccaggatccgactgtggcgggtacccgcagagggcctggaagaggtgctcaccacgccagagactgtgctcacaggccacacggagaagatctgctccctgcgcttccacccactggcagccaatgtgctggcctcgtcctcctatgacctcactgttcgcatctgggaccttcaggctggagctgatcggctgaagctgcagggccaccaagaccagatcttcagcctggcctggagtcctgatgggcagcagctggccactgtctgcaaggatgggcgtgtgcgggtctacaggccccggagtggccctgagcccctgcaggaaggcccagggcccaagggaggacgcggagctcgcattgtctgggtatgtgatggtcgctgtctgctggtgtctggctttgacagccaaagtgagcgccagctgctcctatatgaagctgaggccctggccggcggacccttggcagtgttgggcctggacgtggctccctcaaccctgctgcccagctacgacccagacactggcctggtgctcctgaccggcaagggcgacacccgtgtattcctgtacgagctgctccccgagtcccctttcttcctggagtgcaacagcttcacgtcgcctgacccccacaagggcctcgtcctcctgcctaagacggagtgcgacgtgcgggaagtggagctgatgcggtgcctgcggctgcgtcagtcctccctggagcctgtggccttccggctgccccgagtccggaaagagttcttccaggatgacgtgttcccagacacggctgtgatctgggagcctgtgctcagtgccgaggcctggctgcaaggcgctaatgggcagccctggcttctcagcctgcagcctcctgacatgagcccagtgagccaagccccccgagaggcccctgctcgtcgggccccatcctcagcgcagtacctggaagaaaagtctgaccagcaaaagaaggaggagctgctgaatgccatggtggcaaaactggggaaccgggaggacccactcccccaggactcctttgaaggcgtggacgaggacgagtgggactagcctgcgcccccgtcacctccacctcacctgtgctgccacttcctagtgcacacctcacggctcatcctcaagctggaagatacctctctggccccggcacatgtcacccctgcactcctgccttcccgtgggcacttccacatcctctgggcctctggcagttcccagggactgttttcacctctgctgtctctggggtcagctgctgctcatcagctgcccgctagcatgtggccaggggtgcagggtggcggggggtcagcagcatgtccctgggcaggccctgggcaccctgtctcccctggtctcactgctgacctgggctggtcccagcctggattggcctcatccaggatctttggtcaccccacgctgccccatcttgcctgctgttccagttctggtcaagggccttgggggctggccccccaccaggccttctagagcagcaccagtctcagggccctgggaccagctgccctacttcccaggtttgtagccaggagaagggggcatcacagagctgatggtccaataaggggggtgtgagccccgcagggactggcccgcacctgccttggatgttttcagcaattaaacttttttaagctggcc

SEQ ID NO: 79139 - DNA, 3454 bp, Artificial Sequence
  derived and/or modified sequence
ctttatctcggtgatgctgccacggctgggtggggcctggggaagcctgagcaggtggagccccaaagaattgctgagccaggtgccgggagacccttcggacccccgaaacggcaggaggactgatgaggggtgcgccttggaaacgatgtcagctctgctcttccgctttccgtgttattttcctggatcagtgacattcgagcaggaaccgccccttcatgcaggaaccacatcaaatcaagctgcagcttgatcgccttcaactccgaccgtcctggtgtactgggcattgtgcctctgcaaggccaaggagaggacaagcgacgcgtggcccacctgggctgccattcagacctagtcaccgacttggacttctcgccctttgatgacttcctcctggccacaggctcggctgacaggacggtaaaactctggcgactgccagggcctggccaggccctgccctcagcacccggggtggtgctgggccccgaggacctcccagtggaggtactgcagttccaccccacctctgacggcattctgagctggcagcccatggggacctggtgcagagcgccgtctggagccgagatggagccctggtgggcacggcgtgcaaggacaagcagctgcggatctttgaccccagaacaaagccgcgggcctctcagagcacgcaggcccatgagaacagcagggatagccggctggcatggatgggcacctgggagcaccttgtgtctactggattcaaccagatgcgtgagcgcgaagtgaagctgtgggacacgcggttcttctccagcgccctggcctccctcaccttggacacctcgcttgggtgtctcgtgcctctgctggaccctgactctgggctcctggtcctggcaggaaagggcgagaggcagctgtactgttacgaggtggtcccgcagcagccggcgctgagcccagtgacccagtgtgtcctggagagcgtgctgcgtggggctgcccttgtgccccggcaggcgctggccgtcatgagctgcgaggtactccgcgtcctacagctgagcgacacagccatcgtgcccatcggctaccatgtgccccgcaaggctgtggagttccacgaggacctgttcccggacactgccggctgtgtgcctgccaccgacccccatagctggtgggctggggacaaccagcaggtgcagaaggtcagcctcaaccccgcctgccggccccacccgagcttcacttcctgtctggtgccccctgcggagcccctccctgacacagcccagcctgcggtgatggagacacccgtgggtgatgcagacgcaagcgagggtttctcttcccctcccagttcgctgacctcgccctccacgccctccagcctggggccctcactctccagcaccagtggcatcgggaccagccccagtttgaggtcgctgcagagcctgctgggccccagttccaagttccgccatgctcagggcactgtcctgcaccgagacagccacatcaccaacctcaaggggctcaacctcaccacacctggtgagagtgacggcttctgtgccaacaagctgcgtgtggccgtgccgctgctcagcagcgggggacaggtggctgtgcttgagctacggaagcctggccgcctgcccgacacggcactgcccacgctgcagaatggggcagctgtgactgatctggcctgggacccctttgacccccatcgcctcgctgtggctggtgaggacgccaggatccgactgtggcgggtacccgcagagggcctggaagaggtgctcaccacgccagagactgtgctcacaggccacacggagaagatctgctccctgcgcttccacccactggcagccaatgtgctggcctcgtcctcctatgacctcactgttcgcatctgggaccttcaggctggagctgatcggctgaagctgcagggccaccaagaccagatcttcagcctggcctggagtcctgatgggcagcagctggccactgtctgcaaggatgggcgtgtgcgggtctacaggccccggagtggccctgagcccctgcaggaaggcccagggcccaagggaggacgcggagctcgcattgtctgggtatgtgatggtcgctgtctgctggtgtctggctttgacagccaaagtgagcgccagctgctcctatatgaagctgaggccctggccggcggacccttggcagtgttgggcctggacgtggctccctcaaccctgctgcccagctacgacccagacactggcctggtgctcctgaccggcaagggcgacacccgtgtattcctgtacgagctgctccccgagtcccctttcttcctggagtgcaacagcttcacgtcgcctgacccccacaagggcctcgtcctcctgcctaagacggagtgcgacgtgcgggaagtggagctgatgcggtgcctgcggctgcgtcagtcctccctggagcctgtggccttccggctgccccgagtccggaaagagttcttccaggatgacgtgttcccagacacggctgtgatctgggagcctgtgctcagtgccgaggcctggctgcaaggcgctaatgggcagccctggcttctcagcctgcagcctcctgacatgagcccagtgagccaagccccccgagaggcccctgctcgtcgggccccatcctcagcgcagtacctggaagaaaagtctgaccagcaaaagaaggaggagctgctgaatgccatggtggcaaaactggggaaccgggaggacccactcccccaggactcctttgaaggcgtggacgaggacgagtgggactagcctgcgcccccgtcacctccacctcacctgtgctgccacttcctagtgcacacctcacggctcatcctcaagctggaagatacctctctggccccggcacatgtcacccctgcactcctgccttcccgtgggcacttccacatcctctgggcctctggcagttcccagggactgttttcacctctgctgtctctggggtcagctgctgctcatcagctgcccgctagcatgtggccaggggtgcagggtggcggggggtcagcagcatgtccctgggcaggccctgggcaccctgtctcccctggtctcactgctgacctgggctggtcccagcctggattggcctcatccaggatctttggtcaccccacgctgccccatcttgcctgctgttccagttctggtcaagggccttgggggctggccccccaccaggccttctagagcagcaccagtctcagggccctgggaccagctgccctacttcccaggtttgtagccaggagaagggggcatcacagagctgatggtccaataaggggggtgtgagccccgcagggactggcccgcacctgccttggatgttttcagcaattaaacttttttaagctggc

SEQ ID NO: 79140 - DNA, 1104 bp, Artificial Sequence
  derived and/or modified sequence
atgaacagattcagagtgagcaagttcagacacaccgaggccagaccccccagaagagaggacaagcagctgagaatcttcgaccccagaaccaagcccagagccagccagagcacccaggcccacgagaacagcagagacagcagactggcctggatgggcacctgggagcacctggtgagcaccggcttcaaccagatgagagagagagaggtgaagctgtgggacaccagattcttcagcagcgccctggccagcctgaccctggacaccagcctgggctgcctggtgcccctgctggaccccgacagcggcctgctggtgctggccggcaagggcgagagacagctgtactgctacgaggtggtgccccagcagcccgccctgagccccgtgacccagtgcgtgctggagagcgtgctgagaggcgccgccctggtgcccagacaggccctggccgtgatgagctgcgaggtgctgagagtgctgcagctgagcgacaccgccatcgtgcccatcggctaccacgtgcccagaaaggccgtggagttccacgaggacctgttccccgacaccgccggctgcgtgcccgccaccgacccccacagctggtgggccggcgacaaccagcaggtgcagaaggtgagcctgaaccccgcctgcagaccccaccccagcttcaccagctgcctggtgccccccgccgagcccctgcccgacaccgcccagcccgccgtgatggagacccccgtgggcgacgccgacgccagcgagggcttcagcagcccccccagcagcctgaccagccccagcacccccagcagcctgggccccagcctgagcagcaccagcggcatcggcaccagccccagcctgagaagcctgcagagcctgctgggccccagcagcaagttcagacacgcccagggcaccgtgctgcacagagacagccacatcaccaacctgaagggcctgaacctgaccacccccggcgagagcgacggcttctgcgccaacaagctgagagtggccgtgcccctgctgagcagcggcggccaggtggccgtgctggagatgagagagaagagacacagagaggtgtag

SEQ ID NO: 79141 - DNA, 2118 bp, Artificial Sequence
  derived and/or modified sequence
atgggcacctgggagcacctggtgagcaccggcttcaaccagatgagagagagagaggtgaagctgtgggacaccagattcttcagcagcgccctggccagcctgaccctggacaccagcctgggctgcctggtgcccctgctggaccccgacagcggcctgctggtgctggccggcaagggcgagagacagctgtactgctacgaggtggtgccccagcagcccgccctgagccccgtgacccagtgcgtgctggagagcgtgctgagaggcgccgccctggtgcccagacaggccctggccgtgatgagctgcgaggtgctgagagtgctgcagctgagcgacaccgccatcgtgcccatcggctaccacgtgcccagaaaggccgtggagttccacgaggacctgttccccgacaccgccggctgcgtgcccgccaccgacccccacagctggtgggccggcgacaaccagcaggtgcagaaggtgagcctgaaccccgcctgcagaccccaccccagcttcaccagctgcctggtgccccccgccgagcccctgcccgacaccgcccagcccgccgtgatggagacccccgtgggcgacgccgacgccagcgagggcttcagcagcccccccagcagcctgaccagccccagcacccccagcagcctgggccccagcctgagcagcaccagcggcatcggcaccagccccagcctgagaagcctgcagagcctgctgggccccagcagcaagttcagacacgcccagggcaccgtgctgcacagagacagccacatcaccaacctgaagggcctgaacctgaccacccccggcgagagcgacggcttctgcgccaacaagctgagagtggccgtgcccctgctgagcagcggcggccaggtggccgtgctggagctgagaaagcccggcagactgcccgacaccgccctgcccaccctgcagaacggcgccgccgtgaccgacctggcctgggaccccttcgacccccacagactggccgtggccggcgaggacgccagaatcagactgtggagagtgcccgccgagggcctggaggaggtgctgaccacccccgagaccgtgctgaccggccacaccgagaagatctgcagcctgagattccaccccctggccgccaacgtgctggccagcagcagctacgacctgaccgtgagaatctgggacctgcaggccggcgccgacagactgaagctgcagggccaccaggaccagatcttcagcctggcctggagccccgacggccagcagctggccaccgtgtgcaaggacggcagagtgagagtgtacagacccagaagcggccccgagcccctgcaggagggccccggccccaagggcggcagaggcgccagaatcgtgtgggtgtgcgacggcagatgcctgctggtgagcggcttcgacagccagagcgagagacagctgctgctgtacgaggccgaggccctggccggcggccccctggccgtgctgggcctggacgtggcccccagcaccctgctgcccagctacgaccccgacaccggcctggtgctgctgaccggcaagggcgacaccagagtgttcctgtacgagctgctgcccgagagccccttcttcctggagtgcaacagcttcaccagccccgacccccacaagggcctggtgctgctgcccaagaccgagtgcgacgtgagagaggtggagctgatgagatgcctgagactgagacagagcagcctggagcccgtggccttcagactgcccagagtgagaaaggagttcttccaggacgacgtgttccccgacaccgccgtgatctgggagcccgtgctgagcgccgaggcctggctgcagggcgccaacggccagccctggctgctgagcctgcagccccccgacatgagccccgtgagccaggcccccagagaggcccccgccagaagagcccccagcagcgcccagtacctggaggagaagagcgaccagcagaagaaggaggagctgctgaacgccatggtggccaagctgggcaacagagaggaccccctgccccaggacagcttcgagggcgtggacgaggacgagtgggactag

SEQ ID NO: 79142 - protein, 1048 aa, Artificial Sequence
  derived and/or modified sequence
MNRFRVSKFRHTEARPPRRESWISDIRAGTAPSCRNHIKSSCSLIAFNSDRPGVLGIVPLQGQGEDKRRVAHLGCHSDLVTDLDFSPFDDFLLATGSADRTVKLWRLPGPGQALPSAPGVVLGPEDLPVEVLQFHPTSDGILVSAAGTTVKVWDAAKQQPLTELAAHGDLVQSAVWSRDGALVGTACKDKQLRIFDPRTKPRASQSTQAHENSRDSRLAWMGTWEHLVSTGFNQMREREVKLWDTRFFSSALASLTLDTSLGCLVPLLDPDSGLLVLAGKGERQLYCYEVVPQQPALSPVTQCVLESVLRGAALVPRQALAVMSCEVLRVLQLSDTAIVPIGYHVPRKAVEFHEDLFPDTAGCVPATDPHSWWAGDNQQVQKVSLNPACRPHPSFTSCLVPPAEPLPDTAQPAVMETPVGDADASEGFSSPPSSLTSPSTPSSLGPSLSSTSGIGTSPSLRSLQSLLGPSSKFRHAQGTVLHRDSHITNLKGLNLTTPGESDGFCANKLRVAVPLLSSGGQVAVLELRKPGRLPDTALPTLQNGAAVTDLAWDPFDPHRLAVAGEDARIRLWRVPAEGLEEVLTTPETVLTGHTEKICSLRFHPLAANVLASSSYDLTVRIWDLQAGADRLKLQGHQDQIFSLAWSPDGQQLATVCKDGRVRVYRPRSGPEPLQEGPGPKGGRGARIVWVCDGRCLLVSGFDSQSERQLLLYEAEALAGGPLAVLGLDVAPSTLLPSYDPDTGLVLLTGKGDTRVFLYELLPESPFFLECNSFTSPDPHKGLVLLPKTECDVREVELMRCLRLRQSSLEPVAFRLPRVRKEFFQDDVFPDTAVIWEPVLSAEAWLQGANGQPWLLSLQPPDMSPVSQAPREAPARRAPSSAQYLEEKSDQQKKEELLNAMVAKLGNREDPLPQDSFEGVDEDEWAKYLAQIIVMGVQVVGRAFARALRQEFAASRAAADARGRAGHRSAAASNLSGLSLQEAQQILNVSKLSPEEVQKNYEHLFKVNDKSVGGSFYLQSKVVRAKERLDEELKIQAQEDREKGQMPHT

SEQ ID NO: 79143 - protein, 925 aa, Artificial Sequence
  derived and/or modified sequence
MNRFRVSKFRHTEARPPRRESWISDIRAGTAPSCRNHIKSSCSLIAFNSDRPGVLGIVPLQGQGEDKRRVAHLGCHSDLVTDLDFSPFDDFLLATGSADRTVKLWRLPGPGQALPSAPGVVLGPEDLPVEVLQFHPTSDGILVSAAGTTVKVWDAAKQQPLTELAAHGDLVQSAVWSRDGALVGTACKDKQLRIFDPRTKPRASQSTQAHENSRDSRLAWMGTWEHLVSTGFNQMREREVKLWDTRFFSSALASLTLDTSLGCLVPLLDPDSGLLVLAGKGERQLYCYEVVPQQPALSPVTQCVLESVLRGAALVPRQALAVMSCEVLRVLQLSDTAIVPIGYHVPRKAVEFHEDLFPDTAGCVPATDPHSWWAGDNQQVQKVSLNPACRPHPSFTSCLVPPAEPLPDTAQPAVMETPVGDADASEGFSSPPSSLTSPSTPSSLGPSLSSTSGIGTSPSLRSLQSLLGPSSKFRHAQGTVLHRDSHITNLKGLNLTTPGESDGFCANKLRVAVPLLSSGGQVAVLELRKPGRLPDTALPTLQNGAAVTDLAWDPFDPHRLAVAGEDARIRLWRVPAEGLEEVLTTPETVLTGHTEKICSLRFHPLAANVLASSSYDLTVRIWDLQAGADRLKLQGHQDQIFSLAWSPDGQQLATVCKDGRVRVYRPRSGPEPLQEGPGPKGGRGARIVWVCDGRCLLVSGFDSQSERQLLLYEAEALAGGPLAVLGLDVAPSTLLPSYDPDTGLVLLTGKGDTRVFLYELLPESPFFLECNSFTSPDPHKGLVLLPKTECDVREVELMRCLRLRQSSLEPVAFRLPRVRKEFFQDDVFPDTAVIWEPVLSAEAWLQGANGQPWLLSLQPPDMSPVSQAPREAPARRAPSSAQYLEEKSDQQKKEELLNAMVAKLGNREDPLPQDSFEGVDEDEWD

SEQ ID NO: 79144 - protein, 367 aa, Artificial Sequence
  derived and/or modified sequence
MNRFRVSKFRHTEARPPRREDKQLRIFDPRTKPRASQSTQAHENSRDSRLAWMGTWEHLVSTGFNQMREREVKLWDTRFFSSALASLTLDTSLGCLVPLLDPDSGLLVLAGKGERQLYCYEVVPQQPALSPVTQCVLESVLRGAALVPRQALAVMSCEVLRVLQLSDTAIVPIGYHVPRKAVEFHEDLFPDTAGCVPATDPHSWWAGDNQQVQKVSLNPACRPHPSFTSCLVPPAEPLPDTAQPAVMETPVGDADASEGFSSPPSSLTSPSTPSSLGPSLSSTSGIGTSPSLRSLQSLLGPSSKFRHAQGTVLHRDSHITNLKGLNLTTPGESDGFCANKLRVAVPLLSSGGQVAVLEMREKRHREV

SEQ ID NO: 79145 - protein, 705 aa, Artificial Sequence
  derived and/or modified sequence
MGTWEHLVSTGFNQMREREVKLWDTRFFSSALASLTLDTSLGCLVPLLDPDSGLLVLAGKGERQLYCYEVVPQQPALSPVTQCVLESVLRGAALVPRQALAVMSCEVLRVLQLSDTAIVPIGYHVPRKAVEFHEDLFPDTAGCVPATDPHSWWAGDNQQVQKVSLNPACRPHPSFTSCLVPPAEPLPDTAQPAVMETPVGDADASEGFSSPPSSLTSPSTPSSLGPSLSSTSGIGTSPSLRSLQSLLGPSSKFRHAQGTVLHRDSHITNLKGLNLTTPGESDGFCANKLRVAVPLLSSGGQVAVLELRKPGRLPDTALPTLQNGAAVTDLAWDPFDPHRLAVAGEDARIRLWRVPAEGLEEVLTTPETVLTGHTEKICSLRFHPLAANVLASSSYDLTVRIWDLQAGADRLKLQGHQDQIFSLAWSPDGQQLATVCKDGRVRVYRPRSGPEPLQEGPGPKGGRGARIVWVCDGRCLLVSGFDSQSERQLLLYEAEALAGGPLAVLGLDVAPSTLLPSYDPDTGLVLLTGKGDTRVFLYELLPESPFFLECNSFTSPDPHKGLVLLPKTECDVREVELMRCLRLRQSSLEPVAFRLPRVRKEFFQDDVFPDTAVIWEPVLSAEAWLQGANGQPWLLSLQPPDMSPVSQAPREAPARRAPSSAQYLEEKSDQQKKEELLNAMVAKLGNREDPLPQDSFEGVDEDEWD

SEQ ID NO: 79146 - DNA, 3147 bp, Artificial Sequence
  derived and/or modified sequence
atgaaccgattccgcgtttctaagttccggcacactgaggcacgtccccccagacgggagtcatggatatctgacatcagggccggcaccgcccctagttgtagaaaccacataaagagctcttgtagtctgattgccttcaacagcgataggccaggtgtgttgggcatcgtgcccctgcagggacagggcgaggataagcgccgcgtggcgcacctcggatgtcattccgaccttgtgacagatttggatttctccccttttgacgactttttgctggctacaggctcagccgacaggaccgtgaaactttggcgtcttcctggccccggacaagccttgccctcggcacccggagtggtgctcggaccggaagacttgccggttgaggttctccagttccatcccaccagtgacggtatactggtgtccgcggctggaaccaccgttaaggtctgggacgcagctaagcagcaacccctgacagagctggctgcgcatggtgatctcgttcagagtgccgtgtggtccagagatggcgccctagttggcacagcctgcaaggacaagcagcttcggatttttgaccccagaactaagccacgagccagccagagcacacaagctcatgaaaattcccgagactctagactcgcgtggatgggtacatgggaacacctggtatccaccggcttcaaccaaatgagggaaagagaagtcaagctctgggataccaggtttttttcctccgcacttgcctccctcaccctcgacacgtcacttggctgtctcgtgccactcctggatccagactccggactcttagtactggccgggaagggagaacggcagctctattgctacgaggtggtcccacaacaaccagccctttctcctgttactcagtgcgtcttggagtcagtattgcgtggggcagcactcgtaccacggcaagccctagcagtcatgtcttgcgaggtcttgcgagtcctgcagctctccgatacagccatcgtcccgattgggtaccacgtgccccgaaaggccgttgaatttcatgaagacctcttcccggataccgccgggtgcgttcccgctactgatccacactcctggtgggctggagataatcagcaggtgcagaaggtgtccctgaatccagcctgcaggcctcatcctagcttcacctcgtgcctcgtgccccctgctgaacctctccccgacaccgctcagcctgccgtgatggagaccccagtgggggacgcagatgctagtgaggggttctcttctcctcctagcagcctaacaagcccttcaacaccatctagtctaggacctagtctgagcagcacctctggcattggaacaagtccatcactgcggtcactgcagagtctgttaggaccatctagcaaatttagacacgcccagggaacggtgctgcaccgggactctcacataactaacctcaagggcctcaatctgacgacgcccggagaatccgacggattttgcgccaacaagttgcgggtggccgtacccctgctgtcttccggcggacaggtggccgtacttgagctcagaaaacctggccggctgccggacaccgctcttccaactctgcagaacggagcagcggtgaccgacctcgcatgggatccattcgatccacacagactcgctgtggccggcgaagatgcacgcatccgcctgtggcgggtgccagctgaagggctcgaggaagtgctaactactcccgaaaccgtcctgactggacacaccgagaagatttgcagcttgcgattccaccctctagccgccaatgtgctggcttcgtcttcatatgatctcaccgtaaggatttgggacctacaagcaggcgcggatcgtctgaagctccagggacaccaggatcaaatcttcagcctagcctggtcacccgacggacagcagctggctactgtgtgcaaggatggcagagtcagggtgtaccgacctcgctccggacccgagccgctgcaggagggaccaggccccaaaggcgggcgcggcgcccggattgtgtgggtgtgcgacgggagatgccttctcgtttctggcttcgactcccaatccgaaaggcaactgcttctgtacgaggccgaagcccttgctggtggaccactggctgttctagggctggatgtcgcgccatcaacattgttgccttcgtatgacccggacaccggtcttgtcttgctgacaggaaaaggagacacgagggttttcctgtatgagttgctgcccgagagccccttcttcttggagtgtaactcattcacctcccctgatccacataaagggctagtgctccttccaaaaaccgagtgtgacgtgagagaggtcgagctcatgaggtgtttacgattaaggcaatcaagcctggagcccgttgccttccgcctccctagggttcgcaaggaatttttccaagacgacgtcttccccgatacagccgtgatttgggaacctgtcctcagcgcagaggcctggctgcagggcgcaaatggtcagccatggctgttgtccctgcagcccccagacatgagccccgtgtcccaggccccaagagaggcgccagctcgccgggcccccagtagcgcgcagtaccttgaggaaaagagtgatcagcagaagaaggaggagctgctcaacgctatggtggccaagctgggaaatagggaggaccctctgccacaggatagcttcgagggcgtcgacgaagacgagtgggccaaatacctcgcacaaattattgtgatgggagtgcaagtcgtaggccgcgcctttgctagggcattaaggcaggaattcgccgcaagcagagccgctgccgatgctaggggtcgggcaggacatcgtagcgccgccgccagcaatctgagcgggctatccctgcaggaggcccagcagattcttaatgtctccaagctcagtcccgaggaggtgcagaagaactacgagcacttgtttaaagtgaacgataaatcagtcggtggatctttctacttgcaaagcaaagtagtccgggccaaggagcggttggatgaggagctgaaaattcaggcacaagaggacagggagaagggccagatgcctcacacctag

SEQ ID NO: 79147 - DNA, 3147 bp, Artificial Sequence
  derived and/or modified sequence
atgaaccgcttccgggtgtccaagttccgccacacagaggcccggcccccccggcgggagagctggatcagtgacatccgggccggcacagcccccagctgcaggaaccacatcaagagcagctgcagcctgattgccttcaacagcgacaggcctggggtgctgggcatcgtgcccctgcagggccagggcgaggacaagagaagagtggcccacctgggctgccacagcgacctggtgacagacctggacttcagcccctttgatgacttcctgctggccactggatctgctgacagaacagtgaagctgtggaggctgcccggccctggccaggccctgcccagcgcccctggggtggtgctgggccctgaggacctgcctgtggaggtgctgcagttccaccccaccagtgatggcatcctggtgtctgctgctggcaccaccgtgaaggtgtgggatgctgccaagcagcagcccctgacagagctggccgcccatggagacctggtgcagagcgctgtgtggagcagagatggagccctggtgggcacagcctgcaaggacaagcagctgcgcatctttgaccccaggaccaagccccgggccagccagagcacccaggcccacgagaacagccgggacagccggctggcctggatgggcacctgggagcacctggtgtccacaggcttcaaccagatgagggagcgggaggtgaagctgtgggacacccgcttcttcagcagcgccctggccagcctgaccctggacaccagcctgggctgcctggtgcccctgctggaccctgacagcggcctgctggtgctggccggcaagggggagcggcagctgtactgctatgaggtggtgccccagcagcctgccctgagccctgtgacccagtgtgtgctggagagcgtgctgcggggggccgccctggtgccccggcaggccctggccgtgatgagctgtgaggtgctgcgggtgctgcagctgagtgacacagccatcgtgcccatcggctaccacgtgcccaggaaggctgtggagttccacgaggacctcttcccagacacagctggctgtgtgcctgccacagacccccacagctggtgggccggggacaaccagcaggtgcagaaggtgtccctgaacccagcctgccggccccaccccagcttcaccagctgcctggtgcccccagctgagcccctgcctgacacagcccagcctgctgtgatggagacccctgtgggagatgctgatgccagcgagggcttcagcagcccccccagcagcctgaccagccccagcacccccagcagcctgggccccagcctgagcagcaccagcggcatcggcaccagccccagcctgcggagcctgcagagcctgctgggccccagcagcaagttcagacatgcccagggcaccgtgctgcaccgggacagccacatcaccaacctgaagggcctgaacctgaccaccccaggagagagtgatggcttctgtgccaacaagctgcgggtggccgtgcccctgctgagcagcggcggccaggtggccgtgctggagctgaggaagccaggccgcctgcctgacacagccctgcccaccctgcagaatggagctgctgtgacagacctggcctgggacccctttgacccccaccggctggccgtggccggagaagatgcccgcatccggctgtggagggtgcctgctgagggcctggaggaggtgctgaccaccccagagaccgtgctgaccggccacacagagaagatctgcagcctgcgcttccaccccctggccgccaacgtgctggccagcagcagctatgacctgactgtgcgcatctgggacctgcaggccggggctgaccggctgaagctgcagggccaccaggaccagatcttcagcctggcctggagcccagatggccagcagctggccaccgtgtgcaaggatggccgggtgcgggtgtaccggcccaggagcggccctgagcccctgcaggagggccctggccccaagggcggccgcggggccagaattgtgtgggtgtgtgatggccgctgcctgctggtgtctggctttgacagccagagcgagcggcagctgctgctgtatgaggccgaggccctggccggcggccccctggccgtgctgggcctggatgtggcccccagcaccctgctgcccagctatgaccctgacaccggcctggtgctgctgaccgggaagggggacaccagggtcttcctgtatgagctgctgcctgagagccccttcttcctggagtgcaacagcttcaccagcccagacccccacaagggcctggtgctgctgcccaagacagaatgtgatgtgcgggaggtggagctgatgcgctgcctgcggctgcggcagagcagcctggagcctgtggccttccggctgccccgggtgaggaaggagttcttccaggatgatgtgtttcctgacacagctgtgatctgggagcctgtgctgtctgctgaggcctggctgcagggcgccaacggccagccctggctgctgagcctgcagcccccagacatgagccctgtgtcccaggccccccgggaggccccagcccggcgggcccccagcagcgcccagtacctggaggagaagagtgaccagcagaagaaggaggagctgctgaatgccatggtggccaagctgggcaaccgggaggaccccctgccccaggacagctttgagggcgtggatgaagatgagtgggccaagtacctggcccagatcatcgtgatgggcgtgcaggtggtgggccgggcctttgcccgggccctgcggcaggagtttgctgccagcagagctgctgctgatgcccggggccgggccggccacaggtctgctgctgccagcaacctgagcggcctgagcctgcaggaggcccagcagatcctgaatgtgtccaagctgagccctgaggaggtgcagaagaactatgagcacctgttcaaggtgaatgacaagtctgtgggcggcagcttctacctgcagagcaaggtggtgcgggccaaggagcggctggatgaggagctgaagatccaggcccaggaggaccgggagaagggccagatgccccacacctag

SEQ ID NO: 79148 - DNA, 3147 bp, Artificial Sequence
  derived and/or modified sequence
atgaaccggttccgggtgagcaagttccggcacaccgaggcccggccaccacgcagggagtcttggattagcgatatcagagcaggcactgcccctagctgccgcaatcatattaaatcctcttgttcactgatcgcctttaacagcgatagaccaggtgtcttaggcatcgttccgctgcaaggtcagggggaggataagcgcagagtcgcgcacctggggtgccactctgacctggtcacggatctggacttttctccgttcgacgacttcctacttgcaactggaagtgcagataggaccgtgaagctgtggaggttacctgggccaggccaggctttacccagtgccccaggcgtggtgctcgggcctgaggatctgccagtggaagtcttacagttccaccctacctcggatggaatactggtttctgcagctggtacgacagtgaaggtctgggacgccgccaagcagcagcccctcaccgaattagccgctcacggggacctcgtgcaatcagccgtatggtctcgagatggtgcgctcgtaggaactgcctgcaaggacaaacagctgcgcatctttgatcctcggaccaagccccgggccagccagtcaacgcaagcacatgagaattcccgggattctagacttgcctggatggggacatgggaacatctcgtctcgacggggtttaaccagatgcgcgagcgggaggttaaattgtgggatacccgcttctttagctccgccttagcatctttgaccctggacacctccctggggtgtttggtgcccttactggacccagattccgggctcctggtgctcgccggtaagggggagcgacagctgtactgttatgaagtggtgccacaacagccggcgctgtctcccgtaactcaatgcgttctagaaagtgtgctgcgcggagctgcgcttgtgcctcgccaggcattagcggtgatgagctgcgaggtgctgcgagtcctgcagctcagcgatacagcgatcgtccctatcggttatcatgtgcctagaaaggccgtggagtttcacgaggatttgtttcctgacactgcaggatgtgtgccagctacagacccacattcctggtgggctggtgacaaccagcaggtccagaaagtgtccttgaatcccgcttgtaggccacatcccagtttcacatcctgcctcgtgccacctgcagaaccactgcccgatacagcccagccggcggtgatggagactcccgtaggggatgccgacgccagcgaaggtttttcttcaccaccgagctccttaacttcaccctccacccctagctctttaggaccatctttaagttcaacttctgggattgggacctcccccagcttaaggtccttgcagagcctgctgggccccagctctaaattcagacatgcccagggtaccgtccttcatcgcgactcgcacatcacaaatctgaagggattgaatctgacaacacccggggagagcgatgggttttgcgcaaacaaattaagggtcgccgtgccccttctgtcttcagggggccaggtggcggtactggaacttcggaagcccgggcgactgcctgacaccgccttgccgacacttcaaaacggggcagcggtgactgacttagcttgggaccctttcgatcctcataggttggccgtcgcaggcgaggacgcccgcattaggctctggcgggtgccagccgaggggctggaggaggttcttacaacacccgaaaccgtgttgacaggtcacaccgagaagatctgctccttgcgcttccaccccctagcagccaatgtccttgcaagtagcagttatgatctgactgtacgcatatgggaccttcaagctggggctgatcgcctgaaactgcaaggccaccaagaccagattttctccctggcctggagcccagatggacaacaactggcaaccgtgtgtaaagatggccgcgtcagagtgtacaggcccagatctggacccgaacctcttcaagaaggtccaggaccgaagggagggcgcggagcaaggattgtctgggtttgtgatgggagatgtctgctggtatcgggctttgacagtcagtctgaacgccagctgcttctttacgaagctgaagccttagccggcggccctttagccgtgctcggtttagacgtagcaccttccacactgctgccctcttatgaccctgacaccggcctggtgctactgacaggcaagggcgatactcgggttttcctgtatgagctgctgcctgagagtcccttttttttggaatgcaattctttcacaagccccgaccctcacaagggcttagttctgcttcctaagaccgaatgcgatgttagagaagtggagcttatgcgttgtctgcgcttgcgccagtccagcctggagcccgtagcctttaggctgcctagggtgaggaaggaattctttcaagatgacgtgtttccagataccgctgtgatctgggagcctgtgctttctgcggaggcatggctgcaaggggccaatggccaaccgtggctgttatccctccagcccccagatatgtctcctgtttctcaagcacccagggaggctcctgccagacgagctccctctagcgctcagtacctggaggagaagtcggaccagcaaaagaaggaagaattgctaaatgccatggtcgcaaagctcggcaaccgtgaggatccattgccacaggacagctttgaaggcgtggatgaagacgagtgggctaaatacctcgctcagataatagtaatgggagtacaggtggtcggaagggctttcgctagagcccttcgccaggaatttgccgcaagtagagcagccgccgatgcaagaggcagggccggacaccgaagcgcagccgcctcaaatctgtcgggcctaagcctccaagaagcacagcagattctgaacgtgtccaaactctctcccgaagaagtgcaaaaaaactatgaacacctctttaaagtgaacgataagagcgtcgggggatcattctatctgcagtctaaagtggtgagggccaaggaacgcctggatgaggagttgaaaattcaggctcaagaggacagggaaaaaggccagatgcctcacacctag

SEQ ID NO: 79149 - DNA, 3147 bp, Artificial Sequence
  derived and/or modified sequence
atgaaccgcttccgagtctccaaattccgccacactgaagctaggccaccaaggagagagagttggatctctgacatccgcgctggaacggcccctagctgtcggaatcacataaagtcttcatgtagtttaatcgctttcaacagcgacaggcctggcgtgcttggcattgtgcctctgcagggccagggcgaggacaaacggagagtggcccacctcggctgccacagcgaccttgtcactgacctcgacttctccccgtttgatgatttcctgctggcaaccggatcagccgaccggacagtgaaactctggaggctgcccggaccaggtcaagctctccctagtgcaccaggcgtggtgttaggcccagaggacctgccagttgaggttcttcagttccatccgacgtcagacggcattttagtttctgcagccggaacaacagtcaaagtgtgggacgcagctaagcagcaacctttgacagaactcgccgctcatggcgatttggtccaaagtgcagtatggtccagagatggagctctcgtgggcacagcgtgcaaggacaaacaactgagaatctttgacccacgaaccaagcccagggcaagtcagtccacgcaggcccacgaaaatagtcgggactctagattggcttggatgggtacgtgggaacatttggtgtccactgggtttaatcagatgcgcgagagggaagtgaagctctgggatacacgtttcttttcctcagctctagccagcctgaccttagatactagccttggttgcctggtacccctgttggacccggacagcggcctactggtactcgccggaaaaggggagagacaactgtactgttacgaagtggttccgcagcaacctgccctcagtccagtcacacaatgtgtcctagaatccgtactgcggggagcagcgctcgtgcctaggcaggcactggctgtcatgtcatgcgaggtacttagggttctgcaactttctgataccgcgattgtaccaatcggttatcacgtcccacggaaggcagtcgagtttcacgaagaccttttccctgacacagctggatgtgtcccagctaccgatccccactcctggtgggccggtgacaatcagcaggtccaaaaagtgagcctgaatccagcctgcagacctcaccccagcttcacgtcctgccttgttcccccagccgaaccgctaccagacacagcccagccagctgtcatggaaacacccgtaggagatgctgatgcttccgagggattttcgtcccccccaagttccctcaccagtccttctacaccttcgtcccttggcccatcactctccagtacgtccggcatcgggacctcgccatctctgcgtagcttgcagagtctcctggggcctagctccaaattccgccacgcgcaaggaaccgttctgcacagggactctcacatcaccaatctcaagggactcaatcttaccactcctggcgaaagtgacggattttgcgcaaataagctgagagtcgccgtacctttgttatccagtgggggacaggttgcagtgctggagctccggaagcccggacgtttaccagatactgccctgccgactcttcagaatggcgcagcggtaacagacctcgcatgggacccgtttgacccacatcgcctggctgtggctggtgaggatgcaaggattcgtctttggagggtgcctgcagagggacttgaggaggtcctcaccactcctgagaccgtgctcactggccatacagaaaagatttgtagccttagattccaccctctggctgccaacgtgttggcgtcatctagctacgacttaactgtcaggatttgggatctccaagccggtgccgatcgtctcaagctgcagggccaccaagaccagatcttctccctagcttggtctccagatggccaacagctggccacagtatgcaaggacggtcgcgtgcgcgtgtacagaccgcgatcaggtcctgaacccctgcaagaaggaccgggaccgaagggaggcagaggcgctagaattgtgtgggtctgtgacggaagatgtctattggtgagcggctttgacagtcagtctgagcgccaactccttctgtacgaagcagaagccttagctggagggcctttagccgtgctcggcctggatgttgcaccctcaacgcttctcccctcatacgatcccgatactggactggtcctgctgaccggaaagggtgatactagggttttcctgtatgaattgctgccagaatctcctttcttcttagagtgcaactccttcacttcccctgatccgcacaagggactggtgctgttgcccaagaccgaatgtgacgttcgagaggtggagctaatgcggtgccttcgccttcgtcagagctcactcgaacctgttgcttttagactgcccagagtgcggaaagagttctttcaggatgatgtcttccccgatacagccgtgatctgggagccagtcctctccgctgaggcttggctgcagggcgctaacggccagccgtggctcctgtccttgcagccaccagatatgtcacctgtcagccaagcaccaagggaggctccggctcggagggctcctagtagcgcacagtacctggaagagaaaagcgatcagcagaaaaaagaggagttactgaatgccatggtggctaaactggggaacagagaggatcctctgccacaagactctttcgagggcgttgacgaggacgagtgggctaaataccttgcccaaatcatagtaatgggagtccaagtggtaggtcgtgcatttgccagagcgctgaggcaggagttcgcagccagtcgggcagctgccgatgccaggggacgggcaggccatcgaagcgcagcagcttccaatctgtcagggctttcactccaggaggcccagcagattctcaacgtgagtaaattatcccctgaggaggttcagaagaactatgagcacttatttaaagtgaatgacaagtccgtgggtggatccttttatctgcagagcaaggtcgtcagagccaaggagcgcctggatgaagaattgaaaattcaggcacaggaagatagagagaaagggcagatgccccacacctag

SEQ ID NO: 79150 - DNA, 3284 bp, Artificial Sequence
  derived and/or modified sequence
tgctcagcgtgcacctgagacccgacgcccggggtcctcgaagacgcgtccgccgccgtgcccgtcgccatgaaccgcttcagggtgtccaagttccggcacaccgaggctcggccgccccgccgcgagtcctggatcagtgacattcgagcaggaaccgccccttcatgcaggaaccacatcaaatcaagctgcagcttgatcgccttcaactccgaccgtcctggtgtactgggcattgtgcctctgcaaggccaaggagaggacaagcgacgcgtggcccacctgggctgccattcagacctagtcaccgacttggacttctcgccctttgatgacttcctcctggccacaggctcggctgacaggacggtaaaactctggcgactgccagggcctggccaggccctgccctcagcacccggggtggtgctgggccccgaggacctcccagtggaggtactgcagttccaccccacctctgacggcattctggtgagcgcagcaggcaccactgtgaaggtctgggacgcagccaagcagcagcccctgacagagctggcagcccatggggacctggtgcagagcgccgtctggagccgagatggagccctggtgggcacggcgtgcaaggacaagcagctgcggatctttgaccccagaacaaagccgcgggcctctcagagcacgcaggcccatgagaacagcagggatagccggctggcatggatgggcacctgggagcaccttgtgtctactggattcaaccagatgcgtgagcgcgaagtgaagctgtgggacacgcggttcttctccagcgccctggcctccctcaccttggacacctcgcttgggtgtctcgtgcctctgctggaccctgactctgggctcctggtcctggcaggaaagggcgagaggcagctgtactgttacgaggtggtcccgcagcagccggcgctgagcccagtgacccagtgtgtcctggagagcgtgctgcgtggggctgcccttgtgccccggcaggcgctggccgtcatgagctgcgaggtactccgcgtcctacagctgagcgacacagccatcgtgcccatcggctaccatgtgccccgcaaggctgtggagttccacgaggacctgttcccggacactgccggctgtgtgcctgccaccgacccccatagctggtgggctggggacaaccagcaggtgcagaaggtcagcctcaaccccgcctgccggccccacccgagcttcacttcctgtctggtgccccctgcggagcccctccctgacacagcccagcctgcggtgatggagacacccgtgggtgatgcagacgcaagcgagggtttctcttcccctcccagttcgctgacctcgccctccacgccctccagcctggggccctcactctccagcaccagtggcatcgggaccagccccagtttgaggtcgctgcagagcctgctgggccccagttccaagttccgccatgctcagggcactgtcctgcaccgagacagccacatcaccaacctcaaggggctcaacctcaccacacctggtgagagtgacggcttctgtgccaacaagctgcgtgtggccgtgccgctgctcagcagcgggggacaggtggctgtgcttgagctacggaagcctggccgcctgcccgacacggcactgcccacgctgcagaatggggcagctgtgactgatctggcctgggacccctttgacccccatcgcctcgctgtggctggtgaggacgccaggatccgactgtggcgggtacccgcagagggcctggaagaggtgctcaccacgccagagactgtgctcacaggccacacggagaagatctgctccctgcgcttccacccactggcagccaatgtgctggcctcgtcctcctatgacctcactgttcgcatctgggaccttcaggctggagctgatcggctgaagctgcagggccaccaagaccagatcttcagcctggcctggagtcctgatgggcagcagctggccactgtctgcaaggatgggcgtgtgcgggtctacaggccccggagtggccctgagcccctgcaggaaggcccagggcccaagggaggacgcggagctcgcattgtctgggtatgtgatggtcgctgtctgctggtgtctggctttgacagccaaagtgagcgccagctgctcctatatgaagctgaggccctggccggcggacccttggcagtgttgggcctggacgtggctccctcaaccctgctgcccagctacgacccagacactggcctggtgctcctgaccggcaagggcgacacccgtgtattcctgtacgagctgctccccgagtcccctttcttcctggagtgcaacagcttcacgtcgcctgacccccacaagggcctcgtcctcctgcctaagacggagtgcgacgtgcgggaagtggagctgatgcggtgcctgcggctgcgtcagtcctccctggagcctgtggccttccggctgccccgagtccggaaagagttcttccaggatgacgtgttcccagacacggctgtgatctgggagcctgtgctcagtgccgaggcctggctgcaaggcgctaatgggcagccctggcttctcagcctgcagcctcctgacatgagcccagtgagccaagccccccgagaggcccctgctcgtcgggccccatcctcagcgcagtacctggaagaaaagtctgaccagcaaaagaaggaggagctgctgaatgccatggtggcaaaactggggaaccgggaggacccactcccccaggactcctttgaaggcgtggacgaggacgagtgggccaagtacctggcccagatcattgtgatgggcgtgcaggtggtgggcagggcctttgcacgggccttgcggcaggagtttgcagccagccgggccgcagctgatgcccgaggacgcgctggacaccggtctgcagccgcttccaacctctccggcctcagcctccaggaggcacagcagattctcaacgtgtccaagctgagccctgaggaggtccagaagaactatgaacacttatttaaggtgaatgataaatccgtgggtggctccttctacctgcagtcaaaggtggtccgcgcaaaggagcgcctggatgaggaactcaaaatccaggcccaggaggacagagaaaaagggcagatgccccatacgtgactgctcggctccccccgcccaccccgccgcctctaatttatagcttggtaataaatttcttttctgca

SEQ ID NO: 79151 - DNA, 1622 bp, Artificial Sequence
  derived and/or modified sequence
agtcgcggttgctcagcgtgcacctgagacccgacgcccggggtcctcgaagacgcgtccgccgccgtgcccgtcgccatgaaccgcttcagggtgtccaagttccggcacaccgaggctcggccgccccgccgcgaggacaagcagctgcggatctttgaccccagaacaaagccgcgggcctctcagagcacgcaggcccatgagaacagcagggatagccggctggcatggatgggcacctgggagcaccttgtgtctactggattcaaccagatgcgtgagcgcgaagtgaagctgtgggacacgcggttcttctccagcgccctggcctccctcaccttggacacctcgcttgggtgtctcgtgcctctgctggaccctgactctgggctcctggtcctggcaggaaagggcgagaggcagctgtactgttacgaggtggtcccgcagcagccggcgctgagcccagtgacccagtgtgtcctggagagcgtgctgcgtggggctgcccttgtgccccggcaggcgctggccgtcatgagctgcgaggtactccgcgtcctacagctgagcgacacagccatcgtgcccatcggctaccatgtgccccgcaaggctgtggagttccacgaggacctgttcccggacactgccggctgtgtgcctgccaccgacccccatagctggtgggctggggacaaccagcaggtgcagaaggtcagcctcaaccccgcctgccggccccacccgagcttcacttcctgtctggtgccccctgcggagcccctccctgacacagcccagcctgcggtgatggagacacccgtgggtgatgcagacgcaagcgagggtttctcttcccctcccagttcgctgacctcgccctccacgccctccagcctggggccctcactctccagcaccagtggcatcgggaccagccccagtttgaggtcgctgcagagcctgctgggccccagttccaagttccgccatgctcagggcactgtcctgcaccgagacagccacatcaccaacctcaaggggctcaacctcaccacacctggtgagagtgacggcttctgtgccaacaagctgcgtgtggccgtgccgctgctcagcagcgggggacaggtggctgtgcttgagatgagggagaagaggcacagagaggtttagtgacctgcccgggtcacacagctgtctacggaagcctggccgcctgcccgacacggcactgcccacgctgcagaatggggcagctgtgactgatctggcctgggacccctttgacccccatcgcctcgctgtggctggtgaggacgccaggatccgactgtggcgggtacccgcagagggcctggaagaggtgctcaccacgccagagactgtgctcacaggccacacggagaagatctgctccctgcgcttccacccactggcagccaatgtgctggcctcgtcctcctatgacctcactgttcgcatctgggaccttcaggctggagctgatcggctgaagctgcagggccaccaagaccagatcttcagcctggcctggagtcctgatgggcagcagctggccactgtctgcaaggatgggcgtgtgcgggtctaca

SEQ ID NO: 79152 - DNA, 3147 bp, Artificial Sequence
  derived and/or modified sequence
atgaacagattcagagtgagcaagttcagacacaccgaggccagaccccccagaagagagagctggatcagcgacatcagagccggcaccgcccccagctgcagaaaccacatcaagagcagctgcagcctgatcgccttcaacagcgacagacccggcgtgctgggcatcgtgcccctgcagggccagggcgaggacaagagaagagtggcccacctgggctgccacagcgacctggtgaccgacctggacttcagccccttcgacgacttcctgctggccaccggcagcgccgacagaaccgtgaagctgtggagactgcccggccccggccaggccctgcccagcgcccccggcgtggtgctgggccccgaggacctgcccgtggaggtgctgcagttccaccccaccagcgacggcatcctggtgagcgccgccggcaccaccgtgaaggtgtgggacgccgccaagcagcagcccctgaccgagctggccgcccacggcgacctggtgcagagcgccgtgtggagcagagacggcgccctggtgggcaccgcctgcaaggacaagcagctgagaatcttcgaccccagaaccaagcccagagccagccagagcacccaggcccacgagaacagcagagacagcagactggcctggatgggcacctgggagcacctggtgagcaccggcttcaaccagatgagagagagagaggtgaagctgtgggacaccagattcttcagcagcgccctggccagcctgaccctggacaccagcctgggctgcctggtgcccctgctggaccccgacagcggcctgctggtgctggccggcaagggcgagagacagctgtactgctacgaggtggtgccccagcagcccgccctgagccccgtgacccagtgcgtgctggagagcgtgctgagaggcgccgccctggtgcccagacaggccctggccgtgatgagctgcgaggtgctgagagtgctgcagctgagcgacaccgccatcgtgcccatcggctaccacgtgcccagaaaggccgtggagttccacgaggacctgttccccgacaccgccggctgcgtgcccgccaccgacccccacagctggtgggccggcgacaaccagcaggtgcagaaggtgagcctgaaccccgcctgcagaccccaccccagcttcaccagctgcctggtgccccccgccgagcccctgcccgacaccgcccagcccgccgtgatggagacccccgtgggcgacgccgacgccagcgagggcttcagcagcccccccagcagcctgaccagccccagcacccccagcagcctgggccccagcctgagcagcaccagcggcatcggcaccagccccagcctgagaagcctgcagagcctgctgggccccagcagcaagttcagacacgcccagggcaccgtgctgcacagagacagccacatcaccaacctgaagggcctgaacctgaccacccccggcgagagcgacggcttctgcgccaacaagctgagagtggccgtgcccctgctgagcagcggcggccaggtggccgtgctggagctgagaaagcccggcagactgcccgacaccgccctgcccaccctgcagaacggcgccgccgtgaccgacctggcctgggaccccttcgacccccacagactggccgtggccggcgaggacgccagaatcagactgtggagagtgcccgccgagggcctggaggaggtgctgaccacccccgagaccgtgctgaccggccacaccgagaagatctgcagcctgagattccaccccctggccgccaacgtgctggccagcagcagctacgacctgaccgtgagaatctgggacctgcaggccggcgccgacagactgaagctgcagggccaccaggaccagatcttcagcctggcctggagccccgacggccagcagctggccaccgtgtgcaaggacggcagagtgagagtgtacagacccagaagcggccccgagcccctgcaggagggccccggccccaagggcggcagaggcgccagaatcgtgtgggtgtgcgacggcagatgcctgctggtgagcggcttcgacagccagagcgagagacagctgctgctgtacgaggccgaggccctggccggcggccccctggccgtgctgggcctggacgtggcccccagcaccctgctgcccagctacgaccccgacaccggcctggtgctgctgaccggcaagggcgacaccagagtgttcctgtacgagctgctgcccgagagccccttcttcctggagtgcaacagcttcaccagccccgacccccacaagggcctggtgctgctgcccaagaccgagtgcgacgtgagagaggtggagctgatgagatgcctgagactgagacagagcagcctggagcccgtggccttcagactgcccagagtgagaaaggagttcttccaggacgacgtgttccccgacaccgccgtgatctgggagcccgtgctgagcgccgaggcctggctgcagggcgccaacggccagccctggctgctgagcctgcagccccccgacatgagccccgtgagccaggcccccagagaggcccccgccagaagagcccccagcagcgcccagtacctggaggagaagagcgaccagcagaagaaggaggagctgctgaacgccatggtggccaagctgggcaacagagaggaccccctgccccaggacagcttcgagggcgtggacgaggacgagtgggccaagtacctggcccagatcatcgtgatgggcgtgcaggtggtgggcagagccttcgccagagccctgagacaggagttcgccgccagcagagccgccgccgacgccagaggcagagccggccacagaagcgccgccgccagcaacctgagcggcctgagcctgcaggaggcccagcagatcctgaacgtgagcaagctgagccccgaggaggtgcagaagaactacgagcacctgttcaaggtgaacgacaagagcgtgggcggcagcttctacctgcagagcaaggtggtgagagccaaggagagactggacgaggagctgaagatccaggcccaggaggacagagagaagggccagatgccccacacctag

SEQ ID NO: 79153 - protein, 959 aa, Artificial Sequence
  derived and/or modified sequence
MSSDEKGISPAHKTSTPTHRSASSSTSSQRDSRQSIHILERTASSSTEPSVSRQLLEPEPVPLSKEADSWEIIEGLKIGQTNVQKPDKHEGFMLKKRKWPLKGWHKRFFVLDNGMLKYSKAPLDIQKGKVHGSIDVGLSVMSIKKKARRIDLDTEEHIYHLKVKSQDWFDAWVSKLRHHRLYRQNEIVRSPRDASFHIFPSTSTAESSPAANVSVMDGKMQPNSFPWQSPLPCSNSLPATCTTGQSKVAAWLQDSEEMDRCAEDLAHCQSNLVELSKLLQNLEILQRTQSAPNFTDMQANCVDISKKDKRVTRRWRTKSVSKDTKIQLQEGPPAKGQFSTTRRRQRLAAAVATTVPFSATMSPVRLHSSNPNLCADIEFQTPPSHLTDPLESSTDYTKLQEEFCLIAQKVHSLLKSAFNSIAIEKEKLKQMVSEQDHSKGHSTQMARLRQSLSQALNQNAELRSRLNRIHSESIICDQVVSVNIIPSPDEAGEQIHVSLPLSQQVANESRLSMSESVSEFFDAQEVLLSASSSENEASDDESYISDVSDNISEDNTSVADNISRQILNGELTGGAFRNGRRACLPAPCPDTSNINLWNILRNNIGKDLSKVSMPVELNEPLNTLQHLCEEMEYSELLDKASETDDPYERMVLVAAFAVSGYCSTYFRAGSKPFNPVLGETYECIREDKGFRFFSEQVSHHPPISACHCESKNFVFWQDIRWKNKFWGKSMEILPVGTLNVMLPKYGDYYVWNKVTTCIHNILSGRRWIEHYGEVTIRNTKSSVCICKLTFVKVNYWNSNMNEVQGVVIDQEGKAVYRLFGKWHEGLYCGVAPSAKCIWRPGSMPTNYELYYGFTRFAIELNELDPVLKDLLPPTDARFRPDQRFLEEGNLEAAASEKQRVEELQRSRRRYMEENNLEHIPKFFKKVIDANQREAWVSNDTYWELRKDPGFSKVDSPVLW

SEQ ID NO: 79154 - DNA, 2880 bp, Artificial Sequence
  derived and/or modified sequence
atgagcagcgatgagaagggaatatctccagctcacaagacctccacacctactcatcggtctgcttcctcttcaacctctagccaaagagattcacgacagtctattcacattctagagaggactgcgtcgtcttctactgagccctctgtgtcaagacagcttttggagccagagccggtgcccctgtcaaaggaagcagattcctgggagatcattgagggcttaaagatcggacaaaccaatgttcagaagcctgataaacatgagggctttatgctcaagaaacgcaagtggccgcttaaaggttggcataaaagattctttgtgctagataatggcatgcttaagtactccaaggcccccctggatatacagaaagggaaagtccatggcagcatcgatgtcggccttagcgtcatgagcattaagaaaaaggcccgacgtattgatctggataccgaagaacatatctaccacctgaaagtcaagagccaggactggttcgacgcatgggttagtaagttaaggcaccacagactgtatagacagaacgaaatcgtgcgctctcctcgcgacgccagcttccacatcttcccttccacctcaacagccgaaagctctcctgccgcgaatgtctctgtcatggatgggaaaatgcagcctaactcattcccttggcagagcccccttccttgcagtaatagcctgcccgccacatgcaccactggtcaaagcaaagtcgctgcctggctacaggactccgaggaaatggatcgatgtgcagaggatttggcccactgtcagtcaaatctcgttgaactctccaagctgctacagaacctggaaatccttcaacgaacacagagtgccccaaactttacagacatgcaggcgaattgtgtcgatatcagtaagaaggacaagagggtcacaagacggtggcgtactaagagtgtaagcaaagatacaaagattcaactccaagaagggccacctgccaaaggacagtttagtaccacccgccgaaggcagcgattggctgctgcagtcgccaccacagttcctttctctgccaccatgtcccctgtgcggctccactctagtaatcccaacctctgcgccgatatcgaatttcagacacctcccagccacctgaccgatccccttgagtccagtacagattacacgaagctccaggaggaattttgcttaatcgctcagaaagtgcacagcttactgaaaagtgcctttaatagtatcgcaatcgagaaggagaagctaaagcaaatggtgtccgagcaagaccactctaaaggccatagtacccagatggctcggctgaggcagtctcttagccaagcactcaatcagaacgccgagcttcgatcccgtcttaatcgaattcattcggagtccattatctgtgatcaggtagttagcgttaatatcataccgtctcctgacgaggccggcgaacagatccacgtaagccttcccttgagccagcaggttgcaaacgagtctagattgtcgatgtccgagagtgtgtcagagttcttcgacgctcaagaggtacttttaagtgcaagctctagcgagaatgaggcatctgacgacgaatcgtacatttccgacgtctccgacaatatctctgaggacaatacctcggtcgccgataatatatcaaggcagattctgaatggcgaactgacagggggggcattccggaacggcaggcgggcctgtctgcctgctccatgccccgataccagcaatattaacctttggaacatcctgaggaacaacatagggaaagacctttcaaaggtttccatgcccgttgagctgaatgaacctcttaacactctccagcacctgtgcgaagagatggaatattcagagctgctggataaagccagcgaaaccgatgatccctacgagcgaatggtgcttgtggctgcgttcgccgtctccggctactgctcaacctattttcgggcaggaagcaaaccatttaaccctgtcctcggagagacatacgagtgcatacgcgaggacaaaggatttagattcttttctgagcaagtatcccaccaccctccgatttctgcatgccactgcgaaagtaagaattttgttttttggcaggacattcggtggaagaataagttctggggtaaaagcatggagatcctcccggttggcaccctcaacgtgatgctcccaaagtatggagactattacgtttggaacaaagttactacttgcattcacaatatactgtcaggaaggcgctggattgagcactatggggaggttacaatacgcaacactaaaagcagcgtttgcatttgtaagctgacctttgtaaaagttaattactggaactcaaacatgaacgaggtccagggagtggtgatcgatcaagagggcaaggctgtgtaccggctgtttggcaagtggcatgagggcctctactgcggggtggcgccctccgccaaatgcatttggaggcccggatccatgccgacaaactacgaattgtattacggcttcacacggtttgccatcgagcttaacgagctggacccagtactgaaggaccttttgccgcctaccgatgccaggttcaggccagaccagaggttccttgaggagggaaacctggaagccgcagcaagtgaaaagcagagggtcgaggaactccagcgctcgcggcggcggtacatggaagaaaacaaccttgaacacatcccaaaattctttaaaaaagtgatagatgccaaccaacgcgaggcctgggtgtctaacgacacatattgggagttgcgcaaggatcctggattctccaaggttgactcgcccgtactgtggtag

SEQ ID NO: 79155 - DNA, 2880 bp, Artificial Sequence
  derived and/or modified sequence
atgagcagtgatgagaagggcatcagccctgcccacaagaccagcacccccacccacaggtctgccagcagcagcaccagcagccagagggacagccggcagagcatccacatcctggagaggacagccagcagcagcacagagcccagcgtgtcccggcagctgctggagcctgagcctgtgcccctgagcaaggaggccgacagctgggagatcatcgagggcctgaagattggccagaccaacgtgcagaagccagacaagcatgagggcttcatgctgaagaagaggaagtggcccctgaagggctggcacaagcgcttctttgtgctggacaatggcatgctgaagtacagcaaggcccccctggacatccagaagggcaaggtgcacggcagcattgatgtgggcctgtctgtgatgagcatcaagaagaaggccaggagaattgacctggacacagaggagcacatctaccacctgaaggtgaagagccaggactggtttgatgcctgggtgtccaagctgcggcaccaccggctgtaccggcagaatgaaattgtgcgcagccccagagatgccagcttccacatcttccccagcaccagcacagctgagagcagccctgctgccaacgtgtctgtgatggatggcaagatgcagcccaacagcttcccctggcagagccccctgccctgcagcaacagcctgcctgccacctgcaccaccggccagagcaaggtggccgcctggctgcaggacagcgaggagatggacagatgtgccgaggacctggcccactgccagagcaacctggtggagctgagcaagctgctgcagaacctggagatcctgcagaggacccagagcgcccccaacttcacagacatgcaggccaactgtgtggacatcagcaagaaggacaagagggtgacccggcgctggaggaccaagtctgtgtccaaggacaccaagatccagctgcaggagggccccccagccaagggccagttcagcaccacccggcggcggcagaggctggccgctgctgtggccaccaccgtgcccttcagcgccaccatgagccctgtgcggctgcacagcagcaaccccaacctgtgtgccgacatcgagttccagaccccacccagccacctgacagaccccctggagagcagcacagactacaccaagctgcaggaggagttctgcctgattgcccagaaggtgcacagcctgctgaagagcgccttcaacagcatcgccatcgagaaggagaagctgaagcagatggtgtctgagcaggaccacagcaagggccacagcacccagatggcccggctgcggcagagcctgagccaggccctgaaccagaatgctgagctgcggagccggctgaaccgcatccacagcgagagcatcatctgtgaccaggtggtgtctgtgaacatcatccccagcccagatgaagctggggagcagatccacgtgtccctgcccctgagccagcaggtggccaatgaaagccggctgtccatgtctgagagcgtgtctgagttctttgatgcccaggaggtgctgctgagcgccagcagcagtgaaaatgaggccagtgatgatgagagctacatcagtgatgtgtctgacaacatcagcgaggacaacacctctgtggccgacaacatcagccggcagatcctgaatggagagctgaccggcggggccttcagaaatggccggcgggcctgcctgcctgccccctgcccagacaccagcaacatcaacctgtggaacatcctgaggaacaacatcggcaaggacctgagcaaggtgtccatgcctgtggagctgaatgagcccctgaacaccctgcagcacctgtgtgaggagatggagtacagcgagctgctggacaaggccagcgagacagatgacccctatgaaagaatggtgctggtggccgcctttgctgtgtctggctactgcagcacctacttccgggccggcagcaagcccttcaaccctgtgctgggggagacctatgagtgcatccgggaggacaagggcttccgcttcttcagcgagcaggtgagccaccacccccccatcagcgcctgccactgtgagagcaagaactttgtgttctggcaggacatccgctggaagaacaagttctggggcaagtccatggagatcctgcctgtgggcaccctgaatgtgatgctgcccaagtatggagactactacgtgtggaacaaggtgaccacctgcatccacaacatcctgtctggaagacgctggattgagcactatggagaggtgaccatccggaacaccaagagctctgtgtgcatctgcaagctgacctttgtgaaggtgaactactggaacagcaacatgaatgaggtgcagggcgtggtgattgaccaggagggcaaggctgtgtaccgcctgtttgggaagtggcatgagggcctgtactgcggcgtggcccccagcgccaagtgcatctggaggcctggctccatgcccaccaactatgagctgtactacggcttcaccaggtttgccatcgagctgaatgagctggaccctgtgctgaaggacctgctgcccccaacagatgcccgcttccggccagaccagcgcttcctggaggagggcaacctggaggccgccgccagcgagaagcagagggtggaggagctgcagaggagcagaagacgctacatggaggagaacaacctggagcacatccccaagttcttcaagaaggtgattgatgccaaccagcgggaggcctgggtgtccaatgacacctactgggagctgaggaaggaccccggcttcagcaaggtggacagccctgtgctgtggtag

SEQ ID NO: 79156 - DNA, 2880 bp, Artificial Sequence
  derived and/or modified sequence
atgagcagcgacgagaagggcatcagccccgcccacaagaccagcactccaactcataggtctgccagtagcagtacatccagccagagggacagccggcaatcaattcacatcttggaacgcacggccagtagttccaccgagcccagcgtcagccggcagctgttggagccagagccggttcccctttccaaagaggccgactcctgggagatcatcgagggtctaaaaataggacagacaaacgtccagaaacccgataagcacgagggttttatgctgaagaaacggaagtggcctctgaagggctggcacaaaagattcttcgtcctcgacaacgggatgctgaagtattcgaaagcccctctggacatacagaaaggcaaagtgcatggcagtattgatgtcggactctcggtaatgagtataaagaaaaaggctcggcgcattgacctggacaccgaggagcacatttaccacttgaaggtaaaaagtcaggactggttcgatgcctgggtatccaagctgcgtcatcatagactttacaggcaaaacgagatcgtgcgcagccctcgtgatgcttcttttcacattttcccgagcacaagcactgctgaaagctctcctgcagcgaacgtgtccgtcatggacggaaaaatgcagccaaacagtttcccctggcaaagcccactgccttgctctaatagcctaccagctacttgcaccacaggacaatcaaaagtggccgcctggctccaagactctgaggagatggatcggtgtgcagaagatctcgcccactgtcagagcaacctggtggagttgagcaagctgcttcagaacctggaaatactgcagcgcacccaatccgcgcctaactttacagatatgcaagcgaattgcgtagatatctctaaaaaggataaacgcgtcaccagacgctggagaaccaaatccgtttccaaggataccaagattcagcttcaggaggggccacccgccaagggccagttctccaccacccgcaggcgccagcgactcgcagcggcagtcgcaactaccgtcccattctcagccaccatgtctcctgtacgtttacatagctccaatcccaatctctgcgctgatatcgagtttcagacacctccctcacacctgacagatccacttgagtcatcaactgactacacgaagctccaggaagaattttgtctcatcgcgcagaaagtccattccctgctcaaatcagcatttaattctatcgccattgagaaggagaagctgaaacaaatggtatcggaacaggaccactccaaaggtcatagcacacagatggctcgactcaggcagtcactttcacaggctctgaatcagaacgccgagcttcgcagtcgactgaatagaatccactccgagtctatcatttgtgaccaagtggtgtccgtgaatattatcccgagccctgacgaggcaggggagcagattcatgtaagcctacccttgtcccagcaggttgcgaatgagtcacgtctttcaatgagtgagtctgtttcagagtttttcgatgctcaggaagtcctgctgagtgctagttcgtccgagaatgaagcaagcgacgacgaatcttacatcagtgacgtgagcgacaatatctcagaagataatacctctgtggccgacaacatctctagacagatcttgaatggcgagctgacgggtggagctttccggaacggtcgcagggcttgcttgcctgcgccttgtcccgatacctcgaatatcaacctgtggaacatactgcgcaataatattggtaaggacctgtccaaggtcagcatgcccgtcgagctcaacgaaccactcaacacgctacagcatctgtgtgaagagatggagtattcagagttgttagacaaggcaagcgaaacggatgacccatacgagcggatggtgctggtggccgccttcgctgtctcgggctactgttctacttacttccgggccggctccaagccattcaaccctgtgctaggggaaacatatgaatgtatccgagaggacaagggcttccgattttttagcgaacaggtgtctcaccatcctccaatatctgcgtgccactgcgaaagcaaaaattttgtcttttggcaagatatccgatggaaaaacaaattttgggggaagtccatggaaatactgcccgtgggaaccctaaacgtgatgctccccaaatacggagactattacgtctggaataaggtgaccacgtgtatccacaacatcctgtccgggcgtcgttggatcgaacattatggcgaggttacgatacgtaataccaagagcagtgtctgtatctgtaaactgaccttcgtgaaggttaattactggaactcaaacatgaacgaggtgcagggagttgtgattgatcaggaaggtaaggccgtgtaccgtctgttcggcaagtggcatgaggggttatattgcggagtggcaccttcagcaaagtgtatctggagacctggaagtatgcccactaactatgagttgtactacggttttactcggtttgccatcgagttgaatgaacttgatccagtgctgaaggaccttcttccccctacggacgcccgattccgcccagatcaacgatttctcgaagaggggaatctggaggcggcagcttctgagaagcagcgcgtcgaggaactccagaggtccagaaggcggtacatggaagagaataacctcgagcacataccaaagttctttaagaaggttatcgatgctaatcagagggaagcatgggtcagtaacgatacctactgggagctcagaaaagaccctgggtttagtaaagtggatagtccagtgctgtggtag

SEQ ID NO: 79157 - DNA, 3637 bp, Artificial Sequence
  derived and/or modified sequence
ctggaggcgcagcacggtcgccgccgccgctgtcggtgctggagatcgcggctcggtgcaggcggcgcccatgcctcctctcctccactagcccgcgcgccagtccgcctgccggggccggctctccgcctcctgcctcccgtcgcagccgcgcagccgccgcagagtccgcggcgccaccgctcgccctccaggttctgccacttgctgggaaaacagcaacagaaggatattaaggagccacccctataatttacccagatagccccagcaaggtcaaagacatatcatgtcccaaggagaaaagctgcaggcatctgaggataaatcactgtgaaacagctttgaccataaagctgacttggaagactttgactccaaggtgcaaggtggtttggacaccctcaatattgcctgctcttttctagtcaaacctgattcatgaaatggaatgaagctgaaaaatcatctacttctttgtttgtggatttgagagaagattgggatggtcttaagtgcataaaacgagactctaactgcagcgatgagttcagatgagaagggcatttcccctgctcataaaacatccactccaacccatagaagtgcctcctcttcaacatcctcccaaagggacagtaggcagagtattcacatactggagaggactgcttcctctagcaccgagccctctgtaagtcggcaattgctagaaccggagccagtccccctctccaaggaagctgacagctgggaaattatagaagggctgaaaataggccaaaccaatgtccagaaaccagacaaacatgagggctttatgctgaagaaaagaaaatggcctttaaaaggctggcacaagcgtttttttgtcctggataatggaatgttaaagtattcaaaggcaccactcgatattcagaaaggaaaggtccatgggagcatagatgtgggactctcagtcatgtcaattaaaaagaaagctcgaagaatagaccttgacaccgaagagcacatctatcatttgaaggtgaaatcccaggactggtttgatgcatgggtctccaaactgcgacatcatcggttgtatcgtcagaatgaaattgtgagatcaccaagagatgctagttttcacatatttccttcaacgtccacagctgaatcctcaccagctgctaatgtttctgtaatggatggaaagatgcaaccaaacagctttccgtggcagtcccctttaccatgcagcaatagcctccctgcaacgtgcacaactggccagagtaaagtggcagcctggttacaggactcggaagagatggacaggtgtgcagaagatcttgcacattgccagtcaaaccttgtggaacttagcaaactcctgcaaaatttggaaatacttcagagaactcagtcggcacctaactttactgacatgcaggctaactgtgtagatatttcaaagaaagacaagcgggtcacaagacgatggagaacaaaaagtgtcagcaaagatacaaaaatacaactgcaggaagggccacccgcgaagggccagttcagcacaactcggcgccggcagaggctagcggcagcagtggctacaacagttcctttcagtgctaccatgtcaccagttcgcttgcattcctccaaccccaacctttgtgcagatattgaatttcagactccccctagccacctcactgaccctctggaaagttcaacagattatacaaagctgcaagaagaattttgtctaatcgcacagaaagtgcattctcttttgaagtctgcatttaatagcatagctatagagaaggagaagctgaagcagatggtttccgagcaggatcacagtaaaggccacagcacgcagatggcacggctccgacagtcactgtctcaggcactcaaccagaatgctgaactaaggagtcggttgaacagaatacattcagagtctattatttgtgatcaggttgtcagtgtaaatattattcctagccctgatgaggctggtgagcaaatccatgtcagtctccccttatcacagcaagtagccaatgagagccgcctctccatgtcagagtctgtttctgagttctttgatgcccaagaggtgctcctctctgcaagttcgtcagagaatgaggcttcagatgatgagtcttacatcagtgatgtgagtgataatatatctgaagacaacaccagtgttgcagacaatatttctcggcaaatcctgaatggggagcttacaggaggggccttccgaaatgggcgtcgagcatgcctgccagctccttgtcctgacaccagtaacattaacctgtggaatatcttgaggaacaacattggtaaagacctgtctaaagtctctatgcctgtggagctaaacgagccgctcaacaccctgcagcacctctgtgaggaaatggaatacagcgagctcctggacaaggcttcggaaactgatgatccatatgagcgcatggttctcgttgccgcatttgcagtttcaggatactgctccacctatttcagagcaggaagtaagccattcaacccagtccttggggagacttatgaatgcattagagaagacaagggattccgctttttctcagaacaggttagccatcatccacccatttctgcctgtcactgtgaatcaaagaattttgtgttttggcaagatatcagatggaaaaacaagttctgggggaagtcgatggaaatcctgcctgttggaacactgaatgtcatgcttccaaagtatggagattactatgtgtggaataaagtcaccacttgcatacacaacatcctcagtgggagaagatggatagaacattatggagaagtaaccatcagaaataccaaaagcagtgtttgcatttgcaaactcacatttgtcaaggtgaattattggaattctaacatgaatgaagtccagggggtggtgatagatcaggaggggaaggcggtgtaccggctgtttggaaagtggcatgaaggactctactgtggtgtggccccctctgcaaagtgcatttggagaccaggttccatgccaacaaactatgagctgtactatggcttcacaaggtttgctattgagctcaatgagttagatccagtactaaaagatctccttccaccaacagacgcccggttccggccagatcaaagatttttggaagaaggaaatttagaagctgcagcatcagagaagcaaagagtagaggaactccagagatctcggagacgatatatggaagaaaacaatcttgaacatataccaaaattttttaaaaaagttattgatgccaatcaaagagaagcctgggtttctaacgacacctactgggagcttcgaaaggaccctgggtttagcaaagtagacagccctgttctttggtagactgggaatgtagagctagccaacatatcacattctgaatgaataaataactatgcacaattatgtttcttatagctatgtgtggtttctgggtcaactgaaaacctaccatttgcttttctattcatctttataatggactttcagaagtgcattagacaaggcccctaaccactttgggatcctttctgttttgctgcaaccatattcctt

SEQ ID NO: 79158 - DNA, 2880 bp, Artificial Sequence
  derived and/or modified sequence
atgagttccgatgaaaaaggcatcagcccggctcataaaacttcaacacccacgcataggagtgcctcctcctcaacctcctctcagcgagatagccggcaatctatccacatcctggagaggaccgcatctagttccaccgagccatccgtctctagacagcttctggaacccgaacctgtgccactgagcaaggaagccgactcatgggaaatcattgaaggcctgaagatcggccagactaatgtgcagaagccagataagcacgaggggtttatgctcaagaaacgcaaatggcccctgaagggatggcacaagcgcttcttcgtcttggacaacggcatgcttaagtactcaaaggcccctctggatatccaaaaaggaaaggtgcatggctctattgatgttgggttaagcgtgatgtctatcaaaaaaaaagcccgtaggatcgatttagacacagaggagcatatttaccacctaaaggtgaagagccaggactggttcgacgcatgggtcagcaagctaaggcatcatcggctttaccgccagaacgagatcgtgcgttcaccacgcgacgcatcattccatatattcccctcaactagcaccgccgaaagttcccccgcagctaacgttagcgtaatggatggcaaaatgcagcctaactccttcccctggcagtctccactgccatgtagcaattcactgcctgccacgtgtaccacgggtcagtctaaggtggctgcatggctccaagatagcgaggaaatggatcgttgcgcagaggacttagctcactgccagtcgaacctggtggaactgagcaaactgctccaaaacctagaaattctgcaaaggacgcagagtgctcctaacttcactgacatgcaggcgaactgtgtagatattagcaagaaggataagcgggtcacacggagatggcggacaaaaagtgtatccaaagatactaaaatccagctgcaggagggccctcctgccaaagggcagttttccaccacgaggcggcgacaaagattggccgcagcagtggcaactacggtgcctttctcagcgaccatgtctccggtccgtctgcacagctctaacccaaatctgtgcgcggacatagagttccaaacccccccaagccacctgacagacccactggaatccagcactgactataccaaactccaggaggagttttgtctaatagcacagaaagttcattccctgttaaaatccgctttcaactccattgccatcgagaaggagaaactgaagcagatggtctcagagcaggaccactctaagggccatagtacgcagatggctcggctgcgccaaagtctgtcgcaggctctgaaccaaaatgccgagctgcggagtagactgaacagaattcacagcgagtctattatctgtgatcaggtggtctccgtaaatattatccctagcccagatgaggccggagagcagattcacgtgagcctgcctctctcgcaacaagttgccaatgagtcgcggctgtctatgagcgagtcagtttccgagttcttcgatgcccaagaggtgctcctatccgcttcaagcagtgagaatgaggcctctgatgatgagtcctacatatcagatgtgagcgataacatttctgaggataacaccagtgtggccgacaatatctccagacaaatcttgaatggcgaacttactggaggcgcatttcgtaacggtcgtagagcctgtctgcccgcaccctgtccagataccagcaacatcaatctgtggaatatcctaaggaacaatatcgggaaagatctgagcaaagtttccatgcccgtggaactaaatgagccactgaataccctgcagcacctctgtgaggagatggagtacagtgaactgcttgataaagcctcggagaccgacgacccgtatgaacgaatggtccttgtcgccgcttttgccgtgtcaggctactgtagtacctattttcgagccggaagcaagcccttcaatcctgtgctcggagagacctacgaatgcattcgcgaggataaggggttccgattcttttcagaacaagtgtctcaccacccgcctattagcgcgtgtcattgcgagtccaaaaactttgtgttctggcaagatataagatggaaaaataaattctgggggaagtccatggaaatccttcccgtgggaaccttgaacgttatgttacctaagtatggagactattatgtatggaataaagttacaacatgtatccacaatatactaagcggcagaagatggatcgagcattacggcgaggttaccatacgaaacacgaagtcttctgtctgtatctgtaaactaacatttgtcaaagttaattactggaacagcaatatgaatgaggtacagggcgtggttatcgatcaggagggaaaggccgtgtaccggctattcgggaagtggcatgagggattgtactgcggcgtcgctccatccgccaaatgcatttggcgtcccggtagcatgcccaccaattatgagctctactacggctttacccgattcgccattgagttgaatgagctggaccccgttctgaaagacctccttcctccaacagatgccagatttcgaccggaccaaagattcttagaggagggtaacttggaggccgctgcctctgagaagcaacgggtcgaagagctccaacgcagccggaggaggtatatggaagaaaacaacctggagcatatacccaagtttttcaagaaggtaatcgacgccaaccaacgagaagcctgggtgtctaacgacacctactgggaactcaggaaggaccccggttttagtaaagtggacagccccgtgctgtggtag

SEQ ID NO: 79159 - DNA, 2880 bp, Artificial Sequence
  derived and/or modified sequence
atgagcagcgacgagaagggcatcagccccgcccacaagaccagcacccccacccacagaagcgccagcagcagcaccagcagccagagagacagcagacagagcatccacatcctggagagaaccgccagcagcagcaccgagcccagcgtgagcagacagctgctggagcccgagcccgtgcccctgagcaaggaggccgacagctgggagatcatcgagggcctgaagatcggccagaccaacgtgcagaagcccgacaagcacgagggcttcatgctgaagaagagaaagtggcccctgaagggctggcacaagagattcttcgtgctggacaacggcatgctgaagtacagcaaggcccccctggacatccagaagggcaaggtgcacggcagcatcgacgtgggcctgagcgtgatgagcatcaagaagaaggccagaagaatcgacctggacaccgaggagcacatctaccacctgaaggtgaagagccaggactggttcgacgcctgggtgagcaagctgagacaccacagactgtacagacagaacgagatcgtgagaagccccagagacgccagcttccacatcttccccagcaccagcaccgccgagagcagccccgccgccaacgtgagcgtgatggacggcaagatgcagcccaacagcttcccctggcagagccccctgccctgcagcaacagcctgcccgccacctgcaccaccggccagagcaaggtggccgcctggctgcaggacagcgaggagatggacagatgcgccgaggacctggcccactgccagagcaacctggtggagctgagcaagctgctgcagaacctggagatcctgcagagaacccagagcgcccccaacttcaccgacatgcaggccaactgcgtggacatcagcaagaaggacaagagagtgaccagaagatggagaaccaagagcgtgagcaaggacaccaagatccagctgcaggagggcccccccgccaagggccagttcagcaccaccagaagaagacagagactggccgccgccgtggccaccaccgtgcccttcagcgccaccatgagccccgtgagactgcacagcagcaaccccaacctgtgcgccgacatcgagttccagaccccccccagccacctgaccgaccccctggagagcagcaccgactacaccaagctgcaggaggagttctgcctgatcgcccagaaggtgcacagcctgctgaagagcgccttcaacagcatcgccatcgagaaggagaagctgaagcagatggtgagcgagcaggaccacagcaagggccacagcacccagatggccagactgagacagagcctgagccaggccctgaaccagaacgccgagctgagaagcagactgaacagaatccacagcgagagcatcatctgcgaccaggtggtgagcgtgaacatcatccccagccccgacgaggccggcgagcagatccacgtgagcctgcccctgagccagcaggtggccaacgagagcagactgagcatgagcgagagcgtgagcgagttcttcgacgcccaggaggtgctgctgagcgccagcagcagcgagaacgaggccagcgacgacgagagctacatcagcgacgtgagcgacaacatcagcgaggacaacaccagcgtggccgacaacatcagcagacagatcctgaacggcgagctgaccggcggcgccttcagaaacggcagaagagcctgcctgcccgccccctgccccgacaccagcaacatcaacctgtggaacatcctgagaaacaacatcggcaaggacctgagcaaggtgagcatgcccgtggagctgaacgagcccctgaacaccctgcagcacctgtgcgaggagatggagtacagcgagctgctggacaaggccagcgagaccgacgacccctacgagagaatggtgctggtggccgccttcgccgtgagcggctactgcagcacctacttcagagccggcagcaagcccttcaaccccgtgctgggcgagacctacgagtgcatcagagaggacaagggcttcagattcttcagcgagcaggtgagccaccacccccccatcagcgcctgccactgcgagagcaagaacttcgtgttctggcaggacatcagatggaagaacaagttctggggcaagagcatggagatcctgcccgtgggcaccctgaacgtgatgctgcccaagtacggcgactactacgtgtggaacaaggtgaccacctgcatccacaacatcctgagcggcagaagatggatcgagcactacggcgaggtgaccatcagaaacaccaagagcagcgtgtgcatctgcaagctgaccttcgtgaaggtgaactactggaacagcaacatgaacgaggtgcagggcgtggtgatcgaccaggagggcaaggccgtgtacagactgttcggcaagtggcacgagggcctgtactgcggcgtggcccccagcgccaagtgcatctggagacccggcagcatgcccaccaactacgagctgtactacggcttcaccagattcgccatcgagctgaacgagctggaccccgtgctgaaggacctgctgccccccaccgacgccagattcagacccgaccagagattcctggaggagggcaacctggaggccgccgccagcgagaagcagagagtggaggagctgcagagaagcagaagaagatacatggaggagaacaacctggagcacatccccaagttcttcaagaaggtgatcgacgccaaccagagagaggcctgggtgagcaacgacacctactgggagctgagaaaggaccccggcttcagcaaggtggacagccccgtgctgtggtag

SEQ ID NO: 79160 - protein, 903 aa, Artificial Sequence
  derived and/or modified sequence
MSSDEKGISPAHKTSTPTHRSASSSTSSQRDSRQSIHILERTASSSTEPSVSRQLLEPEPVPLSKEADSWEIIEGLKIGQTNVQKPDKHEGFMLKKRKWPLKGWHKRFFVLDNGMLKYSKAPLDIQKGKVHGSIDVGLSVMSIKKKARRIDLDTEEHIYHLKVKSQDWFDAWVSKLRHHRLYRQNEIVRSPRDASFHIFPSTSTAESSPAANVSVMDGKMQPNSFPWQSPLPCSNSLPATCTTGQSKVAAWLQDSEEMDRCAEDLAHCQSNLVELSKLLQNLEILQRTQSAPNFTDMQVPFSATMSPVRLHSSNPNLCADIEFQTPPSHLTDPLESSTDYTKLQEEFCLIAQKVHSLLKSAFNSIAIEKEKLKQMVSEQDHSKGHSTQMARLRQSLSQALNQNAELRSRLNRIHSESIICDQVVSVNIIPSPDEAGEQIHVSLPLSQQVANESRLSMSESVSEFFDAQEVLLSASSSENEASDDESYISDVSDNISEDNTSVADNISRQILNGELTGGAFRNGRRACLPAPCPDTSNINLWNILRNNIGKDLSKVSMPVELNEPLNTLQHLCEEMEYSELLDKASETDDPYERMVLVAAFAVSGYCSTYFRAGSKPFNPVLGETYECIREDKGFRFFSEQVSHHPPISACHCESKNFVFWQDIRWKNKFWGKSMEILPVGTLNVMLPKYGDYYVWNKVTTCIHNILSGRRWIEHYGEVTIRNTKSSVCICKLTFVKVNYWNSNMNEVQGVVIDQEGKAVYRLFGKWHEGLYCGVAPSAKCIWRPGSMPTNYELYYGFTRFAIELNELDPVLKDLLPPTDARFRPDQRFLEEGNLEAAASEKQRVEELQRSRRRYMEENNLEHIPKFFKKVIDANQREAWVSNDTYWELRKDPGFSKVDSPVLW

SEQ ID NO: 79161 - DNA, 2712 bp, Artificial Sequence
  derived and/or modified sequence
atgtcttctgacgaaaagggcatctctcccgcacataagacttccactccaactcaccggagcgcttctagttccacttctagccagcgagacagtcggcaatcaattcacattctggagcgaactgcttcttcctctaccgagccctcagtgtcacgtcagctgttggagccagagccagtgcctctgagcaaagaggccgattcttgggagatcatagaaggtctgaagattggacagacaaatgtccagaaacctgataaacatgagggcttcatgctgaagaagcgcaaatggccactgaaaggttggcacaagcggttcttcgtccttgataatggaatgctcaagtactccaaggcacccctggacatccagaagggtaaggttcatgggtccatcgacgttgggctcagcgttatgagcatcaaaaagaaggctcgccggattgacttggacaccgaagagcacatatatcatttgaaagtcaaaagccaggattggttcgatgcctgggtatccaaattacgtcatcacagattataccggcagaacgagattgttagatctccccgcgacgctagttttcatatattcccttccacgtcaacagcggagtccagccccgcagctaatgtcagtgtaatggacgggaaaatgcagccgaacagttttccatggcagagccccttgccctgttcaaattcccttcccgcgacgtgcaccaccgggcagagtaaggtggcagcctggctgcaggattcggaggagatggatcgctgtgctgaggatttagcgcactgtcagagcaaccttgtggaactgagtaagctactccagaatctggagattcttcagcgaacacagtccgccccaaattttactgacatgcaggtccccttctcagccactatgtccccagtgagattgcactcttccaatccaaacctttgcgccgacatagagttccagacacccccgtctcatcttaccgacccgttggagagctcaacagactacacaaaactgcaggaagaattttgcctaatagcacagaaagtccactctttgctcaagagcgccttcaactccattgccattgagaaggagaagttaaagcagatggtttccgaacaagatcattctaagggtcactccacccagatggccaggctgcgccagtctctgtctcaggctttgaaccagaatgctgaacttcgcagccgtctgaatcgtatccattcagaatccataatctgcgatcaggtggtgagtgtcaatatcattcctagccccgacgaggccggcgagcagatacatgtttccttgcctctgtctcagcaggtcgccaatgagagccggttaagtatgagtgagtcggtgtccgagttcttcgatgcacaagaggtactgttaagtgcatcgtcctctgaaaacgaggccagcgacgatgagtcttatattagcgacgtgtctgacaatattagcgaagacaatacaagcgttgcagacaacatttcccgtcaaatcctgaatggtgagcttaccggaggagcattccgaaacggtcgtcgcgcctgcttgcccgctccctgtcctgacaccagtaacattaatttgtggaacatcctgaggaacaacattggcaaagatcttagtaaagtgagtatgcctgtggagttaaatgaacctttaaacacccttcagcacttatgcgaggagatggaatacagtgagctcttggataaagcgtctgaaacagacgacccttacgaaaggatggtcctcgtggccgccttcgccgtttcagggtattgttccacctatttccgcgctggcagcaaacccttcaacccagtcctgggagagacctatgaatgcattcgggaagataaaggcttcaggttcttcagcgagcaggtgtcccatcaccccccgatctctgcttgtcattgtgaatccaagaacttcgtgttctggcaagatattaggtggaagaataaattttggggaaagagtatggaaatcttgccagtgggcactctcaacgttatgttgcccaagtacggagattattacgtctggaacaaagtaaccacctgtatccataacattttgtctgggaggcggtggatagaacattacggggaggtgactattagaaatacaaaatccagcgtttgtatttgtaaactcacatttgtgaaggtgaactactggaattccaacatgaacgaggtccagggagtcgtaatcgatcaggaggggaaggcggtgtaccggctgtttggaaagtggcacgaggggctttactgtggagttgcacccagcgcaaagtgcatttggcggccaggaagtatgcccacaaactacgagttatattatggattcacccgattcgcaattgagctcaatgaactggacccagttctgaaagatctcctgccacctactgatgcaagatttcgacctgatcagcgcttcctcgaggagggcaatctggaagcagctgctagcgaaaagcaacgagtcgaggaactccagcgctccaggcgaaggtatatggaggaaaacaacctcgagcacatccctaaattttttaaaaaagtcatagacgccaaccaacgcgaggcttgggtcagtaatgacacttattgggaactaaggaaggaccctgggttttccaaagtggactctcccgtgctgtggtag

SEQ ID NO: 79162 - DNA, 2712 bp, Artificial Sequence
  derived and/or modified sequence
atgagcagtgatgagaagggcatcagccctgcccacaagaccagcacccccacccacaggtctgccagcagcagcaccagcagccagagggacagccggcagagcatccacatcctggagaggacagccagcagcagcacagagcccagcgtgtcccggcagctgctggagcctgagcctgtgcccctgagcaaggaggccgacagctgggagatcatcgagggcctgaagattggccagaccaacgtgcagaagccagacaagcatgagggcttcatgctgaagaagaggaagtggcccctgaagggctggcacaagcgcttctttgtgctggacaatggcatgctgaagtacagcaaggcccccctggacatccagaagggcaaggtgcacggcagcattgatgtgggcctgtctgtgatgagcatcaagaagaaggccaggagaattgacctggacacagaggagcacatctaccacctgaaggtgaagagccaggactggtttgatgcctgggtgtccaagctgcggcaccaccggctgtaccggcagaatgaaattgtgcgcagccccagagatgccagcttccacatcttccccagcaccagcacagctgagagcagccctgctgccaacgtgtctgtgatggatggcaagatgcagcccaacagcttcccctggcagagccccctgccctgcagcaacagcctgcctgccacctgcaccaccggccagagcaaggtggccgcctggctgcaggacagcgaggagatggacagatgtgccgaggacctggcccactgccagagcaacctggtggagctgagcaagctgctgcagaacctggagatcctgcagaggacccagagcgcccccaacttcacagacatgcaggtgcccttcagcgccaccatgagccctgtgcggctgcacagcagcaaccccaacctgtgtgccgacatcgagttccagaccccacccagccacctgacagaccccctggagagcagcacagactacaccaagctgcaggaggagttctgcctgattgcccagaaggtgcacagcctgctgaagagcgccttcaacagcatcgccatcgagaaggagaagctgaagcagatggtgtctgagcaggaccacagcaagggccacagcacccagatggcccggctgcggcagagcctgagccaggccctgaaccagaatgctgagctgcggagccggctgaaccgcatccacagcgagagcatcatctgtgaccaggtggtgtctgtgaacatcatccccagcccagatgaagctggggagcagatccacgtgtccctgcccctgagccagcaggtggccaatgaaagccggctgtccatgtctgagagcgtgtctgagttctttgatgcccaggaggtgctgctgagcgccagcagcagtgaaaatgaggccagtgatgatgagagctacatcagtgatgtgtctgacaacatcagcgaggacaacacctctgtggccgacaacatcagccggcagatcctgaatggagagctgaccggcggggccttcagaaatggccggcgggcctgcctgcctgccccctgcccagacaccagcaacatcaacctgtggaacatcctgaggaacaacatcggcaaggacctgagcaaggtgtccatgcctgtggagctgaatgagcccctgaacaccctgcagcacctgtgtgaggagatggagtacagcgagctgctggacaaggccagcgagacagatgacccctatgaaagaatggtgctggtggccgcctttgctgtgtctggctactgcagcacctacttccgggccggcagcaagcccttcaaccctgtgctgggggagacctatgagtgcatccgggaggacaagggcttccgcttcttcagcgagcaggtgagccaccacccccccatcagcgcctgccactgtgagagcaagaactttgtgttctggcaggacatccgctggaagaacaagttctggggcaagtccatggagatcctgcctgtgggcaccctgaatgtgatgctgcccaagtatggagactactacgtgtggaacaaggtgaccacctgcatccacaacatcctgtctggaagacgctggattgagcactatggagaggtgaccatccggaacaccaagagctctgtgtgcatctgcaagctgacctttgtgaaggtgaactactggaacagcaacatgaatgaggtgcagggcgtggtgattgaccaggagggcaaggctgtgtaccgcctgtttgggaagtggcatgagggcctgtactgcggcgtggcccccagcgccaagtgcatctggaggcctggctccatgcccaccaactatgagctgtactacggcttcaccaggtttgccatcgagctgaatgagctggaccctgtgctgaaggacctgctgcccccaacagatgcccgcttccggccagaccagcgcttcctggaggagggcaacctggaggccgccgccagcgagaagcagagggtggaggagctgcagaggagcagaagacgctacatggaggagaacaacctggagcacatccccaagttcttcaagaaggtgattgatgccaaccagcgggaggcctgggtgtccaatgacacctactgggagctgaggaaggaccccggcttcagcaaggtggacagccctgtgctgtggtag

SEQ ID NO: 79163 - DNA, 2712 bp, Artificial Sequence
  derived and/or modified sequence
atgagcagcgacgagaagggcatcagccccgcccacaagaccagcacccctactcacaggtccgcgagtagctcaacaagctcacagagggattcccgacaatccattcacattctggagaggactgcgagtagctctacagagccaagcgtgagtcggcagttgttggaaccagaacccgttccccttagcaaagaagccgattcgtgggagatcattgaagggctgaagatcggccagactaatgtgcaaaagccagataagcacgaaggttttatgctaaaaaaacgcaaatggcctctgaagggatggcataagagattcttcgtgctcgataacggaatgcttaagtactctaaggcgcctttggacatacaaaaagggaaggtccacggttctatcgatgtgggcctttccgtaatgagcatcaagaaaaaggcacggcgcatcgacctggataccgaagaacatatttaccatttaaaagtgaagtcccaggactggtttgacgcatgggtatccaaactgagacaccaccgtctatatagacagaacgagatcgtgaggagtcctagagacgcttctttccacatcttcccgagcactagtacggccgaaagctccccggcagcgaatgtgagtgtgatggatggtaagatgcagcccaacagctttccttggcagtcacctctgccttgctcaaacagcctccccgccacttgtaccaccgggcagtccaaagtggcggcttggctgcaggacagcgaggagatggaccgctgcgccgaggacctggcccactgtcagtcaaatctggttgagctgtccaagttgctccagaacctggagattctgcaacgtacccaatctgcacctaattttacagacatgcaggtgcccttctcagctactatgtcgcccgttaggttacacagtagcaaccccaacctgtgcgcagacattgaattccagacgcctcccagccacctgaccgatcccctcgaaagcagtaccgactataccaaactgcaagaggagttctgcctcattgcacaaaaagtccatagccttttgaaatcagcattcaatagtatagccattgagaaagaaaaactgaagcagatggtatccgaacaagatcacagtaaaggtcatagcactcagatggctcgactgcgacagtccttgagccaagctttgaaccagaacgccgaactccggtcgcgcctgaatcgcattcactccgagtctatcatttgcgatcaggtggtgtctgtgaatattattccctcaccggatgaggcaggggaacaaatccatgtcagcctgccactttcccagcaagtcgcgaacgaaagcagactttctatgtcagagtccgtgtcagagttcttcgacgcgcaggaggtgctgttatccgcctccagctcagaaaatgaagcgtctgatgacgagtcttacatcagtgacgtttctgataacatctccgaggacaacaccagcgtggctgacaatatctctcgtcagattcttaacggggaactaactggaggagcctttagaaacgggagacgggcctgtctcccagcaccctgccctgatacctccaatatcaacctgtggaatattctgcgaaacaacatagggaaggaccttagcaaagtctccatgccggtggaactgaacgaaccacttaatactcttcaacatctgtgcgaagaaatggagtatagtgagcttctggataaagcatcggaaactgacgacccttatgaaaggatggtgctggtggccgcattcgccgtctcagggtactgtagtacctactttagagccggaagcaaaccattcaacccggtcctgggggaaacctatgagtgcatccgcgaggacaaagggttccgattcttttcggagcaggtatcgcaccatccaccgatatccgcctgccattgcgagagcaaaaatttcgtcttttggcaggacataagatggaagaataagttctggggaaagtcaatggaaattttgcccgtggggacactgaacgtcatgttacctaagtacggtgattactacgtctggaacaaggtgaccacctgtatccataatattctgagcggccgccgctggattgaacactatggagaggtgactatacgaaacactaagtcttctgtgtgcatatgtaagctgacgttcgtaaaagtgaattactggaattctaatatgaacgaggtccaaggagtcgttatcgaccaggaaggaaaagcagtctatcgactctttgggaaatggcatgaggggttatactgtggcgtggctcctagcgcaaaatgcatctggcgccctggaagtatgccaactaactacgagctgtactatggcttcacacgctttgcaatcgagctcaatgagctggaccctgtgctcaaggacttgctgccccccacagacgcgcgattccggccggatcaacgatttctggaggagggcaatcttgaagccgcagcatccgaaaagcaacgggtagaggagcttcagcgatcaagaagacgatatatggaagagaataatttggagcatatccctaagtttttcaagaaggtgattgacgctaatcagcgggaagcctgggtttcaaacgatacttattgggagcttcggaaagatccaggattttccaaggtcgactcccccgtcctttggtag

SEQ ID NO: 79164 - DNA, 3427 bp, Artificial Sequence
  derived and/or modified sequence
agatcgcggctcggtgcaggcggcgcccatgcctcctctcctccactagcccgcgcgccagtccgcctgccggggccggctctccgcctcctgcctcccgtcgcagccgcgcagccgccgcagagtccgcggcgccaccgctcgccctccaggttctgccacttgctgggaaaacagcaacagaaggatattaaggagccacccctataatttacccagatagccccagcaaggtcaaagacatatcatgtcccaaggagaaaagctgcaggcatctgaggataaatcactgtgaaacagctttgaccataaagctgacttggaagactttgactccaaggtgcaaggtggtttggacaccctcaatattgcctgctcttttctagtcaaacctgattcatgaaatggaatgaagctgaaaaatcatctacttctttgtttgtggatttgagagaagattgggatggtcttaagtgcataaaacgagactctaactgcagcgatgagttcagatgagaagggcatttcccctgctcataaaacatccactccaacccatagaagtgcctcctcttcaacatcctcccaaagggacagtaggcagagtattcacatactggagaggactgcttcctctagcaccgagccctctgtaagtcggcaattgctagaaccggagccagtccccctctccaaggaagctgacagctgggaaattatagaagggctgaaaataggccaaaccaatgtccagaaaccagacaaacatgagggctttatgctgaagaaaagaaaatggcctttaaaaggctggcacaagcgtttttttgtcctggataatggaatgttaaagtattcaaaggcaccactcgatattcagaaaggaaaggtccatgggagcatagatgtgggactctcagtcatgtcaattaaaaagaaagctcgaagaatagaccttgacaccgaagagcacatctatcatttgaaggtgaaatcccaggactggtttgatgcatgggtctccaaactgcgacatcatcggttgtatcgtcagaatgaaattgtgagatcaccaagagatgctagttttcacatatttccttcaacgtccacagctgaatcctcaccagctgctaatgtttctgtaatggatggaaagatgcaaccaaacagctttccgtggcagtcccctttaccatgcagcaatagcctccctgcaacgtgcacaactggccagagtaaagtggcagcctggttacaggactcggaagagatggacaggtgtgcagaagatcttgcacattgccagtcaaaccttgtggaacttagcaaactcctgcaaaatttggaaatacttcagagaactcagtcggcacctaactttactgacatgcaggttcctttcagtgctaccatgtcaccagttcgcttgcattcctccaaccccaacctttgtgcagatattgaatttcagactccccctagccacctcactgaccctctggaaagttcaacagattatacaaagctgcaagaagaattttgtctaatcgcacagaaagtgcattctcttttgaagtctgcatttaatagcatagctatagagaaggagaagctgaagcagatggtttccgagcaggatcacagtaaaggccacagcacgcagatggcacggctccgacagtcactgtctcaggcactcaaccagaatgctgaactaaggagtcggttgaacagaatacattcagagtctattatttgtgatcaggttgtcagtgtaaatattattcctagccctgatgaggctggtgagcaaatccatgtcagtctccccttatcacagcaagtagccaatgagagccgcctctccatgtcagagtctgtttctgagttctttgatgcccaagaggtgctcctctctgcaagttcgtcagagaatgaggcttcagatgatgagtcttacatcagtgatgtgagtgataatatatctgaagacaacaccagtgttgcagacaatatttctcggcaaatcctgaatggggagcttacaggaggggccttccgaaatgggcgtcgagcatgcctgccagctccttgtcctgacaccagtaacattaacctgtggaatatcttgaggaacaacattggtaaagacctgtctaaagtctctatgcctgtggagctaaacgagccgctcaacaccctgcagcacctctgtgaggaaatggaatacagcgagctcctggacaaggcttcggaaactgatgatccatatgagcgcatggttctcgttgccgcatttgcagtttcaggatactgctccacctatttcagagcaggaagtaagccattcaacccagtccttggggagacttatgaatgcattagagaagacaagggattccgctttttctcagaacaggttagccatcatccacccatttctgcctgtcactgtgaatcaaagaattttgtgttttggcaagatatcagatggaaaaacaagttctgggggaagtcgatggaaatcctgcctgttggaacactgaatgtcatgcttccaaagtatggagattactatgtgtggaataaagtcaccacttgcatacacaacatcctcagtgggagaagatggatagaacattatggagaagtaaccatcagaaataccaaaagcagtgtttgcatttgcaaactcacatttgtcaaggtgaattattggaattctaacatgaatgaagtccagggggtggtgatagatcaggaggggaaggcggtgtaccggctgtttggaaagtggcatgaaggactctactgtggtgtggccccctctgcaaagtgcatttggagaccaggttccatgccaacaaactatgagctgtactatggcttcacaaggtttgctattgagctcaatgagttagatccagtactaaaagatctccttccaccaacagacgcccggttccggccagatcaaagatttttggaagaaggaaatttagaagctgcagcatcagagaagcaaagagtagaggaactccagagatctcggagacgatatatggaagaaaacaatcttgaacatataccaaaattttttaaaaaagttattgatgccaatcaaagagaagcctgggtttctaacgacacctactgggagcttcgaaaggaccctgggtttagcaaagtagacagccctgttctttggtagactgggaatgtagagctagccaacatatcacattctgaatgaataaataactatgcacaattatgtttcttatagctatgtgtggtttctgggtcaactgaaaacctaccatttgcttttctattcatctttataatggactttcagaagtgcattagacaaggcccctaaccactttgggatcctttctgttttgctgcaaccatattcctt

SEQ ID NO: 79165 - DNA, 2712 bp, Artificial Sequence
  derived and/or modified sequence
atgtcctctgacgagaaaggaattagccccgctcataagacttccaccccaacgcaccggagtgctagctcaagcacctcaagtcagagagattctcgtcagagcatccacatcctggagaggacagctagctcaagcacagaaccaagcgtgtcacgccagcttctggaacccgagccggtgcctctatcgaaggaggccgactcttgggaaattatagaaggattaaagatcggccaaaccaatgtgcagaagcctgacaaacatgaggggttcatgcttaagaaaaggaaatggccgctcaaggggtggcacaagcgctttttcgtcctcgataacggaatgcttaaatactcgaaagccccactagatatccagaagggtaaggtgcatggatcaatcgatgtgggattatccgtgatgagcataaaaaagaaggcgcgaagaattgatctcgatacagaagagcacatatatcatttaaaggttaaatcccaagattggttcgacgcctgggtttctaagctaaggcatcaccggttatatagacagaacgaaattgtgagatcacccagagacgcttccttccacatattcccatctactagtaccgctgagagctcgccagccgcaaatgtgtccgttatggatggcaaaatgcaaccaaactctttcccatggcagtctccccttccctgttcaaatagtctcccagcgacatgcaccacggggcagtctaaggtagccgcttggctacaggatagtgaggaaatggatcgatgtgctgaggacttagctcactgtcagtctaaccttgtagagctctccaagttgctgcaaaatctggagatcctccaacggacacagagcgctccaaacttcacagatatgcaggtgcctttttcagccactatgagccccgtcagactgcattcatctaacccaaatctgtgcgccgacattgagttccagacccccccaagccacctgacggatcctctggaatcttctacagattatacaaagttgcaggaagagttctgtctgatagcccaaaaggtgcatagcctgttgaaaagcgccttcaactcgatagcaatcgaaaaagagaaactgaaacagatggtcagcgaacaggaccactcgaaagggcatagcacgcaaatggcaaggctacggcagtcgctctctcaggccttgaatcaaaatgcggagctccgttcccgcctcaataggattcattctgagtcaattatttgcgaccaggtcgtgagcgttaacattatcccttccccagacgaggcaggcgagcagatccacgtcagtctcccactgagtcagcaagtggccaacgaatcgaggctttctatgtcagaaagtgtaagcgaattttttgatgctcaggaggtcctgttaagcgcatcatccagcgagaacgaggctagtgatgacgaatcatatatatcggatgtctccgataacattagcgaggataataccagcgtcgccgacaacatcagcaggcaaatactgaatggtgaattgactggcggagcgttcaggaacggtaggcgggcttgtctgcctgctccctgccccgacacctcaaatatcaatctgtggaatattctcaggaacaacatcggcaaagacctgagcaaagtcagcatgcctgtcgaacttaacgaacccctgaacaccctgcagcatttgtgtgaagaaatggaatatagtgaattactggataaagccagcgaaacagacgatccatatgagcgcatggtgctggtggccgcattcgctgtttccggatattgcagcacttattttagagcaggctccaagccctttaatcccgtcctgggtgaaacttacgagtgcataagagaggacaaggggtttcgctttttttcagagcaagtgtcccaccacccccctatctcagcctgccactgtgaaagtaagaacttcgttttctggcaggatatcagatggaaaaacaagttttggggaaaaagcatggagatcctgcccgtgggaacccttaacgtgatgctgcccaaatacggggactattatgtatggaacaaggtgactacctgcattcacaacattctcagtgggagacggtggattgaacactacggcgaagtgactatccggaacaccaaatcgtccgtatgtatctgtaaattgacatttgtcaaagtgaattactggaatagcaatatgaatgaggtgcaaggcgtggttatcgaccaggaagggaaagcagtgtaccgcctgttcggaaaatggcacgaagggctttactgcggagtggccccatctgctaagtgcatttggagacccggatctatgcccactaattatgaactctattatggttttactcgcttcgccatcgaacttaacgaattggacccagtgctgaaagacctgcttcctcccacagacgcaaggtttcgcccagaccagagattcctggaggaaggaaacctggaagctgccgcaagtgagaaacagcgggtggaggagctacagcggtcgcggagaaggtatatggaggagaacaacctggagcatatccccaagtttttcaaaaaggtcatcgacgcaaaccaacgggaagcctgggtgagcaacgatacatactgggaactgagaaaagatccaggattttcaaaggtggactcgccggtgctttggtag

SEQ ID NO: 79166 - DNA, 2712 bp, Artificial Sequence
  derived and/or modified sequence
atgagcagcgacgagaagggcatcagccccgcccacaagaccagcacccccacccacagaagcgccagcagcagcaccagcagccagagagacagcagacagagcatccacatcctggagagaaccgccagcagcagcaccgagcccagcgtgagcagacagctgctggagcccgagcccgtgcccctgagcaaggaggccgacagctgggagatcatcgagggcctgaagatcggccagaccaacgtgcagaagcccgacaagcacgagggcttcatgctgaagaagagaaagtggcccctgaagggctggcacaagagattcttcgtgctggacaacggcatgctgaagtacagcaaggcccccctggacatccagaagggcaaggtgcacggcagcatcgacgtgggcctgagcgtgatgagcatcaagaagaaggccagaagaatcgacctggacaccgaggagcacatctaccacctgaaggtgaagagccaggactggttcgacgcctgggtgagcaagctgagacaccacagactgtacagacagaacgagatcgtgagaagccccagagacgccagcttccacatcttccccagcaccagcaccgccgagagcagccccgccgccaacgtgagcgtgatggacggcaagatgcagcccaacagcttcccctggcagagccccctgccctgcagcaacagcctgcccgccacctgcaccaccggccagagcaaggtggccgcctggctgcaggacagcgaggagatggacagatgcgccgaggacctggcccactgccagagcaacctggtggagctgagcaagctgctgcagaacctggagatcctgcagagaacccagagcgcccccaacttcaccgacatgcaggtgcccttcagcgccaccatgagccccgtgagactgcacagcagcaaccccaacctgtgcgccgacatcgagttccagaccccccccagccacctgaccgaccccctggagagcagcaccgactacaccaagctgcaggaggagttctgcctgatcgcccagaaggtgcacagcctgctgaagagcgccttcaacagcatcgccatcgagaaggagaagctgaagcagatggtgagcgagcaggaccacagcaagggccacagcacccagatggccagactgagacagagcctgagccaggccctgaaccagaacgccgagctgagaagcagactgaacagaatccacagcgagagcatcatctgcgaccaggtggtgagcgtgaacatcatccccagccccgacgaggccggcgagcagatccacgtgagcctgcccctgagccagcaggtggccaacgagagcagactgagcatgagcgagagcgtgagcgagttcttcgacgcccaggaggtgctgctgagcgccagcagcagcgagaacgaggccagcgacgacgagagctacatcagcgacgtgagcgacaacatcagcgaggacaacaccagcgtggccgacaacatcagcagacagatcctgaacggcgagctgaccggcggcgccttcagaaacggcagaagagcctgcctgcccgccccctgccccgacaccagcaacatcaacctgtggaacatcctgagaaacaacatcggcaaggacctgagcaaggtgagcatgcccgtggagctgaacgagcccctgaacaccctgcagcacctgtgcgaggagatggagtacagcgagctgctggacaaggccagcgagaccgacgacccctacgagagaatggtgctggtggccgccttcgccgtgagcggctactgcagcacctacttcagagccggcagcaagcccttcaaccccgtgctgggcgagacctacgagtgcatcagagaggacaagggcttcagattcttcagcgagcaggtgagccaccacccccccatcagcgcctgccactgcgagagcaagaacttcgtgttctggcaggacatcagatggaagaacaagttctggggcaagagcatggagatcctgcccgtgggcaccctgaacgtgatgctgcccaagtacggcgactactacgtgtggaacaaggtgaccacctgcatccacaacatcctgagcggcagaagatggatcgagcactacggcgaggtgaccatcagaaacaccaagagcagcgtgtgcatctgcaagctgaccttcgtgaaggtgaactactggaacagcaacatgaacgaggtgcagggcgtggtgatcgaccaggagggcaaggccgtgtacagactgttcggcaagtggcacgagggcctgtactgcggcgtggcccccagcgccaagtgcatctggagacccggcagcatgcccaccaactacgagctgtactacggcttcaccagattcgccatcgagctgaacgagctggaccccgtgctgaaggacctgctgccccccaccgacgccagattcagacccgaccagagattcctggaggagggcaacctggaggccgccgccagcgagaagcagagagtggaggagctgcagagaagcagaagaagatacatggaggagaacaacctggagcacatccccaagttcttcaagaaggtgatcgacgccaaccagagagaggcctgggtgagcaacgacacctactgggagctgagaaaggaccccggcttcagcaaggtggacagccccgtgctgtggtag

SEQ ID NO: 79167 - protein, 898 aa, Artificial Sequence
  derived and/or modified sequence
MSSDEKGISPAHKTSTPTHRSASSSTSSQRDSRQSIHILERTASSSTEPSVSRQLLEPEPVPLSKEADSWEIIEGLKIGQTNVQKPDKHEGFMLKKRKWPLKGWHKRFFVLDNGMLKYSKAPLDIQKGKVHGSIDVGLSVMSIKKKARRIDLDTEEHIYHLKVKSQDWFDAWVSKLRHHRLYRQNEIVRSPRDASFHIFPSTSTAESSPAANVSVMDGKMQPNSFPWQSPLPCSNSLPATCTTGQSKVAAWLQDSEEMDRCAEDLAHCQSNLVELSKLLQNLEILQRTQSAPNFTDMQANCVDISKKDKRVTRRWRTKSVSKDTKIQLQVPFSATMSPVRLHSSNPNLCADIEFQTPPSHLTDPLESSTDYTKLQEEFCLIAQKVHSLLKSAFNSIAIEKEKLKQMVSEQDHSKGHSTQMARLRQSLSQAGEQIHVSLPLSQQVANESRLSMSESVSEFFDAQEVLLSASSSENEASDDESYISDVSDNISEDNTSVADNISRQILNGELTGGAFRNGRRACLPAPCPDTSNINLWNILRNNIGKDLSKVSMPVELNEPLNTLQHLCEEMEYSELLDKASETDDPYERMVLVAAFAVSGYCSTYFRAGSKPFNPVLGETYECIREDKGFRFFSEQVSHHPPISACHCESKNFVFWQDIRWKNKFWGKSMEILPVGTLNVMLPKYGDYYVWNKVTTCIHNILSGRRWIEHYGEVTIRNTKSSVCICKLTFVKVNYWNSNMNEVQGVVIDQEGKAVYRLFGKWHEGLYCGVAPSAKCIWRPGSMPTNYELYYGFTRFAIELNELDPVLKDLLPPTDARFRPDQRFLEEGNLEAAASEKQRVEELQRSRRRYMEENNLEHIPKFFKKVIDANQREAWVSNDTYWELRKDPGFSKVDSPVLW

SEQ ID NO: 79168 - DNA, 2697 bp, Artificial Sequence
  derived and/or modified sequence
atgtcctctgatgagaaaggcatttcgcctgctcacaagacatctacgcccacccatcggagtgcgtcctcttctaccagcagtcagcgggactcgagacagtccatccacatcctggagcggaccgcatccagctccacggaaccctccgtcagtagacaactgctcgagccagaacctgtaccactgagtaaggaggcggactcctgggagattatcgaaggactgaagatcggtcaaacgaacgtgcagaagccggacaagcatgaaggtttcatgctcaagaagcggaagtggcccctgaagggttggcataaacggtttttcgtccttgacaacggtatgctcaagtacagtaaagcgccacttgacatccaaaaaggcaaggtccacgggagtattgacgtcggcctgagtgtcatgagtatcaaaaagaaggcgagaagaatcgatttagacaccgaagaacatatttatcatctgaaagtgaaaagccaagattggtttgatgcctgggtgtcaaaattaaggcatcaccgtctgtacaggcagaacgaaatcgtgcgtagtcctagggatgcctcctttcatatctttcctagcacctctacagcagaaagttcacccgccgctaacgtgagtgtcatggacggcaagatgcaacccaatagcttcccttggcagagtcccctgccatgttcgaatagtctccctgctacatgcacaaccggccagtccaaagttgctgcttggttacaagacagcgaagaaatggatcgttgtgctgaagatttggcccattgccagagcaacctcgtcgaactgtcaaagctgctgcagaatctagagattctgcaacggacgcaatccgctcccaatttcactgatatgcaggcgaattgcgtcgatatctcaaaaaaggataaaagagtcacacgacgatggcggaccaagtccgtctctaaggatactaagatacagttgcaggtcccattcagtgctactatgtctccagtaagactgcacagtagcaatccaaacctatgcgcagacatcgagttccagactcctccaagccacctcaccgacccgcttgagtccagcaccgactacaccaagctccaggaagaattttgcctgattgcccagaaagttcactctctcctgaagtctgcattcaatagcatcgctattgagaaagagaaactgaaacaaatggttagtgaacaggatcactctaaaggccactcaacacagatggctcggcttcgccagagtctgtctcaggcaggtgagcagattcacgtgtctctgcctctcagccaacaggttgcaaacgagtccaggctgtctatgagcgaaagtgtgtctgaattcttcgacgctcaggaggtgctgctgagcgctagctctagtgagaatgaggcgtcagatgatgagagttacatctctgacgtgagcgataatatcagtgaggataacacttcagtggctgacaacatctcccggcagatcctgaacggggagctgactggaggagccttccgaaacgggagacgtgcatgtcttcccgctccatgtcccgatactagcaacatcaacctgtggaacatcttgagaaataacattgggaaagacttaagcaaggtctcaatgcctgtggagttaaatgagcctttaaacacattacagcatttatgcgaggagatggagtattccgagctgctagacaaagcttctgagacggacgacccctatgaacgaatggttttggtcgctgccttcgccgtaagtggatactgtagcacctacttcagggctggctcgaaacctttcaacccagtactgggtgagacctacgagtgcatccgtgaggataaaggattccgttttttttccgagcaagtgtctcaccatccgccaatcagcgcttgccactgcgagagtaagaactttgtgttctggcaggacatccgctggaaaaacaaattctggggaaaatcaatggaaattctgccggtcggtacacttaatgttatgctcccaaaatacggcgactactatgtgtggaacaaagtcaccacctgcatccataacattttgtccggtcgcagatggatcgagcactatggcgaagtcacaatccgcaatacgaaaagtagtgtgtgcatctgtaagctgacctttgttaaggtgaattattggaattccaacatgaacgaggtgcagggggttgtcattgatcaggaggggaaggctgtgtaccggttattcggcaaatggcatgaaggcctgtactgcggcgtcgcccccagtgcgaaatgtatttggcggcctgggtcaatgcctaccaactacgaactgtactatggcttcacccgcttcgccatcgagctgaacgaactggatccagttctgaaagacttgctgcctcctacggacgcccggtttagacccgatcagcgtttcctggaagaagggaatcttgaagctgctgccagcgaaaagcagcgagtggaggaactgcaaaggtcacgtcggagatacatggaggagaataatcttgagcacatccccaaatttttcaaaaaagtaattgacgctaatcaacgagaggcatgggtttccaacgacacctactgggaattaagaaaggatccaggctttagtaaagtagactcacctgttctgtggtag

SEQ ID NO: 79169 - DNA, 573 bp, Artificial Sequence
  derived and/or modified sequence
atggacggcaaaatgcaacctaactcttttccttggcagtcaccactcccttgcagtaactccctgccagccacctgcactactgggcagtccaaagttgctgcctggttgcaggactcagaggagatggacaggtgtgctgaagaccttgcacactgtcagagcaatttggtagaactctcgaaactccttcaaaatctggaaatcctacagagaacccagagtgccccgaatttcacagatatgcaggcaaattgtgtggacatctctaagaaagataagagggtgaccagacggtggaggaccaagtccgtctctaaggacactaaaattcagctgcaggtgccatttagcgccaccatgagtcccgtgcggctgcactccagcaatccgaatctttgtgcggatatcgaatttcagacaccaccacctaatcacttcggcatcctgagcgttcttctgcaaccttactctctcaagaaaaagaagaaaaagaagaagaaaagcactccgtcgcttgagagtaggattaagggcgccgaatataagattcaaagcctgacttcactgtag

SEQ ID NO: 79170 - DNA, 2697 bp, Artificial Sequence
  derived and/or modified sequence
atgagcagtgatgagaagggcatcagccctgcccacaagaccagcacccccacccacaggtctgccagcagcagcaccagcagccagagggacagccggcagagcatccacatcctggagaggacagccagcagcagcacagagcccagcgtgtcccggcagctgctggagcctgagcctgtgcccctgagcaaggaggccgacagctgggagatcatcgagggcctgaagattggccagaccaacgtgcagaagccagacaagcatgagggcttcatgctgaagaagaggaagtggcccctgaagggctggcacaagcgcttctttgtgctggacaatggcatgctgaagtacagcaaggcccccctggacatccagaagggcaaggtgcacggcagcattgatgtgggcctgtctgtgatgagcatcaagaagaaggccaggagaattgacctggacacagaggagcacatctaccacctgaaggtgaagagccaggactggtttgatgcctgggtgtccaagctgcggcaccaccggctgtaccggcagaatgaaattgtgcgcagccccagagatgccagcttccacatcttccccagcaccagcacagctgagagcagccctgctgccaacgtgtctgtgatggatggcaagatgcagcccaacagcttcccctggcagagccccctgccctgcagcaacagcctgcctgccacctgcaccaccggccagagcaaggtggccgcctggctgcaggacagcgaggagatggacagatgtgccgaggacctggcccactgccagagcaacctggtggagctgagcaagctgctgcagaacctggagatcctgcagaggacccagagcgcccccaacttcacagacatgcaggccaactgtgtggacatcagcaagaaggacaagagggtgacccggcgctggaggaccaagtctgtgtccaaggacaccaagatccagctgcaggtgcccttcagcgccaccatgagccctgtgcggctgcacagcagcaaccccaacctgtgtgccgacatcgagttccagaccccacccagccacctgacagaccccctggagagcagcacagactacaccaagctgcaggaggagttctgcctgattgcccagaaggtgcacagcctgctgaagagcgccttcaacagcatcgccatcgagaaggagaagctgaagcagatggtgtctgagcaggaccacagcaagggccacagcacccagatggcccggctgcggcagagcctgagccaggccggggagcagatccacgtgtccctgcccctgagccagcaggtggccaatgaaagccggctgtccatgtctgagagcgtgtctgagttctttgatgcccaggaggtgctgctgagcgccagcagcagtgaaaatgaggccagtgatgatgagagctacatcagtgatgtgtctgacaacatcagcgaggacaacacctctgtggccgacaacatcagccggcagatcctgaatggagagctgactggaggagccttcagaaatggaagaagagcctgcctgcctgccccctgcccagacaccagcaacatcaacctgtggaacatcctgaggaacaacatcggcaaggacctgagcaaggtgtccatgcctgtggagctgaatgagcccctgaacaccctgcagcacctgtgtgaggagatggagtacagcgagctgctggacaaggccagcgagacagatgacccctatgaaagaatggtgctggtggccgcctttgctgtgtctggctactgcagcacctacttccgggccggcagcaagcccttcaaccctgtgctgggggagacctatgagtgcatcagagaagataaaggcttccgcttcttcagcgagcaggtgagccaccacccccccatcagcgcctgccactgtgagagcaagaactttgtgttctggcaggacatccgctggaagaacaagttctggggcaagtccatggagatcctgcctgtgggcaccctgaatgtgatgctgcccaagtacggggactactacgtgtggaacaaggtgaccacctgcatccacaacatcctgagcggccgccgctggattgagcactacggggaggtgaccatccggaacaccaagagctctgtgtgcatctgcaagctgacctttgtgaaggtgaactactggaacagcaacatgaatgaggtgcagggcgtggtgattgaccaggagggcaaggctgtgtaccgcctgtttgggaagtggcatgagggcctgtactgcggcgtggcccccagcgccaagtgcatctggaggcctggctccatgcccaccaactatgagctgtactacggcttcaccaggtttgccatcgagctgaatgagctggaccctgtgctgaaggacctgctgcccccaacagatgcccgcttccggccagaccagcgcttcctggaggagggcaacctggaggccgccgccagcgagaagcagagggtggaggagctgcagaggagcagaagacgctacatggaggagaacaacctggagcacatccccaagttcttcaagaaggtgattgatgccaaccagcgggaggcctgggtgtccaatgacacctactgggagctgaggaaggaccccggcttcagcaaggtggacagccctgtgctgtggtag

SEQ ID NO: 79171 - DNA, 573 bp, Artificial Sequence
  derived and/or modified sequence
atggatggcaagatgcagcccaacagcttcccctggcagagccccctgccctgcagcaacagcctgcctgccacctgcaccaccggccagagcaaggtggccgcctggctgcaggacagcgaggagatggacagatgtgccgaggacctggcccactgccagagcaacctggtggagctgagcaagctgctgcagaacctggagatcctgcagaggacccagagcgcccccaacttcacagacatgcaggccaactgtgtggacatcagcaagaaggacaagagggtgacccggcgctggaggaccaagtctgtgtccaaggacaccaagatccagctgcaggtgcccttcagcgccaccatgagccctgtgcggctgcacagcagcaaccccaacctgtgtgccgacatcgagttccagaccccaccacccaaccacttcggcatcctgtctgtgctgctgcagccctacagcctgaagaagaagaagaagaagaagaagaagagcacccccagcctggagagccgcatcaagggagctgagtacaagatccagagcctgaccagcctgtag

SEQ ID NO: 79172 - DNA, 2697 bp, Artificial Sequence
  derived and/or modified sequence
atgagcagcgacgagaagggcatcagccccgcccacaagaccagcactcctacccaccggtcagcttctagtagcacgtcctcacagagggattctcgccagtctattcacatcctggagcgtactgcatcaagcagcacggagccaagtgtatctagacagcttctggaaccggagcccgtgccactatcaaaagaggcagattcgtgggaaataattgaaggactgaaaatcgggcagacgaatgtccaaaagcccgataagcacgaagggttcatgctaaaaaagagaaaatggccattaaaagggtggcacaagaggtttttcgtacttgacaatgggatgctgaagtattccaaagctccccttgacatacaaaaggggaaggttcatgggtcgatcgatgtggggctcagcgttatgtccataaagaagaaagcccggagaatcgacttggacactgaggaacacatataccacttgaaagtgaagtcgcaggactggtttgacgcctgggtgtccaaactaagacatcaccggttgtatcggcagaatgagattgttagatcgcctcgggacgcctcttttcacatctttccctcaacatctacagccgagtccagccccgccgccaatgtctcggtgatggacggaaagatgcagcccaattcattcccctggcagagtcctctgccatgcagcaacagtctcccagcaacctgcacaaccggtcagagcaaggtagcggcctggttacaggactccgaagagatggatagatgcgcagaggaccttgctcactgtcagtctaatcttgttgagttgagcaaactcctgcagaatcttgagattcttcagcgcacacagtccgcaccgaacttcaccgacatgcaagctaactgtgtggatatctctaagaaggataagagagtgaccagaagatggagaaccaaatccgtgagtaaggacaccaagattcaactacaagtccctttcagcgctactatgtctccagtcaggttgcacagctccaatcctaacctatgcgcagacattgagtttcagactccaccgtctcacctgaccgaccccctggagtcctctaccgactataccaaactgcaggaggagttctgcctcattgcacagaaggtacacagtctgttaaagtctgcattcaatagtatcgccatcgaaaaggagaagttgaagcagatggtgagcgaacaggatcactctaaaggtcactctacccagatggccaggctcaggcagagcctctcccaagcaggggagcagatacacgtctcactgccattgtcacagcaggtggctaacgagtctagactttcaatgagtgagtcagtaagtgagttctttgatgctcaggaggttctgcttagcgcatccagctcagaaaacgaggcatccgatgatgaaagctatatctcggatgtgtcagacaatatctctgaggacaatacgagtgtggctgacaacatctcacgacaaattctgaatggtgagctcaccggtggagcattccgcaacgggagacgcgcatgcttacccgccccatgtcctgacaccagcaacatcaatctgtggaatatattacgcaacaatattggcaaggacctttcaaaagtgagtatgccagttgagctgaatgaaccgttgaacactctgcaacacttgtgtgaggaaatggagtatagcgagctcctggataaagcttcagagacggatgacccttatgagcggatggtgctggtggcggcgtttgctgtttcaggctattgtagcacatattttagagccggtagcaagcccttcaaccccgtactgggcgaaacttacgaatgtattcgcgaagataaggggtttcgattttttagcgaacaggtgtcccatcaccccccaatcagcgcttgtcactgcgagtctaagaactttgtgttctggcaggacatccggtggaagaacaagttttggggaaaatctatggaaatcctccctgtcgggactctcaacgtgatgctccccaagtatggcgattattatgtgtggaacaaggttacaacatgcatacataacatattaagcgggagaaggtggatcgaacattatggggaagttacaatcaggaacacaaagagtagtgtttgtatttgtaaactgacatttgtgaaggtcaactactggaacagtaatatgaacgaagtacaaggggtcgtaattgaccaggaggggaaggccgtgtatcgactcttcgggaaatggcatgaaggcctttactgcggcgtggccccatctgctaagtgtatttggcggccaggatctatgccgactaactacgaattatactatgggtttactcgttttgcaatagagcttaacgaactagacccagtccttaaggatttattgcccccaaccgatgcacgatttcggcccgaccagcgctttctcgaggaggggaacttggaggccgccgctagcgaaaagcaacgggtggaggagctgcagcggtccaggcggagatacatggaggagaacaatctggaacacatacccaaatttttcaaaaaggtcatagacgccaaccaacgtgaggcctgggtatcaaacgacacatactgggaactgcggaaggatccagggtttagcaaggtcgactcacctgtcctttggtag

SEQ ID NO: 79173 - DNA, 573 bp, Artificial Sequence
  derived and/or modified sequence
atggacggcaagatgcagcccaacagcttcccctggcagagccccctgccttgtagtaattccctacctgccacatgcactactggccagtcaaaggtcgccgcttggcttcaggacagcgaagaaatggaccggtgcgcggaggacctggctcactgccagtccaacctggtggagttatcaaaattactccagaatctcgagatcctgcaaagaactcagagtgcacctaatttcacagacatgcaagccaattgcgtggatatcagcaaaaaagacaagagggtgaccaggaggtggcgcaccaaaagtgtctccaaagataccaagatccaattacaggtcccctttagtgccacgatgagccctgtccggttgcactcgtctaatcctaatctctgcgcggacattgagttccagacaccaccccccaatcactttggcattctgtccgtgctgctgcaaccctattccctgaaaaagaagaagaaaaaaaagaagaaatctacccccagccttgaaagccgtatcaagggagccgaatacaagatccaatccctgacttcgctctag

SEQ ID NO: 79174 - DNA, 3454 bp, Artificial Sequence
  derived and/or modified sequence
ctggaggcgcagcacggtcgccgccgccgctgtcggtgctggagatcgcggctcggtgcaggcggcgcccatgcctcctctcctccactagcccgcgcgccagtccgcctgccggggccggctctccgcctcctgcctcccgtcgcagccgcgcagccgccgcagagtccgcggcgccaccgctcgccctccaggttctgccacttgctgggaaaacagcaacagaaggatattaaggagccacccctataatttacccagatagccccagcaaggtcaaagacatatcatgtcccaaggagaaaagctgcaggcatctgaggataaatcactgtgaaacagctttgaccataaagctgacttggaagactttgactccaaggtgcaaggtggtttggacaccctcaatattgcctgctcttttctagtcaaacctgattcatgaaatggaatgaagctgaaaaatcatctacttctttgtttgtggatttgagagaagattgggatggtcttaagtgcataaaacgagactctaactgcagcgatgagttcagatgagaagggcatttcccctgctcataaaacatccactccaacccatagaagtgcctcctcttcaacatcctcccaaagggacagtaggcagagtattcacatactggagaggactgcttcctctagcaccgagccctctgtaagtcggcaattgctagaaccggagccagtccccctctccaaggaagctgacagctgggaaattatagaagggctgaaaataggccaaaccaatgtccagaaaccagacaaacatgagggctttatgctgaagaaaagaaaatggcctttaaaaggctggcacaagcgtttttttgtcctggataatggaatgttaaagtattcaaaggcaccactcgatattcagaaaggaaaggtccatgggagcatagatgtgggactctcagtcatgtcaattaaaaagaaagctcgaagaatagaccttgacaccgaagagcacatctatcatttgaaggtgaaatcccaggactggtttgatgcatgggtctccaaactgcgacatcatcggttgtatcgtcagaatgaaattgtgagatcaccaagagatgctagttttcacatatttccttcaacgtccacagctgaatcctcaccagctgctaatgtttctgtaatggatggaaagatgcaaccaaacagctttccgtggcagtcccctttaccatgcagcaatagcctccctgcaacgtgcacaactggccagagtaaagtggcagcctggttacaggactcggaagagatggacaggtgtgcagaagatcttgcacattgccagtcaaaccttgtggaacttagcaaactcctgcaaaatttggaaatacttcagagaactcagtcggcacctaactttactgacatgcaggctaactgtgtagatatttcaaagaaagacaagcgggtcacaagacgatggagaacaaaaagtgtcagcaaagatacaaaaatacaactgcaggttcctttcagtgctaccatgtcaccagttcgcttgcattcctccaaccccaacctttgtgcagatattgaatttcagactccccctagccacctcactgaccctctggaaagttcaacagattatacaaagctgcaagaagaattttgtctaatcgcacagaaagtgcattctcttttgaagtctgcatttaatagcatagctatagagaaggagaagctgaagcagatggtttccgagcaggatcacagtaaaggccacagcacgcagatggcacggctccgacagtcactgtctcaggctggtgagcaaatccatgtcagtctccccttatcacagcaagtagccaatgagagccgcctctccatgtcagagtctgtttctgagttctttgatgcccaagaggtgctcctctctgcaagttcgtcagagaatgaggcttcagatgatgagtcttacatcagtgatgtgagtgataatatatctgaagacaacaccagtgttgcagacaatatttctcggcaaatcctgaatggggagcttacaggaggggccttccgaaatgggcgtcgagcatgcctgccagctccttgtcctgacaccagtaacattaacctgtggaatatcttgaggaacaacattggtaaagacctgtctaaagtctctatgcctgtggagctaaacgagccgctcaacaccctgcagcacctctgtgaggaaatggaatacagcgagctcctggacaaggcttcggaaactgatgatccatatgagcgcatggttctcgttgccgcatttgcagtttcaggatactgctccacctatttcagagcaggaagtaagccattcaacccagtccttggggagacttatgaatgcattagagaagacaagggattccgctttttctcagaacaggttagccatcatccacccatttctgcctgtcactgtgaatcaaagaattttgtgttttggcaagatatcagatggaaaaacaagttctgggggaagtcgatggaaatcctgcctgttggaacactgaatgtcatgcttccaaagtatggagattactatgtgtggaataaagtcaccacttgcatacacaacatcctcagtgggagaagatggatagaacattatggagaagtaaccatcagaaataccaaaagcagtgtttgcatttgcaaactcacatttgtcaaggtgaattattggaattctaacatgaatgaagtccagggggtggtgatagatcaggaggggaaggcggtgtaccggctgtttggaaagtggcatgaaggactctactgtggtgtggccccctctgcaaagtgcatttggagaccaggttccatgccaacaaactatgagctgtactatggcttcacaaggtttgctattgagctcaatgagttagatccagtactaaaagatctccttccaccaacagacgcccggttccggccagatcaaagatttttggaagaaggaaatttagaagctgcagcatcagagaagcaaagagtagaggaactccagagatctcggagacgatatatggaagaaaacaatcttgaacatataccaaaattttttaaaaaagttattgatgccaatcaaagagaagcctgggtttctaacgacacctactgggagcttcgaaaggaccctgggtttagcaaagtagacagccctgttctttggtagactgggaatgtagagctagccaacatatcacattctgaatgaataaataactatgcacaattatgtttcttatagctatgtgtggtttctgggtcaactgaaaacctaccatttgcttttctattcatctttataatggactttcagaagtgcattagacaaggcccctaaccactttgggatcctttctgttttgctgcaaccatattcctt

SEQ ID NO: 79175 - DNA, 1762 bp, Artificial Sequence
  derived and/or modified sequence
ctggaggcgcagcacggtcgccgccgccgctgtcggtgctggagatcgcggctcggtgcaggcggcgcccatgcctcctctcctccactagcccgcgcgccagtccgcctgccggggccggctctccgcctcctgcctcccgtcgcagccgcgcagccgccgcagagtccgcggcgccaccgctcgccctccaggttctgccacttgctgggaaaacagcaacagaaggatattaaggagccacccctataatttacccagatagccccagcaaggtcaaagacatatcatgtcccaaggagaaaagctgcaggcatctgaggataaatcactgtgaaacagctttgaccataaagctgacttggaagactttgactccaaggtgcaaggtggtttggacaccctcaatattgcctgctcttttctagtcaaacctgattcatgaaatggaatgaagctgaaaaatcatctacttctttgtttgtggatttgagagaagattgggatggtcttaagtgcataaaacgagactctaactgcagcgatgagttcagatgagaagggcatttcccctgctcataaaacatccactccaacccatagaagtgcctcctcttcaacatcctcccaaagggacagtaggcagagtattcacatactggagaggactgcttcctctagcaccgagccctctgtaagtcggcaattgctagaaccggagccagtccccctctccaaggaagctgacagctgggaaattatagaagggctgaaaataggccaaaccaatgtccagaaaccagacaaacatgagggctttatgctgaagaaaagaaaatggcctttaaaaggctggcacaagcgtttttttgtcctggataatggaatgttaaagtattcaaaggcaccactcgatattcagaaaggaaaggtccatgggagcatagatgtgggactctcagtcatgtcaattaaaaagaaagctcgaagaatagaccttgacaccgaagagcacatctatcatttgaaggtgaaatcccaggactggtttgatgcatgggtctccaaactgcgacatcatcggttgtatcgtcagaatgaaattgtgagatcaccaagagatgctagttttcacatatttccttcaacgtccacagctgaatcctcaccagctgctaatgtttctgtaatggatggaaagatgcaaccaaacagctttccgtggcagtcccctttaccatgcagcaatagcctccctgcaacgtgcacaactggccagagtaaagtggcagcctggttacaggactcggaagagatggacaggtgtgcagaagatcttgcacattgccagtcaaaccttgtggaacttagcaaactcctgcaaaatttggaaatacttcagagaactcagtcggcacctaactttactgacatgcaggctaactgtgtagatatttcaaagaaagacaagcgggtcacaagacgatggagaacaaaaagtgtcagcaaagatacaaaaatacaactgcaggttcctttcagtgctaccatgtcaccagttcgcttgcattcctccaaccccaacctttgtgcagatattgaatttcagactccccctcctaaccactttgggatcctttctgttttgctgcaaccatattccttaaaaaaaaaaaaaaaaaaaaaaaaaaaatccacaccgtccttggaaagcagaataaaaggagcagaatataaaatccaaagtctgaccagtttgtaa

SEQ ID NO: 79176 - DNA, 2697 bp, Artificial Sequence
  derived and/or modified sequence
atgtcgagtgacgaaaagggaattagccccgcacacaagacctccactccaacacatcggagcgcgtcaagcagcacaagttctcagcgggactcccgccagtcaatccacatactggaaagaactgctagcagttcaaccgagccatctgtttctcgccagttgttggagcccgagcccgtcccgctgtccaaggaggcggatagctgggagattattgaagggctcaagattggtcagactaatgtccagaaaccagacaaacatgaaggctttatgctgaaaaagcggaagtggccactaaagggctggcataagcggttcttcgtactagacaatggaatgttaaaatactccaaggccccattggacatccaaaaggggaaagtccatggctctatcgacgtgggcctgtctgtcatgtcgatcaagaagaaggccaggcgcattgacctggacaccgaggagcacatatatcacctaaaggtgaagtcgcaggactggttcgatgcctgggttagcaaactgcggcaccatcgcctataccgtcagaacgaaattgtgaggtcccctagggacgcctcttttcacatttttccatccacgagtacggccgagtccagcccagctgccaacgtttccgttatggacggtaagatgcagcccaacagcttcccctggcagtctcctctgccttgctcaaattctcttcccgcaacctgcactaccggacagtccaaagtagcagcctggctgcaggacagtgaggagatggacaggtgcgccgaagatctcgcgcactgtcagagcaacctggtcgaattgagcaagctgcttcaaaatttagagatcctacagagaactcagtcagctcccaattttacagacatgcaggctaattgcgtggatattagcaagaaggacaagcgcgtcacacgtcgctggagaactaaatccgtttccaaagacacaaaaatccagttgcaggtcccttttagtgcgaccatgtcaccagtgcggctgcactcatcgaatcccaacctgtgcgcagacattgaattccagactccaccctctcatctcaccgaccccttagagtctagtacagactataccaagctccaggaagagttttgcctgattgcacaaaaagtgcattccctgctcaaaagcgccttcaactccatcgccattgaaaaagagaagctgaagcaaatggtctccgaacaggatcatagcaaaggccattccacacagatggctcgtttgcgccagtccctgagtcaggctggagaacagatccacgtgtcacttccactgtctcagcaggtggccaatgagtctcgcttgtcgatgagcgaatctgtgagtgagtttttcgacgctcaggaggtattactgtcagcttcctccagcgagaacgaggcctcagacgacgagagctacatttccgatgtaagcgataacatctctgaagacaacacatcagttgcagataacatctcacggcagatccttaacggcgaactgaccggcggagccttccgcaacggccgacgggcttgccttcccgctccttgtccagacacttctaatataaatttgtggaatattctgcgcaataacatcggcaaagatctatccaaagtcagcatgcctgtggagctgaatgaaccgttaaacactttacagcatctatgtgaggaaatggaatacagtgaattattggataaggcgagtgagaccgatgacccatacgaacggatggtgctggtggcagctttcgctgtaagcgggtattgcagcacctacttcagggctggctctaagccattcaatccagtgcttggggagacctacgagtgtatccgagaagacaagggcttccggttcttttctgaacaggtcagccaccaccccccaataagcgcgtgccactgtgagagtaaaaattttgttttctggcaggatattagatggaaaaacaagttttggggcaaaagcatggagatcttgcccgtcggcaccctcaacgtcatgctgccaaaatacggcgactactatgtttggaataaggtcaccacctgcatccacaatatattaagtggtaggaggtggatagaacactacggggaggttacaatccggaacacaaagagcagcgtgtgtatatgtaagcttaccttcgtcaaagtgaactactggaattccaatatgaatgaagtccaaggggtcgtgattgatcaggagggcaaggccgtgtacaggctgtttggcaagtggcacgagggattgtattgcggcgttgcaccatcagctaagtgcatttggagacccggatctatgcccacaaactatgagctgtattacgggttcacacggttcgcaattgagcttaatgaactcgaccctgtactgaaggacctgctgccacccaccgatgccagattccgcccagaccagagattcctggaagaaggcaatttagaagctgccgctagcgagaagcaacgggtggaagagctgcaacgatcccgccgacgctatatggaagagaataatttggagcatattcctaagttcttcaaaaaagtcatcgacgccaatcaacgcgaggcttgggtgagcaatgatacttactgggaactcaggaaggatcctggtttttcaaaggtcgatagtccggtcctgtggtag

SEQ ID NO: 79177 - DNA, 573 bp, Artificial Sequence
  derived and/or modified sequence
atggatggtaaaatgcaacccaactcttttccatggcagtcaccattgccttgtagcaattccttgcccgcaacttgtactacaggacaatcaaaagtggcagcttggttacaagacagcgaagaaatggatcggtgtgcggaggatctggcccattgtcaatccaatctcgtcgaactgtcgaaactcctgcagaatctggaaatcctacagaggacccagtctgctcccaattttacggacatgcaggcaaactgcgtggacatctcaaaaaaggataagcgcgtgacacgcaggtggcgtaccaaaagtgtgtccaaagataccaaaatccagttacaggtgcctttttcagcaacaatgtccccagttaggctgcacagctctaatccaaacctgtgtgccgatattgaattccagacgccgcctcctaaccatttcggcattcttagcgtattactgcagccttacagtttaaaaaaaaaaaagaaaaaaaagaaaaagtccaccccgtcactggaatctcgcattaaaggtgcggagtacaagattcagagtcttacctcattatag

SEQ ID NO: 79178 - DNA, 2697 bp, Artificial Sequence
  derived and/or modified sequence
atgagcagcgacgagaagggcatcagccccgcccacaagaccagcacccccacccacagaagcgccagcagcagcaccagcagccagagagacagcagacagagcatccacatcctggagagaaccgccagcagcagcaccgagcccagcgtgagcagacagctgctggagcccgagcccgtgcccctgagcaaggaggccgacagctgggagatcatcgagggcctgaagatcggccagaccaacgtgcagaagcccgacaagcacgagggcttcatgctgaagaagagaaagtggcccctgaagggctggcacaagagattcttcgtgctggacaacggcatgctgaagtacagcaaggcccccctggacatccagaagggcaaggtgcacggcagcatcgacgtgggcctgagcgtgatgagcatcaagaagaaggccagaagaatcgacctggacaccgaggagcacatctaccacctgaaggtgaagagccaggactggttcgacgcctgggtgagcaagctgagacaccacagactgtacagacagaacgagatcgtgagaagccccagagacgccagcttccacatcttccccagcaccagcaccgccgagagcagccccgccgccaacgtgagcgtgatggacggcaagatgcagcccaacagcttcccctggcagagccccctgccctgcagcaacagcctgcccgccacctgcaccaccggccagagcaaggtggccgcctggctgcaggacagcgaggagatggacagatgcgccgaggacctggcccactgccagagcaacctggtggagctgagcaagctgctgcagaacctggagatcctgcagagaacccagagcgcccccaacttcaccgacatgcaggccaactgcgtggacatcagcaagaaggacaagagagtgaccagaagatggagaaccaagagcgtgagcaaggacaccaagatccagctgcaggtgcccttcagcgccaccatgagccccgtgagactgcacagcagcaaccccaacctgtgcgccgacatcgagttccagaccccccccagccacctgaccgaccccctggagagcagcaccgactacaccaagctgcaggaggagttctgcctgatcgcccagaaggtgcacagcctgctgaagagcgccttcaacagcatcgccatcgagaaggagaagctgaagcagatggtgagcgagcaggaccacagcaagggccacagcacccagatggccagactgagacagagcctgagccaggccggcgagcagatccacgtgagcctgcccctgagccagcaggtggccaacgagagcagactgagcatgagcgagagcgtgagcgagttcttcgacgcccaggaggtgctgctgagcgccagcagcagcgagaacgaggccagcgacgacgagagctacatcagcgacgtgagcgacaacatcagcgaggacaacaccagcgtggccgacaacatcagcagacagatcctgaacggcgagctgaccggcggcgccttcagaaacggcagaagagcctgcctgcccgccccctgccccgacaccagcaacatcaacctgtggaacatcctgagaaacaacatcggcaaggacctgagcaaggtgagcatgcccgtggagctgaacgagcccctgaacaccctgcagcacctgtgcgaggagatggagtacagcgagctgctggacaaggccagcgagaccgacgacccctacgagagaatggtgctggtggccgccttcgccgtgagcggctactgcagcacctacttcagagccggcagcaagcccttcaaccccgtgctgggcgagacctacgagtgcatcagagaggacaagggcttcagattcttcagcgagcaggtgagccaccacccccccatcagcgcctgccactgcgagagcaagaacttcgtgttctggcaggacatcagatggaagaacaagttctggggcaagagcatggagatcctgcccgtgggcaccctgaacgtgatgctgcccaagtacggcgactactacgtgtggaacaaggtgaccacctgcatccacaacatcctgagcggcagaagatggatcgagcactacggcgaggtgaccatcagaaacaccaagagcagcgtgtgcatctgcaagctgaccttcgtgaaggtgaactactggaacagcaacatgaacgaggtgcagggcgtggtgatcgaccaggagggcaaggccgtgtacagactgttcggcaagtggcacgagggcctgtactgcggcgtggcccccagcgccaagtgcatctggagacccggcagcatgcccaccaactacgagctgtactacggcttcaccagattcgccatcgagctgaacgagctggaccccgtgctgaaggacctgctgccccccaccgacgccagattcagacccgaccagagattcctggaggagggcaacctggaggccgccgccagcgagaagcagagagtggaggagctgcagagaagcagaagaagatacatggaggagaacaacctggagcacatccccaagttcttcaagaaggtgatcgacgccaaccagagagaggcctgggtgagcaacgacacctactgggagctgagaaaggaccccggcttcagcaaggtggacagccccgtgctgtggtag

SEQ ID NO: 79179 - DNA, 573 bp, Artificial Sequence
  derived and/or modified sequence
atggacggcaagatgcagcccaacagcttcccctggcagagccccctgccctgcagcaacagcctgcccgccacctgcaccaccggccagagcaaggtggccgcctggctgcaggacagcgaggagatggacagatgcgccgaggacctggcccactgccagagcaacctggtggagctgagcaagctgctgcagaacctggagatcctgcagagaacccagagcgcccccaacttcaccgacatgcaggccaactgcgtggacatcagcaagaaggacaagagagtgaccagaagatggagaaccaagagcgtgagcaaggacaccaagatccagctgcaggtgcccttcagcgccaccatgagccccgtgagactgcacagcagcaaccccaacctgtgcgccgacatcgagttccagacccccccccccaaccacttcggcatcctgagcgtgctgctgcagccctacagcctgaagaagaagaagaagaagaagaagaagagcacccccagcctggagagcagaatcaagggcgccgagtacaagatccagagcctgaccagcctgtag

SEQ ID NO: 79180 - protein, 672 aa, Artificial Sequence
  derived and/or modified sequence
MQKASVLLFLAWVCFLFYAGIALFTSGFLLTRLELTNHSSCQEPPGPGSLPWGSQGKPGACWMASRFSRVVLVLIDALRFDFAQPQHSHVPREPPVSLPFLGKLSSLQRILEIQPHHARLYRSQVDPPTTTMQRLKALTTGSLPTFIDAGSNFASHAIVEDNLIKQLTSAGRRVVFMGDDTWKDLFPGAFSKAFFFPSFNVRDLDTVDNGILEHLYPTMDSGEWDVLIAHFLGVDHCGHKHGPHHPEMAKKLSQMDQVIQGLVERLENDTLLVVAGDHGMTTNGDHGGDSELEVSAALFLYSPTAVFPSTPPEEPEVIPQVSLVPTLALLLGLPIPFGNIGEVMAELFSGGEDSQPHSSALAQASALHLNAQQVSRFLHTYSAATQDLQAKELHQLQNLFSKASADYQWLLQSPKGAEATLPTVIAELQQFLRGARAMCIESWARFSLSFLLLHLLAAGIPVTTPGPFTVPWQAVSAWALMATQTFYSTGHQPVFPAIHWHAAFVGFPEGHGSCTWLPALLVGANTFASHLLFAVGCPLLLLWPFLCESQGLRKRQQPPGNEADARVRPEEEEEPLMEMRLRDAPQHFYAALLQLGLKYLFILGIQILACALAASILRRHLMVWKVFAPKFIFEAVGFIVSSVGLLLGIALVMRVDGAVSSWFRQLFLAQQR

SEQ ID NO: 79181 - DNA, 2019 bp, Artificial Sequence
  derived and/or modified sequence
atgcagaaggccagcgtgctgctgttcctggcctgggtgtgcttcctgttctacgccggcatcgccctgttcaccagcggcttcctgctgaccagactggagctgaccaaccacagcagctgccaggagccccccggccccggcagcctgccctggggcagccagggcaagcccggcgcctgctggatggccagcagattcagcagagtggtgctggtgctgatcgacgccctgagattcgacttcgcccagccccagcacagccacgtgcccagagagccccccgtgagcctgcccttcctgggcaagctgagcagcctgcagagaatcctggagatccagccccaccacgccagactgtacagaagccaggtggacccccccaccaccaccatgcagagactgaaggccctgaccaccggcagcctgcccaccttcatcgacgccggcagcaacttcgccagccacgccatcgtggaggacaacctgatcaagcagctgaccagcgccggcagaagagtggtgttcatgggcgacgacacctggaaggacctgttccccggcgccttcagcaaggccttcttcttccccagcttcaacgtgagagacctggacaccgtggacaacggcatcctggagcacctgtaccccaccatggacagcggcgagtgggacgtgctgatcgcccacttcctgggcgtggaccactgcggccacaagcacggcccccaccaccccgagatggccaagaagctgagccagatggaccaggtgatccagggcctggtggagagactggagaacgacaccctgctggtggtggccggcgaccacggcatgaccaccaacggcgaccacggcggcgacagcgagctggaggtgagcgccgccctgttcctgtacagccccaccgccgtgttccccagcaccccccccgaggagcccgaggtgatcccccaggtgagcctggtgcccaccctggccctgctgctgggcctgcccatccccttcggcaacatcggcgaggtgatggccgagctgttcagcggcggcgaggacagccagccccacagcagcgccctggcccaggccagcgccctgcacctgaacgcccagcaggtgagcagattcctgcacacctacagcgccgccacccaggacctgcaggccaaggagctgcaccagctgcagaacctgttcagcaaggccagcgccgactaccagtggctgctgcagagccccaagggcgccgaggccaccctgcccaccgtgatcgccgagctgcagcagttcctgagaggcgccagagccatgtgcatcgagagctgggccagattcagcctgagcttcctgctgctgcacctgctggccgccggcatccccgtgaccacccccggccccttcaccgtgccctggcaggccgtgagcgcctgggccctgatggccacccagaccttctacagcaccggccaccagcccgtgttccccgccatccactggcacgccgccttcgtgggcttccccgagggccacggcagctgcacctggctgcccgccctgctggtgggcgccaacaccttcgccagccacctgctgttcgccgtgggctgccccctgctgctgctgtggcccttcctgtgcgagagccagggcctgagaaagagacagcagccccccggcaacgaggccgacgccagagtgagacccgaggaggaggaggagcccctgatggagatgagactgagagacgccccccagcacttctacgccgccctgctgcagctgggcctgaagtacctgttcatcctgggcatccagatcctggcctgcgccctggccgccagcatcctgagaagacacctgatggtgtggaaggtgttcgcccccaagttcatcttcgaggccgtgggcttcatcgtgagcagcgtgggcctgctgctgggcatcgccctggtgatgagagtggacggcgccgtgagcagctggttcagacagctgttcctggcccagcagagatag

SEQ ID NO: 79182 - DNA, 2019 bp, Artificial Sequence
  derived and/or modified sequence
atgcagaaagcctccgttttgctgttcctggcatgggtgtgctttttattctatgctggaatcgccctttttacctccggatttttgctgaccagactggagctgaccaaccattctagttgccaagagcctcctggcccaggctcgcttccttgggggagccaggggaaaccgggagcctgttggatggcgtctagattttccagggtggtcttggtgctgatcgatgcacttcgattcgatttcgctcagcctcagcatagccatgtgcccagggaaccacctgtctcattgcctttcctaggcaaactgtcctcgctgcaaaggatcttagaaattcaaccccaccatgcacggctgtatcggagccaggtggaccctcctacaacaactatgcagaggctgaaggcccttacaactggctctctgccaacatttattgatgccggctcgaatttcgcatcacatgccatcgtcgaggataatctaatcaaacaactcaccagcgccgggaggcgggtggtcttcatgggcgatgatacttggaaggatctctttcctggagcattcagcaaagcatttttctttccatcctttaatgtaagggatcttgatactgtagacaacgggatactcgaacatttgtatccaaccatggactctggcgaatgggacgtgcttatcgcccacttcctcggtgtggaccactgtggacataagcatgggccccatcatcccgaaatggctaagaagctctcccagatggaccaggtgatccagggtctggttgaacggctagaaaacgacacactactagtcgtcgccggcgatcacggcatgacaaccaacggtgatcacggaggcgattccgagctggaggtttctgccgctctgtttctgtatagtcctaccgcagttttcccaagtactcccccggaggaaccggaggtgattcctcaggtttcccttgtgccaacgctggccttacttctgggtctgcccattccctttggaaatattggagaagtgatggccgagctgttcagcggcggcgaagactctcagccccatagctccgccctggcacaggcatccgccttacacctgaacgcacagcaggtcagcaggtttctccatacgtattccgccgccacccaggacctccaggccaaagagctccatcagctacagaaccttttttctaaagcctccgccgattatcagtggctgctccagtctcctaagggcgcagaggccactctgcctacagtcattgccgaactgcagcagtttctcaggggagcacgggccatgtgcatcgaatcctgggcaaggtttagtctaagcttcctcttactgcatcttctcgccgccggcatccccgtcactacccccggaccctttacagttccctggcaggcagttagtgcctgggcacttatggccacccagacattctattctaccggtcaccagccagtgttccctgctatccactggcatgccgccttcgtgggttttcccgagggtcacggaagttgcacttggctccccgcgttgttagtaggggcgaatactttcgcgtctcatctgctattcgcagtcgggtgcccactgctcctgctgtggcccttcctgtgtgagtcgcaagggttgaggaaaagacagcagcccccgggtaatgaagccgatgccagggttcgcccggaggaggaagaggaaccacttatggagatgcggctgagggatgcccctcagcatttctatgccgctctactacagctaggtctcaaatacctgtttattctgggcatccagatcctggcctgtgccctcgcagccagcattctaaggagacacctcatggtgtggaaggttttcgcccccaaattcatcttcgaggcagtggggttcatcgtcagctcagtgggattactgttgggcattgctctcgtcatgagggtagacggtgccgtgtcctcttggtttcgacagctattccttgctcaacagcgctag

SEQ ID NO: 79183 - DNA, 2019 bp, Artificial Sequence
  derived and/or modified sequence
atgcagaaagcctctgtcttacttttcctcgcctgggtttgttttttattttatgccggcatcgccctgtttacatcgggcttcctgctgactcgcttggagctaaccaatcactcctcatgccaggagccacccggaccagggtcactgccatgggggtcccagggcaaaccgggggcctgctggatggcctcacggttttcccgcgtggtgcttgtacttattgatgccctgcgttttgatttcgctcagccccagcactctcacgtgcccagggagccacctgtgagcctcccttttctaggcaaactgagctccctgcagaggatacttgaaatacagcctcatcatgctcgtctttaccggtcacaggtggacccaccaaccacaactatgcagagactgaaagccctgactaccggaagcctgccaacttttatagacgcagggagtaatttcgcctcccatgccattgttgaggacaatctgataaagcagctgaccagcgcgggacgcagggtggtttttatgggtgatgatacatggaaagacttatttcccggggcattttcaaaggccttctttttccccagcttcaacgtgcgtgatctcgacacggtcgataacgggatcttggagcacctttatcccactatggactcgggagagtgggacgtgttaattgcacattttttgggtgtcgatcactgcgggcacaagcatgggccacatcatccggagatggctaagaagctgtctcagatggaccaagttatacaggggctagtggaaaggcttgagaatgatacacttctggtggtggccggcgatcacggcatgacgacgaacggcgaccatgggggggactccgaactggaagtgtccgcagcgttgttcctttacagcccaaccgctgtttttccaagtacgccacctgaggagcccgaggtgatccctcaagtgtccctggtgcccaccctcgctttattgctgggactgcctatcccctttggaaacatcggagaggtcatggctgaactattttccggcggcgaagacagtcagccacacagcagtgctctggcccaggcttccgctctgcacttgaacgcgcaacaggtttctagatttctgcacacttacagtgccgcaacccaggatctgcaagctaaagagctgcaccagctgcagaacttattcagcaaggcctctgctgattatcaatggctgcttcagtctcctaagggagctgaggccacgttaccaaccgtgatcgctgagctgcagcagtttctgcggggagccagggctatgtgcatcgagtcctgggccagatttagcttgagttttctactccttcacctgctggctgcggggataccagttacgacacctggaccattcaccgtcccttggcaggccgtgtccgcatgggcactgatggccactcagacattctactccaccggacaccagcctgtctttccagcgattcactggcacgcagccttcgtggggtttccagaaggtcacgggtcttgtacatggctgccagcactgctagttggcgcaaacacattcgcctctcatcttctcttcgccgttggatgtcccctgctcctcctttggccctttttgtgcgagagccaggggcttcgtaaacgacagcagcctcccggcaacgaggcggatgctcgtgtgaggcccgaagaagaggaggagccgttaatggagatgcgcttaagggatgctccacagcacttctacgctgcgctgttgcaattgggtttgaagtacctgttcatcctggggatccagatcctagcgtgcgccctggcagctagtatcctccggagacacctaatggtgtggaaagtttttgctccaaagtttatttttgaggcggtgggattcattgttagtagcgttgggctcctccttggcatagccctggtgatgcgcgtggacggggccgtcagctcttggtttaggcagctgtttcttgcacagcaaagatag

SEQ ID NO: 79184 - DNA, 2019 bp, Artificial Sequence
  derived and/or modified sequence
atgcagaaggcctctgtgctgctcttcctggcctgggtgtgcttcctgttctacgccggcatcgccctcttcaccagcggcttcctgctgacccggctggagctgaccaaccacagcagctgccaggagcccccaggccctggcagcctgccctggggcagccagggcaagccaggggcctgctggatggccagccgcttcagccgggtggtgctggtgctgattgatgccctgcgctttgattttgcccagccccagcacagccacgtgccccgggagccccctgtgtccctgcccttcctgggcaagctgagcagcctgcagaggatcctggagatccagccccaccacgcccggctgtaccgcagccaggtggacccccccaccaccaccatgcagaggctgaaggccctgaccaccggcagcctgcccaccttcattgatgctggcagcaactttgccagccacgccatcgtggaggacaacctgatcaagcagctgaccagcgctggccggcgggtggtgttcatgggagatgacacctggaaggacctcttccctggggccttcagcaaggccttcttcttccccagcttcaacgtgcgggacctggacacagtggacaatggcatcctggagcacctgtaccccaccatggattctggagagtgggatgtgctgattgcccacttcctgggcgtggaccactgcggccacaagcacggcccccaccaccctgagatggccaagaagctgagccagatggaccaggtgatccagggcctggtggagcggctggagaatgacaccctgctggtggtggccggggaccacggcatgaccaccaatggagaccacggcggggacagcgagctggaggtgtctgctgccctcttcctgtacagccccacagctgtgttccccagcaccccacctgaggagcctgaggtgatcccccaggtgtccctggtgcccaccctggccctgctgctgggcctgcccatcccctttggaaacatcggggaggtgatggccgagctgttctctggaggagaggacagccagccccacagcagcgccctggcccaggccagcgccctgcacctgaatgcccagcaggtgagccgcttcctgcacacctacagcgctgccacccaggacctgcaggccaaggagctgcaccagctgcagaacctcttcagcaaggccagcgctgactaccagtggctgctgcagagccccaagggagctgaggccaccctgcccaccgtgattgctgagctgcagcagttcctgcggggggcccgggccatgtgcatcgagagctgggcccgcttcagcctgtccttcctgctgctgcacctgctggccgccggcatccctgtgaccaccccaggccccttcaccgtgccctggcaggccgtgtctgcctgggccctgatggccacccagaccttctacagcacaggccaccagcctgtgtttcctgccatccactggcacgccgcctttgtgggcttccctgagggccacggcagctgcacctggctgcctgccctgctggtgggcgccaacacctttgccagccacctgctgtttgctgtgggctgccccctgctgctgctgtggcccttcctgtgtgagagccagggcctgaggaagaggcagcagcccccaggaaatgaagcagatgcccgggtgcggcctgaggaggaggaggagcccctgatggagatgaggctgagagatgccccccagcacttctacgccgccctgctgcagctgggcctgaagtacctgttcatcctgggcatccagatcctggcctgtgccctggccgccagcatcctgcggcggcacctgatggtgtggaaggtgtttgcccccaagttcatctttgaagctgtgggcttcatcgtgtcctctgtgggcctgctgctgggcatcgccctggtgatgagggtggatggagctgtgtcctcctggttccggcagctgttcctggcccagcagaggtag

SEQ ID NO: 79185 - DNA, 2019 bp, Artificial Sequence
  derived and/or modified sequence
atgcagaaggccagcgtgctgctgttcctggcctgggtgtgcttccttttttatgccggcattgcattgtttacatctgggttcctccttactcggctcgagcttacaaatcattctagctgccaggaacccccaggtcctggtagtttaccatgggggtcgcagggcaaaccaggagcctgttggatggctagccgattcagtagagtagttctagttctgatcgacgcattacggttcgactttgcccagcctcagcattctcacgtcccccgcgagccacctgtaagcctcccctttttaggcaagttgtcttccctacagagaattctggaaattcagccacaccatgcacgactctacagatcccaagtcgatccgccaaccacaacaatgcagcggctgaaggccctgaccactggttccctgccaaccttcattgacgccggatctaactttgcctcacacgccatcgtcgaggataatctgattaaacaactcactagtgcaggcagacgcgttgtgttcatgggcgacgatacatggaaagatttgtttcctggtgccttttcaaaagccttctttttcccttcctttaacgtgagggacctggacacggtggataatggtattcttgaacatctatatccaacaatggattccggggagtgggacgtgctcattgcacacttcctgggggtggaccactgcggccacaagcacggtccccatcacccggaaatggcaaagaagctttctcagatggatcaggtaatccagggcttggtagaacgactggagaacgatacactccttgtagtggccggggaccacggcatgaccactaacggcgaccacgggggagattccgagttagaagtgagcgctgccctctttctgtactcccctaccgccgttttcccgtccactccacccgaggaacctgaagtgatcccccaggtctcactggtgccaacccttgccctgttgctcggcctacctatacctttcggaaacattggagaagtgatggcagagctgttctccggcggggaagattcccagcctcactctagcgccctagcccaggcatccgccctgcatctgaacgcgcaacaggtttctcgtttcttacacacctattccgccgccacccaggaccttcaggctaaggaactgcaccagctgcagaacctgtttagtaaagctagtgccgactaccagtggctccttcagtctcccaaaggggcggaagccacccttcctactgtgatcgctgaactgcagcaatttttacgtggtgcccgcgccatgtgtatcgaatcctgggcaaggttcagcctgtcttttcttctgctacacctgctggctgcaggcataccagttaccactccaggaccttttacggttccatggcaggccgtctcagcgtgggccctaatggccactcaaacattctatagtacgggccatcagccagtgtttcccgcaattcattggcacgctgcctttgtgggctttcccgagggccacggctcttgtacctggctgccagccctgctggtcggagccaacacattcgcctctcacctgctattcgctgttggatgtccgctgctcctactgtggccttttctgtgcgagtcccagggactgcgtaagcgtcagcagccccccggcaatgaggccgacgcccgcgttcgacctgaggaggaggaggagcctctgatggagatgcgcttacgcgatgccccccaacatttctacgctgcactgctccaacttggccttaaatacctttttatcctgggaatacaaattttggcctgcgctctggccgcgagcatcctcaggaggcacttgatggtttggaaggtcttcgctcccaaatttatatttgaggcggtgggttttatcgtcagctcagtcggactcctgctgggtatcgctttggtcatgagagttgacggcgcagtgagcagttggtttagacagctattcctggctcaacaacggtag

SEQ ID NO: 79186 - DNA, 2019 bp, Artificial Sequence
  derived and/or modified sequence
atgcagaaggccagcgtgctgctgttcctggcctgggtgtgcttcttattttacgctggaatcgccctttttactagtgggtttctgttaactcgcctggagctcaccaaccactcttcctgccaggagcctcccgggcctgggtccctcccctgggggtctcaggggaagcctggcgcctgctggatggcctctcggtttagtcgggttgtgctagttcttatcgatgcgcttcggttcgactttgcccagccccagcacagccacgtgccgcgcgagcccccagtaagtctgccgttcctcggcaagttgtcttcgctacagcgtattcttgagattcaacctcaccatgcaagactctacagaagtcaagtggacccacccaccactacaatgcagcgtcttaaggcactcacgacaggctccctgcctacattcattgatgccggctcaaacttcgcgagccacgcgattgtagaagataacttaataaagcagttaacatctgccggacgacgtgtcgtgttcatgggagacgacacctggaaggatctcttccctggagcatttagcaaggcattcttttttccaagctttaatgtccgagatctggacaccgttgacaatgggatattggaacacttgtatccaaccatggactctggcgagtgggacgtgcttattgcccactttctgggagtggaccattgtgggcacaagcacggtccccaccaccccgagatggccaagaagctctcacagatggatcaagtgatccagggtctggtggagcggctcgagaacgacactctgctggttgtggccggcgaccacggtatgactacaaacggggaccatgggggggacagcgagctcgaagtgtcggcagcactgttcctgtatagtccgaccgccgtgttccccagcaccccacccgaggagcctgaagttatcccccaagtgagcctagtgccaacgttggcccttctcctagggctacccatcccgtttggaaacattggcgaggtgatggcggagctttttagtgggggagaggatagtcagcctcattcaagcgcactcgcccaggcatccgccctgcacctaaatgctcaacaagtctctcgattcctgcacacctatagtgccgctacccaggatttacaggcaaaggaactccaccagcttcagaatctattttccaaagcctctgctgattatcagtggttattgcagtctccaaagggagcagaagccacactgcctactgtaattgcagaactccagcagttcctgagaggagcgagagctatgtgcattgaaagctgggctcgcttcagcctgagcttcctcctgctgcacctgctcgcagccggaattcctgtgaccacccctggaccattcaccgttccctggcaggcggtgtccgcctgggctctcatggccacccaaaccttttatagcaccggccatcaacctgtgttccctgctattcactggcatgcggctttcgttggtttcccggaaggccacggatcgtgcacatggctcccggcgctgttggtgggcgccaacacattcgccagccatctgttgtttgccgtgggatgtcctcttctgctactgtggccgttcctatgcgagtctcagggtctgcgaaagcgccaacagccgcccggcaatgaggccgatgcacgcgtcagacctgaagaagaggaagagccgctgatggagatgcgcctgcgggacgctccccagcatttttacgctgccttactacaactgggtctgaagtacttatttatcctcggtatacagatcctggcttgtgccttggccgccagcatcttgaggcggcatctgatggtgtggaaggtgttcgctccaaagtttattttcgaagctgtgggctttattgtcagctcagttggtctgcttttaggaatcgcccttgtcatgagagtcgacggagctgtctcctcctggtttcgccagttgttcttagcccagcaacgttag

SEQ ID NO: 79187 - DNA, 2588 bp, Artificial Sequence
  derived and/or modified sequence
cctgcggcttcgatccctttccactgggtattgagattggcgaggggagaggcgcagaaacggcgtactctagtgcagtggttcaatctcggctcactgcaacctccgcctccccgattcaagcgattctcctgcgtcagcctccccagtagctgagactacaggatgcagaaagcctcagtgttgctcttcctggcctgggtctgcttcctcttctacgctggcattgccctcttcaccagtggcttcctgctcacccgtttggagctcaccaaccatagcagctgccaagagcccccaggccctgggtccctgccatgggggagccaagggaaacctggggcctgctggatggcttcccgattttcgcgggttgtgttggtgctgatagatgctctgcgatttgacttcgcccagccccagcattcacacgtgcctagagagcctcctgtctccctacccttcctgggcaaactaagctccttgcagaggatcctggagattcagccccaccatgcccggctctaccgatctcaggttgaccctcctaccaccaccatgcagcgcctcaaggccctcaccactggctcactgcctacctttattgatgctggtagtaacttcgccagccacgccatagtggaagacaatctcattaagcagctcaccagtgcaggaaggcgtgtagtcttcatgggagatgatacctggaaagaccttttccctggtgctttctccaaagctttcttcttcccatccttcaatgtcagagacctagacacagtggacaatggcatcctggaacacctctaccccaccatggacagtggtgaatgggacgtgctgattgctcacttcctgggtgtggaccactgtggccacaagcatggccctcaccaccctgaaatggccaagaaacttagccagatggaccaggtgatccagggacttgtggagcgtctggagaatgacacactgctggtagtggctggggaccatgggatgaccacaaatggagaccatggaggggacagtgagctggaggtctcagctgctctctttctgtatagccccacagcagtcttccccagcaccccaccagaggagccagaggtgattcctcaagttagccttgtgcccacgctggccctgctgctgggcctgcccatcccatttgggaatatcggggaagtgatggctgagctattctcagggggtgaggactcccagccccactcctctgctttagcccaagcctcagctctccatctcaatgctcagcaggtgtcccgatttcttcatacctactcagctgctactcaggaccttcaagctaaggagcttcatcagctgcagaacctcttctccaaggcctctgctgactaccagtggcttctccagagccccaagggggctgaggcgacactgccgactgtgattgctgagctgcagcagttcctgcggggagctcgggccatgtgcatcgagtcttgggctcgtttctctctgagcttccttctcctacatctgcttgctgctgggatacccgtcaccacccctggtccttttactgtgccatggcaggcagtctcggcttgggccctcatggccacacagaccttctactccacaggccaccagcctgtctttccagccatccattggcatgcagccttcgtgggattcccagagggtcatggctcctgtacttggctgcctgctttgctagtgggagccaacacctttgcctcccacctcctctttgcagtaggttgcccactgctcctgctctggcctttcctgtgtgagagtcaagggctgcggaagagacagcagcccccagggaatgaagctgatgccagagtcagacccgaggaggaagaggagccactgatggagatgcggctccgggatgcgcctcagcacttctatgcagcactgctgcagctgggcctcaagtacctctttatccttggtattcagattctggcctgtgccttggcagcctccatccttcgcaggcatctcatggtctggaaagtgtttgcccctaagttcatatttgaggctgtgggcttcattgtgagcagcgtgggacttctcctgggcatagctttggtgatgagagtggatggtgctgtgagctcctggttcaggcagctatttctggcccagcagaggtagcctagtctgtgattactggcacttggctacagagagtgcttgagaacagtgtagcctggcctgtacaggtactggatgatctgcaagacaggctcagccatactcttactatcatgcagccaggggccgctgacatctaggacttcattattctataattcaggaccacagtggagtatgatccctaactcctgatttggatgcatctgagggacaaggggggcggtctccgaagtggaataaaataggccgggcgtggtgacttgcacctataatcccagcactttgggaggcagaggtgggaggattgcttggtcccaggagttcaagaccagcctgtggaacataacaagaccccgtctctactatttaaaaaaaagtgtaataaaatgataatataatta

SEQ ID NO: 79188 - DNA, 2439 bp, Artificial Sequence
  derived and/or modified sequence
gcacttccgggtgccattgcaggatgcagaaagcctcagtgttgctcttcctggcctgggtctgcttcctcttctacgctggcattgccctcttcaccagtggcttcctgctcacccgtttggagctcaccaaccatagcagctgccaagagcccccaggccctgggtccctgccatgggggagccaagggaaacctggggcctgctggatggcttcccgattttcgcgggttgtgttggtgctgatagatgctctgcgatttgacttcgcccagccccagcattcacacgtgcctagagagcctcctgtctccctacccttcctgggcaaactaagctccttgcagaggatcctggagattcagccccaccatgcccggctctaccgatctcaggttgaccctcctaccaccaccatgcagcgcctcaaggccctcaccactggctcactgcctacctttattgatgctggtagtaacttcgccagccacgccatagtggaagacaatctcattaagcagctcaccagtgcaggaaggcgtgtagtcttcatgggagatgatacctggaaagaccttttccctggtgctttctccaaagctttcttcttcccatccttcaatgtcagagacctagacacagtggacaatggcatcctggaacacctctaccccaccatggacagtggtgaatgggacgtgctgattgctcacttcctgggtgtggaccactgtggccacaagcatggccctcaccaccctgaaatggccaagaaacttagccagatggaccaggtgatccagggacttgtggagcgtctggagaatgacacactgctggtagtggctggggaccatgggatgaccacaaatggagaccatggaggggacagtgagctggaggtctcagctgctctctttctgtatagccccacagcagtcttccccagcaccccaccagaggagccagaggtgattcctcaagttagccttgtgcccacgctggccctgctgctgggcctgcccatcccatttgggaatatcggggaagtgatggctgagctattctcagggggtgaggactcccagccccactcctctgctttagcccaagcctcagctctccatctcaatgctcagcaggtgtcccgatttcttcatacctactcagctgctactcaggaccttcaagctaaggagcttcatcagctgcagaacctcttctccaaggcctctgctgactaccagtggcttctccagagccccaagggggctgaggcgacactgccgactgtgattgctgagctgcagcagttcctgcggggagctcgggccatgtgcatcgagtcttgggctcgtttctctctgagcttccttctcctacatctgcttgctgctgggatacccgtcaccacccctggtccttttactgtgccatggcaggcagtctcggcttgggccctcatggccacacagaccttctactccacaggccaccagcctgtctttccagccatccattggcatgcagccttcgtgggattcccagagggtcatggctcctgtacttggctgcctgctttgctagtgggagccaacacctttgcctcccacctcctctttgcagtaggttgcccactgctcctgctctggcctttcctgtgtgagagtcaagggctgcggaagagacagcagcccccagggaatgaagctgatgccagagtcagacccgaggaggaagaggagccactgatggagatgcggctccgggatgcgcctcagcacttctatgcagcactgctgcagctgggcctcaagtacctctttatccttggtattcagattctggcctgtgccttggcagcctccatccttcgcaggcatctcatggtctggaaagtgtttgcccctaagttcatatttgaggctgtgggcttcattgtgagcagcgtgggacttctcctgggcatagctttggtgatgagagtggatggtgctgtgagctcctggttcaggcagctatttctggcccagcagaggtagcctagtctgtgattactggcacttggctacagagagtgcttgagaacagtgtagcctggcctgtacaggtactggatgatctgcaagacaggctcagccatactcttactatcatgcagccaggggccgctgacatctaggacttcattattctataattcaggaccacagtggagtatgatccctaactcctgatttggatgcatctgagggacaaggggggcggtctccgaagtggaataaaataggccgggcgtggtgacttgcacctataatcccagcactttgggaggcagaggtgggaggattgcttggtcccaggagttcaagaccagcctgtggaacataacaagaccccgtctctactatttaaaaaaaagtgtaataaaatgataat

SEQ ID NO: 79189 - DNA, 2019 bp, Artificial Sequence
  derived and/or modified sequence
atgcagaaggcctccgtcctgttgttccttgcctgggtctgcttcctcttctacgccggaattgcccttttcacatctggttttctgctcacacggctggaattgactaaccatagcagttgccaggagcctcctggaccgggttccttaccatgggggtctcagggaaaacccggagcatgttggatggcttcgagattcagcagggtcgtgctggtcctcatcgatgctctcagattcgattttgcgcagcctcaacatagtcacgtccctcgagaaccaccggtcagcctacccttcctcggcaagctgagttctctgcaacggatcctggaaattcagcctcatcacgctagactgtatcgatctcaagttgacccacccacaacaacgatgcagcgtctcaaagctttaactacaggctccttgcccaccttcattgatgccggaagcaacttcgcctcacacgccattgtggaagacaatctgatcaagcagttgacatctgcaggcagacgagtcgttttcatgggcgatgacacttggaaggatttgtttcccggtgcctttagtaaagccttcttttttccatcttttaacgtccgcgatttagataccgtagacaatggcatcctggaacacctttacccgacaatggatagcggagaatgggacgtgctgatcgcacacttcttaggagtcgaccattgtgggcataaacacggccctcatcatcccgaaatggccaaaaaactctcccaaatggaccaggtgattcaggggcttgttgaaagactggaaaacgataccttgttagttgtcgccggagaccatggaatgaccactaacggagatcacggcggtgatagcgaattggaagtatcagccgcactgtttctctacagtccaactgctgtcttccctagtactcctcctgaggagccagaagtaattccccaagttagcctggtgccaacactggcattactgttgggtctgccgatcccgttcgggaatattggcgaggtcatggcagagcttttctctggaggcgaggatagccagccccactcctccgcccttgcacaggcatccgctctgcatctcaacgcacagcaggtcagtcggtttcttcatacctacagcgctgcaactcaggatctgcaggcaaaggaacttcatcaattgcaaaacttgttttcgaaagcatctgccgattaccaatggctattgcagagcccaaaaggcgcagaagccactctaccaacagtgatcgctgagcttcagcagttcctgcggggtgcccgagctatgtgcatcgaaagttgggcgaggttttccctgtcattcctgctccttcacctcttggcagccggaattcctgttactacacctgggccttttaccgtgccatggcaagccgttagcgcctgggccctgatggccactcagacgttttacagcaccggccaccagcctgtatttcccgcaattcactggcatgccgcatttgtgggcttccctgagggtcacgggtcatgcacatggttgccagccctcctggtgggtgccaacactttcgcgagccatctgctgtttgcagtgggttgcccgctgctactgctgtggccgtttttgtgtgaatcccaaggccttaggaagcgtcagcaacctccgggtaatgaggctgatgccagggtccgccctgaggaagaggaggaacctctgatggagatgcggctgcgtgatgcacctcagcacttttatgctgccttgctgcagctcgggctgaagtatctttttatcctgggcatccagatcctggcctgcgctctggctgctagtatactgaggagacacctaatggtctggaaagttttcgctcctaagtttatcttcgaggcagtcggtttcatagtgtcctcagttgggctattgctgggcatcgcgctcgtcatgagagtggacggtgccgtttcttcatggttccggcagttgtttttggcacagcagagatag

SEQ ID NO: 79190 - DNA, 2019 bp, Artificial Sequence
  derived and/or modified sequence
atgcagaaggctagcgtcctgctgttcctggcgtgggtgtgcttcctgttctacgctggaatcgctctgtttacatccggcttcctgctgacacgactcgagctgactaaccattcttcatgtcaggaacctccagggcctggttcactcccctggggtagccagggaaaacccggagcttgctggatggcgtccagattctcacgcgttgtcctcgtccttatagatgccctgaggttcgattttgcccagccccagcactcccatgtgcctcgcgagccgcctgtatctctgccatttttgggaaagctttcatccctccagcggattctcgaaatccaaccccaccatgccagattgtacagatcacaggtagatccacctacaaccacaatgcagaggctgaaggctctcacaactggctccctgcctacattcatcgacgctggcagcaactttgccagtcatgcaattgttgaggataatttgataaaacagctcacctcagcgggaaggagagtcgtcttcatgggcgatgatacttggaaggacctgtttcccggagcattcagcaaggcttttttcttcccttcctttaacgtgcgggaccttgataccgtcgataacggtattctcgaacacctgtacccgacaatggattccggagaatgggacgtcctgatcgctcacttcctgggtgtcgaccattgcggccacaaacacggcccacatcaccctgagatggctaagaagctgagtcagatggaccaggtcatccagggtctcgtcgaacgcttggagaatgataccctcctcgtcgtcgcaggtgaccacggcatgaccaccaacggcgatcatggtggagattcagaactggaagtgagtgccgctttgttcctctacagtcctaccgctgtgtttccatccactccacccgaggaaccagaggtcattcctcaggtatcactcgtccccacactggccctgcttttaggattgccaatcccatttgggaacatcggcgaagtcatggctgaattgtttagtggcggagaagattctcagcctcattcgtccgcgctggctcaggctagcgccttgcatctgaacgctcaacaggtgtctcgttttctgcacacatattccgctgccactcaagacctccaggcgaaagaactgcatcagttacagaatttattctcgaaggccagcgccgattatcagtggctcttgcagagccccaagggggcagaagccacactgcctaccgtaatcgcagagttgcagcagttcctgagaggggctcgggcaatgtgcattgagagttgggctcgattctctttgtcttttctgcttcttcacctcctggccgcaggaattcctgtcactactccgggaccgttcaccgttccgtggcaggccgtttctgcctgggcactgatggcgacccagaccttctattcaacaggccatcaaccagtgttccctgcaatccattggcacgcagccttcgtcggcttccctgagggacacggcagttgtacatggctgcctgctctcttagtgggcgcaaataccttcgcttcccatcttcttttcgcagtgggctgtcctctcctcttactctggccttttctgtgtgaatctcagggtctgcgtaagcgccaacagccccctgggaacgaggctgatgcccgagtccgcccagaagaggaagaagagcctctgatggagatgcgactccgagatgcaccacagcacttctacgctgccctgttgcagttggggctgaagtatcttttcatcctggggatccaaatcctggcctgtgccctggccgcttcaattctgcgtcgtcatttgatggtctggaaggtgttcgctcctaagttcatcttcgaagcggtggggttcatagtttctagcgtgggactgcttctggggattgccttggtaatgcgcgtggatggcgctgtctcatcttggttcagacaactgttcctggcccagcaacgatag

SEQ ID NO: 79191 - DNA, 585 bp, Artificial Sequence
  derived and/or modified sequence
gttttaaaagattataagtaaatactctgctctttcaagtgaaccaaacctatcaaacctgtttagaaaataaaccaggcagaataaaatgatgcgaaatgttcattttaaaaaacttcaggatgggcacaaacacacagaagtgggaaatgaataaaagagtattgataaatttttgaaaattgttgaagctgagtaatgggctttcagtccagtgtaaagctgttggagcgcgggagcaaaggtaaagaatgatgtaatgcgctggctgctccaaagcatcttttgttgtggaatggttattccagtcatctctttatgaatcaaatgtgaggggctgctttgtggacggagtcctttgcaagagcacatcaacgggaaagagaaagagacattcacttggagggctcttgctgaaaatgggtttaactctccttttgccagtcaccaccagcctgacctcatacacttttagtacaatggagtggctgagcctttgagcacaccaccattacatcatcgtggcaaattaaagaaggaggtgggaaaagaggacttattgttgtcatggcccatgagatgatt

SEQ ID NO: 79192 - DNA, 1860 bp, Artificial Sequence
  derived and/or modified sequence
atggtttttgcctccgccgagcggccagtgtttacaaaccattttctcgtcgagctacacaaaggcggggaggacaaggcacgacaggttgctgcagagcatggattcggagtgcgcaagctgccctttgcagaaggcctgtatcacttttatcacaatggcctggccaaggcaaagaggagacggtcactgcatcataagcagcagttggagcgcgaccctcgggttaagatggcactgcagcaagagggctttgaccgaaaaaagcgaggatacagagatattaacgaaattgacatcaacatgaatgaccctctgtttacaaagcaatggtatttgatcaacacgggacaggccgatggcacgcctggcctagacctgaacgtggcggaggcttgggagttaggctacacagggaaaggagtcacaatcgggataatggatgatggaattgactacctccatcctgatctggcttccaactacaatgcagaagctagttacgatttctcctcaaatgatccatacccctaccctaggtacaccgatgattggttcaattctcatggtacaagatgtgcaggcgaagtctcagctgcggccaacaacaacatctgtggcgttggcgtagcatataatagcaaagtagcagggatccgcatgttagaccagccctttatgactgatattatagaagcaagttccatttctcacatgccccagctgattgatatatattccgccagttggggcccaaccgacaatggcaagaccgtggacgggcctagagaactgacactccaggctatggccgatggtgtgaataaaggacgcggcgggaagggcagcatctacgtgtgggccagcggggatggaggaagttacgacgattgtaactgcgatggctacgcttcatcaatgtggactatctcgattaactccgccatcaacgatggcagaactgccctgtatgacgaaagctgctcaagtacactggcaagcactttttcgaacggccgcaaaaggaatcccgaggcaggagtagccacaactgacctctacggtaactgtacccttcgacattccggtacctcagcagctgctccggaagctgctggggtcttcgctctggccttagaggccaatctcggcctcacttggagagatatgcagcaccttaccgtgctgacaagcaaaaggaatcagctgcacgacgaggtgcatcagtggagaagaaatggcgtcggcctagagtttaatcatctgttcggttacggtgtcctggatgcaggagccatggttaagatggctaaggactggaaaaccgtccctgagcgatttcactgtgtgggcgggtctgttcaggatcctgagaaaattccatccaccggtaaactggtcttgactctgaccacggacgcttgcgaggggaaggagaatttcgtccggtatctcgagcatgtgcaagctgttattactgtcaatgcgactagaaggggagacctcaatatcaacatgacctctccaatggggacaaagtctattctgctctctaggcgcccccgtgatgacgactccaaggtcggctttgacaagtggccctttatgaccacccatacctggggtgaggatgctaggggaacatggactctggagctcggattcgttggatcggcgccccagaaaggcgtgctaaaagaatggactctgatgctgcatggcacccagagtgccccatatattgaccaggtcgtcagggattatcagtcaaaactggcgatgagtaaaaaggaggaactggaggaggagctggacgaagccgtcgaacgctcattgaaatccatccttaacaagaactag

SEQ ID NO: 79193 - DNA, 1860 bp, Artificial Sequence
  derived and/or modified sequence
atggtgtttgccagcgctgagaggcctgtgttcaccaaccacttcctggtggagctgcacaagggcggggaggacaaggcccggcaggtggccgctgagcacggcttcggcgtgaggaagctgccctttgctgagggcctgtaccacttctaccacaacggcctggccaaggccaagagaagaagaagcctgcaccacaagcagcagctggagcgggacccccgggtgaagatggccctgcagcaggagggctttgacaggaagaagaggggctacagagacatcaatgaaattgacatcaacatgaatgaccccctcttcaccaagcagtggtacctgatcaacacaggccaggctgatggcaccccaggcctggacctgaatgtggccgaggcctgggagctgggctacaccgggaagggcgtgaccatcggcatcatggatgatggcatcgactacctgcacccagacctggccagcaactacaatgctgaggccagctatgacttcagcagcaatgacccctacccctacccccgctacacagatgactggttcaacagccacggcacccgctgtgccggggaggtgtctgctgctgccaacaacaacatctgtggggtgggcgtggcctacaacagcaaggtggccggcatccgcatgctggaccagcccttcatgacagacatcatcgaggccagcagcatcagccacatgccccagctgattgacatctacagcgcctcctggggccccacagacaatggcaagacagtggatggcccccgggagctgaccctgcaggccatggctgatggagtgaacaagggccggggcggcaagggcagcatctacgtgtgggccagcggagatggcggcagctatgatgactgcaactgtgatggctacgccagctccatgtggaccatcagcatcaacagcgccatcaatgatggccgcacagccctgtatgatgagagctgcagcagcaccctggccagcaccttcagcaatggaaggaagaggaaccctgaggccggcgtggccaccacagacctgtatggcaactgcaccctgcggcacagcggcaccagcgctgctgcccctgaggccgccggcgtgtttgccctggccctggaggccaacctgggcctgacctggagggacatgcagcacctgactgtgctgaccagcaagaggaaccagctgcatgatgaggtgcaccagtggaggagaaatggagtgggcctggagttcaaccacctgtttggctatggagtgctggatgctggggccatggtgaagatggccaaggactggaagacagtgcctgagcgcttccactgtgtgggcggctctgtgcaggaccctgagaagatccccagcacaggcaagctggtgctgaccctgaccacagatgcctgtgagggcaaggaaaattttgtgcgctacctggagcacgtgcaggccgtcatcaccgtgaatgccacccggcggggggacctgaacatcaacatgaccagccccatgggcaccaagagcatcctgctgagcagaagaccaagagatgatgacagcaaggtgggctttgacaagtggcccttcatgaccacccacacctggggagaagatgcccggggcacctggaccctggagctgggctttgtgggcagcgccccccagaagggcgtgctgaaggagtggaccctgatgctgcacggcacccagagcgccccctacatcgaccaggtggtgcgggactaccagagcaagctggccatgagcaagaaggaggagctggaggaggagctggatgaagctgtggagaggagcctgaagagcatcctgaacaagaactag

SEQ ID NO: 79194 - DNA, 1860 bp, Artificial Sequence
  derived and/or modified sequence
atggtgttcgccagcgccgagcggcccgtgttcaccaaccacttcctcgttgaactccacaaagggggagaagataaggcccgccaggtagccgccgagcatggcttcggtgttcgtaaactccccttcgccgagggtctctaccacttctatcacaatggtctggcaaaagccaaacgtcgtaggagtctacaccataagcagcagctggagcgcgaccccagagtgaagatggccctccaacaagagggattcgataggaagaaaagaggttatcgagatattaatgagatcgatattaatatgaacgatccgctgttcacaaagcaatggtatctgatcaatactgggcaggccgatggcacgccagggctggatttaaatgtggccgaggcttgggaactgggctatacaggtaagggggttaccatcggaatcatggacgacgggatcgattacctccaccctgatcttgcttcaaactacaatgcggaagcctcgtatgacttcagcagcaacgacccttacccctacccgcgttacacggacgattggtttaacagccatggtacaagatgcgcaggtgaagtctccgcggcagctaataacaacatctgcggcgtaggcgtggcttacaattcaaaggttgccggcatcagaatgctcgatcagccatttatgactgacatcatcgaagcttcttctatttcccacatgccccaactgattgatatctatagtgcttcctggggccccaccgacaatgggaagaccgttgacggccctagggagctgaccttgcaggccatggccgatggcgtgaacaaaggcaggggaggtaagggctctatatatgtatgggcaagtggagatgggggaagctacgatgactgcaattgtgacggctatgccagctccatgtggaccatctccataaactctgccattaatgacgggagaacagccctgtacgacgaaagctgcagcagcacattggctagcacattctctaacggaaggaagaggaatcccgaagccggggtggcaactactgacctctacgggaactgtacacttaggcactcaggcacaagcgccgcagctcccgaggctgcaggcgtgtttgctttggctctagaggccaatctggggctgacatggcgcgacatgcaacatttaactgtattgacctctaagcgcaaccagttacacgatgaagtccaccaatggcggcgtaacggtgtgggactcgagtttaaccatctttttggttatggggttctggacgctggggcgatggtgaagatggccaaagactggaagaccgttccagaacggtttcattgcgtgggtggatcagtgcaggatcctgagaagattccctcaacaggaaaactggtgcttactctgactaccgacgcctgcgagggaaaagagaactttgtgcggtacctggaacatgtgcaggcggtaatcaccgttaacgcgactagaaggggggacctaaatattaacatgactagccctatgggcacaaaaagcatcttgttgtcccggagaccccgtgatgacgactccaaagtagggtttgacaagtggcccttcatgaccactcacacctggggcgaggacgcccgcgggacgtggacactggaattaggctttgtgggctctgctccacaaaaaggagtgctcaaagagtggacactaatgcttcacggcactcagtctgcaccttacattgaccaggtagttcgggattaccaatccaagctggccatgagtaagaaagaagagctggaggaagagcttgatgaagccgtggaaaggagcttgaagagtattctgaacaaaaattag

SEQ ID NO: 79195 - DNA, 1860 bp, Artificial Sequence
  derived and/or modified sequence
atggtttttgcttccgccgagcgtccggtgtttacgaaccattttcttgtggagcttcataaggggggagaggacaaagctaggcaggtggcagccgaacatgggttcggtgtgcgtaaactccccttcgccgaaggtctgtaccatttctatcacaatgggctagctaaggccaaaagaaggaggtcgttgcatcacaaacagcagcttgagagagatcccagggtgaagatggcccttcagcaagaggggttcgatcgcaagaagcgaggttaccgggacatcaacgagattgatattaatatgaatgatcctctgttcacgaagcaatggtacttgataaataccggacaggcagacgggacccccggacttgaccttaacgtggccgaggcctgggaactcggctacaccggaaaaggtgtgacaattggtatcatggacgacgggatcgattatttacatccggacctggcttcaaactataatgccgaggcttcttacgacttcagtagcaatgatccttacccatatccaagatacactgatgactggttcaatagtcatgggaccagatgcgccggagaggtctctgcggctgccaataataacatctgtggggtcggagtggcttataacagcaaagtggcaggcatacggatgctggatcagccattcatgaccgacattatagaggctagcagcatttcccacatgcctcagctaattgatatttactctgctagctgggggcctactgacaatgggaagacagttgacggtcctcgggagctgaccctgcaggccatggctgacggcgtgaacaagggcaggggcggtaagggcagtatatacgtctgggccagtggggacgggggaagttatgacgactgcaactgtgacggctatgcaagcagtatgtggactatcagcatcaattcagcgatcaacgacgggagaactgccttgtatgatgagtcatgcagcagtacgctggctagtacgttcagtaatggcagaaagagaaacccagaggcaggcgtggcaaccactgacctttatgggaactgtacccttaggcatagcgggactagcgcagcagctccagaggcagcaggggtttttgccctggctttggaagctaacctaggcctaacctggcgcgatatgcagcacctgaccgtgttgacgtccaaacgcaatcaactacatgacgaggtccaccagtggagaagaaatggcgtgggtctggaatttaatcacctctttggctacggcgtgcttgacgcgggagcaatggtcaagatggctaaggattggaaaaccgtgccagaaagatttcattgcgtcggtggaagcgtccaagatccagagaaaatcccctcaacgggcaagttggtgttgacactgaccacagacgcatgcgagggaaaggaaaattttgtcagatacttggaacatgtgcaggcagtgattactgtgaatgccacccgcaggggcgatctgaatataaacatgaccagtcctatgggaacaaagtccatcctgctgagtaggaggccgagagatgatgatagcaaagttggctttgacaaatggccatttatgaccacgcatacatggggagaagatgcgagggggacctggactctagaactaggctttgtggggtccgccccacaaaaaggtgtactgaaggagtggaccttgatgcttcacgggactcagagcgctccttacattgaccaagttgtacgcgactaccaaagtaagctcgcaatgtccaagaaggaagaactcgaggaagagttagacgaggctgtcgaaagatctttgaagtcaattctaaataagaattag

SEQ ID NO: 79196 - DNA, 1860 bp, Artificial Sequence
  derived and/or modified sequence
atggtgttcgccagcgccgagagacccgtgttcaccaaccacttcctggtggagctgcacaagggcggcgaggacaaggccagacaggtggccgccgagcacggcttcggcgtgagaaagctgcccttcgccgagggcctgtaccacttctaccacaacggcctggccaaggccaagagaagaagaagcctgcaccacaagcagcagctggagagagaccccagagtgaagatggccctgcagcaggagggcttcgacagaaagaagagaggctacagagacatcaacgagatcgacatcaacatgaacgaccccctgttcaccaagcagtggtacctgatcaacaccggccaggccgacggcacccccggcctggacctgaacgtggccgaggcctgggagctgggctacaccggcaagggcgtgaccatcggcatcatggacgacggcatcgactacctgcaccccgacctggccagcaactacaacgccgaggccagctacgacttcagcagcaacgacccctacccctaccccagatacaccgacgactggttcaacagccacggcaccagatgcgccggcgaggtgagcgccgccgccaacaacaacatctgcggcgtgggcgtggcctacaacagcaaggtggccggcatcagaatgctggaccagcccttcatgaccgacatcatcgaggccagcagcatcagccacatgccccagctgatcgacatctacagcgccagctggggccccaccgacaacggcaagaccgtggacggccccagagagctgaccctgcaggccatggccgacggcgtgaacaagggcagaggcggcaagggcagcatctacgtgtgggccagcggcgacggcggcagctacgacgactgcaactgcgacggctacgccagcagcatgtggaccatcagcatcaacagcgccatcaacgacggcagaaccgccctgtacgacgagagctgcagcagcaccctggccagcaccttcagcaacggcagaaagagaaaccccgaggccggcgtggccaccaccgacctgtacggcaactgcaccctgagacacagcggcaccagcgccgccgcccccgaggccgccggcgtgttcgccctggccctggaggccaacctgggcctgacctggagagacatgcagcacctgaccgtgctgaccagcaagagaaaccagctgcacgacgaggtgcaccagtggagaagaaacggcgtgggcctggagttcaaccacctgttcggctacggcgtgctggacgccggcgccatggtgaagatggccaaggactggaagaccgtgcccgagagattccactgcgtgggcggcagcgtgcaggaccccgagaagatccccagcaccggcaagctggtgctgaccctgaccaccgacgcctgcgagggcaaggagaacttcgtgagatacctggagcacgtgcaggccgtgatcaccgtgaacgccaccagaagaggcgacctgaacatcaacatgaccagccccatgggcaccaagagcatcctgctgagcagaagacccagagacgacgacagcaaggtgggcttcgacaagtggcccttcatgaccacccacacctggggcgaggacgccagaggcacctggaccctggagctgggcttcgtgggcagcgccccccagaagggcgtgctgaaggagtggaccctgatgctgcacggcacccagagcgccccctacatcgaccaggtggtgagagactaccagagcaagctggccatgagcaagaaggaggagctggaggaggagctggacgaggccgtggagagaagcctgaagagcatcctgaacaagaactag

SEQ ID NO: 79197 - protein, 603 aa, Artificial Sequence
  derived and/or modified sequence
MKGGCVSQWKAAAGFLFCVMVFASAERPVFTNHFLVELHKGGEDKARQVAAEHGFGVRKVKMALQQEGFDRKKRGYRDINEIDINMNDPLFTKQWYLINTGQADGTPGLDLNVAEAWELGYTGKGVTIGIMDDGIDYLHPDLASNYNAEASYDFSSNDPYPYPRYTDDWFNSHGTRCAGEVSAAANNNICGVGVAYNSKVAGIRMLDQPFMTDIIEASSISHMPQLIDIYSASWGPTDNGKTVDGPRELTLQAMADGVNKGRGGKGSIYVWASGDGGSYDDCNCDGYASSMWTISINSAINDGRTALYDESCSSTLASTFSNGRKRNPEAGVATTDLYGNCTLRHSGTSAAAPEAAGVFALALEANLGLTWRDMQHLTVLTSKRNQLHDEVHQWRRNGVGLEFNHLFGYGVLDAGAMVKMAKDWKTVPERFHCVGGSVQDPEKIPSTGKLVLTLTTDACEGKENFVRYLEHVQAVITVNATRRGDLNINMTSPMGTKSILLSRRPRDDDSKVGFDKWPFMTTHTWGEDARGTWTLELGFVGSAPQKGVLKEWTLMLHGTQSAPYIDQVVRDYQSKLAMSKKEELEEELDEAVERSLKSILNKN

SEQ ID NO: 79198 - DNA, 1812 bp, Artificial Sequence
  derived and/or modified sequence
atgaaaggcgggtgtgtctcgcagtggaaggctgcggctgggtttctcttctgtgtcatggtgttcgcttccgctgagcgaccggtgtttactaaccatttcttagtcgagctccacaaggggggtgaggacaaagctcgccaggttgctgctgagcatgggttcggtgtgcggaaagttaagatggcactgcaacaagagggattcgatcgcaaaaagaggggttatcgagacataaacgaaatcgatatcaacatgaacgaccctctttttacgaaacagtggtatctgattaataccggccaggccgacgggacacccggattggacctcaacgtggccgaggcatgggagctgggctacaccggcaaaggtgtaactattggaatcatggatgatggcatcgactaccttcacccagatttagctagcaactataatgctgaggcatcatacgatttctcgtctaacgatccctatccgtatccaaggtacactgacgattggtttaatagtcatggaacgcgctgcgccggggaggtaagcgcagctgccaataacaatatctgtggcgtgggagttgcttacaattccaaagtggcaggtattcgaatgttggaccagccattcatgactgatataatcgaagcctcctccatctctcacatgccacaactgatagacatctattctgcctcatggggccccaccgataatgggaaaactgtggacggcccacgagagttgaccttacaagccatggcagacggagttaacaaaggacgcggggggaagggatctatttacgtctgggcttctggcgatgggggctcatatgatgattgcaactgtgacggctatgcaagctctatgtggacaatatcaatcaattctgcaatcaatgacgggcggaccgctctctacgacgagagttgctccagtacactcgcttccacttttagcaatgggagaaaacgcaatccagaggccggggtcgcaactaccgatctgtatgggaactgcactctccgacatagtggcacctccgccgctgctccagaggccgccggcgtgtttgcattggcactggaggcaaacctcggactgacttggagagacatgcaacacctgacagtgctcacatccaagagaaaccagctgcacgacgaagttcatcagtggcgacgcaacggggttggcctcgaatttaaccacctcttcggttatggagttcttgacgctggcgccatggtcaagatggcaaaagattggaaaacagtcccagaacgcttccactgcgtgggtggaagcgtgcaggacccggaaaagatcccctctactgggaagctggttttaacccttacaacagacgcatgcgaggggaaagaaaatttcgttcgatacctcgagcacgtgcaggccgtgattactgtcaatgcaacacggcgcggcgatctgaatataaatatgaccagtcccatgggaaccaaatccatccttctttccagacgacctcgcgacgacgactccaaggtcggcttcgacaaatggccctttatgactacccacacctggggcgaagatgcacggggcacatggaccctcgagcttgggtttgtcggaagcgcacctcagaagggcgtgctcaaagagtggaccctgatgctacacggcacccagagcgcgccctacatcgatcaagttgtgagagactaccagagcaagttggcaatgagcaagaaagaggagcttgaagaagaactcgatgaagcagtcgagcggtcacttaagagtattttgaataaaaactag

SEQ ID NO: 79199 - DNA, 1812 bp, Artificial Sequence
  derived and/or modified sequence
atgaagggcggctgtgtgtcccagtggaaggctgctgctggcttcctgttctgtgtgatggtgtttgccagcgctgagaggcctgtgttcaccaaccacttcctggtggagctgcacaagggaggagaggacaaggcccggcaggtggccgctgagcacggctttggagtgaggaaggtgaagatggccctgcagcaggagggctttgacaggaagaagaggggctacagagacatcaatgaaattgacatcaacatgaatgaccccctcttcaccaagcagtggtacctgatcaacacaggccaggctgatggcaccccaggcctggacctgaatgtggccgaggcctgggagctgggctacaccgggaagggcgtgaccatcggcatcatggatgatggcatcgactacctgcacccagacctggccagcaactacaatgctgaggccagctatgacttcagcagcaatgacccctacccctacccccgctacacagatgactggttcaacagccacggcacccgctgtgccggggaggtgtctgctgctgccaacaacaacatctgtggggtgggcgtggcctacaacagcaaggtggccggcatccgcatgctggaccagcccttcatgacagacatcatcgaggccagcagcatcagccacatgccccagctgattgacatctacagcgcctcctggggccccacagacaatggcaagacagtggatggcccccgggagctgaccctgcaggccatggctgatggagtgaacaagggccggggcggcaagggcagcatctacgtgtgggccagcggagatggcggcagctatgatgactgcaactgtgatggctacgccagctccatgtggaccatcagcatcaacagcgccatcaatgatggccgcacagccctgtatgatgagagctgcagcagcaccctggccagcaccttcagcaatggaaggaagaggaaccctgaggccggcgtggccaccacagacctgtatggcaactgcaccctgcggcacagcggcaccagcgctgctgcccctgaggccgccggcgtgtttgccctggccctggaggccaacctgggcctgacctggagggacatgcagcacctgactgtgctgaccagcaagaggaaccagctgcatgatgaggtgcaccagtggaggagaaatggagtgggcctggagttcaaccacctgtttggctatggagtgctggatgctggggccatggtgaagatggccaaggactggaagacagtgcctgagcgcttccactgtgtgggcggctctgtgcaggaccctgagaagatccccagcacaggcaagctggtgctgaccctgaccacagatgcctgtgagggcaaggaaaattttgtgcgctacctggagcacgtgcaggccgtcatcaccgtgaatgccacccggcggggggacctgaacatcaacatgaccagccccatgggcaccaagagcatcctgctgagcagaagaccaagagatgatgacagcaaggtgggctttgacaagtggcccttcatgaccacccacacctggggagaagatgcccggggcacctggaccctggagctgggctttgtgggcagcgccccccagaagggcgtgctgaaggagtggaccctgatgctgcacggcacccagagcgccccctacatcgaccaggtggtgcgggactaccagagcaagctggccatgagcaagaaggaggagctggaggaggagctggatgaagctgtggagaggagcctgaagagcatcctgaacaagaactag

SEQ ID NO: 79200 - DNA, 1812 bp, Artificial Sequence
  derived and/or modified sequence
atgaagggcggctgcgtgagccagtggaaggccgccgccggcttcctcttttgtgtgatggtctttgccagcgccgagagaccagtttttactaaccatttcttggtcgaactgcacaagggcggggaagataaggcaagacaggtggcagcggaacacggcttcggggtgaggaaagttaagatggcgcttcaacaagaaggttttgataggaagaaacggggctacagggacattaacgagatagacattaatatgaacgacccccttttcactaagcagtggtatttgatcaatacaggacaggccgatggcacacctggtctggatctgaatgtcgccgaggcatgggagcttggctacactggcaagggagttacaattggtataatggatgacggtatagactacctgcaccccgaccttgcgagcaactataacgcagaggctagctacgacttctcctctaacgatccttacccctaccctaggtatacagacgattggtttaatagccacggcaccagatgcgcaggggaggtctctgcagccgccaataataatatttgtggcgtgggcgtggcctataatagcaaggtagccggaatccggatgctcgatcagccttttatgacagatatcatagaagccagctcgatctcgcacatgcctcaattgatcgacatctactccgctagttgggggcccaccgataatggaaagactgtggacggtcctagagagctgacgttgcaagcgatggccgatggggtcaacaagggccgaggaggcaaaggatcaatctacgtgtgggcttccggtgatggcgggtcatatgacgactgtaattgcgatggttacgccagtagcatgtggactattagcatcaatagcgccataaacgacggacggactgcgctgtatgacgagagttgtagctcaacactggcgtctaccttctctaacggccgaaaaagaaatcccgaggctggcgtagccactaccgacctgtacgggaactgcacactcagacatagcgggacaagcgccgccgctccagaagccgccggagtcttcgccctcgcactggaggctaacttgggtctaacatggcgtgacatgcaacatctgaccgtgctcacatctaagaggaatcagttgcacgacgaagtccaccaatggcgccgcaatggcgtgggtctggagttcaaccacctgtttggctatggcgtgcttgacgctggtgccatggtaaagatggccaaggactggaaaaccgtgccggaaaggtttcattgtgtcggagggtcagtgcaggaccctgaaaagattcccagtacaggaaagctggtgttgacgctgacaacagacgcctgtgaaggaaaggaaaattttgtgcgatatctagaacatgtccaggcagtgattaccgtgaatgccactagaagaggagacctcaacattaatatgacaagtccaatgggtacaaagtcgattttgctgagcaggcgacccagggatgatgactcaaaggtaggctttgacaagtggccctttatgacaacccatacttggggcgaagatgctcggggcacgtggactcttgaactcggctttgtggggtcggccccgcaaaagggcgtcttgaaggagtggacgctgatgctgcatggaacacagtcggcaccatatattgaccaggtggttcgggactatcaatctaaactggccatgtcgaaaaaggaggagctggaagaggaactggacgaggcggtagagagaagtcttaaatctatcctgaacaaaaattag

SEQ ID NO: 79201 - DNA, 1812 bp, Artificial Sequence
  derived and/or modified sequence
atgaaggggggttgcgtgtcacagtggaaagccgcagctgggtttctgttctgtgtaatggtgtttgcttctgccgagagaccggttttcactaaccactttttggtggagttacacaagggaggtgaagacaaagctcgccaggtggccgctgagcacggatttggagtaagaaaagttaaaatggccctgcagcaggagggcttcgaccggaagaagagggggtaccgtgacatcaatgaaattgacatcaacatgaacgacccgctctttacaaaacagtggtatctcatcaacactgggcaggccgatgggactcctgggcttgatctgaatgtggccgaagcttgggaactgggctacactggtaagggagttaccatcggcatcatggatgacggaatagattatctccaccctgatctggcaagtaactacaacgcagaagcgagctatgatttcagctctaatgacccatacccatacccccgatataccgatgactggtttaatagccacggaacacggtgcgccggtgaggttagtgcagctgcaaacaacaatatatgtggcgtgggtgttgcttacaattccaaagtggcaggtataaggatgcttgaccaaccgtttatgactgatattatcgaggcttcaagcatcagtcatatgccccagctgatcgacatttacagcgccagctggggtcccactgacaacggcaagacagttgacgggccacgggagttgacactgcaagctatggcggacggagttaacaaaggcaggggcggaaagggctcaatttatgtctgggcaagcggggacggtggaagctacgatgactgcaattgcgacggatacgcatcttcaatgtggaccatctccattaactccgctattaatgatggcaggaccgcgttgtacgatgagtcttgctcgagcactctagcctccacattctcaaatggcaggaagaggaacccagaagctggggtggcaacaacggacctctacgggaattgtacactccggcattcagggacttccgctgcagcccctgaagcagctggagtgttcgcactggctcttgaagccaatctggggctgacctggcgcgacatgcagcacctcaccgtgctcaccagcaagagaaatcagctgcacgatgaggttcatcaatggaggcgcaatggagtgggactcgaatttaatcacctcttcggatacggcgtattagacgctggtgcgatggtcaagatggctaaagactggaagaccgtgcccgaaagatttcactgtgtcggcggttccgtccaggacccagaaaagatcccttcaactggtaagctggtactcacactgacaacagacgcgtgcgaagggaaagaaaatttcgtgcggtacctcgagcatgtgcaggctgtgattacagtaaacgccacacgccgtggcgacctcaatattaacatgacttccccaatgggcacgaagtcaatacttctgagcagacggcctcgggatgatgattcaaaagtcggctttgataaatggccctttatgaccacccacacttggggagaggatgcgcgtggcacctggaccctcgagctgggctttgtcggctctgcgcctcagaaaggtgtgctgaaggagtggaccctcatgcttcacgggacccagtctgcgccttacatagaccaggtggttcgggattatcagtctaagctcgccatgtcaaagaaggaggagctggaagaagaactggatgaggctgtggagagatcgcttaagtctatactgaacaaaaactag

SEQ ID NO: 79202 - DNA, 2275 bp, Artificial Sequence
  derived and/or modified sequence
acacacagctccccacattcgcacccctgcccgcgcgccgggccgcctgactgcacggcttcccctccagccagatgctggagaacacacactgattcgctgctttccaagaccctgttcagtctctttctctatacaaagatttttttaaaaactatatataagaattctttatttgcaccctccctccgagtcccctgctccgccagcctgcgcgcctcctagcaccacttttcactcccaaagaaggatgaagggtggttgtgtctcccagtggaaggcggccgccgggttcctcttctgtgtcatggtttttgcatctgctgagcgaccggtcttcacgaatcattttcttgtggagttgcataaagggggagaggacaaagctcgccaagttgcagcagaacacggctttggagtccgaaaggtaaagatggctttgcagcaggaaggatttgaccgaaaaaagcgaggttacagagacatcaatgagatcgacatcaacatgaacgatcctctttttacaaagcagtggtatctgatcaatactgggcaagctgatggcactcctggccttgatttgaatgtggctgaagcctgggagctgggatacacagggaaaggtgttaccattggaattatggatgatgggattgactatctccacccggacctggcctccaactataatgccgaagcaagttacgacttcagcagcaacgacccctatccttaccctcggtacacagatgactggtttaacagccacgggacccgatgtgcaggagaagtttctgctgccgccaacaacaatatctgtggagttggagtagcatacaactccaaggttgcaggcatccggatgctggaccagccattcatgacagacatcatcgaggcctcctccatcagtcatatgccacagctgattgacatctacagcgccagctggggccccacagacaacggcaagacagtggatgggccccgggagctcacgctgcaggccatggccgatggcgtgaacaagggccgcggcggcaaaggcagcatctacgtgtgggcctccggggacggcggcagctatgacgactgcaactgcgacggctacgcctccagcatgtggaccatctccatcaactcagccatcaacgacggcaggactgccctgtacgacgagagctgctcttccaccttggcttccaccttcagcaacgggaggaaaaggaaccccgaggccggtgtggcaaccacagatttgtacggcaactgcactctgaggcattctgggacatctgcagctgcccccgaggcagctggtgtgtttgcactggctctggaggctaacctgggtctgacctggcgggacatgcagcatctgactgtgctcacctccaaacggaaccagcttcacgacgaggtccatcagtggcggcgcaatggggtcggcctggaatttaatcacctctttggctacggggtccttgatgcaggtgccatggtgaaaatggctaaagactggaaaaccgtgcctgagagattccactgtgtgggaggctccgtgcaggaccctgagaaaataccatccactggcaagttggtgctgacactcacaaccgacgcctgtgaggggaaggaaaattttgtccgctacctggagcatgtccaggctgtcatcacggtcaacgcaaccagaagaggagacctgaacatcaacatgacttcccctatgggcaccaagtccattttgctgagccggcgtccaagggatgacgactccaaggtgggctttgacaagtggcctttcatgaccactcacacgtggggggaagacgcccgaggcacctggaccctggagctgggatttgtcggcagcgccccgcagaagggggtgctgaaggagtggaccctgatgctgcatggcactcagagtgccccgtacatcgaccaggtggtgcgggattaccagtccaagttggccatgtccaagaaagaggagctggaggaagagctggacgaagccgtggagagaagcctgaaaagcatccttaacaagaactagcgctgcacatccgcctttcccaccgccctccctccccagctccgcctctgtcctcgctccacgtttcaggcaggcacctagcaattccatcacccgtacaggcaattccgtcttcttaatctgaagcttcactcactgtcaatgattattttcattacaatggaaacaatcttttttactctatgccccaaatatagcgttcccaacaacatc

SEQ ID NO: 79203 - DNA, 1812 bp, Artificial Sequence
  derived and/or modified sequence
atgaagggcggctgcgtgagccagtggaaggccgccgccggcttcctgttctgcgtgatggtgttcgccagcgccgagagacccgtgttcaccaaccacttcctggtggagctgcacaagggcggcgaggacaaggccagacaggtggccgccgagcacggcttcggcgtgagaaaggtgaagatggccctgcagcaggagggcttcgacagaaagaagagaggctacagagacatcaacgagatcgacatcaacatgaacgaccccctgttcaccaagcagtggtacctgatcaacaccggccaggccgacggcacccccggcctggacctgaacgtggccgaggcctgggagctgggctacaccggcaagggcgtgaccatcggcatcatggacgacggcatcgactacctgcaccccgacctggccagcaactacaacgccgaggccagctacgacttcagcagcaacgacccctacccctaccccagatacaccgacgactggttcaacagccacggcaccagatgcgccggcgaggtgagcgccgccgccaacaacaacatctgcggcgtgggcgtggcctacaacagcaaggtggccggcatcagaatgctggaccagcccttcatgaccgacatcatcgaggccagcagcatcagccacatgccccagctgatcgacatctacagcgccagctggggccccaccgacaacggcaagaccgtggacggccccagagagctgaccctgcaggccatggccgacggcgtgaacaagggcagaggcggcaagggcagcatctacgtgtgggccagcggcgacggcggcagctacgacgactgcaactgcgacggctacgccagcagcatgtggaccatcagcatcaacagcgccatcaacgacggcagaaccgccctgtacgacgagagctgcagcagcaccctggccagcaccttcagcaacggcagaaagagaaaccccgaggccggcgtggccaccaccgacctgtacggcaactgcaccctgagacacagcggcaccagcgccgccgcccccgaggccgccggcgtgttcgccctggccctggaggccaacctgggcctgacctggagagacatgcagcacctgaccgtgctgaccagcaagagaaaccagctgcacgacgaggtgcaccagtggagaagaaacggcgtgggcctggagttcaaccacctgttcggctacggcgtgctggacgccggcgccatggtgaagatggccaaggactggaagaccgtgcccgagagattccactgcgtgggcggcagcgtgcaggaccccgagaagatccccagcaccggcaagctggtgctgaccctgaccaccgacgcctgcgagggcaaggagaacttcgtgagatacctggagcacgtgcaggccgtgatcaccgtgaacgccaccagaagaggcgacctgaacatcaacatgaccagccccatgggcaccaagagcatcctgctgagcagaagacccagagacgacgacagcaaggtgggcttcgacaagtggcccttcatgaccacccacacctggggcgaggacgccagaggcacctggaccctggagctgggcttcgtgggcagcgccccccagaagggcgtgctgaaggagtggaccctgatgctgcacggcacccagagcgccccctacatcgaccaggtggtgagagactaccagagcaagctggccatgagcaagaaggaggagctggaggaggagctggacgaggccgtggagagaagcctgaagagcatcctgaacaagaactag

SEQ ID NO: 79204 - protein, 716 aa, Artificial Sequence
  derived and/or modified sequence
MATSHRVAKLVASSLQTPVNPITGARVAQYEREDPLKALAAAEAILEDEEEEKVAQPAGASADLNTSFSGVDEHAPISYEDFVNFPDIHHSNEEYFKKVEELKAAHIETMAKLEKMYQDKLHLKEVQPVVIREDSLSDSSRSVSEKNSYHPVSLMTSFSEPDLGQSSSLYVSSSEEELPNLEKEYPRKNRMMTYAKELINNMWTDFCVEDYIRCKDTGFHAAEKRRKKRKEWVPTITVPEPFQMMIREQKKKEESMKSKSDIEMVHKALKKQEEDPEYKKKFRANPVPASVFLPLYHDLVKQKEERRRSLKEKSKEALLASQKPFKFIAREEQKRAAREKQLRDFLKYKKKTNRFKARPIPRSTYGSTTNDKLKEEELYRNLRTQLRAQEHLQNSSPLPCRSACGCRNPRCPEQAVKLKCKHKVRCPTPDFEDLPERYQKHLSEHKSPKLLTVCKPFDLHASPHASIKREKILADIEADEENLKETRWPYLSPRRKSPVRCAGVNPVPCNCNPPVPTVSSRGREQAVRRSLEEKKMLEEERNRILTKQKQRMKELQKLLTTRAKAYDSHQSLAQISKSRVKCLRKSEKERMREYQRELEEREEKLKKRPLLFERVAQKNARMAAEKHYSNTLKALGISDEFVSKKGQSGKVLEYFNNQETKSVTEDKESFNEEEKIEERENGEENYFIDTNSQDSYKEKDEANEESEEEKSVEESH

SEQ ID NO: 79205 - DNA, 3762 bp, Artificial Sequence
  derived and/or modified sequence
ggaggcggggcgatggccacctcccaccgagtggcgaagctggtggcctccagtctccagaccccggtaaatcccatcactggagcgcgggtcgcccagtacgaacgcgaagaccccttaaaggccctggcggcagcggaggcgatcttggaggacgaagaggaggagaaagtggctcagcccgctggggcatcggctgatttgaacaccagcttttctggggtggatgaacatgcaccgataagctatgaggactttgtgaactttcctgatattcaccactctaatgaggagtatttcaagaaagtagaagagttgaaggctgcccacatagaaactatggcaaaattagagaaaatgtaccaggataaattacatttaaaggaagttcagccagtggtcatcagagaagactctcttagtgactcttccagatctgtatcagaaaagaactcctatcaccctgtctcattaatgacatcattttcagagcctgatttaggccagtcttcctccttgtatgtgtcctcctctgaagaggagttacccaacctagaaaaagagtatcctaggaaaaacagaatgatgacctatgctaaggagctcatcaacaatatgtggacagacttttgtgttgaggattatattcgctgtaaagatactggcttccatgcagctgaaaaaagaaggaagaaacgaaaagaatgggtgcccacaattacagtaccggagccttttcaaatgatgataagagaacagaagaaaaaagaagagtccatgaaatctaaatcagatatcgaaatggtacataaagcgctcaaaaaacaagaagaggatccagagtataagaagaaattccgagccaatccagttcctgcatctgtctttctccccctttaccatgatttagtcaagcaaaaagaagaacggagaaggtctctgaaggagaaaagcaaagaagctcttttggcctcacaaaagccatttaaatttatagcaagggaggaacagaagcgagcagcccgggaaaagcagctgagagactttcttaagtataaaaagaaaacaaatcgatttaaagccagacccattcctcgatctacttatggttcaactaccaatgacaagttaaaagaagaagagctctatcgaaaccttaggacacagctgagagcccaggagcatttacagaactcatctcctctgccttgtaggtcagcttgtggatgcaggaaccccaggtgtcctgaacaggctgtaaagttgaagtgtaaacacaaggttaggtgcccaactcctgattttgaggaccttcctgagagataccagaaacacctctcagaacacaagtctccaaaactcttaacagtgtgtaaaccatttgatcttcatgcatctccacatgcatctattaaaagagaaaaaattttggcagacatcgaagcagatgaagaaaatttaaaagaaacacgttggccttatttgtctccaaggcgtaagtcaccagtaagatgtgcaggtgtaaaccctgtgccttgtaactgcaaccctcccgtgcccacggtatcttccagaggacgagaacaagccgtaaggagatcacttgaggaaaagaaaatgttggaagaagagagaaatcggatcctaactaaacagaagcaaagaatgaaagaattgcagaaactcctgacaacccgggctaaggcttatgactcacatcaaagtttagctcaaatatctaaatccagagtaaaatgtctcagaaagagcgaaaaggaaaggatgagagaataccaacgagaactagaagaaagagaagaaaaattaaaaaagaggccactgctatttgaaagagttgctcagaaaaatgcaagaatggcagcagaaaagcattattctaataccctaaaagcactaggaatatctgatgagtttgtttcaaagaaaggccaaagtggaaaagtacttgagtacttcaacaatcaagagacgaaaagtgtcactgaagacaaagaaagctttaatgaagaagaaaaaatagaagaaagagagaatggggaagaaaattattttattgataccaacagccaggattcttacaaggaaaaagatgaagccaatgaggaaagtgaagaagagaaatctgttgaagaatcacactgaatcatcaaggtctcctctctatgcccttgctgttgtttgcagcgtcagggtgtcagcagccgcatttgtgtttagaacatctgtggggacgcttctgatatgtgcagggctgttgatcaaagtcatctgtagcctgaaaagcctgaatccagctgattggtcatttgatcagttagagtaaggctttgcctattcagttttaaaaatcattgtgtattatctgtttgcaactatgattttgtatttttaaaaagtgagaaccacagctgtcacaaactgattagttataaaaatatacattatttcattaattttactggaaaaaatggcttagtattgaaaggagagagaagtattggtctttggtggtttactttttaaaaattttggaaagtgtgaatcaataactatttttaattatactatttgcccattctttttctctgcagtgcatttcacagaataaatcctctaacttgttttgctgctctgagccatttttaaaagtatagaaaaaacgccgggtatggtggctcatgcctgtaatcccagcattttgggaggccgagacgggtggatcacgaggtcaggagatcgagaccatcctggctaacacgatgaaaccccgtctctactaaaaatacaaaaaattagccaggcgtggtggtgggcgcctgtagtcccagctacttgggaggcagaggcaggagaatggcatgaacccaggaggcagagcttgcagtgagccgagatcgcgccactgcactccagcttgggcaacagagcgagactccgtctccaaaaaaaaaaaaaaagtatagaaaaaaatggatacttgcaaatttacatttatttttgcactgagagtttactgttaaattgtctacaccatcatccctttttctttttatccttagttctagtccaaattatttttgatttgtaaattattaggaaagtttttatactagtttttttaaccctatgtattattacagatggaagtaattatggcatgtgtgagttataatctaaattaggggcaagtatccctttttttatatgatgaaattgtgcataataacttggctagggcaagtctccaaagtaattcagatttaactcttcactgctagacccagttgtgttcaactttttacatattattgccaacacactttatctctctgtgtacagtgttaatctgattttataaatctatatttttttctttaagcaaatttttgttttaaaatttgaagccaatcataaagataatatagcataagacattttcttttctaaaaacaatcagcatcattttaaaaggatgaactaatacaggtgtatgtaatagcagtgtttccaaactggcaatttatgctttaaatttaaaaataaggtcatttttctccatcaggggcaaatgtttacttgtaattttcttcctacagttcgtgttaaattactttttactattattatattgtaaactccttgggatttggcaccatttaaaaattcatctttgtattcccttaatatttggaacagtattgtacatatggtaggtacttaataaaggtttgaatgagtgtg

SEQ ID NO: 79206 - DNA, 2151 bp, Artificial Sequence
  derived and/or modified sequence
atggctacgagccaccgagtagcgaagttggtggcttcttcactacagactcctgtgaacccaatcactggggcacgtgtggcccagtacgaaagggaggaccccctcaaggccctggcggccgccgaggcgatcctggaggacgaagaagaggaaaaagtggcccagcccgccggagcctccgcagatctcaacactagctttagtggggttgatgagcacgccccaatttcctatgaggactttgtgaacttccctgatattcaccattctaatgaagaatatttcaagaaggtcgaagagttaaaggcggcgcatattgaaaccatggctaagctcgaaaagatgtaccaggacaaactgcacctcaaggaggtgcaacctgtcgttatcagggaggactctctgtctgactctagcaggtctgtgtcagaaaagaactcttatcatcccgtatccctgatgacatccttctctgagcccgacctgggacagagttcctccttatatgtgagctcttccgaggaggaactgcctaatctagagaaggagtacccacggaagaaccgcatgatgacctacgctaaggagttaataaataacatgtggaccgatttctgcgtcgaggattacatccgctgcaaggatacaggtttccatgcagctgagaaacgccggaaaaagcgtaaagaatgggtgccaaccattactgtaccggaaccttttcaaatgatgatccgcgaacaaaagaagaaagaagaaagtatgaagagtaaatccgatattgagatggttcacaaggcactaaagaaacaggaggaagaccctgagtacaagaaaaaatttcgagccaacccagtcccagcttcagtgtttctccccttataccacgacctggtgaaacagaaggaagagcgaaggagatctctgaaagagaagtccaaagaggccttgctggcatcccagaaaccctttaagttcattgcaagggaggagcagaaaagagccgctcgggagaagcagctacgtgacttccttaagtacaagaagaagactaaccggtttaaggcccgacctatcccacgttcaacgtacgggtcgaccaccaatgataaactgaaagaagaggagctttatagaaatctgcgtacacagctgcgagcccaggaacacctccagaattcttctcctctgccatgtagaagcgcttgtggctgtcgcaatcctcggtgccccgagcaggctgtgaaactgaaatgcaaacacaaggtgagatgccctactccagactttgaagatctaccagaacggtaccagaagcacttgagcgagcataaatcacctaaactgcttacagtttgtaagccttttgacctccacgcgtctcctcacgcaagcatcaagcgggaaaagattctcgccgacatcgaagccgatgaggaaaacctgaaggaaacgcggtggccgtacctaagccccagacgcaaatcgcctgtacgatgtgctggtgtcaaccctgtgccgtgtaactgcaatccccccgtacccacagtatccagccggggaagggagcaggcggtcagaaggtcactcgaggaaaagaaaatgctggaagaggaaaggaaccgcatattgacaaagcagaagcaacggatgaaggagctacagaaactattgacaaccagagccaaggcctacgattcgcaccagtctctggcacagatttcgaagtccagggtaaaatgtcttagaaagagcgaaaaggagagaatgcgcgagtatcaacgcgagctggaggaacgcgaagagaaactgaagaaacgtccactgctttttgaacgcgttgctcagaaaaacgctaggatggctgccgaaaagcattactccaacacattgaaagctcttgggattagtgatgagtttgtatcaaaaaagggacaaagtggcaaagtacttgagtactttaataatcaggaaactaagagtgtaacagaggataaggaaagtttcaacgaggaagagaagatcgaggagcgtgaaaacggcgaggaaaattatttcattgacactaatagtcaggactcgtacaaagagaaggatgaagccaatgaggagagcgaagaagaaaaatccgtggaggagagccactag

SEQ ID NO: 79207 - DNA, 2151 bp, Artificial Sequence
  derived and/or modified sequence
atggccaccagccaccgggtggccaagctggtggccagcagcctgcagacccctgtgaaccccatcactggagcccgggtggcccagtatgaaagagaggaccccctgaaggccctggccgctgctgaggccatcctggaggatgaggaggaggagaaggtggcccagcctgctggggccagcgctgacctgaacaccagcttctctggagtggatgagcacgcccccatctcctatgaggactttgtgaacttcccagacatccaccacagcaatgaggagtacttcaagaaggtggaggagctgaaggccgcccacatcgagaccatggccaagctggagaagatgtaccaggacaagctgcacctgaaggaggtgcagcctgtggtgatccgggaggacagcctgagtgacagcagccgctctgtgtctgagaagaacagctaccaccctgtgtccctgatgaccagcttcagcgagccagacctgggccagagcagcagcctgtatgtgagcagcagcgaggaggagctgcccaacctggagaaggagtaccccaggaagaacaggatgatgacctacgccaaggagctgatcaacaacatgtggacagacttctgtgtggaggactacatccgctgcaaggacaccggcttccacgccgctgagaagaggaggaagaagaggaaggagtgggtgcccaccatcaccgtgcctgagcccttccagatgatgatccgggagcagaagaagaaggaggagagcatgaagagcaagagtgacatcgagatggtgcacaaggccctgaagaagcaggaggaggaccctgagtacaagaagaagttccgggccaaccctgtgcctgccagcgtcttcctgcccctgtaccatgacctggtgaagcagaaggaggagaggagaagaagcctgaaggagaagagcaaggaggccctgctggccagccagaagcccttcaagttcatcgcccgggaggagcagaagagagctgcccgggagaagcagctgcgggacttcctgaagtacaagaagaagaccaaccgcttcaaggcccggcccatccccaggagcacctacggcagcaccaccaatgacaagctgaaggaggaggagctgtacagaaacctgcggacccagctgcgggcccaggagcacctgcagaacagcagccccctgccctgccgcagcgcctgtggctgcaggaacccccgctgcccagagcaggccgtgaagctgaagtgcaagcacaaggtgcgctgccccaccccagactttgaggacctgcctgagcgctaccagaagcacctgtctgagcacaagagccccaagctgctgactgtgtgcaagccctttgacctgcacgccagcccccacgccagcatcaagcgggagaagatcctggccgacatcgaggctgatgaggagaacctgaaggagacccgctggccctacctgagccccaggaggaagagccctgtgcgctgtgccggcgtgaaccctgtgccctgcaactgcaacccccctgtgcccaccgtgagcagccggggccgggagcaggccgtgcggcgcagcctggaggagaagaagatgctggaggaggagaggaaccgcatcctgaccaagcagaagcagaggatgaaggagctgcagaagctgctgaccacccgggccaaggcctatgacagccaccagagcctggcccagatcagcaagagccgggtgaagtgcctgaggaagtctgagaaggagaggatgagggagtaccagcgggagctggaggagcgggaggagaagctgaagaagaggcccctgctgtttgagcgggtggcccagaagaatgccaggatggctgctgagaagcactacagcaacaccctgaaggccctgggcatcagtgatgaatttgtgtccaagaagggccagagcggcaaggtgctggagtacttcaacaaccaggagaccaagtctgtgacagaggacaaggagagcttcaatgaggaggagaagattgaggagcgggagaatggagaggagaactacttcatcgacaccaacagccaggacagctacaaggagaaggatgaggccaatgaggagagcgaggaggagaagtctgtggaggagagccactag

SEQ ID NO: 79208 - DNA, 2151 bp, Artificial Sequence
  derived and/or modified sequence
atggccaccagccaccgggtggccaagctggtggccagcagcctgcaaactcccgtcaatccaataactggagcaagggtagcccagtatgagcgggaagatccccttaaagccttggccgcagctgaggcaatcctcgaagatgaagaagaggaaaaggtggctcagccggctggagcctccgcagatctgaacacttcattttccggagttgatgagcatgcgcccatttcttatgaggacttcgtgaattttccggatattcatcacagcaacgaggagtactttaagaaggttgaggagcttaaagctgcccacatcgaaacgatggccaaactcgaaaagatgtatcaggacaagctgcatctaaaagaggttcagcctgtcgttattcgggaagattctctctccgactcatcccggtccgtgagcgaaaagaacagttatcaccccgtgtctctgatgacctcattctcagagccggatttggggcagtcttcttccttgtacgtaagctcttctgaggaagaattaccgaacctcgagaaggaatacccccgtaagaatcggatgatgacatacgccaaggaattgatcaataatatgtggaccgacttttgtgtggaagactacatcaggtgtaaagatactggattccatgccgctgaaaagcgccgcaagaaaagaaaagagtgggtgccaacgataactgttcccgagcccttccagatgatgatcagagaacagaagaaaaaagaggaatcaatgaaatctaagtcggacatagaaatggttcataaggcactgaagaaacaagaggaggatcctgagtacaagaagaaattccgagcaaatcccgttccggcttcagtgttcctccccctctatcacgacctggtgaagcagaaggaggaacgcagacgttcactcaaagaaaagagtaaggaagcattgctggctagccaaaagccattcaagttcatagcgcgagaggagcaaaaacgcgcagcccgggaaaaacagttgagggacttcctgaaatacaaaaagaagaccaaccggtttaaagccagaccaatcccacgatcgacatatgggtcaaccacaaacgataagctgaaggaagaggagttgtaccgaaatttgcgaacccaactacgggcccaggaacatctccagaatagctcccctctgccttgccgctccgcttgcgggtgtagaaatccaagatgcccagagcaggccgtgaagctaaaatgcaagcacaaagttaggtgccccacgcccgatttcgaagatctacccgagcgctaccagaagcacctgagtgaacacaagtccccgaagctgctgacagtgtgtaagcccttcgatctgcacgcttcccctcacgcaagcattaagcgggagaagatcttagctgacatcgaagccgatgaggagaatcttaaagagacacgatggccttacctgagcccgcgtcgtaaaagtccggtgcgctgcgcgggtgtgaatccagttccatgcaactgcaaccctcccgttcctacggttagttcacgaggtagggagcaagccgtgagacgttcgctcgaggaaaagaagatgctggaggaagaacggaaccggattctgaccaagcagaaacagcgaatgaaggaactccaaaaactgctgactaccagggccaaggcctacgattcacaccagagcctcgcacagataagcaagagccgcgtgaagtgcctacgcaaatccgagaaggaacgcatgcgggagtaccagcgggaactggaggagagagaagaaaagttaaagaagaggccactgctgttcgagagagttgcacagaagaatgcccggatggctgccgaaaaacactattccaatactcttaaggctcttggaatctccgatgagttcgtctcaaagaagggccagtctggaaaggtgctggaatacttcaataaccaagagacaaaaagcgtgacagaggataaggaatccttcaatgaggaagaaaaaattgaggagagggaaaacggggaggagaattactttattgacactaactcgcaagactcatacaaagagaaagatgaggctaatgaggagtctgaagaagaaaaatcagttgaggagagccattag

SEQ ID NO: 79209 - DNA, 2151 bp, Artificial Sequence
  derived and/or modified sequence
atggcaacaagccaccgggtcgccaagctcgtcgccagcagcctgcagacacccgtaaacccgataacaggcgctcgggtggctcaatacgaaagggaagatccgttgaaggccctagcagcagcagaagctatactggaggatgaggaagaggagaaagtggctcagcccgctggcgcttcagccgacctcaatactagcttcagcggcgtggatgaacatgcaccaatttcttatgaagactttgttaattttcccgacatccaccacagtaatgaggaatattttaaaaaagtggaggaacttaaagccgcacacatcgaaaccatggcaaagctggaaaagatgtatcaggacaagttgcatctaaaggaggtacagcctgtggtcatccgcgaagatagcctgagtgactcatccaggtctgtttcagagaaaaacagttaccaccccgtgtctctcatgaccagtttcagtgagccagaccttggccagagtagttccttatacgtaagtagcagtgaggaagaactgcctaatctggagaaggagtatccaaggaagaatcgtatgatgacatacgccaaggaattgataaataatatgtggactgatttctgcgtggaagattacatcagatgcaaggataccggctttcacgctgccgagaaaagaaggaaaaagcgcaaagaatgggttccaacaattaccgtgcccgagccctttcagatgatgattagagagcagaagaagaaagaagagtccatgaaaagcaagtccgacattgaaatggtccacaaggccctgaagaaacaagaggaggaccctgagtataaaaaaaaatttagagcaaacccggtgcccgcaagtgtgttcttgccattgtaccacgacctggtcaagcagaaggaggaaagaagacggtccctgaaagaaaaatcaaaagaggctcttttagccagccaaaaaccgtttaaattcatagcgagggaggagcagaaaagggccgcacgggagaagcagctgcgggactttcttaaatacaaaaagaaaacaaatcgtttcaaagctcggccaataccacgtagtacgtatggaagtaccactaatgacaaattaaaagaggaggagctataccgcaacctgcgtacccagctaagagcacaggagcatctgcagaatagctcgcccctgccgtgccgaagtgcctgcggttgtagaaatccacgatgtcccgagcaagctgtcaagcttaaatgtaagcacaaagtccgatgtccaactcccgacttcgaagatctaccagagcggtaccaaaagcatctgagcgaacataaatctccaaagttgctaacggtctgtaaaccctttgatctgcacgcatctccccacgcctccattaaacgggagaaaatcctggcagatattgaggcggatgaagaaaacctgaaagaaactcggtggccttatctctctccgaggaggaaatctcctgtcaggtgcgcaggcgtcaaccctgtaccatgtaattgcaacccacctgtgcccaccgtctcctctagggggcgagagcaggctgtgcggcgatctcttgaagaaaagaaaatgctggaagaggaaaggaatcgcattctcaccaaacagaagcagcgaatgaaggagctgcaaaagttgttgaccacacgagcaaaagcctacgatagtcaccaatcccttgcccagatcagcaagagtagagttaagtgtctgcgcaaatcagagaaagagcggatgagggagtatcaacgagaattggaggaaagggaagagaagctcaaaaaaaggcctcttcttttcgaacgcgttgcccagaagaatgctaggatggctgcagagaagcactactcgaataccctgaaagcactaggcatctccgatgaatttgtatcaaaaaaaggccagtctggaaaggttttagaatatttcaataaccaggaaacaaagtccgtgactgaggataaagagtccttcaatgaggaggagaaaattgaagagagagaaaacggcgaggagaattattttatcgatactaatagccaagactcctacaaagagaaggacgaggctaacgaagagagtgaagaagagaaatccgtggaagagtcacactag

SEQ ID NO: 79210 - DNA, 2151 bp, Artificial Sequence
  derived and/or modified sequence
atggccaccagccacagagtggccaagctggtggccagcagcctgcagacccccgtgaaccccatcaccggcgccagagtggcccagtacgagagagaggaccccctgaaggccctggccgccgccgaggccatcctggaggacgaggaggaggagaaggtggcccagcccgccggcgccagcgccgacctgaacaccagcttcagcggcgtggacgagcacgcccccatcagctacgaggacttcgtgaacttccccgacatccaccacagcaacgaggagtacttcaagaaggtggaggagctgaaggccgcccacatcgagaccatggccaagctggagaagatgtaccaggacaagctgcacctgaaggaggtgcagcccgtggtgatcagagaggacagcctgagcgacagcagcagaagcgtgagcgagaagaacagctaccaccccgtgagcctgatgaccagcttcagcgagcccgacctgggccagagcagcagcctgtacgtgagcagcagcgaggaggagctgcccaacctggagaaggagtaccccagaaagaacagaatgatgacctacgccaaggagctgatcaacaacatgtggaccgacttctgcgtggaggactacatcagatgcaaggacaccggcttccacgccgccgagaagagaagaaagaagagaaaggagtgggtgcccaccatcaccgtgcccgagcccttccagatgatgatcagagagcagaagaagaaggaggagagcatgaagagcaagagcgacatcgagatggtgcacaaggccctgaagaagcaggaggaggaccccgagtacaagaagaagttcagagccaaccccgtgcccgccagcgtgttcctgcccctgtaccacgacctggtgaagcagaaggaggagagaagaagaagcctgaaggagaagagcaaggaggccctgctggccagccagaagcccttcaagttcatcgccagagaggagcagaagagagccgccagagagaagcagctgagagacttcctgaagtacaagaagaagaccaacagattcaaggccagacccatccccagaagcacctacggcagcaccaccaacgacaagctgaaggaggaggagctgtacagaaacctgagaacccagctgagagcccaggagcacctgcagaacagcagccccctgccctgcagaagcgcctgcggctgcagaaaccccagatgccccgagcaggccgtgaagctgaagtgcaagcacaaggtgagatgccccacccccgacttcgaggacctgcccgagagataccagaagcacctgagcgagcacaagagccccaagctgctgaccgtgtgcaagcccttcgacctgcacgccagcccccacgccagcatcaagagagagaagatcctggccgacatcgaggccgacgaggagaacctgaaggagaccagatggccctacctgagccccagaagaaagagccccgtgagatgcgccggcgtgaaccccgtgccctgcaactgcaacccccccgtgcccaccgtgagcagcagaggcagagagcaggccgtgagaagaagcctggaggagaagaagatgctggaggaggagagaaacagaatcctgaccaagcagaagcagagaatgaaggagctgcagaagctgctgaccaccagagccaaggcctacgacagccaccagagcctggcccagatcagcaagagcagagtgaagtgcctgagaaagagcgagaaggagagaatgagagagtaccagagagagctggaggagagagaggagaagctgaagaagagacccctgctgttcgagagagtggcccagaagaacgccagaatggccgccgagaagcactacagcaacaccctgaaggccctgggcatcagcgacgagttcgtgagcaagaagggccagagcggcaaggtgctggagtacttcaacaaccaggagaccaagagcgtgaccgaggacaaggagagcttcaacgaggaggagaagatcgaggagagagagaacggcgaggagaactacttcatcgacaccaacagccaggacagctacaaggagaaggacgaggccaacgaggagagcgaggaggagaagagcgtggaggagagccactag

SEQ ID NO: 79211 - protein, 577 aa, Artificial Sequence
  derived and/or modified sequence
MLLLINVILTLWVSCANGQVKPCDFPEIQHGGLYYKSLRRLYFPAAAGQSYSYYCDQNFVTPSGSYWDYIHCTQDGWSPTVPCLRTCSKSDVEIENGFISESSSIYILNEETQYNCKPGYATAEGNSSGSITCLQNGWSTQPICIKFCDMPVFENSRAKSNGMWFKLHDTLDYECYDGYESSYGNTTDSIVCGEDGWSHLPTCYNSSENCGPPPPISNGDTTSFPQKVYLPWSRVEYQCQSYYELQGSKYVTCSNGDWSEPPRCISMKPCEFPEIQHGHLYYENTRRPYFPVATGQSYSYYCDQNFVTPSGSYWDYIHCTQDGWLPTVPCLRTCSKSDIEIENGFISESSSIYILNKEIQYKCKPGYATADGNSSGSITCLQNGWSAQPICIKFCDMPVFENSRAKSNGMRFKLHDTLDYECYDGYEISYGNTTGSIVCGEDGWSHFPTCYNSSEKCGPPPPISNGDTTSFLLKVYVPQSRVEYQCQSYYELQGSNYVTCSNGEWSEPPRCIHPCIITEENMNKNNIQLKGKSDIKYYAKTGDTIEFMCKLGYNANTSVLSFQAVCREGIVEYPRCE

SEQ ID NO: 79212 - DNA, 1734 bp, Artificial Sequence
  derived and/or modified sequence
atgttgttgcttatcaacgtaatccttactctctgggtctcctgtgcaaacggacaggtaaagccctgcgatttccctgagattcaacacggggggttatattacaagagcctgcggcggttatacttccccgccgcagccggacagtcctatagctattactgtgatcagaactttgtgaccccatcaggctcatactgggactatatccattgcactcaagatggttggtcccccacagtaccttgccttcgtacatgtagtaaaagcgatgtggagatcgaaaacggctttatctctgaaagttcaagcatttacatcttgaatgaggaaacccagtacaactgtaaacctgggtatgctaccgccgagggcaacagcagcggtagcattacttgcctgcagaatggttggtctacacagcccatctgcataaaattctgtgatatgccagtcttcgaaaactctagagctaagagcaacggcatgtggttcaagctccacgatactctggattacgagtgctacgacggctatgagtccagctatggaaacactaccgacagcatcgtgtgtggggaagacggctggtcccaccttccaacctgttacaatagctccgaaaactgtgggcctccacctcccatttccaacggcgacacgacatccttcccccaaaaagtgtacctgccttggagccgtgtagaatatcagtgtcagtcttattacgaattgcaggggagtaagtatgttacgtgctctaacggcgattggtccgaaccacctaggtgtataagcatgaagccctgcgaattccctgaaatccagcatggacatctgtactatgagaacactaggaggccctattttccagtcgccacaggtcaatcatactcttactattgcgatcagaacttcgttacgccgtcaggatcatattgggattacatccactgcacccaggacggatggcttcccacggtaccttgccttcggacatgcagcaagagcgatatcgaaatagagaatggcttcatttccgagtcttcaagtatctatattctgaataaagaaattcagtataagtgcaagccaggctacgccactgccgatggaaattcctccggctcaatcacatgtctgcagaacggatggtctgcacaacccatatgtattaagttttgcgatatgcccgtgtttgagaatagtagggccaagtccaacggaatgcgtttcaaactccacgacacactggactacgaatgctatgatgggtatgagatctcttacggcaatacaactgggtccatagtatgtggcgaggatggttggtctcacttccccacttgttacaatagtagcgagaaatgcggccccccgcctccaataagcaacggggatactacctctttcctgctgaaagtctacgtgccccagtcaagggtggaatatcagtgccaatcttattatgaactgcagggctccaactatgtgacctgttctaacggcgagtggtcagaaccccctaggtgcatccacccatgtatcatcaccgaggagaatatgaacaagaacaatatacagctcaaaggcaagtcagacattaagtactacgctaaaactggtgatacgatcgagttcatgtgcaagctcgggtataacgccaacaccagtgtcctatcttttcaagctgtctgcagagaaggtattgtggaatacccacgctgtgaatag

SEQ ID NO: 79213 - DNA, 1734 bp, Artificial Sequence
  derived and/or modified sequence
atgctgctgctgatcaacgtcatcctgaccctgtgggtgtcctgtgccaacggccaggtgaagccctgtgacttccctgagatccagcacggcggcctgtactacaagagcctgcggcggctgtacttccctgctgctgctggccagagctacagctactactgtgaccagaactttgtgaccccatctggcagctactgggactacatccactgcacccaggacggctggagccccaccgtgccctgcctgcggacctgcagcaagagtgatgtggagattgaaaatggcttcatcagcgagagcagcagcatctacatcctgaatgaggagacccagtacaactgcaagccaggctacgccacagctgagggcaacagcagcggcagcatcacctgcctgcagaatggctggagcacccagcccatctgcatcaagttctgtgacatgcctgtgtttgagaacagccgggccaagagcaatggcatgtggttcaagctgcatgacaccctggactatgagtgctatgatggctatgagagcagctatggcaacaccacagacagcatcgtgtgtggggaggatggctggagccacctgcccacctgctacaacagcagcgagaactgtggccccccaccacccatcagcaatggagacaccaccagcttcccccagaaggtgtacctgccctggagccgggtggagtaccagtgccagagctactatgagctgcagggcagcaaatatgtgacctgcagcaatggagactggagcgagcccccacgctgcatctccatgaagccctgtgagttccctgagatccagcacggccacctgtactatgagaacacccggcggccctacttccctgtggccaccggccagagctacagctactactgtgaccagaactttgtgacccccagcggcagctactgggactacatccactgcacccaggacggctggctgcccaccgtgccctgcctgcggacctgcagcaagagtgacattgaaattgaaaatggcttcatcagcgagagcagcagcatctacatcctgaacaaggagatccagtacaagtgcaagccaggctacgccacagcagatggcaacagcagcggcagcatcacctgcctgcagaatggctggagcgcccagcccatctgcatcaagttctgtgacatgcctgtgtttgagaacagccgggccaagagcaatggcatgaggttcaagctgcatgacaccctggactatgaatgttatgatggctatgagatctcctatggcaacaccaccggcagcatcgtgtgtggagaagatggctggagccacttccccacctgctacaacagcagcgagaagtgtggccccccaccacccatcagcaatggagacaccaccagcttcctgctgaaggtgtatgtgccccagagccgggtggagtaccagtgccagagctactatgagctgcagggcagcaactacgtgacctgcagcaatggagagtggagcgagcccccacgctgcatccacccctgcatcatcacagaggagaacatgaacaagaacaacatccagctgaagggcaagagtgacatcaagtactatgccaagacaggagacaccatcgagttcatgtgcaagctgggctacaatgccaacacctctgtgctgtccttccaggccgtgtgccgggagggcatcgtggagtacccccgctgtgagtag

SEQ ID NO: 79214 - DNA, 1734 bp, Artificial Sequence
  derived and/or modified sequence
atgctgctgctgatcaacgtgatcctgaccctgtgggtgagctgcgcaaacggccaagttaagccttgcgactttccagagattcagcatggaggcctatactacaaaagtctcagaaggctttactttccggccgccgccggacagtcttatagctattactgcgaccagaacttcgtgactccttctgggagttactgggattatatacattgcacacaagacggctggtcacccactgtaccatgcctgcgtacctgctccaagtctgatgtggaaattgagaacggctttattagcgagtcctcctcaatctacatccttaacgaggagacccagtacaattgcaaaccagggtatgccaccgcagagggcaacagtagtggttccataacttgcctgcaaaacggatggagtactcagccaatatgtatcaaattctgcgacatgccagtgttcgagaactctcgcgccaagtctaatggaatgtggttcaaacttcatgacacactggactacgagtgctacgacgggtatgaaagctcttatggtaacaccaccgattcaattgtgtgcggcgaagatggatggtcccacctgcctacttgttacaactctagcgagaactgcgggccgcccccaccaatatcaaatggagatactacatctttcccccagaaagtgtacctgccttggagtagagtggaatatcagtgccaatcttattatgagctgcaggggtcaaagtacgtgacttgttcaaacggagactggtccgaaccccctcgctgcatttcaatgaaaccctgtgagtttcctgaaatccagcatggtcacctgtattacgaaaacacccggagaccctacttccccgtcgccacagggcagtcatatagctattactgcgatcagaactttgtgactccaagtggctcctattgggactacatccactgtacccaggacgggtggctcccaacggtcccctgcctgagaacatgtagcaagagtgacatcgaaatagaaaacgggtttatcagtgagtcttcgtcaatttacatattgaataaggagatccagtacaagtgtaagccaggatatgccacagccgacggaaattcctccgggagcattacttgtctgcagaatgggtggtctgcacagcccatatgtatcaagttctgcgatatgccagtcttcgagaattcccgcgctaagtctaacggcatgcgtttcaagctgcatgacacactggactacgagtgttacgacggctacgagatttcctacggaaacaccactgggtctatagtttgtggtgaggatggctggtcccactttcctacgtgttataatagtagtgagaagtgtggaccaccgcccccaatctccaacggtgatacaacttcctttctcctgaaagtttacgtcccccagagccgtgtggagtatcaatgtcagtcttattatgagctgcagggctctaattatgtgacctgttcaaatggcgagtggagcgagcctcctcgatgtattcatccttgcataatcacagaagaaaatatgaacaaaaacaacatacaacttaaggggaaaagcgacattaagtactatgccaaaactggggacaccatcgagttcatgtgcaagctgggctacaatgcaaatacctccgttttatcttttcaggccgtctgccgcgagggcatcgttgaatatccccgctgcgaatag

SEQ ID NO: 79215 - DNA, 1734 bp, Artificial Sequence
  derived and/or modified sequence
atgctcctcctgattaacgtcatcctaacgctgtgggtttcctgcgctaatggtcaagttaaaccctgcgacttccctgaaattcagcacgggggactctattataaatccctcagaaggctctactttccagctgccgcaggacagtcttacagctattactgcgatcagaattttgtgactccttcgggctcttactgggattatatccactgcactcaggatggttggagcccaaccgtcccatgtcttcgcacctgcagcaagagcgacgtggagatagagaatggctttatcagcgaatcatcatccatttacatcttgaacgaagagacccagtataactgcaagcctgggtacgccaccgccgaaggcaacagctccggcagcattacctgcttgcagaacggttggagcacacagcccatatgcatcaaattctgcgacatgcctgtgttcgagaactctagagcaaaaagcaatggcatgtggttcaaactgcatgatacgctggactacgagtgctacgacggatatgagtcatcatacggtaacactacggacagtatcgtgtgcggggaggacggatggtctcacctgcctacctgttataattccagtgagaattgcggcccaccccctcccatctctaatggagacacaactagttttcctcagaaagtttaccttccctggtctcgtgtcgagtatcagtgtcagtcttattacgaactgcagggcagtaaatacgtaacctgctcaaacggggattggagcgagcccccaaggtgtatttccatgaagccatgcgagttccctgagatacagcatggccacttgtactatgagaacacgcggcgaccatacttccctgtggctacaggtcagtcatatagctactactgtgaccagaatttcgtcacccccagtggaagttattgggattacattcattgcactcaggatggttggcttcctacagtgccttgtctgcgcacttgctccaagagtgacatcgagattgagaacggttttatcagcgagagctcctctatttatattctcaataaagagatccagtataagtgcaagcctggatatgccaccgcagacggaaacagctcggggagcataacatgtcttcagaacgggtggagcgctcaacctatctgtataaagttttgcgatatgcctgtgttcgagaactcgcgagccaagtccaacgggatgaggttcaagcttcatgacacccttgactacgagtgctacgacggttacgaaatttcctacggaaatacaacggggagtatcgtctgtggtgaggatggctggtcccatttcccaacttgctacaactcaagtgaaaagtgcggtcctccccctcctataagtaacggcgacacgaccagttttctactgaaagtgtatgtgccccagtcacgggtcgagtaccagtgtcagagctactatgaactccagggctccaattacgtcacttgctccaatggggagtggagcgaaccgccaagatgtatacacccatgcataatcactgaggaaaacatgaacaagaacaacatccagctcaagggaaaaagcgatattaagtattacgctaaaacaggggacactatcgaattcatgtgtaaattaggctataatgccaatacctccgtactctcatttcaagccgtgtgtcgggagggaatcgtggagtatccacgctgtgagtag

SEQ ID NO: 79216 - DNA, 2178 bp, Artificial Sequence
  derived and/or modified sequence
aagtgaccttaaagccctagctttgtggtagtgcacttaaattcagaatcacacttggtaactaataatgaaagatttcaaaccccaaacagtgcaactgaaacttttgcattactatactactgagaatatctaacatgttgttactaatcaatgtcattctgaccttgtgggtttcctgtgctaatggacaagtgaaaccttgtgattttccagaaattcaacatggaggtctatattataagagtttgcgtagactatactttccagcagctgcaggacaatcttattcctattactgtgatcaaaattttgtgactccttcaggaagttactgggattacattcattgcacacaagatggttggtcaccaacggtcccatgcctcagaacatgctcaaaatcagatgtagaaattgaaaatggattcatttctgaatcttcctctatttatattttaaatgaagaaacacaatataattgtaaaccaggatatgcaacagcagagggaaattcttcaggatcaattacatgtttgcaaaatggatggtcaacacaaccaatttgcattaaattttgtgatatgcctgtttttgagaattccagagccaagagtaatggcatgtggtttaagctccatgacacattggactatgaatgctatgatggatatgaaagcagttatggaaacaccacagattccatagtgtgtggtgaagatggctggtcccatttgccaacatgctataattcttcagaaaactgtgggcctcctccacctattagcaatggagataccacgtccttcccgcaaaaagtgtatctgccatggtcaagagtcgagtaccagtgccagtcctactatgaacttcagggttctaaatatgtaacatgtagtaatggagactggtcagaaccaccaagatgcatatcaatgaaaccttgtgagtttccagaaattcaacatggacatctatattatgagaatacgcgtagaccatactttccagtagctacaggacaatcttactcctattactgtgaccaaaattttgtgactccttcaggaagttactgggattacattcactgcacacaagatgggtggttgccaacagtcccatgcctcagaacatgctcaaaatcagatatagaaattgaaaatggattcatttctgaatcttcctctatttatattttaaataaagaaatacaatataaatgtaaaccaggatatgcaacagcagatggaaattcttcaggttcaattacatgtttgcaaaatggatggtcagcacaaccaatttgcattaaattttgtgatatgcctgtttttgagaattccagagccaagagtaatggcatgcggtttaagctccatgacacattggactacgaatgctacgatggatatgaaatcagttatggaaacaccacaggttccatagtgtgtggtgaagatgggtggtcccatttcccaacatgttataattcttcagaaaagtgtgggcctcctccacctattagcaatggtgataccacctcctttctactaaaagtgtatgtgccacagtcaagagtcgagtaccaatgccagtcctactatgaacttcagggttctaattatgtaacatgtagtaatggagagtggtcggaaccaccaagatgcatacatccatgtataataactgaagaaaacatgaataaaaataacatacagttaaaaggaaaaagtgacataaaatattatgcaaaaacaggggataccattgaatttatgtgtaaattgggatataatgcgaatacatcagttctatcatttcaagcagtgtgtagggaaggcatagtggaataccccagatgcgaataaggcagcattgttaccctaaatgtatgtccaacttccacttctcactcttatggtctcaaagcttgcaaagatagcttctgatattgttgtaatttctactttatttcaaagaaaattaatataatagtttcaatttgcaacttaatatgttctcaaaaatatgttaaaacaaactaaattattgcttatgcttgtactaaaataataaaaactacccttatattggacttcctatcaatgaattagtaagtatagaaacagataactgaatggctttctgcatattgtacagtatacctagacatag

SEQ ID NO: 79217 - DNA, 1734 bp, Artificial Sequence
  derived and/or modified sequence
atgctgctgctgatcaacgtgatcctgaccctgtgggtgagctgcgccaacggccaggtgaagccctgcgacttccccgagatccagcacggcggcctgtactacaagagcctgagaagactgtacttccccgccgccgccggccagagctacagctactactgcgaccagaacttcgtgacccccagcggcagctactgggactacatccactgcacccaggacggctggagccccaccgtgccctgcctgagaacctgcagcaagagcgacgtggagatcgagaacggcttcatcagcgagagcagcagcatctacatcctgaacgaggagacccagtacaactgcaagcccggctacgccaccgccgagggcaacagcagcggcagcatcacctgcctgcagaacggctggagcacccagcccatctgcatcaagttctgcgacatgcccgtgttcgagaacagcagagccaagagcaacggcatgtggttcaagctgcacgacaccctggactacgagtgctacgacggctacgagagcagctacggcaacaccaccgacagcatcgtgtgcggcgaggacggctggagccacctgcccacctgctacaacagcagcgagaactgcggcccccccccccccatcagcaacggcgacaccaccagcttcccccagaaggtgtacctgccctggagcagagtggagtaccagtgccagagctactacgagctgcagggcagcaagtacgtgacctgcagcaacggcgactggagcgagccccccagatgcatcagcatgaagccctgcgagttccccgagatccagcacggccacctgtactacgagaacaccagaagaccctacttccccgtggccaccggccagagctacagctactactgcgaccagaacttcgtgacccccagcggcagctactgggactacatccactgcacccaggacggctggctgcccaccgtgccctgcctgagaacctgcagcaagagcgacatcgagatcgagaacggcttcatcagcgagagcagcagcatctacatcctgaacaaggagatccagtacaagtgcaagcccggctacgccaccgccgacggcaacagcagcggcagcatcacctgcctgcagaacggctggagcgcccagcccatctgcatcaagttctgcgacatgcccgtgttcgagaacagcagagccaagagcaacggcatgagattcaagctgcacgacaccctggactacgagtgctacgacggctacgagatcagctacggcaacaccaccggcagcatcgtgtgcggcgaggacggctggagccacttccccacctgctacaacagcagcgagaagtgcggcccccccccccccatcagcaacggcgacaccaccagcttcctgctgaaggtgtacgtgccccagagcagagtggagtaccagtgccagagctactacgagctgcagggcagcaactacgtgacctgcagcaacggcgagtggagcgagccccccagatgcatccacccctgcatcatcaccgaggagaacatgaacaagaacaacatccagctgaagggcaagagcgacatcaagtactacgccaagaccggcgacaccatcgagttcatgtgcaagctgggctacaacgccaacaccagcgtgctgagcttccaggccgtgtgcagagagggcatcgtggagtaccccagatgcgagtag

SEQ ID NO: 79218 - protein, 505 aa, Artificial Sequence
  derived and/or modified sequence
MVEEVQKHSVHTLVFRSLKRTHDMFVADNGKPVPLDEESHKRKMAIKLRNEYGPVLHMPTSKENLKEKGPQNATDSYVHKQYPANQGQEVEYFVAGVALTADTKIQRMPSESAAQSLAVALPLQTKADANRTAPSGSEYRHPGASDRPQPTAMNSIVMETGNTKNSALMAKKAPTMPKPQWHPPWKLYRVISGHLGWVRCIAVEPGNQWFVTGSADRTIKIWDLASGKLKLSLTGHISTVRGVIVSTRSPYLFSCGEDKQVKCWDLEYNKVIRHYHGHLSAVYGLDLHPTIDVLVTCSRDSTARIWDVRTKASVHTLSGHTNAVATVRCQAAEPQIITGSHDTTIRLWDLVAGKTRVTLTNHKKSVRAVVLHPRHYTFASGSPDNIKQWKFPDGSFIQNLSGHNAIINTLTVNSDGVLVSGADNGTMHLWDWRTGYNFQRVHAAVQPGSLDSESGIFACAFDQSESRLLTAEADKTIKVYREDDTATEETHPVSWKPEIIKRKRF

SEQ ID NO: 79219 - DNA, 1518 bp, Artificial Sequence
  derived and/or modified sequence
atggtagaggaagttcaaaagcattctgttcacacactggtcttccgtagtctcaaacgcacgcacgatatgttcgtcgcagacaacggaaaacctgtgcccttggacgaagaaagtcataagaggaagatggcaattaagctccgcaacgagtatggtcccgtccttcacatgcccaccagtaaagagaacctaaaggagaaaggccctcaaaatgctacagatagctatgttcacaagcaatatcccgctaaccagggccaagaagtggagtactttgtcgctggcgtggctctgaccgctgacaccaaaatccagcggatgcccagtgaaagtgctgcacagtcgctcgctgtggctttgcccctccaaaccaaggccgacgcaaaccgaaccgctccttctggatccgagtataggcacccaggggcgagcgatagaccacagcccaccgccatgaattcaatagtgatggagactgggaacactaaaaattccgctttgatggcaaaaaaggccccaaccatgcccaaaccgcaatggcatcccccttggaagctctacagggtgatctccgggcatctgggctgggttcgttgtatcgcagttgaacctgggaaccagtggttcgttactggctctgctgacagaacaatcaagatatgggacctcgccagcggaaagttgaaattgtccttgacaggtcatatctcaaccgtccgtggagtgattgtgtctacacgctccccctatctgttctcgtgcggagaggacaagcaagtcaagtgctgggacctcgaatataataaggttatcaggcattaccatggacaccttagcgcagtttatggtctggacctgcaccccactatcgacgtcctggtcacctgctcacgggatagcacagcccgcatctgggatgtgagaaccaaagcctccgtgcacactctgtccggccatacgaacgccgtagcaaccgtacggtgccaggccgccgagccacaaatcattactggctctcatgataccacgatcagactgtgggacctggtcgccggcaaaacccgcgttacactgaccaatcataaaaaatcagtcagggccgtggtcttacacccccgacactacacgttcgcatcgggcagtcctgacaatattaagcaatggaagtttccagatggcagctttatccagaatctatcgggtcacaatgccataattaatactctgacagtgaattcggatggcgtcctcgtctctggggccgataacggcactatgcatctgtgggattggaggactggatacaactttcagagggtccatgctgcagtgcagccagggagcctggattctgagagcgggatttttgcttgtgcgttcgatcagtcagaatctcggctgttaacagctgaggccgacaaaaccatcaaggtctatagggaagatgacactgccaccgaggagactcatcctgttagttggaaacccgaaattatcaagcgcaaacgtttctag

SEQ ID NO: 79220 - DNA, 1518 bp, Artificial Sequence
  derived and/or modified sequence
atggtggaggaggtgcagaagcacagcgtgcacaccctggtgttccgcagcctgaagaggacccatgacatgtttgtggccgacaatggcaagcctgtgcccctggatgaggagagccacaagaggaagatggccatcaagctgagaaatgaatatggccctgtgctgcacatgcccaccagcaaagaaaacctgaaggagaagggcccccagaatgccacagacagctatgtgcacaagcagtacccagccaaccagggccaggaggtggagtactttgtggccggcgtggccctgacagctgacaccaagatccagaggatgcccagcgagagcgctgcccagagcctggccgtggccctgcccctgcagaccaaggcagatgccaacagaacagcccccagcggcagcgagtaccgccaccctggggccagtgaccggccccagcccacagccatgaacagcatcgtgatggagaccggcaacaccaagaacagcgccctgatggccaagaaggcccccaccatgcccaagccccagtggcaccccccctggaagctgtacagagtcatcagcggccacctgggctgggtgcgctgcatcgctgtggagcccggcaaccagtggtttgtgacaggcagcgctgacaggaccatcaagatctgggacctggccagcggcaagctgaagctgagcctgaccggccacatcagcacagtgcggggcgtcatcgtgtccaccaggagcccctacctgttcagctgtggggaggacaagcaggtgaagtgctgggacctggagtacaacaaggtgatccgccactaccacggccacctgtctgctgtgtatggcctggacctgcaccccaccattgatgtgctggtgacctgcagccgggacagcacagcccgcatctgggatgtgaggaccaaggcctctgtgcacaccctgagcggccacaccaatgctgtggccaccgtgcgctgccaggccgctgagccccagatcatcaccggcagccatgacaccaccatccggctgtgggacctggtggccggcaagaccagggtgaccctgaccaaccacaagaagtctgtgcgggctgtggtgctgcaccccaggcactacacctttgccagcggcagcccagacaacatcaagcagtggaagttcccagatggcagcttcatccagaacctgagcggccacaatgccatcatcaacaccctgactgtgaacagtgatggagtgctggtgtctggagctgacaatggcaccatgcacctgtgggactggaggacaggctacaacttccagagggtgcatgctgctgtgcagcccggcagcctggacagcgagagcggcatctttgcctgtgcctttgaccagagcgagagccggctgctgacagctgaggccgacaagaccatcaaggtgtaccgggaggatgacacagccacagaggagacccaccctgtgtcctggaagccagagatcatcaagaggaagcgcttctag

SEQ ID NO: 79221 - DNA, 1518 bp, Artificial Sequence
  derived and/or modified sequence
atggtggaggaggtgcagaagcacagcgtgcacaccctggtgttccgatctctgaaacgtactcacgacatgtttgttgctgacaatggcaagcctgtgcctctggacgaggaatcacacaagagaaaaatggcgatcaaactgaggaatgaatatgggccagtgttacacatgccaaccagcaaagagaatctaaaagaaaagggccctcagaatgcgactgactcttacgtgcataagcaatacccagccaatcaaggccaagaggtggagtattttgtcgcaggagtggccctgaccgcagacaccaaaatacagcgcatgcccagtgagagtgcagcccagagcctggccgtcgccctgccccttcagaccaaggcagacgccaaccggacggccccaagcgggtccgaatacaggcatcccggggcaagtgatcgaccacaacccactgccatgaacagcattgtaatggagacgggcaacactaagaatagtgcactcatggcaaagaaggctcccacgatgcctaaacctcagtggcatccaccctggaagttgtaccgagtaatcagcggccaccttggctgggtccgctgtatcgcggtggaaccgggcaaccagtggtttgtaacgggctcagcggaccgaaccatcaaaatctgggatctggccagtggaaaactgaaactgtcattgacgggccacataagcactgtccggggcgtgattgtgtccacccggtcaccatatttattttcctgcggagaagataagcaagtaaagtgttgggatctcgaatacaataaggtcatcaggcactatcacggacatctcagtgcagtgtatggtctggacctacaccctactatcgacgtgctcgttacctgcagccgtgactctacggcccgcatctgggatgtccgaaccaaggcttccgtgcacaccctgtcaggccacaccaatgccgtggctaccgtgcgctgtcaggctgcagaacctcagataattaccgggtcccatgatacgaccattcggctttgggatctggtggccggcaagacccgggtgactctcacgaaccacaagaagagtgttagagccgtcgtcctgcatcccagacactacacctttgcttcaggctctcctgataatatcaagcagtggaagtttcctgatggatctttcattcagaacttgtcgggacataatgccattatcaacactttgacagtgaattccgacggtgtcctggtgtctggggcagacaatgggacaatgcacttgtgggactggcggaccggctacaatttccagcgggtccatgctgcagtgcagccgggaagtctggattccgaatccggcatctttgcctgtgcgttcgatcagtccgaaagcaggctgctgacagctgaagccgacaagaccattaaggtatacagagaagatgacactgcaactgaagaaacccacccagtctcctggaagcctgaaatcattaagcggaagcgcttctag

SEQ ID NO: 79222 - DNA, 1673 bp, Artificial Sequence
  derived and/or modified sequence
tccggaaggtgctgcacagctgtggcggcgggtactgcgttagtgattagagtttcttccctgccggaggtgggatacacggtagcatcatggtcgaggaggtacagaaacattctgtacacacccttgtgttcaggtcgttgaagaggacccatgacatgtttgtagctgataatggaaaacctgtgcctttagatgaagagagtcacaaacgaaaaatggcaatcaagcttcgtaatgagtatggtcctgtgttgcatatgcctacttcaaaagaaaatcttaaagagaagggtcctcagaatgcaacggattcatatgttcataaacagtaccctgccaatcaaggacaagaagttgaatactttgtggcaggggttgctttgacagcagatactaagatccagagaatgccaagtgaatcagctgcacagtccttagcggtggcattacctttgcagaccaaggctgatgcaaatcgtactgcccctagtggaagtgaataccgacatcctggggcttctgaccgtccacagcctacagcgatgaattcaattgtcatggagactggcaataccaagaactctgcactgatggctaaaaaagcccctacaatgccaaaaccccagtggcacccaccgtggaaactctacagggttatcagtgggcatcttggctgggttcgatgtattgctgtggaacctggaaatcagtggtttgttactggatctgctgacagaactataaagatctgggacttggctagtggcaaattaaaactgtcattgactgggcatattagtactgtgcggggcgtgatagtaagcacaaggagcccatatctgttctcttgtggagaagacaaacaagtgaaatgctgggatctcgaatacaataaggttatacggcattatcatggacatttaagtgcagtgtatggtttggatttgcacccgacaatcgatgtgttggtaacctgtagtcgagattcaactgcacggatttgggatgtgagaactaaagccagtgtacacacattatctggacatacaaatgcagttgctacagtgagatgtcaggctgcagaaccacaaattattacaggaagccatgatactacaattcgattatgggatctggtggctggaaaaacaagagtgacattaacaaatcacaaaaaatcagttagggctgtggttttacatccaagacattacacatttgcatctggttctccagataacataaagcagtggaaattccctgatggaagtttcattcaaaatctttccggtcataatgctattattaacacattgacggtaaattctgatggagtgcttgtatctggagctgacaatggcaccatgcatctttgggactggagaactggctacaattttcagagagttcacgcagctgtgcaacctgggtctttggacagtgaatcaggaatatttgcttgtgcttttgatcagtctgaaagtcgattactaacagctgaagctgataaaaccattaaagtatacagagaggatgacacagccacagaagaaactcatccagtcagctggaaaccagaaattatcaagagaaagagattttaatgaatgtggaattttttctctctctttttttttctttttaattaaaaaaaaaaaagcttggcgttc

SEQ ID NO: 79223 - DNA, 1518 bp, Artificial Sequence
  derived and/or modified sequence
atggtagaagaagtgcagaagcattctgttcatacattggtgttccggagcttgaagcgcacccatgacatgttcgttgccgacaacggcaaacctgtgccactcgatgaggagtcgcataaaagaaagatggctataaagttaaggaatgagtacgggcctgttcttcacatgccgactagcaaagaaaatctgaaggagaaaggaccccagaacgctactgatagctatgtccacaagcagtatcccgcaaatcaggggcaggaagtggaatattttgtggccggagtggcccttacagcggatacaaagatccagcggatgccttccgaaagcgcagcccagagcctggccgtcgcccttcctctccagactaaggcggatgccaaccggaccgccccttctgggtccgagtataggcaccctggggcaagcgacaggcctcaacccaccgcgatgaacagcatcgttatggagaccgggaacaccaaaaattccgcattaatggccaagaaagccccaacgatgcctaaaccgcagtggcaccctccttggaaactgtacagagtgataagcggccacctgggatgggtgcggtgtattgctgtcgagcctggtaatcagtggtttgtgacggggagcgcagaccgaaccatcaagatctgggacctggctagtggcaaactgaaactgtcactgacgggccatatatctaccgtgcggggtgtcatagtcagcacccgctccccttacttgttcagttgcggcgaagataagcaggtcaaatgttgggatctcgagtataacaaggtcattagacactaccatggccatttgtcggcagtgtatggtttggacctgcatcctaccattgacgtgctagtgacctgctctcgagattcaactgctaggatttgggacgtaagaacgaaggcttccgtgcataccttgtctggccatactaatgccgtagcaactgttagatgccaagctgctgagccgcagatcattaccggatcccacgataccactatccgcctctgggatttagttgctggaaagaccagagtaacgttgaccaatcataagaaatctgtgcgcgctgtggttctgcacccgagacactatacattcgcatctggctcccccgataatattaagcaatggaagttcccagatggcagtttcattcagaatctgtctggacataacgcgataatcaatactcttactgtgaactcagatggtgtcctagtgtcaggcgcagataatggtacgatgcacctttgggattggcgcaccggatataatttccaacgcgtgcatgccgctgtgcagcccggaagtctggacagcgaatcagggattttcgcttgcgcattcgaccagtctgagagccgcctgctcaccgctgaagccgacaagacaatcaaagtttatagagaggacgacacagctaccgaggagacacaccccgtctcttggaagcctgaaattatcaagcgcaaaagattttag

SEQ ID NO: 79224 - DNA, 1518 bp, Artificial Sequence
  derived and/or modified sequence
atggtggaggaggtgcagaagcacagcgtgcacaccctggtgttcagaagcctgaagagaacccacgacatgttcgtggccgacaacggcaagcccgtgcccctggacgaggagagccacaagagaaagatggccatcaagctgagaaacgagtacggccccgtgctgcacatgcccaccagcaaggagaacctgaaggagaagggcccccagaacgccaccgacagctacgtgcacaagcagtaccccgccaaccagggccaggaggtggagtacttcgtggccggcgtggccctgaccgccgacaccaagatccagagaatgcccagcgagagcgccgcccagagcctggccgtggccctgcccctgcagaccaaggccgacgccaacagaaccgcccccagcggcagcgagtacagacaccccggcgccagcgacagaccccagcccaccgccatgaacagcatcgtgatggagaccggcaacaccaagaacagcgccctgatggccaagaaggcccccaccatgcccaagccccagtggcaccccccctggaagctgtacagagtgatcagcggccacctgggctgggtgagatgcatcgccgtggagcccggcaaccagtggttcgtgaccggcagcgccgacagaaccatcaagatctgggacctggccagcggcaagctgaagctgagcctgaccggccacatcagcaccgtgagaggcgtgatcgtgagcaccagaagcccctacctgttcagctgcggcgaggacaagcaggtgaagtgctgggacctggagtacaacaaggtgatcagacactaccacggccacctgagcgccgtgtacggcctggacctgcaccccaccatcgacgtgctggtgacctgcagcagagacagcaccgccagaatctgggacgtgagaaccaaggccagcgtgcacaccctgagcggccacaccaacgccgtggccaccgtgagatgccaggccgccgagccccagatcatcaccggcagccacgacaccaccatcagactgtgggacctggtggccggcaagaccagagtgaccctgaccaaccacaagaagagcgtgagagccgtggtgctgcaccccagacactacaccttcgccagcggcagccccgacaacatcaagcagtggaagttccccgacggcagcttcatccagaacctgagcggccacaacgccatcatcaacaccctgaccgtgaacagcgacggcgtgctggtgagcggcgccgacaacggcaccatgcacctgtgggactggagaaccggctacaacttccagagagtgcacgccgccgtgcagcccggcagcctggacagcgagagcggcatcttcgcctgcgccttcgaccagagcgagagcagactgctgaccgccgaggccgacaagaccatcaaggtgtacagagaggacgacaccgccaccgaggagacccaccccgtgagctggaagcccgagatcatcaagagaaagagattctag

SEQ ID NO: 79225 - DNA, 672 bp, Artificial Sequence
  derived and/or modified sequence
atgtctaaagccatcgggctcctggacgtggatgtgtacggaccgagtgtcccaaaaatgatgaatctgaaagggaacccagaactcagtcagtccaacctgatgaggccgttgctcaactacgggatcgcctgcatgagcatgggcttcctggtagaggagtccgagcctgttgtgtggcgggggttgatggtgatgtccgccattgaaaagctcctgcgccaggtggactggggacagctggattatctcgtggtcgacatgcctcctggcacaggggatgttcagctctccgtttcccagaatattccaatcaccggggccgtcattgtgagcacacctcaggatattgcgctgatggatgcccataagggcgcagaaatgttcagacgcgtgcatgtacccgtgctgggcctggtccagaacatgtctgtttttcaatgtccaaagtgcaagcacaagacacatatattcggagccgatggcgctagaaaactggcgcagaccctggggcttgaagtcctcggcgatataccattgcatctgaacatcagggaggcatccgacacagggcagcctattgtgttctctcagcccgaaagcgatgaagcaaaggcctatttgaggatagcagttgaggtcgtgcgacgactcccttccccctctgaatag

SEQ ID NO: 79226 - DNA, 672 bp, Artificial Sequence
  derived and/or modified sequence
atgagcaaggccatcggcctgctggatgtggatgtgtatggccccagcgtgcccaagatgatgaacctgaagggcaaccctgagctgagccagagcaacctgatgaggcccctgctgaactatggaattgcctgcatgtccatgggcttcctggtggaggagagcgagcctgtggtgtggaggggcctgatggtgatgtctgccatcgagaagctgctgcggcaggtggactggggccagctggactacctggtggtggacatgcctcctggcactggagatgtgcagctgtctgtgtcccagaacatccccatcaccggggccgtcatcgtgtccaccccccaggacatcgccctgatggatgcccacaagggagctgagatgttccggcgggtgcacgtgcctgtgctgggcctggtgcagaacatgtctgtgttccagtgccccaagtgcaagcacaagacccacatctttggagcagatggagccaggaagctggcccagaccctgggcctggaggtgctgggggacatccccctgcacctgaacatccgggaggccagtgacaccggccagcccatcgtgttcagccagcctgagagtgatgaggccaaggcctacctgagaattgctgtggaggtggtgcggcggctgcccagccccagcgagtag

SEQ ID NO: 79227 - DNA, 672 bp, Artificial Sequence
  derived and/or modified sequence
atgagcaaggccatcggcctgctggacgtggacgtgtacggcccctcggtccccaaaatgatgaacctcaaagggaatcctgagctgagccagagcaacctcatgagaccgctactgaattatggcatagcttgtatgtccatgggcttcctggtggaagaaagcgaaccggtcgtgtggagaggactgatggtaatgtctgccatcgagaagctcctccggcaggtcgattggggtcagctcgactatctagttgttgatatgcccccagggactggtgatgtccaactctctgtctctcagaatattcctattacgggcgcagtcatcgtgagtaccccacaggatatagcattgatggatgcacacaagggtgccgagatgttccgccgggtacatgtacctgtcttaggattggtgcagaacatgagcgtatttcaatgcccgaaatgtaagcataaaacccacatatttggcgccgatggcgcgagaaagctggcgcagacacttggactggaagtattaggagatatacccctgcacctgaacatccgcgaggccagcgacaccgggcaacccatagtttttagccagcctgagagcgatgaggccaaagcgtacctgcgaatcgctgttgaagtcgttcggcggctgccatctccatccgagtag

SEQ ID NO: 79228 - DNA, 2685 bp, Artificial Sequence
  derived and/or modified sequence
atgtccaaggccattggtttgctagatgtggatgtgtatggaccttcagttccaaagatgatgaatctgaaaggaaatccggaattatcacagagcaacctaatgaggcctctcttgaattatggtattgcttgtatgtctatgggctttctggttgaagaaagtgaaccagtagtttggagaggccttatggtaatgtcggccattgagaaattgttgaggcaggtagattggggtcaactggactacttagttgtagacatgccaccaggaactggagatgtgcagttatcagtctcacagaatattcctataacaggtgctgtgattgtctccacgccccaggacatcgcattgatggatgcacacaagggtgctgagatgtttcgcagagtccacgtgcccgtccttggccttgtccaaaacatgagtgttttccagtgtccaaaatgtaaacacaaaactcatatttttggtgctgatggtgcaaggaaactagcacagacccttggtcttgaagttctaggagacattcccttacaccttaatataagggaagcttcagatacaggccagccaattgtgttttcacagcctgaaagtgatgaggccaaagcttacttgaggattgctgtggaagtggtaagaagattgccatcaccttcagaatgattccccaagtgtcctggaaatttgcctggtactgacattaagaggacctttggaaatcagcaatgtggtgatggaacctacagaaataatagaaatcataactgttttatttctaaggaaagaatgtcttcatatttgacttgctaagctaaggttcacaaaactttgatgtatcaatgttaactgctatatttaggaattttttgaaagctggtgtgtaccacctgcaaagaactgcattttattttattgaattacccctttagaaatcacgagtttatgatgttacaagtccattttgggagagaactgtacactttttgcaggaccacagaattagtaatttaaatgatatactaaatttgtgtatgggcataagtattacgccttcccaccaggcaatttggactgtctttgaatcctgtctttggtactgtcttggacatgttcttaatatgaacctctgcttcttcatctggatcacactataccccagacttaatgaatttcagtctccaggagtggagcctgaacatatgtatttttagtaagaccatgatgatgttgatgatgattctggtaatcatggcagtaagaataatagctaacatttaacaagttaattataattgttcttccatttgtgtgagtgggtactattatctccattttacagataagtaatttgagatataatttgaaggcactcaaccttgagtgtcttgctgagggttactgtatctagcaggtgatggagcttggatttgaacttgagtaattcgatattagattcatctttttgtacaccaatgtgcttttgttaattaaaaaaagtcggtggtggctaggcgtggtggctcacgcctgtaatcccagcactttgggaggttgaggtgggtggatcatgaggtcaggagttcaagaccagcctgaccaacatggtgaaaccccgtctctactaaaaatacaaaaattagctgggtgtggtggcatatgcctgtaatcccagctactcgggaggctgaggcaggagaatcatttcaacccgggaggctgaggttgcagtgagtggagattgtaccactgcactccagcctggtcaatggagtgcgactccatctcaaaaaaaaaaaaaaaaaaaaaaaaagtcgggggagatgcaatatttagcatttcctcaaactttttttggccatgaaatccaccacccccctcctttttcagagcatttcatgaagttcacatttcaaataatacattttgaaaaacatttatcttgtctaattgaagctcaaagagatagagtcaatgacttttcaaagtcaggtagcagatagttttaaagctgcaagtactgataagtgtgagccattagttaattcgcatttataaagaagtggtctgtcacttttggcaaatgtcttgacatctgttgctctacagttgtcaactagaaaattaggcatagagtttcacattattataagcatgttttcacacaaaaacatgtacattgatgtttattgcaattttatgtgtaataaccaaaaacaacccagattttcttcattgggtaaatgattaaacaaaccatagtacattcataccgtgagtgctactcagcaataaaaaagaacaaactatgggtacaggcagcaacttataattccagagaattatgctgaatgaaaaaggccaatttaaaaaggttttgtaccaaaagattccatttatataacgttcttgaagtgacataattatagaaatggagaacagattagtggtggctgtgttaaggagggggtgaggatgggagagaattgggcgtggctgtgagaaacatgagggatccttgtgatgatggaaatgttctatatcacagctatcgatgtcagtatcccagttgtgatattgtgctatagttttgcaagatgttaccactgggggaaattgggtgaagggcacatggaatctctgtattatttcaactgcatgtaaatctacaattatctc

SEQ ID NO: 79229 - DNA, 672 bp, Artificial Sequence
  derived and/or modified sequence
atgagtaaggcaattgggcttcttgacgtagacgtctacgggccttccgtccctaagatgatgaatttgaaaggcaatcccgaattgtcccaaagtaacttgatgaggcctttgctcaattacggaatcgcgtgcatgtccatgggcttcctggtcgaggagtctgaaccagtcgtgtggagagggttgatggtcatgagtgctatcgaaaagctcctgcggcaggttgattgggggcagttggattatttggtagtggatatgccccctggaaccggcgacgttcagctgtccgtgagtcagaatatccctatcaccggcgcagtcattgtgagcacaccacaagacattgccctgatggatgcacataagggggctgaaatgtttaggcgtgtgcatgtaccagtgctgggactcgtgcagaatatgtcagtattccagtgccccaagtgcaagcacaagacacatatcttcggcgcagacggagccaggaagctcgcgcaaacactgggcttggaggtcctaggtgatataccactacatctgaatattcgcgaggcttcggacaccggtcagccgatcgttttctctcagcccgaatcggacgaagccaaggcctacctgcggatcgcagtagaggtagtgcgacgtctgccctccccttccgagtag

SEQ ID NO: 79230 - DNA, 672 bp, Artificial Sequence
  derived and/or modified sequence
atgagcaaggccatcggcctgctggacgtggacgtgtacggccccagcgtgcccaagatgatgaacctgaagggcaaccccgagctgagccagagcaacctgatgagacccctgctgaactacggcatcgcctgcatgagcatgggcttcctggtggaggagagcgagcccgtggtgtggagaggcctgatggtgatgagcgccatcgagaagctgctgagacaggtggactggggccagctggactacctggtggtggacatgccccccggcaccggcgacgtgcagctgagcgtgagccagaacatccccatcaccggcgccgtgatcgtgagcaccccccaggacatcgccctgatggacgcccacaagggcgccgagatgttcagaagagtgcacgtgcccgtgctgggcctggtgcagaacatgagcgtgttccagtgccccaagtgcaagcacaagacccacatcttcggcgccgacggcgccagaaagctggcccagaccctgggcctggaggtgctgggcgacatccccctgcacctgaacatcagagaggccagcgacaccggccagcccatcgtgttcagccagcccgagagcgacgaggccaaggcctacctgagaatcgccgtggaggtggtgagaagactgcccagccccagcgagtag

SEQ ID NO: 79231 - protein, 334 aa, Artificial Sequence
  derived and/or modified sequence
MNLSLVLAAFCLGIASAVPKFDQNLDTKWYQWKATHRRLYGANEEGWRRAVWEKNMKMIELHNGEYSQGKHGFTMAMNAFGDMTNEEFRQMMGCFRNQKFRKGKVFREPLFLDLPKSVDWRKKGYVTPVKNQKQCGSCWAFSATGALEGQMFRKTGKLVSLSEQNLVDCSRPQGNQGCNGGFMARAFQYVKENGGLDSEESYPYVAVDEICKYRPENSVANDTGFTVVAPGKEKALMKAVATVGPISVAMDAGHSSFQFYKSGIYFEPDCSSKNLDHGVLVVGYGFEGANSNNSKYWLVKNSWGPEWGSNGYVKIAKDKNNHCGIATAASYPNV

SEQ ID NO: 79232 - DNA, 1005 bp, Artificial Sequence
  derived and/or modified sequence
atgaacctctctcttgttctggccgccttctgcctgggaatagcgagtgcagtcccaaagtttgaccagaacttagacactaagtggtatcaatggaaggccacccatagaaggctgtacggagccaacgaggaggggtggaggcgagcggtctgggaaaaaaatatgaaaatgatcgagctacacaacggagagtactctcagggaaaacacggttttactatggctatgaatgcttttggagacatgacaaatgaggagttccggcaaatgatgggctgctttagaaaccaaaaattccgcaaaggtaaggttttcagggagccgctgtttctagacctgcccaaaagcgtggactggcgcaagaaggggtacgtgacccctgtgaaaaaccaaaagcagtgcggaagttgttgggccttcagcgctacgggtgcattggaggggcagatgtttcgcaagactggcaagctagtttccctgtctgaacagaacttggtggactgttcccgaccacagggcaaccaggggtgcaacggtggattcatggcccgggcattccaatatgtgaaggagaatgggggcttagactcggaggagtcttacccttacgtggccgttgacgaaatttgtaagtacagacccgaaaactcggtcgccaacgacacaggtttcacagttgtggcccccggcaaggaaaaggcgctgatgaaggctgtcgcgacggttggtcccatttccgtggcgatggacgccggtcatagctcttttcagttttataagtccggcatctattttgagcccgactgctcatctaaaaacctggatcacggcgtacttgtggtgggctacgggtttgaaggcgcgaattctaacaattcgaagtactggctggtgaaaaactcttggggcccagagtggggctctaatggttatgttaagatcgccaaagacaagaataaccactgcgggatcgccacggccgcaagctatcccaatgtttag

SEQ ID NO: 79233 - DNA, 1005 bp, Artificial Sequence
  derived and/or modified sequence
atgaatctctctcttgtgctcgccgctttctgtctggggatagcctccgcagtacctaaattcgatcagaatcttgatactaagtggtaccagtggaaagctacccaccgccgcttgtacggcgcgaacgaggaaggttggcggagggctgtatgggaaaagaacatgaagatgatcgagttgcataacggagagtactctcagggcaagcacgggtttaccatggctatgaacgctttcggcgatatgaccaacgaggaattccgccaaatgatgggttgtttcaggaatcaaaagtttcgtaaggggaaagtatttagagaacccctgttcctcgatcttccgaagtctgtggactggagaaaaaaaggatacgtcacacctgtcaagaatcagaagcagtgtggttcttgctgggcgttttctgcgactggagccctggagggtcaaatgtttagaaaaaccggcaagctcgtttctctgtccgagcagaaccttgtggattgcagccggccacagggcaaccagggctgtaacgggggtttcatggcccgggccttccagtacgtgaaagaaaacgggggcctagattccgaggaatcttatccatatgtagcagtggatgagatctgtaagtatcgacccgagaattccgtggccaatgataccggctttacagtggtggcaccaggcaaagagaaggctctcatgaaggctgttgcaactgttgggcccatcagcgtggcgatggacgccgggcactcaagctttcaattctataaatcaggcatttattttgagcctgattgctcttcaaaaaacctcgatcatggggtcttagtggtcggatacggattcgagggcgccaactcgaataactccaagtactggctggtgaagaactcctgggggcctgagtggggatctaacggctacgtgaagattgcaaaggacaagaacaatcattgcgggattgcgacagccgcttcctacccaaatgtgtag

SEQ ID NO: 79234 - DNA, 1005 bp, Artificial Sequence
  derived and/or modified sequence
atgaacctgagcctggtgctggccgccttctgcctgggcatcgccagcgctgtgcccaagtttgaccagaacctggacaccaagtggtaccagtggaaggccacccacagaagactctacggggccaatgaggagggctggaggagagctgtgtgggagaagaacatgaagatgattgagctgcacaatggagagtacagccagggcaagcacggcttcaccatggccatgaatgccttcggggacatgaccaatgaggagttccggcagatgatgggctgcttcaggaaccagaagttcaggaagggcaaggtgttccgggagcccctcttcctggacctgcccaagtctgtggactggaggaagaagggctacgtgacccctgtgaagaaccagaagcagtgtggcagctgctgggccttcagcgccaccggggccctggagggccagatgttcaggaagacaggcaagctggtgtccctgtctgagcagaacctggtggactgcagccggccccagggcaaccagggctgcaatggaggcttcatggcccgggccttccagtatgtgaaggaaaatggaggcctggacagcgaggagagctacccctacgtggccgtggatgagatctgcaagtacagacctgagaacagcgtggccaatgacaccggcttcaccgtggtggcccctgggaaggagaaggccctgatgaaggctgtggccaccgtgggccccatctctgtggccatggatgctggccacagcagcttccagttctacaagagcggcatctactttgagccagactgcagcagcaagaacctggaccatggagtgctggtggtgggctacggctttgagggcgccaacagcaacaacagcaagtactggctggtgaagaacagctggggccctgagtggggcagcaatggctacgtgaagatcgccaaggacaagaacaaccactgcggcatcgccacagctgccagctacccaaatgtgtag

SEQ ID NO: 79235 - DNA, 1005 bp, Artificial Sequence
  derived and/or modified sequence
atgaacctgagcctggtgctggccgccttctgcctgggcatcgcctcagcagtgccgaaattcgaccagaacctagatactaagtggtatcagtggaaagctacacatcgacgcctctatggggcaaatgaggaagggtggagaagagccgtctgggaaaaaaacatgaagatgatcgaactgcacaatggagaatattcccaaggaaagcatggcttcaccatggcaatgaacgcctttggagacatgaccaatgaagagttccgccagatgatgggctgtttcagaaaccagaaatttcgcaaaggcaaagtattccgggagccacttttccttgacctgccaaagtctgtggactggcggaagaagggatacgtgaccccagtaaaaaatcagaaacaatgcggttcatgctgggcatttagcgctactggcgcactggaaggccaaatgttcaggaagaccggcaagctggtgtccctttctgaacagaacctggtggattgtagtagaccccaggggaatcagggttgcaatggcgggttcatggccagagcattccaatatgtgaaggaaaacggtgggctggactccgaagaaagttacccctatgttgccgtggacgagatctgtaagtaccgtcccgaaaactctgtggcaaatgacaccggattcactgtggttgccccagggaaagagaaagcactgatgaaagcggtggccaccgtaggccccatttcagtggcgatggacgccggacattcatcatttcagttctataagtccgggatctacttcgaaccagactgctcatctaaaaacttagatcacggcgtattggtcgtgggatatggtttcgagggcgccaactcaaacaacagtaagtattggctggtaaagaatagctggggtcccgaatggggttccaatggatatgttaagatagccaaggataagaacaatcactgtgggatcgctacagcagcttcctaccctaatgtgtag

SEQ ID NO: 79236 - DNA, 1005 bp, Artificial Sequence
  derived and/or modified sequence
atgaacctgagcctggtgctggccgccttctgcctgggcatcgcctcagcggtgcctaagtttgaccaaaacctggatactaagtggtatcagtggaaagcaacccataggagactatacggagctaacgaagagggatggcgtagggcggtctgggaaaagaacatgaagatgattgagctacacaacggcgagtactcacagggtaaacatggatttaccatggcgatgaatgcctttggagacatgaccaacgaggagtttaggcagatgatgggatgctttcggaatcagaaatttagaaaaggtaaggtctttagggaacctctgttcctggatctgcctaaaagcgtggactggcgaaagaagggctacgtaaccccggtgaaaaaccagaagcaatgcggctcatgctgggctttcagtgctactggagctctggaaggccagatgtttaggaaaactggtaagctcgtgtctctgtcggagcagaacctggtcgactgctcccgccctcagggcaatcagggatgcaacggaggcttcatggcgagggccttccaatatgttaaagagaatggtggactggattcggaagaatcctatccttatgtggcagtagatgagatttgtaagtacaggccagaaaattctgtggctaatgataccggtttcaccgtcgttgccccagggaaagagaaggcccttatgaaggccgtcgctaccgtcggcccaatctccgtagcgatggatgctgggcacagttcttttcaattctataagagtggcatatacttcgaacctgattgcagctccaagaatcttgaccacggcgtgttggtagtaggttatggcttcgagggggctaactctaacaatagcaagtactggctggtaaagaattcctggggacctgaatggggcagcaatggttatgtgaagattgcaaaagacaaaaataatcattgtggcatcgcaaccgccgcaagttaccctaacgtctag

SEQ ID NO: 79237 - DNA, 1005 bp, Artificial Sequence
  derived and/or modified sequence
atgaatttaagtcttgtgctggctgccttttgtctgggcatcgcaagcgcagtcccaaagttcgatcagaaccttgataccaaatggtatcaatggaaggccacacaccggagactgtacggtgccaatgaagaagggtggagacgagccgtctgggagaagaacatgaaaatgattgaactccacaacggggagtacagccaaggcaagcacgggttcaccatggccatgaatgcctttggtgacatgactaacgaagaattccggcagatgatggggtgttttcggaaccagaagttccgtaagggaaaggttttcagggaaccgctgttcctagatcttcccaagagtgttgactggagaaagaagggatatgtcactcccgtgaagaatcagaaacagtgcgggtcttgctgggcctttagcgcgaccggcgcattagagggtcaaatgtttcgcaaaacaggaaagctcgtatccctgtcagagcagaatctggttgactgtagccgacctcaggggaatcagggctgcaatgggggattcatggcacgggcatttcagtatgtcaaggagaatggcggacttgactccgaggaatcctatccatatgtagcagttgacgagatctgcaaataccgcccagagaactccgtggcgaacgatacaggctttacagtggtggccccaggaaaggaaaaagctctgatgaaagctgttgcgacagtggggcctatctccgtggcgatggatgcgggtcactcgtcgtttcagttctacaaatccgggatttattttgaaccagactgttccagcaagaacctggatcatggcgtgctggttgttgggtatgggttcgagggcgcaaactctaacaattccaagtactggttagttaaaaattcctggggcccagagtggggatcaaatggatatgtgaagatcgccaaggataagaacaatcactgtggcattgctacagccgcttcttatccgaatgtctag

SEQ ID NO: 79238 - DNA, 1005 bp, Artificial Sequence
  derived and/or modified sequence
atgaatctatccctcgtgcttgctgcattttgcctgggtattgcctcggctgttccgaagtttgatcaaaatcttgacacaaagtggtatcagtggaaggccactcaccggagactgtatggagccaatgaggaaggctggagacgggctgtttgggagaagaacatgaagatgatagagctgcataacggagagtactcgcaagggaaacatggttttaccatggctatgaatgccttcggtgacatgaccaatgaggagttcagacagatgatgggctgttttaggaatcaaaaattcagaaaggggaaagttttccgcgagcctttgttcctcgatctccctaaaagcgtggactggcgaaaaaagggatacgtcacacccgttaagaatcagaagcagtgtggctcctgttgggccttcagcgctacaggggcactcgagggtcagatgttcagaaagaccggcaaattagtgtcgctgagtgagcagaaccttgtagattgttctcggcctcaaggaaaccaggggtgtaatggaggatttatggccagagcgttccagtacgtcaaggagaacgggggactagacagcgaggagagctacccctacgtcgctgtggacgaaatctgcaagtatcgcccagaaaactccgtcgccaacgacactggattcacagtcgtggccccaggcaaggagaaagctttaatgaaggctgtggcgaccgtgggccctatcagtgtagcaatggatgccggtcactctagctttcaattctataaatcgggaatttatttcgagcccgattgcagttctaaaaacctggatcacggagtgctcgtcgtcggatacggttttgaaggagcaaatagcaacaattcgaaatactggctcgtgaagaactcgtggggcccagagtggggttcgaatggatacgtgaaaattgctaaggataaaaacaatcattgtggcatcgccactgctgctagctatcctaatgtctag

SEQ ID NO: 79239 - DNA, 1546 bp, Artificial Sequence
  derived and/or modified sequence
ggtaggcgcgcccagacctgagacgggttgggactgggctgcgtcacgcgcgggctctaagcgcccggggccccgcccagtggccggcacagccaatcgcagcgcgggaaggcggtgggggcggggaaggccgcctggaaacttaaatcccgaggcgggcgaacctgcaccagaccgcggacgtctgtaatctcagaggcttgtttgctgagggtgcctgcgcagctgcgacggctgctggttttgaaacatgaatctttcgctcgtcctggctgccttttgcttgggaatagcctccgctgttccaaaatttgaccaaaatttggatacaaagtggtaccagtggaaggcaacacacagaagattatatggcgcgaatgaagaaggatggaggagagcagtgtgggaaaagaatatgaaaatgattgaactgcacaatggggaatacagccaagggaaacatggcttcacaatggccatgaatgcttttggtgacatgaccaatgaagaattcaggcagatgatgggttgctttcgaaaccagaaattcaggaaggggaaagtgttccgtgagcctctgtttcttgatcttcccaaatctgtggattggagaaagaaaggctacgtgacgccagtgaagaatcagaaacagtgtggttcttgttgggcttttagtgcgactggtgctcttgaaggacagatgttccggaaaactgggaaacttgtctcactgagcgagcagaatctggtggactgttcgcgtcctcaaggcaatcagggctgcaatggtggcttcatggctagggccttccagtatgtcaaggagaacggaggcctggactctgaggaatcctatccatatgtagcagtggatgaaatctgtaagtacagacctgagaattctgttgctaatgacactggcttcacagtggtcgcacctggaaaggagaaggccctgatgaaagcagtcgcaactgtggggcccatctccgttgctatggatgcaggccattcgtccttccagttctacaaatcaggcatttattttgaaccagactgcagcagcaaaaacctggatcatggtgttctggtggttggctacggctttgaaggagcaaattcgaataacagcaagtattggctcgtcaaaaacagctggggtccagaatggggctcgaatggctatgtaaaaatagccaaagacaagaacaaccactgtggaatcgccacagcagccagctaccccaatgtgtgagctgatggatggtgaggaggaaggacttaaggacagcatgtctggggaaattttatcttgaaactgaccaaacgcttattgtgtaagataaaccagttgaatcattgaggatccaagttgagattttaattctgtgacatttttacaagggtaaaatgttaccactactttaattattgttatacacagctttatgatatcaaagactcattgcttaattctaagacttttgaattttcattttttaaaaagatgtacaaaacagtttgaaataaattttaattcgtatat

SEQ ID NO: 79240 - DNA, 1052 bp, Artificial Sequence
  derived and/or modified sequence
cttctaaagccctgatgcacccacccttaagtggaaggttttgaaacatgaatctttcgctcgtcctggctgccttttgcttgggaatagcctccgctgttccaaaatttgaccaaaatttggatacaaagtggtaccagtggaaggcaacacacagaagattatatggcgcgaatgaagaaggatggaggagagcagtgtgggaaaagaatatgaaaatgattgaactgcacaatggggaatacagccaagggaaacatggcttcacaatggccatgaatgcttttggtgacatgaccaatgaagaattcaggcagatgatgggttgctttcgaaaccagaaattcaggaaggggaaagtgttccgtgagcctctgtttcttgatcttcccaaatctgtggattggagaaagaaaggctacgtgacgccagtgaagaatcagaaacagtgtggttcttgttgggcttttagtgcgactggtgctcttgaaggacagatgttccggaaaactgggaaacttgtctcactgagcgagcagaatctggtggactgttcgcgtcctcaaggcaatcagggctgcaatggtggcttcatggctagggccttccagtatgtcaaggagaacggaggcctggactctgaggaatcctatccatatgtagcagtggatgaaatctgtaagtacagacctgagaattctgttgctaatgacactggcttcacagtggtcgcacctggaaaggagaaggccctgatgaaagcagtcgcaactgtggggcccatctccgttgctatggatgcaggccattcgtccttccagttctacaaatcaggcatttattttgaaccagactgcagcagcaaaaacctggatcatggtgttctggtggttggctacggctttgaaggagcaaattcgaataacagcaagtattggctcgtcaaaaacagctggggtccagaatggggctcgaatggctatgtaaaaatagccaaagacaagaacaaccactgtggaatcgccacagcagccagctaccccaatgtgtga

SEQ ID NO: 79241 - DNA, 1005 bp, Artificial Sequence
  derived and/or modified sequence
atgaacctgagcctggtgctggccgccttctgcctgggcatcgccagcgccgtgcccaagttcgaccagaacctggacaccaagtggtaccagtggaaggccacccacagaagactgtacggcgccaacgaggagggctggagaagagccgtgtgggagaagaacatgaagatgatcgagctgcacaacggcgagtacagccagggcaagcacggcttcaccatggccatgaacgccttcggcgacatgaccaacgaggagttcagacagatgatgggctgcttcagaaaccagaagttcagaaagggcaaggtgttcagagagcccctgttcctggacctgcccaagagcgtggactggagaaagaagggctacgtgacccccgtgaagaaccagaagcagtgcggcagctgctgggccttcagcgccaccggcgccctggagggccagatgttcagaaagaccggcaagctggtgagcctgagcgagcagaacctggtggactgcagcagaccccagggcaaccagggctgcaacggcggcttcatggccagagccttccagtacgtgaaggagaacggcggcctggacagcgaggagagctacccctacgtggccgtggacgagatctgcaagtacagacccgagaacagcgtggccaacgacaccggcttcaccgtggtggcccccggcaaggagaaggccctgatgaaggccgtggccaccgtgggccccatcagcgtggccatggacgccggccacagcagcttccagttctacaagagcggcatctacttcgagcccgactgcagcagcaagaacctggaccacggcgtgctggtggtgggctacggcttcgagggcgccaacagcaacaacagcaagtactggctggtgaagaacagctggggccccgagtggggcagcaacggctacgtgaagatcgccaaggacaagaacaaccactgcggcatcgccaccgccgccagctaccccaacgtgtag

SEQ ID NO: 79242 - protein, 598 aa, Artificial Sequence
  derived and/or modified sequence
MPCIQAQYGTPAPSPGPRDHLASDPLTPEFIKPTMDLASPEAAPAAPTALPSFSTFMDGYTGEFDTFLYQLPGTVQPCSSASSSASSTSSSSATSPASASFKFEDFQVYGCYPGPLSGPVDEALSSSGSDYYGSPCSAPSPSTPSFQPPQLSPWDGSFGHFSPSQTYEGLRAWTEQLPKASGPPQPPAFFSFSPPTGPSPSLAQSPLKLFPSQATHQLGEGESYSMPTAFPGLAPTSPHLEGSGILDTPVTSTKARSGAPGGSEGRCAVCGDNASCQHYGVRTCEGCKGFFKRTVQKNAKYICLANKDCPVDKRRRNRCQFCRFQKCLAVGMVKEVVRTDSLKGRRGRLPSKPKQPPDASPANLLTSLVRAHLDSGPSTAKLDYSKFQELVLPHFGKEDAGDVQQFYDLLSGSLEVIRKWAEKIPGFAELSPADQDLLLESAFLELFILRLAYRSKPGEGKLIFCSGLVLHRLQCARGFGDWIDSILAFSRSLHSLLVDVPAFACLSALVLITDRHGLQEPRRVEELQNRIASCLKEHVAAVAGEPQPASCLSRLLGKLPELRTLCTQGLQRIFYLKLEDLVPPPPIIDKIFMDTLPF

SEQ ID NO: 79243 - DNA, 2699 bp, Artificial Sequence
  derived and/or modified sequence
ggagcgcttaagaggagggtcgggctcggccggggagtcccagtggcggaggctacgaaacttgggggagtgcacagaagaacttcgggagcgcacgcgggaccagggaccaggctgagactcggggcgccagtccgggcaggggcagcgggagccggccgggtagggtgcagcctgaggcttgttcagcagaacaggtgcaagccacattgttgccaagacctgcctgaagccggattctccccactgcctccttcaaccccgcctcttcctcctcctgtgggactgctcccccctcctgtgaggctagatagatgccctgtatccaagcccaatatgggacaccagcaccgagtccgggaccccgtgaccacctggcaagcgaccccctgacccctgagttcatcaagcccaccatggacctggccagccccgaggcagcccccgctgcccccactgccctgcccagcttcagcaccttcatggacggctacacaggagagtttgacaccttcctctaccagctgccaggaacagtccagccatgctcctcagcctcctcctcggcctcctccacatcctcgtcctcagccacctcccctgcctctgcctccttcaagttcgaggacttccaggtgtacggctgctaccccggccccctgagcggcccagtggatgaggccctgtcctccagtggctctgactactatggcagcccctgctcggccccgtcgccctccacgcccagcttccagccgccccagctctctccctgggatggctccttcggccacttctcgcccagccagacttacgaaggcctgcgggcatggacagagcagctgcccaaagcctctgggcccccacagcctccagccttcttttccttcagtcctcccaccggccccagccccagcctggcccagagccccctgaagttgttcccctcacaggccacccaccagctgggggagggagagagctattccatgcctacggccttcccaggtttggcacccacttctccacaccttgagggctcggggatactggatacacccgtgacctcaaccaaggcccggagcggggccccaggtggaagtgaaggccgctgtgctgtgtgtggggacaacgcttcatgccagcattatggtgtccgcacatgtgagggctgcaagggcttcttcaagcgcacagtgcagaaaaacgccaagtacatctgcctggctaacaaggactgccctgtggacaagaggcggcgaaaccgctgccagttctgccgcttccagaagtgcctggcggtgggcatggtgaaggaagttgtccgaacagacagcctgaaggggcggcggggccggctaccttcaaaacccaagcagcccccagatgcctcccctgccaatctcctcacttccctggtccgtgcacacctggactcagggcccagcactgccaaactggactactccaagttccaggagctggtgctgccccactttgggaaggaagatgctggggatgtacagcagttctacgacctgctctccggttctctggaggtcatccgcaagtgggcggagaagatccctggctttgctgagctgtcaccggctgaccaggacctgttgctggagtcggccttcctggagctcttcatcctccgcctggcgtacaggtctaagccaggcgagggcaagctcatcttctgctcaggcctggtgctacaccggctgcagtgtgcccgtggcttcggggactggattgacagtatcctggccttctcaaggtccctgcacagcttgcttgtcgatgtccctgccttcgcctgcctctctgcccttgtcctcatcaccgaccggcatgggctgcaggagccgcggcgggtggaggagctgcagaaccgcatcgccagctgcctgaaggagcacgtggcagctgtggcgggcgagccccagccagccagctgcctgtcacgtctgttgggcaaactgcccgagctgcggaccctgtgcacccagggcctgcagcgcatcttctacctcaagctggaggacttggtgccccctccacccatcattgacaagatcttcatggacacgctgcccttctgacccctgcctgggaacacgtgtgcacatgcgcactctcatatgccaccccatgtgcctttagtccacggacccccagagcacccccaagcctgggcttgagctgcagaatgactccaccttctcacctgctccaggaggtttgcagggagctcaagcccttggggagggggatgccttcatgggggtgaccccacgatttgtcttatcccccccagcctggccccggcctttatgttttttgtaagataaaccgtttttaacacatagcgccgtgctgtaaataagcccagtgctgctgtaaatacaggaagaaagagcttgaggtgggagcggggctgggaggaagggatgggccccgccttcctgggcagcctttccagcctcctgctggctctctcttcctaccctccttccacatgtacataaactgtcactctaggaagaagacaaatgacagattctgacatttatatttgtgtattttcctggatttatagtatgtgacttttctgattaatatatttaatatattgaataaaaaatagacatgtagttggaaaaaaaaaaaaaaaaaaaaaaaaaaaaaaa

SEQ ID NO: 79244 - DNA, 1797 bp, Artificial Sequence
  derived and/or modified sequence
atgccttgtatccaggctcagtatggaacgcctgctccaagtccaggccctagggaccacctcgcctccgacccgttgacacctgagttcattaaaccgactatggacctggccagtccggaggcagctccggccgcccccacagcactgccctcctttagtacgtttatggacggctacaccggcgagttcgatacgttcctgtaccaactgcctggtacagtacagccgtgcagttccgcaagttcgtccgcaagttctacgagcagtagctccgccacatctccagccagtgccagttttaagttcgaagattttcaggtatacggttgttacccaggacccttatctggacctgtggacgaggccctaagctcgtcagggtctgactattatgggagcccctgcagtgcaccaagcccttccacacctagttttcaaccgcctcagctttccccctgggatggcagctttgggcactttagcccgtcccagacttacgaggggctgcgagcatggactgaacagttaccgaaagcttcaggccctcctcagcctcctgccttcttcagcttctcacctccaacaggccccagtccaagtctcgcgcagtcccccctgaagctcttcccttcacaagctactcatcagcttggcgaaggggagtcctactctatgccgacagcatttcctgggctcgcaccgacaagtccccacttagaagggagcggtattctggatacccccgtcacatcaacaaaagctcgttctggcgcccccgggggttccgagggcagatgcgcggtatgcggagataacgcctcctgccaacactacggggtgcgcacctgtgagggatgtaaaggcttcttcaaaagaaccgtgcaaaagaacgctaagtatatctgcctcgccaataaggactgcccggtggacaagaggcgccgcaaccgctgccagttctgtagatttcaaaagtgccttgcagtgggaatggtgaaggaagtagtgcgaacagactccctgaaggggagacgcgggcgcctgccatcaaagccaaagcaaccacctgacgcttcccccgctaacctcctcacgtcgctcgtgcgagcacacttggactccgggccctctaccgcaaaactggactattccaagttccaggagctggtcctccctcattttggaaaggaagacgccggcgatgtccaacagttttatgatctgctttcgggctctctggaagtcataaggaagtgggccgaaaagatccccggattcgccgaattgagtcctgccgatcaggacttactcctcgaatctgcttttttggagctgttcatcctcaggctggcatataggtccaagcccggcgaagggaaattgatcttttgctccggattggtactgcaccgacttcagtgcgcacgggggtttggagactggatcgactctattcttgcttttagccggtcactgcacagtctcctcgtggacgtccccgccttcgcttgtcttagcgctttagtgttgattacggaccggcatggtctccaagagcctcgccgcgtcgaggaactgcagaaccggattgcctcatgtttgaaggagcacgtggccgctgtggcaggagaaccgcagcccgcatcttgtttgagcagactgctgggaaaattacccgaactccgcactctttgtacccaaggactgcaaaggatattttatcttaagctcgaagatttggtgccccccccacccataatagacaaaatctttatggacacgctcccattttag

SEQ ID NO: 79245 - DNA, 1836 bp, Artificial Sequence
  derived and/or modified sequence
atgtggctggcaaaggcatgttggtcaatccaaagcgaaatgccctgtatccaggcacagtacggtacgccagctcctagccccggccctagagaccatctggcgagtgaccctctaacgccggaatttataaagcccactatggacttggccagccccgaggctgccccggccgcccccaccgctctaccatctttttctaccttcatggatggttacaccggcgaatttgatacgttcctgtatcagctccccggaactgtgcagccatgctcgtccgccagttcaagcgcaagctccacgtcttcctctagcgctaccagccctgcgagcgctagctttaaatttgaagactttcaggtctatggctgctatcctgggcctctgagtggacctgtggacgaagcattaagttctagcggttccgactactatggctctccttgtagtgctcctagtccatccacaccatcattccagccccctcaactgtctccctgggacgggtccttcggacatttctccccatcccagacctatgaggggctccgagcgtggactgaacagctgcccaaggctagtggacctcctcagcctcctgcctttttttccttctctccccctaccggcccaagtcccagcctggctcagtctcctctgaagctgttcccttcccaggcaactcatcagctgggggagggtgagtcctatagcatgcctaccgcttttcccggcctcgccccgacctcacctcatctcgagggatcaggaattttggatacccccgtaaccagcaccaaggcccgctccggggctccgggcggatcagagggcagatgtgccgtctgcggtgataatgcttcatgccagcactacggagtacggacctgtgaaggatgcaagggcttctttaaacggacagtgcagaaaaatgccaagtacatatgcctggccaacaaggactgccccgtggataagaggaggaggaatcggtgccagttctgtagattccaaaaatgtctggctgttggaatggtcaaagaggtcgtcaggacggactctctcaaaggtaggagaggccgattaccctctaaacccaagcagcctcctgatgcctcaccggccaacctgctcacatctctcgtccgcgcccacctcgatagtggtccatcaacagctaagctggactattcaaagttccaagagctcgtcctacctcatttcgggaaggaggacgccggggacgtccaacaattttatgatctgcttagtgggtcactcgaggtgattaggaaatgggctgagaagatccccggatttgccgagctcagccccgctgatcaagacctgctgctggagtcagcgttcttggagctgtttatactgcgtctggcctaccgctcgaaaccaggcgagggcaaactgattttttgcagcgggctggtacttcacaggctccagtgtgccagaggtttcggtgattggatcgactccatactcgccttcagcaggtcattacacagcctgctggttgatgtccccgccttcgcatgtcttagtgccctggtgttgatcaccgaccgacacggactgcaagagcccagacgcgtggaggagctgcagaaccgcatcgccagttgcctcaaggagcacgtcgcagccgtggctggcgaaccgcaacctgcctcatgtctgagccggctgttgggtaagttgccagaactgcgcacgttatgtacacagggtctacagcgtatattttacttaaagctggaagatcttgtgccaccaccacctatcattgacaagatcttcatggacacccttccgttctag

SEQ ID NO: 79246 - DNA, 1797 bp, Artificial Sequence
  derived and/or modified sequence
atgccctgcattcaagcgcaatatggcacccccgcgcctagtcctggcccccgtgatcatctggcctcggatccactgactcccgaatttattaagccgaccatggatctggccagcccagaagccgcacccgcagcacccacagctttaccatctttttctacctttatggatggctataccggggagtttgacacattcctttaccagctcccaggcacagtgcagccttgttcatctgcctctagttctgcaagctcaacttcaagctcttcagcgactagccccgccagcgcaagcttcaaatttgaagacttccaggtgtatggatgctatcctgggcctctgtccggtccagtggacgaagccctgtcctcctctggtagcgattactatggctccccatgcagtgccccgagtccgtcaaccccatcattccaacctccacagctctctccgtgggatgggtcttttggacattttagccctagtcagacgtatgaagggctgagagcttggacagaacagctacctaaggcttcaggcccacctcaacctccagcattttttagctttagcccacccacaggccccagcccttctctcgctcaatctcctcttaagctgtttccttcacaggcaacacaccaattaggcgaaggcgagagctattcaatgcccacagctttccctggactggccccaacatccccacacctcgaaggttcaggcatactcgacactcccgttacatcgacaaaggctagatctggcgctcctggaggatcagagggtagatgcgcagtatgtggcgacaacgcgtcgtgccaacattacggggtacgtacttgtgaagggtgtaagggattctttaaaaggaccgtgcagaaaaacgcaaagtacatttgtctggctaacaaggattgtcctgtcgataaaaggcgtcgcaatcgatgccaattctgtaggttccaaaagtgcttagctgtcggcatggtgaaagaggttgtgcgcaccgactccctgaagggtaggcgaggccgtctcccttccaaacctaagcaacctcccgatgcctctcctgcaaacttattaactagcctcgtcagggcgcatcttgactccggaccttccacggccaaactcgattactcaaagttccaagagctggtgctgcctcattttgggaaagaggatgcgggagatgtccagcagttctacgacctgctctccggctcactggaggtgattcgaaagtgggctgagaagatccctggattcgctgagctgtcccctgccgatcaggacctcctgctggaaagcgccttcctggaactctttattctccgtcttgcgtacaggtccaagccaggcgaggggaaactaatcttttgctcaggccttgtgctacatagactgcagtgcgccaggggttttggagactggattgactccatcctggctttctcacgctccctgcatagcttgctggtggacgtccctgcgttcgcatgcttgtccgccctcgtgctgatcactgaccggcacggccttcaggagccccgcagagtagaggagctgcagaatcggatagctagctgtctcaaggaacacgttgccgccgttgcgggtgaacctcagccagcatcatgcctctcacggctgctcggtaagctgcctgagttgcggaccttgtgtacccaagggcttcagcggattttctacctgaaattagaagacttggttcctcctccaccaataattgataaaatttttatggatacattgcctttctag

SEQ ID NO: 79247 - DNA, 1797 bp, Artificial Sequence
  derived and/or modified sequence
atgccttgcatccaggcgcaatacggcactccagcaccctcccctggcccccgcgatcacttggcatctgatcctttaacccctgaattcataaagccaactatggacctcgcctcgcctgaggccgcacccgccgcacctaccgcgctcccgtccttttcaacattcatggacggttacacgggagaattcgatacctttctgtaccagctgcctggcactgtgcaaccgtgttccagtgcctctagctcagccagtagtacatctagcagcagcgcgacatcccctgcttccgcctcttttaagtttgaggacttccaagtgtacggctgctaccccggtccactgtcagggcccgtagatgaagccttgtcatcttcaggctcggactattatggtagcccatgctccgccccttcccccagcactcccagcttccagcctcctcagctgtctccatgggacggatctttcggccacttcagcccttcgcagacgtacgagggtctccgcgcttggacagaacagttgccaaaagcaagcgggccaccacagccaccggccttttttagcttttcgccaccaactggcccttctccatccctggcccagtcgcccctcaagctgtttcctagccaggctactcaccagctgggagagggggagagttattccatgccaaccgcctttcccggcttggcacccaccagccctcacctcgagggctctggaattctggacacaccagttacaagcacgaaggctaggtcgggggcgccaggcggctctgagggaaggtgtgcagtctgtggcgacaatgcttcctgccagcactatggagtgagaacttgcgagggctgtaaggggttcttcaaacgaaccgtgcagaagaatgccaagtacatctgtctggcaaacaaggactgccccgtggacaaacgtcgtcgtaacagatgccagttctgtcgcttccagaaatgtctggccgtaggcatggttaaagaggttgtgcgaactgacagcctcaagggccggagaggtagactgccctccaaaccaaaacagccacctgatgcatctcccgctaatttacttacctccctggtgagggctcacttggactcgggcccctctacagctaagttagactacagcaaatttcaagagttggtcctgcctcattttggcaaggaggatgcaggggacgtgcagcagttttacgatttacttagcggtagtctggaagtaatccgcaaatgggctgagaagatacccggattcgctgagctgtctcctgcggaccaggatctgcttttggagagcgcctttctggaactcttcatattgcggctcgcatacaggtccaagcctggtgagggaaagctcattttctgcagcggacttgtgctccaccgactgcagtgtgccagggggtttggggattggatcgatagcatcctggctttttcgaggtccctgcacagcctgctggtggacgtccctgctttcgcgtgcctctccgccctcgtactcatcactgacagacatggcctgcaagaaccgcgtagggttgaagagctccagaataggatcgcctcttgtctcaaagagcacgtggcagccgtggccggagagccacagccagcctcctgcctgtcccggctgctcggtaaactgcccgaactgaggactctttgcacccagggtctccagcggatcttttaccttaagctcgaggacctggtcccaccacctcccatcatcgataaaatctttatggacacactccctttctag

SEQ ID NO: 79248 - DNA, 1836 bp, Artificial Sequence
  derived and/or modified sequence
atgtggctcgccaaagcttgctggtctatccagtccgagatgccgtgtatccaggcacagtatggaaccccggcaccatctcccgggccacgtgatcatcttgcttctgatcctttgacgccggaattcatcaaacctaccatggatctcgccagtcccgaagcagctcctgccgctcccacggctctgccctctttttcaacttttatggatggctacaccggcgagtttgacactttcctgtatcagttgcctggcactgtgcagccttgttcaagcgcaagtagcagcgcaagcagcacatccagctcttctgccacaagccccgccagtgcttcctttaagtttgaagatttccaggtttacgggtgttaccccggacccctttctggccccgtggacgaagctctgtcctcctccggttccgattattacgggtccccatgttccgcccccagcccctcaaccccctcgttccaacctccacagttgagtccgtgggacggaagttttggacacttttccccttcacagacatacgaaggtcttcgcgcatggaccgagcagctccctaaagcatctgggccccctcagcctcccgccttcttcagcttctcccctccgaccggccccagcccgagtctggctcagagccccctcaaactcttcccgagtcaggccacacatcagctcggcgagggggaaagctactcaatgccaactgcattcccgggtttagctcccacctcaccacatctggagggatccggaatcttggacaccccagtaacaagcactaaagctcgatcaggggctcccggtggatcagaaggcagatgtgccgtgtgcggcgataacgcttcttgtcagcactacggtgtgcgcacatgcgaaggctgcaaagggtttttcaaaagaacagttcagaagaacgctaaatacatttgtctggccaataaagactgtccagtggacaagagaaggcgcaatcgctgccagttctgtagatttcaaaaatgtctcgcggttggtatggtgaaggaggtggtgcgtaccgactccctaaaaggccgcagggggaggcttccttccaagcctaaacagccacccgacgcctcccctgcgaacctgctgacttccctggtacgcgcccacctggatagcggtccttccactgctaaactggattactctaagttccaggagctggtccttccacattttggcaaagaagatgccggtgatgttcaacagttctacgacctcctgtcaggatcacttgaggtcatccgcaagtgggccgagaagattccgggcttcgccgaactctcacccgctgaccaagatctgctcctagagtccgcattcctcgaactgttcattttgaggctggcttataggtctaagccgggcgaaggaaagctcatcttctgctctggactcgtgctccaccgcctgcagtgtgcccgggggtttggggattggatagacagcatattggctttctcccgctcactgcatagcttactcgtcgatgtccccgcctttgcctgtctgtcagctctcgtcctcatcacagatcggcatggcctccaggagcctaggcgtgtagaagagctgcagaaccgaattgcttcatgcctgaaggaacatgtcgccgccgtcgccggcgaacctcagcccgcctcatgtctgagccgtcttctgggcaaattgcccgagcttcggacattgtgcacacagggcctgcagcgaattttctatctaaaactcgaggacttggttccacccccacccatcatcgacaaaattttcatggataccttgcctttttag

SEQ ID NO: 79249 - DNA, 1797 bp, Artificial Sequence
  derived and/or modified sequence
atgccctgcatccaggcccagtatggcaccccagcccccagccctggcccccgggaccacctggccagtgaccccctgaccccagagttcatcaagcccaccatggacctggccagccctgaggccgccccagctgcccccacagccctgcccagcttcagcaccttcatggatggctacacaggagaatttgacaccttcctgtaccagctgcccggcaccgtgcagccctgcagcagcgccagcagcagcgccagcagcaccagcagcagcagcgccaccagccctgccagcgccagcttcaagtttgaggacttccaggtgtatggctgctacccaggccccctgagcggccctgtggatgaggccctgagcagcagcggcagtgactactacggcagcccctgcagcgcccccagccccagcacccccagcttccagcccccccagctgagcccctgggatggcagctttggccacttcagccccagccagacctatgagggcctgcgggcctggacagagcagctgcccaaggccagcggccccccccagcccccagccttcttctccttcagcccccccaccggccccagccccagcctggcccagagccccctgaagctgttccccagccaggccacccaccagctgggggagggggagagctacagcatgcccacagccttccctggcctggcccccaccagcccccacctggagggcagcggcatcctggacacccctgtgaccagcaccaaggcccggagcggggcccctgggggcagcgagggccgctgtgctgtgtgtggggacaatgccagctgccagcactatggagtgaggacctgtgagggctgcaagggcttcttcaagaggacagtgcagaagaatgccaagtacatctgcctggccaacaaggactgccctgtggacaagagaagaagaaaccgctgccagttctgccgcttccagaagtgcctggccgtgggcatggtgaaggaggtggtgaggacagacagcctgaagggcagaagaggccgcctgcccagcaagcccaagcagcccccagatgccagccctgccaacctgctgaccagcctggtgcgggcccacctggacagcggccccagcacagccaagctggactacagcaagttccaggagctggtgctgccccactttgggaaggaggatgctggagatgtgcagcagttctatgacctgctgagcggcagcctggaggtgatcaggaagtgggccgagaagatccctggctttgctgagctgagccctgctgaccaggacctgctgctggagagcgccttcctggagctgttcatcctgcggctggcctaccgcagcaagccaggagagggcaagctgatcttctgcagcggcctggtgctgcaccggctgcagtgtgcccggggctttggagactggattgacagcatcctggccttcagccgcagcctgcacagcctgctggtggatgtgcctgcctttgcctgcctgagcgccctggtgctgatcacagacagacatggcctgcaggagccccggcgggtggaggagctgcagaacagaattgccagctgcctgaaggagcacgtggccgctgtggccggggagccccagcctgccagctgcctgagccggctgctgggcaagctgcctgagctgcggaccctgtgcacccagggcctgcagaggatcttctacctgaagctggaggacctggtgcccccaccacccatcatcgacaagatcttcatggacaccctgcccttctag

SEQ ID NO: 79250 - DNA, 1836 bp, Artificial Sequence
  derived and/or modified sequence
atgtggctggccaaggcctgctggagcatccagagcgagatgccctgcatccaggcccagtatggcaccccagcccccagccctggcccccgggaccacctggccagtgaccccctgaccccagagttcatcaagcccaccatggacctggccagccctgaggccgccccagctgcccccacagccctgcccagcttcagcaccttcatggatggctacaccggggagtttgacaccttcctgtaccagctgcccggcaccgtgcagccctgcagcagcgccagcagcagcgccagcagcaccagcagcagcagcgccaccagccctgccagcgccagcttcaagtttgaggacttccaggtgtatggctgctacccaggccccctgagcggccctgtggatgaggccctgagcagcagcggcagtgactactacggcagcccctgcagcgcccccagccccagcacccccagcttccagcccccccagctgagcccctgggatggcagctttggccacttcagccccagccagacctatgagggcctgcgggcctggacagagcagctgcccaaggccagcggccccccccagcccccagccttcttctccttcagccccccaacaggccccagccccagcctggcccagagccccctgaagctgttccccagccaggccacccaccagctgggggagggggagagctacagcatgcccacagccttccctggcctggcccccaccagcccccacctggagggcagcggcatcctggacacccctgtgaccagcaccaaggcccggagcggggcccctgggggcagcgagggccgctgtgctgtgtgtggggacaatgccagctgccagcactacggcgtgaggacctgtgagggctgcaagggcttcttcaagaggacagtgcagaagaatgccaagtacatctgcctggccaacaaggactgccctgtggacaagagaagaagaaaccgctgccagttctgccgcttccagaagtgcctggccgtgggcatggtgaaggaggtggtgaggacagacagcctgaagggccggcggggccgcctgcccagcaagcccaagcagcccccagatgccagccctgccaacctgctgaccagcctggtgcgggcccacctggacagcggccccagcacagccaagctggactacagcaagttccaggagctggtgctgccccactttgggaaggaggatgctggagatgtgcagcagttctatgacctgctgagcggcagcctggaggtgatcaggaagtgggccgagaagatccctggctttgctgagctgagccctgctgaccaggacctgctgctggagagcgccttcctggagctgttcatcctgcggctggcctaccgcagcaagccaggagagggcaagctgatcttctgcagcggcctggtgctgcaccggctgcagtgtgcccggggctttggagactggattgacagcatcctggccttcagccgcagcctgcacagcctgctggtggatgtgcctgcctttgcctgcctgagcgccctggtgctgatcacagacagacatggcctgcaggagcccaggagagtggaggagctgcagaaccgcatcgccagctgcctgaaggagcacgtggccgctgtggccggggagccccagcctgccagctgcctgagccggctgctgggcaagctgcctgagctgcggaccctgtgcacccagggcctgcagaggatcttctacctgaagctggaggacctggtgcccccaccacccatcatcgacaagatcttcatggacaccctgcccttctag

SEQ ID NO: 79251 - DNA, 1797 bp, Artificial Sequence
  derived and/or modified sequence
atgccctgcatccaggcccagtacggcacccccgcccccagccccggcccccgggatcacttggcttcagatccgctcactccggaattcatcaagcctacaatggacctggcgagccccgaagctgctccagccgccccgacagctctaccgagcttttctacttttatggacggttatacaggggaattcgatacattcttataccaattgcccggaactgtccagccttgttctagtgcctcttcttcagcctcctccacttctagcagctcagcaacttcccctgccagcgcctcttttaaattcgaagacttccaggtgtacggctgttaccctgggccactttccggaccagtcgacgaggccctgtctagctctggatctgattattacgggtccccatgctcagcaccaagtcctagtactccttctttccagcctccccagttgtcaccatgggacggctccttcggccatttttctcccagccagacctatgagggactccgggcatggacagagcagcttcccaaagcttccgggcccccgcaacctcctgcttttttttcatttagtccaccaacaggacccagcccatccctggcacagagccctctgaagttgtttccttcgcaggctacacatcagctcggcgagggagaatcttatagcatgcctaccgcttttcctggcttggcacccacaagccctcacctcgaaggaagcggcatcttagacactccagtgactagtacgaaggccaggtcaggagctcctggcggatccgaaggacgttgcgcagtatgcggagataacgccagctgccaacactatggagtgcgaacctgtgagggatgcaagggtttcttcaagagaaccgtccagaagaacgccaaatatatctgtctcgcaaacaaggattgccccgttgacaaaaggcggcgaaataggtgccagttctgccggtttcagaaatgtttggccgtggggatggtgaaagaagtggtccggaccgacagtctgaaaggtcggagggggaggcttcccagcaaaccaaaacagccccccgacgcctctcccgccaaccttttgaccagcctggtacgcgctcacttggattctggaccttctactgctaaactcgattactcaaagttccaggagcttgttctgccccattttgggaaagaagacgccggcgatgtgcaacaattctacgatctgctgagtggtagcctggaggttatcaggaagtgggcagagaagatcccgggctttgcagagctgagcccagccgatcaggatctgctacttgagtctgcttttctagaactgtttatcctccgactggcctatcggtcgaagcctggagagggcaaactaatcttttgctccggcctggtgctacacagattgcagtgcgctaggggtttcggtgattggatcgacagcatcctggcatttagccggtcattgcattccctcctggtggacgtgccagcgttcgcctgtttgtccgctcttgttctgatcactgataggcatggcctgcaggaaccgcgaagggtggaggaactgcagaatagaatcgcaagctgcctgaaagagcacgttgcagccgttgcgggcgagcctcaacccgcctcatgtctgagtcgcctcctgggaaagctgccggagctgaggaccctgtgtacacagggtttacaaagaattttttatctgaaactcgaagacctcgtaccacctccaccgattatcgacaagattttcatggacacactgccattctag

SEQ ID NO: 79252 - DNA, 1836 bp, Artificial Sequence
  derived and/or modified sequence
atgtggctggccaaggcctgctggagcatccagagcgagatgccctgcattcaggctcagtatggaactcccgctccttccccgggccctagggatcacctagcatccgatccgctcacccccgagtttattaaaccgaccatggatctggcaagtccagaggcagcacccgccgccccaaccgcactgccatcttttagcaccttcatggatggatatacaggtgaattcgatacatttctgtatcagctgcctggcactgtgcagccctgttccagcgcctccagttccgcctctagtacgagttcatcctccgccacgtccccagccagcgcttccttcaaattcgaagatttccaagtctacgggtgttatccaggacccttgagcggccctgtggatgaggccctctcatcatccggcagcgactattacggttctccttgtagtgcaccatccccctccaccccttccttccagccaccacagctgagtccctgggatgggagctttggccactttagcccttcgcagacatatgaggggctccgtgcgtggactgagcagctgcctaaggccagtgggcctccccagccccccgccttcttttcgttcagcccacccaccggtccctctccatcattggcgcagtccccgttgaagctattcccaagccaggctacccatcagttgggagagggcgagagttattctatgcctacagcttttcctggccttgcccctacttcccctcaccttgaagggagtggaattctggacacgcctgtgacttccactaaagctcgctctggagcacctggcggatccgaaggtcgctgtgctgtgtgtggggataatgcatcctgccaacattacggtgtacggacctgcgaaggatgtaagggctttttcaagaggactgtccagaaaaacgcgaaatacatttgcttggctaacaaagactgtcccgtcgacaagcggaggcggaaccgttgccagttttgtagattccagaagtgtctagccgttggcatggttaaggaggttgtccgcacagatagcctgaaagggcgaagggggaggctccctagcaaacctaagcagccgcccgacgcgtcaccggccaatctcttgacatcgctcgtgagggcacatctcgactcagggccttcaaccgctaagctggattattccaaatttcaggaactggtgctgccacactttggtaaagaagacgccggagatgttcagcagttttacgacttgctgtctggcagcctagaagtgataaggaagtgggccgagaagattccaggtttcgcagagctgtcccctgccgaccaggacctcctcctggagtctgcatttcttgaactgttcatcctccggctcgcttatcgatccaaacctggtgagggtaagttgatcttctgcagcggactggtgctgcatcgcttgcagtgtgccaggggatttggggattggattgacagcatcttggccttctcgcgctctcttcattccctgctggtagatgtaccagccttcgcatgcctgagtgccctggtactgattacagaccggcacggtctgcaagagccaagaagagtggaggaactccaaaacaggatagcctcttgcctcaaagagcacgtcgctgctgttgctggggaaccccaaccagcaagttgtttaagtcggctgctcggaaaattgccagaactgagaacactttgcacccaagggctccagcgaatattctacctcaagctcgaggacctggtcccgcctcccccgattattgataaaatctttatggatacactgccattttag

SEQ ID NO: 79253 - DNA, 1797 bp, Artificial Sequence
  derived and/or modified sequence
atgccctgcatccaggcccagtacggcacccccgcccccagccccggtccacgggaccatcttgcttcagatcctttgacgccggaattcatcaagcctacaatggacttggccagtccagaggcggcaccggcagcacctaccgctcttccaagtttttccacctttatggatggatacactggcgagtttgacacgttcctataccagctaccaggcactgttcagccatgtagctctgccagttcgtctgcctcctctacaagctcctcaagcgccacttctcccgcatctgctagctttaagtttgaagacttccaggtttatggctgctatcccgggcccctatcaggccccgtcgacgaggcacttagtagctcagggtctgattactatggttctccatgctcagctcctagccctagcactccctcttttcaaccaccgcagttgtcaccttgggacgggtcatttggccatttctcacccagtcaaacctacgagggacttcgcgcttggaccgagcagctgcccaaggcaagcggccctccacagccccctgccttttttagcttttctcctcctactggcccgagtccttccctcgctcaatcgccccttaaactgtttccctcccaggctacccaccagctcggcgagggggagagctattccatgccaaccgcttttccagggctggctccaacctcccctcatctcgagggctccgggattttagatacacccgtgacaagtaccaaagctcggagcggtgctcccggagggagtgagggacgatgtgccgtctgtggcgacaacgcttcttgtcagcattacggagtccggacatgcgagggatgtaaagggttttttaagcggacagtccagaaaaacgccaagtatatttgcttagccaataaggattgtccagttgacaagcggcggcggaaccgatgccagttttgtcgattccagaagtgcctggcagtagggatggtgaaggaggttgtcagaaccgatagcctgaaaggtagaagaggcagactcccgtcgaaaccaaaacagccccctgacgcttcaccagctaacctccttacgtcattggtgcgtgctcatctggattcagggccatccactgctaagctggattactctaagttccaggaattagtgctgccccatttcggcaaggaagacgctggagacgtgcagcaattctacgacctcctgtccggaagcctggaggtgattcggaagtgggccgaaaaaattccaggcttcgccgaactgtcccccgcagaccaagatttgctgctggagagcgcttttcttgagttattcatactgcgactggcttaccgatccaagcccggagaaggaaagcttattttctgcagtggcttggtgttgcacaggctgcagtgcgcgcggggattcggcgattggatagatagcatcctagcatttagtcgcagcctccactccttgctggtggacgttcccgccttcgcatgtctttccgccctcgttctaataactgaccgccacgggcttcaagaaccacgccgcgtcgaggagctgcaaaatcgtattgcttcctgcctgaaggagcacgttgctgcagtcgccggggaaccacaaccggcctcatgcctgagtaggctgctcgggaagctgcccgaattgaggaccctgtgtacacagggcctgcagaggatattttacctcaaacttgaggatcttgttcccccaccacctattatcgacaagatatttatggacaccctaccgttttag

SEQ ID NO: 79254 - DNA, 1797 bp, Artificial Sequence
  derived and/or modified sequence
atgccctgcatccaggcccagtacggcacccccgcccccagccccgggcctcgggatcacctagcctcagatcccctgacacctgagtttattaagcccactatggacctagctagtcccgaggccgcacctgcggctcccacagcactgcctagcttttcaactttcatggatgggtataccggtgagttcgatacatttctttaccagctgcccggtacagttcagccctgctctagcgcctcatcttctgcctctagtacctcctccagctcggccacaagcccagctagcgcatctttcaagttcgaagactttcaggtttatgggtgttatccaggaccattgtccggacccgttgatgaggccctatcatctagcgggtctgactattacggaagcccctgtagtgccccctcaccaagtacaccctcatttcagcctcctcaactttctccctgggatggatctttcggccacttctcaccctcccagacatacgaaggactccgggcttggacagaacagctgcctaaggccagcggtcccccacaacctcccgcattttttagcttttcgcctcctacaggacctagcccatcgctggcacagagcccactaaaattatttccgtcacaggccactcaccagctgggcgagggcgagtcctacagtatgcccacagcctttcccggattggcccccacatctccccacctagaggggtcaggtattctggatactccagtcacgtcaaccaaagcccggtcaggcgcgccaggcggatcagaaggcagatgcgctgtgtgcggggataacgcatcctgccagcattacggggtaaggacctgtgagggatgtaaggggtttttcaaaagaaccgttcaaaagaatgcgaaatacatatgtctggccaacaaagactgccctgtggataaaagacggaggaatagatgccagttttgccgattccagaagtgtctcgctgttgggatggtgaaagaagtggtgcgcaccgattctctgaagggtaggcgaggacgcctcccatccaagccaaaacagccacctgatgcatctcccgctaacctgttgacaagtctcgtccgagcgcacctggacagcggtccttcgacagccaaactcgactactccaaattccaagagctcgtgttaccacactttggcaaggaggacgccggtgacgtccagcagttctatgatttgctcagtgggtcattagaggtaatcagaaaatgggctgagaaaatcccaggatttgctgaactatcccctgcggaccaggaccttctgctggagagtgcgttcttagagcttttcatactcaggcttgcttatcggagtaaacctggggaaggaaaacttattttctgctcgggcctggtgctgcacaggcttcaatgcgccagaggcttcggcgattggatagactccatattagccttctccagatccttgcactctttgttagtcgacgtacctgcgtttgcttgcctgtctgcattagtactgatcaccgacagacacggtctgcaggagccaagacgggtcgaagagctgcagaaccggattgcatcatgccttaaggagcacgttgcagccgttgcaggagagccacaaccagcttcatgtctatcacgattgttgggcaaactacccgaactcagaactctctgcactcaggggttgcaacgaatcttctacctgaagctggaagatctggtcccccctccgccaatcatcgacaaaatctttatggatacacttccattctag

SEQ ID NO: 79255 - DNA, 1836 bp, Artificial Sequence
  derived and/or modified sequence
atgtggctggccaaggcctgctggagcatccagagcgagatgccctgcattcaagctcagtatggtacgcccgcaccttctcctggacccagggaccacctggcttccgatccactgactcctgagttcattaagcccaccatggatctcgcctctcccgaggctgcacctgcagcgcctacggcacttccctctttctcaacctttatggatggctacaccggagaatttgatacttttttataccagctgcctggaacagtccaaccttgttcatccgcatccagctccgctagctctacgagcagctcttccgccactagcccggccagcgctagtttcaaatttgaggactttcaagtctacgggtgctatcccggccccctgtctggacccgtcgatgaggctctatctagcagcggatcagactattatggtagcccctgctccgctccctccccatctaccccctcttttcagccccctcagctgtcgccatgggacggcagctttggtcacttcagcccttctcagacttatgaagggcttcgagcttggaccgagcaacttccgaaggcctctggcccacctcagcctccagccttttttagtttctcacctccaaccgggccctctccgtcgttagctcagtccccgctgaagctgttccccagccaagccacccaccagctgggtgagggtgagagctatagcatgcccactgcctttcccggcctcgctccgacaagcccgcacttggaaggttctggcattcttgatacccctgtcacctccaccaaggctcggtccggagcccccggcgggtctgaaggaagatgcgccgtctgcggtgataacgcctcatgccagcattatggagttaggacatgcgaaggttgtaaagggttctttaaaaggactgtgcaaaagaatgcgaagtatatctgcttggctaataaggactgtcccgtcgacaagcgtagaaggaatagatgtcagttctgcaggtttcaaaaatgccttgctgtgggaatggttaaggaggtggtgcggacagacagcctgaagggccgtcggggccggctgccaagcaaaccaaaacagcctcccgatgcctccccagccaacttgttgacatccctggtgcgggcacacctggactcggggccaagcactgcaaaattagactattccaaatttcaagagctggttctgccgcattttggaaaggaagatgcaggagatgtccaacagttttacgatttgcttagcggatcccttgaggtgatccgtaagtgggcggagaaaattcctggcttcgctgagttaagtccggccgaccaagatttactcctcgagagtgctttcctggaactgtttattctgaggctcgcctaccgatcaaaaccaggcgaaggcaagttaatcttttgttctggcctagttttgcatcgactgcagtgcgccagggggttcggtgactggatcgacagcatactggcatttagtaggtctttacattctcttctggtcgacgttcctgccttcgcctgtttgagcgccctggtcctgatcaccgatcgccatgggcttcaggagcctcgccgtgtagaagagcttcagaatcggattgccagctgtctgaaagagcacgtcgccgcagtcgcaggcgaaccacagcccgctagctgtttgagtaggttgctgggcaagctgccggagcttaggacgctatgcacccagggcttacaacgaatcttttatctcaagctggaggacctggtcccacctccgccgatcatagacaaaatcttcatggataccctgcccttttag

SEQ ID NO: 79256 - DNA, 2668 bp, Artificial Sequence
  derived and/or modified sequence
ggagcgcttaagaggagggtcgggctcggccggggagtcccagtggcggaggctacgaaacttgggggagtgcacagaagaacttcgggagcgcacgcgggaccagggaccaggctgagactcggggcgccagtccgggcaggggcagcgggagccggccgggtagggtgcagcctgaggcttgttcagcagaacaggtgcaagccacattgttgccaagacctgcctgaagccggattctccccactgcctccttcaaccccgcctcttcctcctcctgtgggactgctcccccctcctgtgaggctagatagatgccctgtatccaagcccaatatgggacaccagcaccgagtccgggaccccgtgaccacctggcaagcgaccccctgacccctgagttcatcaagcccaccatggacctggccagccccgaggcagcccccgctgcccccactgccctgcccagcttcagcaccttcatggacggctacacaggagagtttgacaccttcctctaccagctgccaggaacagtccagccatgctcctcagcctcctcctcggcctcctccacatcctcgtcctcagccacctcccctgcctctgcctccttcaagttcgaggacttccaggtgtacggctgctaccccggccccctgagcggcccagtggatgaggccctgtcctccagtggctctgactactatggcagcccctgctcggccccgtcgccctccacgcccagcttccagccgccccagctctctccctgggatggctccttcggccacttctcgcccagccagacttacgaaggcctgcgggcatggacagagcagctgcccaaagcctctgggcccccacagcctccagccttcttttccttcagtcctcccaccggccccagccccagcctggcccagagccccctgaagttgttcccctcacaggccacccaccagctgggggagggagagagctattccatgcctacggccttcccaggtttggcacccacttctccacaccttgagggctcggggatactggatacacccgtgacctcaaccaaggcccggagcggggccccaggtggaagtgaaggccgctgtgctgtgtgtggggacaacgcttcatgccagcattatggtgtccgcacatgtgagggctgcaagggcttcttcaagcgcacagtgcagaaaaacgccaagtacatctgcctggctaacaaggactgccctgtggacaagaggcggcgaaaccgctgccagttctgccgcttccagaagtgcctggcggtgggcatggtgaaggaagttgtccgaacagacagcctgaaggggcggcggggccggctaccttcaaaacccaagcagcccccagatgcctcccctgccaatctcctcacttccctggtccgtgcacacctggactcagggcccagcactgccaaactggactactccaagttccaggagctggtgctgccccactttgggaaggaagatgctggggatgtacagcagttctacgacctgctctccggttctctggaggtcatccgcaagtgggcggagaagatccctggctttgctgagctgtcaccggctgaccaggacctgttgctggagtcggccttcctggagctcttcatcctccgcctggcgtacaggtctaagccaggcgagggcaagctcatcttctgctcaggcctggtgctacaccggctgcagtgtgcccgtggcttcggggactggattgacagtatcctggccttctcaaggtccctgcacagcttgcttgtcgatgtccctgccttcgcctgcctctctgcccttgtcctcatcaccgaccggcatgggctgcaggagccgcggcgggtggaggagctgcagaaccgcatcgccagctgcctgaaggagcacgtggcagctgtggcgggcgagccccagccagccagctgcctgtcacgtctgttgggcaaactgcccgagctgcggaccctgtgcacccagggcctgcagcgcatcttctacctcaagctggaggacttggtgccccctccacccatcattgacaagatcttcatggacacgctgcccttctgacccctgcctgggaacacgtgtgcacatgcgcactctcatatgccaccccatgtgcctttagtccacggacccccagagcacccccaagcctgggcttgagctgcagaatgactccaccttctcacctgctccaggaggtttgcagggagctcaagcccttggggagggggatgccttcatgggggtgaccccacgatttgtcttatcccccccagcctggccccggcctttatgttttttgtaagataaaccgtttttaacacatagcgccgtgctgtaaataagcccagtgctgctgtaaatacaggaagaaagagcttgaggtgggagcggggctgggaggaagggatgggccccgccttcctgggcagcctttccagcctcctgctggctctctcttcctaccctccttccacatgtacataaactgtcactctaggaagaagacaaatgacagattctgacatttatatttgtgtattttcctggatttatagtatgtgacttttctgattaatatatttaatatattgaataaaaaatagacatgtagttgg

SEQ ID NO: 79257 - DNA, 2639 bp, Artificial Sequence
  derived and/or modified sequence
agtcccagtggcggaggctacgaaacttgggggagtgcacagaagaacttcgggagcgcacgcgggaccagggaccaggctgagactcggggcgccagtccgggcaggggcagcgggagccggccgggtagggtgcagcctgaggcttgttcagcagaacaggtgcaagccacattgttgccaagacctgcctgaagccggattctccccactgcctccttcaaccccgcctcttcctcctcctgtgggactgctcccccctcctgtgaggctagatagatgccctgtatccaagcccaatatgggacaccagcaccgagtccgggaccccgtgaccacctggcaagcgaccccctgacccctgagttcatcaagcccaccatggacctggccagccccgaggcagcccccgctgcccccactgccctgcccagcttcagcaccttcatggacggctacacaggagagtttgacaccttcctctaccagctgccaggaacagtccagccatgctcctcagcctcctcctcggcctcctccacatcctcgtcctcagccacctcccctgcctctgcctccttcaagttcgaggacttccaggtgtacggctgctaccccggccccctgagcggcccagtggatgaggccctgtcctccagtggctctgactactatggcagcccctgctcggccccgtcgccctccacgcccagcttccagccgccccagctctctccctgggatggctccttcggccacttctcgcccagccagacttacgaaggcctgcgggcatggacagagcagctgcccaaagcctctgggcccccacagcctccagccttcttttccttcagtcctcccaccggccccagccccagcctggcccagagccccctgaagttgttcccctcacaggccacccaccagctgggggagggagagagctattccatgcctacggccttcccaggtttggcacccacttctccacaccttgagggctcggggatactggatacacccgtgacctcaaccaaggcccggagcggggccccaggtggaagtgaaggccgctgtgctgtgtgtggggacaacgcttcatgccagcattatggtgtccgcacatgtgagggctgcaagggcttcttcaagcgcacagtgcagaaaaacgccaagtacatctgcctggctaacaaggactgccctgtggacaagaggcggcgaaaccgctgccagttctgccgcttccagaagtgcctggcggtgggcatggtgaaggaagttgtccgaacagacagcctgaaggggcggcggggccggctaccttcaaaacccaagcagcccccagatgcctcccctgccaatctcctcacttccctggtccgtgcacacctggactcagggcccagcactgccaaactggactactccaagttccaggagctggtgctgccccactttgggaaggaagatgctggggatgtacagcagttctacgacctgctctccggttctctggaggtcatccgcaagtgggcggagaagatccctggctttgctgagctgtcaccggctgaccaggacctgttgctggagtcggccttcctggagctcttcatcctccgcctggcgtacaggtctaagccaggcgagggcaagctcatcttctgctcaggcctggtgctacaccggctgcagtgtgcccgtggcttcggggactggattgacagtatcctggccttctcaaggtccctgcacagcttgcttgtcgatgtccctgccttcgcctgcctctctgcccttgtcctcatcaccgaccggcatgggctgcaggagccgcggcgggtggaggagctgcagaaccgcatcgccagctgcctgaaggagcacgtggcagctgtggcgggcgagccccagccagccagctgcctgtcacgtctgttgggcaaactgcccgagctgcggaccctgtgcacccagggcctgcagcgcatcttctacctcaagctggaggacttggtgccccctccacccatcattgacaagatcttcatggacacgctgcccttctgacccctgcctgggaacacgtgtgcacatgcgcactctcatatgccaccccatgtgcctttagtccacggacccccagagcacccccaagcctgggcttgagctgcagaatgactccaccttctcacctgctccaggaggtttgcagggagctcaagcccttggggagggggatgccttcatgggggtgaccccacgatttgtcttatcccccccagcctggccccggcctttatgttttttgtaagataaaccgtttttaacacatagcgccgtgctgtaaataagcccagtgctgctgtaaatacaggaagaaagagcttgaggtgggagcggggctgggaggaagggatgggccccgccttcctgggcagcctttccagcctcctgctggctctctcttcctaccctccttccacatgtacataaactgtcactctaggaagaagacaaatgacagattctgacatttatatttgtgtattttcctggatttatagtatgtgacttttctgattaatatatttaatatattgaataaaaaatagacatgtagttggaactga

SEQ ID NO: 79258 - DNA, 2518 bp, Artificial Sequence
  derived and/or modified sequence
ggagcgcttaagaggagggtcgggctcggccggggagtcccagtggcggaggctacgaaacttgggggagtgcacagaagaacttcgggagcgcacgcgggaccagggaccaggctgagactcggggcgccagtccgggcaggggcagcgggagccggccggagatgccctgtatccaagcccaatatgggacaccagcaccgagtccgggaccccgtgaccacctggcaagcgaccccctgacccctgagttcatcaagcccaccatggacctggccagccccgaggcagcccccgctgcccccactgccctgcccagcttcagcaccttcatggacggctacacaggagagtttgacaccttcctctaccagctgccaggaacagtccagccatgctcctcagcctcctcctcggcctcctccacatcctcgtcctcagccacctcccctgcctctgcctccttcaagttcgaggacttccaggtgtacggctgctaccccggccccctgagcggcccagtggatgaggccctgtcctccagtggctctgactactatggcagcccctgctcggccccgtcgccctccacgcccagcttccagccgccccagctctctccctgggatggctccttcggccacttctcgcccagccagacttacgaaggcctgcgggcatggacagagcagctgcccaaagcctctgggcccccacagcctccagccttcttttccttcagtcctcccaccggccccagccccagcctggcccagagccccctgaagttgttcccctcacaggccacccaccagctgggggagggagagagctattccatgcctacggccttcccaggtttggcacccacttctccacaccttgagggctcggggatactggatacacccgtgacctcaaccaaggcccggagcggggccccaggtggaagtgaaggccgctgtgctgtgtgtggggacaacgcttcatgccagcattatggtgtccgcacatgtgagggctgcaagggcttcttcaagcgcacagtgcagaaaaacgccaagtacatctgcctggctaacaaggactgccctgtggacaagaggcggcgaaaccgctgccagttctgccgcttccagaagtgcctggcggtgggcatggtgaaggaagttgtccgaacagacagcctgaaggggcggcggggccggctaccttcaaaacccaagcagcccccagatgcctcccctgccaatctcctcacttccctggtccgtgcacacctggactcagggcccagcactgccaaactggactactccaagttccaggagctggtgctgccccactttgggaaggaagatgctggggatgtacagcagttctacgacctgctctccggttctctggaggtcatccgcaagtgggcggagaagatccctggctttgctgagctgtcaccggctgaccaggacctgttgctggagtcggccttcctggagctcttcatcctccgcctggcgtacaggtctaagccaggcgagggcaagctcatcttctgctcaggcctggtgctacaccggctgcagtgtgcccgtggcttcggggactggattgacagtatcctggccttctcaaggtccctgcacagcttgcttgtcgatgtccctgccttcgcctgcctctctgcccttgtcctcatcaccgaccggcatgggctgcaggagccgcggcgggtggaggagctgcagaaccgcatcgccagctgcctgaaggagcacgtggcagctgtggcgggcgagccccagccagccagctgcctgtcacgtctgttgggcaaactgcccgagctgcggaccctgtgcacccagggcctgcagcgcatcttctacctcaagctggaggacttggtgccccctccacccatcattgacaagatcttcatggacacgctgcccttctgacccctgcctgggaacacgtgtgcacatgcgcactctcatatgccaccccatgtgcctttagtccacggacccccagagcacccccaagcctgggcttgagctgcagaatgactccaccttctcacctgctccaggaggtttgcagggagctcaagcccttggggagggggatgccttcatgggggtgaccccacgatttgtcttatcccccccagcctggccccggcctttatgttttttgtaagataaaccgtttttaacacatagcgccgtgctgtaaataagcccagtgctgctgtaaatacaggaagaaagagcttgaggtgggagcggggctgggaggaagggatgggccccgccttcctgggcagcctttccagcctcctgctggctctctcttcctaccctccttccacatgtacataaactgtcactctaggaagaagacaaatgacagattctgacatttatatttgtgtattttcctggatttatagtatgtgacttttctgattaatatatttaatatattgaataaaaaatagacatgtagttgg

SEQ ID NO: 79259 - DNA, 1797 bp, Artificial Sequence
  derived and/or modified sequence
atgccatgcattcaagcgcagtacgggacccctgcaccctcacctggacctcgcgaccatttggcctctgacccattgactccggagtttataaaacctaccatggacctggcatcccccgaagccgctccagccgcacccactgcacttccctcattctcaacattcatggatggttacacgggggagtttgatactttcctgtatcaactaccaggaacagtccagccctgctctagcgcctcctcttctgcttctagcacgtcaagcagtagtgccacatccccggcaagcgccagcttcaaattcgaggattttcaggtttatggatgttatccaggacccctctctggtcccgtagacgaagctctctcttccagcggatctgattactacggatctccgtgttccgctcccagcccctcaacccccagcttccagccccctcagctgagtccctgggatggaagctttggccacttctctcccagtcagacctacgagggcttgcgcgcttggacagaacagctaccaaaagccagcggtccaccacagccccctgcatttttctctttttctccacccactgggccatccccatccctggcacagtcccccctaaaactcttccccagtcaggcgacccatcagcttggtgagggcgaatcatactcaatgcctacggcatttccagggctcgctccaacatcccctcatctcgaaggctccgggatactggatacacccgtcacaagtacaaaggctagaagtggggctccgggtggctcagagggccgttgcgccgtctgtggagataatgcctcttgccagcattacggcgtgaggacgtgtgaggggtgtaagggattctttaaacggactgttcagaagaatgccaaatatatttgtctggccaacaaggattgcccagtcgataagcgcaggcgcaaccgctgccagttttgccgatttcagaagtgtctggccgtaggaatggttaaggaggttgtccggaccgacagcctgaagggcagaagggggagattgcccagcaagcccaaacagccgccagacgcttctcctgccaatttgcttactagcctggtaagggcacatctggacagcgggccatctacagcaaaactcgactatagcaagttccaggaactagtgttgcctcatttcgggaaagaggatgctggagatgtgcagcagttttacgacctgctcagtgggtcgcttgaagtgattagaaaatgggctgagaaaatcccaggatttgccgaactttcccccgcagaccaggacctattgttggaaagcgcgttcctggagctgttcatcctgaggctcgcttaccgctccaagccaggggagggcaaactgattttctgctcgggcttagtactgcacagactgcagtgcgctcgcggatttggtgattggattgacagcatcctagcatttagtaggtccctgcacagcttgcttgtcgacgtccctgcctttgcctgtttgagtgcactcgtactcatcaccgatcgacatgggctccaggaacctcgcagagttgaggaactccagaatcggattgcttcctgccttaaggaacacgtggccgcagttgctggggagccccagcctgcttcttgcttatcccggctgttaggaaagttacccgaattgcgcacactgtgcacacagggcctgcagagaatcttttacttgaagctggaggatcttgttcctcccccaccaatcatcgataaaatttttatggacacactgcccttctag

SEQ ID NO: 79260 - DNA, 1836 bp, Artificial Sequence
  derived and/or modified sequence
atgtggctggccaaggcttgttggtctatccagtccgagatgccctgtatccaggcccagtatggtaccccggcaccttcgcctggtcccagggaccacctcgccagcgatccccttacacctgaattcatcaagcctacgatggatctggctagccccgaggcagcccctgccgctcccactgctttgccctctttctccaccttcatggacgggtacacaggcgaattcgatacctttctctatcagctgcctggaacagttcagccctgttcatccgcttcgagtagcgcctctagcacatctagctctagcgccacatctccagcctcagcgtctttcaagtttgaggacttccaggtctacggatgttatcctggaccgctttcaggtcccgtggacgaggccctctccagtagcggttcagattattatggttcaccctgtagtgctccctccccaagcactccgtcgtttcagccaccacagttaagcccatgggacgggagtttcggccatttctcgccttcgcagacctatgaagggctgagagcctggactgaacagttgcctaaagcgtcggggcctccccaaccccctgccttcttttctttctctccccctactggcccaagtcccagcctggcacagtctcctctaaagttgttcccctcccaagcaacccatcagctcggtgagggggagagctatagtatgcccactgcatttcccggtttggctcccaccagcccgcatctggaggggagcgggattttggacactcctgtgacaagcaccaaagcgcgttctggcgctcccggaggaagcgagggtaggtgtgctgtctgcggtgataatgcatcatgccaacattacggggtgcgcacctgcgagggatgcaagggtttttttaagcgcactgttcagaaaaatgctaagtatatttgtctcgctaacaaggactgccccgtcgataaacgcaggcggaataggtgccagttctgcaggttccaaaaatgcctggccgtgggaatggtgaaagaagtagtgcgtaccgattctcttaaggggagaagggggagactaccatccaagcccaaacaaccgcctgacgcctctcccgctaacttgctgacctctctcgtcagggcacatctcgacagtggccctagtactgccaaactggattatagtaagtttcaggagctggtgctcccacactttggcaaagaagatgcaggggatgtgcaacagttttacgatctgttatccggatctctggaggtgatccgtaagtgggccgaaaagatcccagggttcgccgagctttcccccgcagaccaggatctgctgcttgagagcgcttttctagagcttttcatactacgtctggcttatcgatccaagcccggagagggtaaactcatattctgcagcggcctggtgcttcaccgattacagtgcgctcgaggctttggtgactggatcgactctatacttgcattctcccgctcactgcatagtttgcttgtggacgtcccagctttcgcctgtctctcagcgctggtcctgataacggaccgccatggattgcaggaacctcgccgagttgaagaattgcagaaccgaatcgcaagctgcctcaaggagcacgtggccgctgttgcgggagagcctcagcccgcttcctgcctatcccggctgctaggcaagctgcctgagctgcgtactttgtgcactcagggcctgcagcgtattttctacctgaagctggaggacttggtgcccccaccgccaattatcgataagatctttatggatacacttccattctag

SEQ ID NO: 79261 - DNA, 1797 bp, Artificial Sequence
  derived and/or modified sequence
atgccttgcattcaggcccaatacggtacgccagcaccctcaccagggcctagagaccatttggcatccgaccctctgacaccagagtttattaagccaacaatggatcttgccagcccggaagcagctcctgcagctcctacggctctgccatcgttttccactttcatggatggctacacaggagagtttgacacctttctataccagttacctgggacagttcaaccttgttcatcagctagctcttccgcctcttcaacgtctagcagtagtgcgacctcgccagcttccgccagttttaaatttgaggactttcaagtgtacggctgctatcctgggcctctctccggtccagtcgatgaagctctctcttcttctgggtccgactactacggatctccatgctcagccccttcaccctcaactccaagttttcaaccacctcagctgtccccctgggatgggtcctttggtcatttctctcctagccaaacatatgagggcctgagggcgtggacagagcagctgcccaaggcttcaggaccacctcagccgcctgccttcttcagctttagcccgccaaccggaccctccccctctctcgcccagtctccgctgaagttgttcccctctcaggcaactcaccagctaggggagggcgagagctatagcatgcccaccgccttcccgggtctggctccgacatccccacacctggagggttcaggaattctggacactccggttacttccacgaaagctcgcagtggagctcccggagggtctgagggtcgctgtgcagtgtgtggagacaatgcaagctgccagcattacggggtccgaacctgtgaaggctgcaagggatttttcaaacgcacagtccagaagaacgccaaatacatttgcctcgccaacaaagattgcccagttgataagcgcagacgcaaccgatgccaattctgtcgctttcagaagtgtctggccgttggcatggtgaaggaagttgtgaggacggactccctcaagggtaggcgcggtaggcttccttccaaacctaagcagcctccagacgcatcacccgcaaatttacttaccagccttgttcgcgctcacttagatagtggtccatctactgctaagttagactattcgaaatttcaagaacttgttcttccacatttcggaaaggaggacgctggtgatgtccagcagttctatgatctcctgtccggctccctcgaagtcattcgcaaatgggcagagaagatcccaggcttcgccgaattgtcacccgcagaccaggatctgctcctggaatccgcctttctcgagttgttcattctaagactcgcctaccgttccaagcctggagagggaaaactgatcttttgcagtgggctagttctgcatcgcctgcagtgcgccagagggttcggcgattggattgactcgatactggcatttagtaggagcctgcactccctgttagtcgacgttcccgcttttgcgtgcctgtcagctcttgttcttatcactgaccgtcatggactgcaagaacccagaagggtcgaagaattgcagaacaggatcgcctcatgcttgaaagaacacgtggccgcagtggccggtgaaccccagccggcatcatgtcttagccgactgctcggaaagttgcccgagctgcggaccctttgtacccaggggttgcagcgaattttctatctcaaactcgaggatctcgtgcccccaccgcctattatcgataaaattttcatggatacgctgcctttttag

SEQ ID NO: 79262 - DNA, 1797 bp, Artificial Sequence
  derived and/or modified sequence
atgccctgcatccaggcccagtatggcactccggctccaagcccagggccacgggatcacctggcctcggacccgttgacgcccgaattcatcaagccaaccatggaccttgcttcacctgaagctgctcctgccgcacccaccgcccttcccagcttctccaccttcatggacgggtacaccggtgaattcgatacgttcctataccaacttccaggaacagtgcagccatgctcttccgcatctagtagcgcatcttccacaagctcatcaagcgcgaccagccccgcttcagcgtcttttaaatttgaggattttcaagtgtatggttgttacccaggaccactctcaggcccagtggacgaagcattgagctcaagcggatctgactattacggtagcccgtgttccgcgcctagcccgagcacaccttccttccagccccctcagctcagtccctgggatggaagctttgggcacttcagtccaagccagacatatgagggtttaagagcttggactgagcaacttcccaaggcctcaggccctccgcaaccccctgcctttttttccttcagccctccgacggggccttccccatcactcgcgcaatcaccgctcaagctgttccccagccaggctacccatcaactgggcgagggtgagtcgtattccatgccaactgcatttcccggactcgcccctacctctccacacctggaaggttccggaattcttgacactcccgttacttccaccaaggcccgtagtggcgctcccggagggagcgaagggaggtgtgctgtctgcggggataatgcgagctgtcagcactatggagtgcgtacctgtgaaggctgtaagggcttttttaaaagaaccgtacagaaaaatgcaaagtacatctgtctcgcgaacaaggattgtccagttgataagagaagacgcaatcggtgccaattttgcagattccagaaatgcctggccgtcggcatggttaaagaggtggtgcgtacagacagcctgaagggtagacggggacgactcccttccaagccaaaacagccgccagatgcctctcctgccaacttactaactagtctggtgagggcccatctggatagcggcccatccactgcgaagctggattattccaagttccaggagctagtgctcccccatttcggaaaggaggacgcaggtgatgtgcagcagttttacgacctcctgtctgggtcactggaggtgatccgtaagtgggctgaaaaaatccccggatttgctgaactgtcacccgcagaccaggacctcttgctggaatccgcctttctggaactgttcatccttcggcttgcgtatcgctccaaacccggtgaagggaaactcattttctgtagcgggctggtgcttcatcggctgcaatgtgccaggggcttcggggactggattgacagcatactcgcgtttagccgtagcctccatagtctcctcgttgatgttcccgcattcgcctgtttaagcgcactcgttctgatcactgaccgacacgggctccaagaacccaggagagtggaagagcttcagaatcgtatagcaagttgtctgaaggaacatgtagcagctgtagccggtgagcctcaaccagcatcatgcctttcacgcctccttggcaagcttccagaactgcggaccctgtgcacccagggtctgcagaggattttttatctgaagttggaagacctggttcccccacccccaataattgacaaaatcttcatggatactctgcccttctag

SEQ ID NO: 79263 - DNA, 1836 bp, Artificial Sequence
  derived and/or modified sequence
atgtggttggcaaaagcatgctggagcatccaatcggaaatgccctgcattcaagcccaatacgggacaccagccccatcacctggacccagggaccatctggcttccgaccccctgacgcccgagttcataaaaccgacaatggatcttgccagccctgaggctgcacctgccgcacccacggccctcccatccttttctactttcatggatggatacacgggagagttcgacaccttcttataccagctccccggtaccgtccaaccatgcagtagtgcatccagcagcgcctcttccactagtagcagcagcgccacctcccccgcttctgcgtcattcaaattcgaagatttccaggtgtatggctgttacccgggtcctttatcgggaccagtggatgaggctctgtcatcttccggctccgattactatggatccccctgttccgctccatctcccagtacaccgagctttcagccccctcagttatccccctgggatgggagttttgggcactttagcccttctcagacctacgaggggctgcgcgcatggactgagcagttgcccaaagcttctgggcctcctcagccgcctgcgtttttctctttttctccacccaccggcccaagcccttctctcgctcagtcccccctgaagctgttcccttcccaggccacacaccagctgggtgagggcgaaagctactccatgccaaccgcgtttccaggtcttgctcctacttcaccgcacctggagggatccgggattctcgacacacccgtgacttccactaaggccagatcaggggctcctggtgggtccgagggccgttgcgctgtatgtggggataatgcttcttgccagcactacggggtgaggacttgcgagggttgcaagggcttctttaagcgaaccgtccaaaagaacgccaagtacatttgccttgccaataaggactgccccgtggataagcggagacgcaaccgctgccagttctgcaggttccaaaaatgcctagccgtcggcatggtcaaggaggtggtgcggacagacagcctgaaaggaagacgcggtcgcctcccttccaaaccgaagcagcctccggacgcctccccagcgaacctgctaactagtctcgttagagcccatcttgactcagggccttccaccgccaagctggattactctaagtttcaggagttggttctgccccactttggtaaagaagacgctggcgatgtgcagcagttttatgatttgctgtctggaagcctagaagtgatacgcaagtgggctgagaagattcctggatttgcggagctctctcctgctgatcaggacctgctcttagagagcgcatttcttgagttgttcatcctgcgcctcgcctacaggtccaagcccggtgagggtaaactgatattttgtagtgggttggtactacacagactccagtgcgccagaggttttggcgactggattgactccatccttgccttttctcggtctctccacagcctgctagttgatgtgcccgcattcgcctgtctgtccgccttggtgctaatcacagacagacacggccttcaggaacctcgcagagttgaggagttacagaatcggattgcctcctgtctgaaggaacacgtggccgctgtagctggggaaccgcaacccgcaagctgtttaagccgactgctcggaaagctgccagagctccggacattgtgcactcagggattgcagaggatcttttacttgaaactcgaggacctggtgcctccaccaccaatcattgataaaattttcatggatactcttccattttag

SEQ ID NO: 79264 - DNA, 1797 bp, Artificial Sequence
  derived and/or modified sequence
atgccctgcatccaggcccagtacggcacccccgcccccagccccggccccagagaccacctggccagcgaccccctgacccccgagttcatcaagcccaccatggacctggccagccccgaggccgcccccgccgcccccaccgccctgcccagcttcagcaccttcatggacggctacaccggcgagttcgacaccttcctgtaccagctgcccggcaccgtgcagccctgcagcagcgccagcagcagcgccagcagcaccagcagcagcagcgccaccagccccgccagcgccagcttcaagttcgaggacttccaggtgtacggctgctaccccggccccctgagcggccccgtggacgaggccctgagcagcagcggcagcgactactacggcagcccctgcagcgcccccagccccagcacccccagcttccagcccccccagctgagcccctgggacggcagcttcggccacttcagccccagccagacctacgagggcctgagagcctggaccgagcagctgcccaaggccagcggccccccccagccccccgccttcttcagcttcagcccccccaccggccccagccccagcctggcccagagccccctgaagctgttccccagccaggccacccaccagctgggcgagggcgagagctacagcatgcccaccgccttccccggcctggcccccaccagcccccacctggagggcagcggcatcctggacacccccgtgaccagcaccaaggccagaagcggcgcccccggcggcagcgagggcagatgcgccgtgtgcggcgacaacgccagctgccagcactacggcgtgagaacctgcgagggctgcaagggcttcttcaagagaaccgtgcagaagaacgccaagtacatctgcctggccaacaaggactgccccgtggacaagagaagaagaaacagatgccagttctgcagattccagaagtgcctggccgtgggcatggtgaaggaggtggtgagaaccgacagcctgaagggcagaagaggcagactgcccagcaagcccaagcagccccccgacgccagccccgccaacctgctgaccagcctggtgagagcccacctggacagcggccccagcaccgccaagctggactacagcaagttccaggagctggtgctgccccacttcggcaaggaggacgccggcgacgtgcagcagttctacgacctgctgagcggcagcctggaggtgatcagaaagtgggccgagaagatccccggcttcgccgagctgagccccgccgaccaggacctgctgctggagagcgccttcctggagctgttcatcctgagactggcctacagaagcaagcccggcgagggcaagctgatcttctgcagcggcctggtgctgcacagactgcagtgcgccagaggcttcggcgactggatcgacagcatcctggccttcagcagaagcctgcacagcctgctggtggacgtgcccgccttcgcctgcctgagcgccctggtgctgatcaccgacagacacggcctgcaggagcccagaagagtggaggagctgcagaacagaatcgccagctgcctgaaggagcacgtggccgccgtggccggcgagccccagcccgccagctgcctgagcagactgctgggcaagctgcccgagctgagaaccctgtgcacccagggcctgcagagaatcttctacctgaagctggaggacctggtgccccccccccccatcatcgacaagatcttcatggacaccctgcccttctag

SEQ ID NO: 79265 - DNA, 1836 bp, Artificial Sequence
  derived and/or modified sequence
atgtggctggccaaggcctgctggagcatccagagcgagatgccctgcatccaggcccagtacggcacccccgcccccagccccggccccagagaccacctggccagcgaccccctgacccccgagttcatcaagcccaccatggacctggccagccccgaggccgcccccgccgcccccaccgccctgcccagcttcagcaccttcatggacggctacaccggcgagttcgacaccttcctgtaccagctgcccggcaccgtgcagccctgcagcagcgccagcagcagcgccagcagcaccagcagcagcagcgccaccagccccgccagcgccagcttcaagttcgaggacttccaggtgtacggctgctaccccggccccctgagcggccccgtggacgaggccctgagcagcagcggcagcgactactacggcagcccctgcagcgcccccagccccagcacccccagcttccagcccccccagctgagcccctgggacggcagcttcggccacttcagccccagccagacctacgagggcctgagagcctggaccgagcagctgcccaaggccagcggccccccccagccccccgccttcttcagcttcagcccccccaccggccccagccccagcctggcccagagccccctgaagctgttccccagccaggccacccaccagctgggcgagggcgagagctacagcatgcccaccgccttccccggcctggcccccaccagcccccacctggagggcagcggcatcctggacacccccgtgaccagcaccaaggccagaagcggcgcccccggcggcagcgagggcagatgcgccgtgtgcggcgacaacgccagctgccagcactacggcgtgagaacctgcgagggctgcaagggcttcttcaagagaaccgtgcagaagaacgccaagtacatctgcctggccaacaaggactgccccgtggacaagagaagaagaaacagatgccagttctgcagattccagaagtgcctggccgtgggcatggtgaaggaggtggtgagaaccgacagcctgaagggcagaagaggcagactgcccagcaagcccaagcagccccccgacgccagccccgccaacctgctgaccagcctggtgagagcccacctggacagcggccccagcaccgccaagctggactacagcaagttccaggagctggtgctgccccacttcggcaaggaggacgccggcgacgtgcagcagttctacgacctgctgagcggcagcctggaggtgatcagaaagtgggccgagaagatccccggcttcgccgagctgagccccgccgaccaggacctgctgctggagagcgccttcctggagctgttcatcctgagactggcctacagaagcaagcccggcgagggcaagctgatcttctgcagcggcctggtgctgcacagactgcagtgcgccagaggcttcggcgactggatcgacagcatcctggccttcagcagaagcctgcacagcctgctggtggacgtgcccgccttcgcctgcctgagcgccctggtgctgatcaccgacagacacggcctgcaggagcccagaagagtggaggagctgcagaacagaatcgccagctgcctgaaggagcacgtggccgccgtggccggcgagccccagcccgccagctgcctgagcagactgctgggcaagctgcccgagctgagaaccctgtgcacccagggcctgcagagaatcttctacctgaagctggaggacctggtgccccccccccccatcatcgacaagatcttcatggacaccctgcccttctag

SEQ ID NO: 79266 - protein, 611 aa, Artificial Sequence
  derived and/or modified sequence
MWLAKACWSIQSEMPCIQAQYGTPAPSPGPRDHLASDPLTPEFIKPTMDLASPEAAPAAPTALPSFSTFMDGYTGEFDTFLYQLPGTVQPCSSASSSASSTSSSSATSPASASFKFEDFQVYGCYPGPLSGPVDEALSSSGSDYYGSPCSAPSPSTPSFQPPQLSPWDGSFGHFSPSQTYEGLRAWTEQLPKASGPPQPPAFFSFSPPTGPSPSLAQSPLKLFPSQATHQLGEGESYSMPTAFPGLAPTSPHLEGSGILDTPVTSTKARSGAPGGSEGRCAVCGDNASCQHYGVRTCEGCKGFFKRTVQKNAKYICLANKDCPVDKRRRNRCQFCRFQKCLAVGMVKEVVRTDSLKGRRGRLPSKPKQPPDASPANLLTSLVRAHLDSGPSTAKLDYSKFQELVLPHFGKEDAGDVQQFYDLLSGSLEVIRKWAEKIPGFAELSPADQDLLLESAFLELFILRLAYRSKPGEGKLIFCSGLVLHRLQCARGFGDWIDSILAFSRSLHSLLVDVPAFACLSALVLITDRHGLQEPRRVEELQNRIASCLKEHVAAVAGEPQPASCLSRLLGKLPELRTLCTQGLQRIFYLKLEDLVPPPPIIDKIFMDTLPF

SEQ ID NO: 79267 - protein, 652 aa, Artificial Sequence
  derived and/or modified sequence
MTSAQYKIKILIEGLHHGQRPGPAPPRQPGSFCWALKADGIMWLAKACWSIQSEMPCIQAQYGTPAPSPGPRDHLASDPLTPEFIKPTMDLASPEAAPAAPTALPSFSTFMDGYTGEFDTFLYQLPGTVQPCSSASSSASSTSSSSATSPASASFKFEDFQVYGCYPGPLSGPVDEALSSSGSDYYGSPCSAPSPSTPSFQPPQLSPWDGSFGHFSPSQTYEGLRAWTEQLPKASGPPQPPAFFSFSPPTGPSPSLAQSPLKLFPSQATHQLGEGESYSMPTAFPGLAPTSPHLEGSGILDTPVTSTKARSGAPGGSEGRCAVCGDNASCQHYGVRTCEGCKGFFKRTVQKNAKYICLANKDCPVDKRRRNRCQFCRFQKCLAVGMVKEVVRTDSLKGRRGRLPSKPKQPPDASPANLLTSLVRAHLDSGPSTAKLDYSKFQELVLPHFGKEDAGDVQQFYDLLSGSLEVIRKWAEKIPGFAELSPADQDLLLESAFLELFILRLAYRSKPGEGKLIFCSGLVLHRLQCARGFGDWIDSILAFSRSLHSLLVDVPAFACLSALVLITDRHGLQEPRRVEELQNRIASCLKEHVAAVAGEPQPASCLSRLLGKLPELRTLCTQGLQRIFYLKLEDLVPPPPIIDKIFMDTLPF

SEQ ID NO: 79268 - DNA, 1959 bp, Artificial Sequence
  derived and/or modified sequence
atgacgtccgcacagtacaagatcaagatcctaatagaaggtcttcaccatggacaacgacccgggcccgccccaccccgacagcccggctctttttgctgggctttgaaagccgatggcattatgtggctcgcaaaggcttgttggagtattcagtcagaaatgccttgcatccaggcgcagtatgggactcccgcgcctagcccgggtcctcgcgaccacttagcctctgacccactaacgcctgaattcatcaaaccgaccatggatctcgcgtcccctgaggcggcgccagcagcccccactgctcttccatctttttcaaccttcatggatggctacacgggggagtttgacacattcctctaccaattaccaggcaccgtgcagccatgtagcagcgcctccagctctgctagcagtacaagttcaagttccgcaaccagtcctgcctcagcatccttcaagttcgaggatttccaggtctacggctgttatccgggtcccctcagtgggcccgttgacgaggctctctcctcctctggttcagattattatggttccccatgcagcgccccctctccgagtaccccatcctttcagcctccccaattatctccctgggatggctcgttcggacacttttcccccagccagacatatgaaggtctgcgtgcatggaccgaacaactgccaaaagcatccggtcctccccagcctccggcgttcttctcctttagtccacctaccggccccagtccaagtttggcgcagtcgcccttgaagctgttccctagccaggccacccatcagttaggcgaaggagaaagctattcaatgcccactgcattccctggacttgctccaaccagcccccaccttgagggatccgggatcctggacacgccagtgaccagcaccaaggcccggtctggtgcgccgggaggctccgaaggaaggtgtgcagtgtgcggtgataatgcttcctgccagcactatggcgttcgtacctgcgagggatgtaagggcttttttaaacgcaccgtacaaaagaatgccaagtacatttgcctggcgaataaagactgcccagtggacaagagaagaaggaaccgatgccagttctgcaggtttcaaaagtgcctggccgtaggaatggtcaaggaggtagtgagaaccgactcgcttaagggccgacgcgggcgtttgccgtccaagcctaagcagcctcccgatgccagcccagctaacctcctgaccagtctggtaagggcacacctggactcaggaccaagcaccgccaagctggactactcgaagttccaggagctggtactccctcatttcggcaaggaggacgcgggggatgtgcaacagttttatgacctcctctccggcagtcttgaagtgataagaaagtgggccgaaaagatccctggatttgccgaactttcaccggccgaccaggacctgctcctggaaagcgctttcctagagttgtttattctgagactcgcctaccgctctaagccaggtgagggcaagctgatcttctgttccggtctagtactgcatcgcctccagtgtgcccgaggctttggggattggattgactccattctggcgttttctagaagccttcatagcctgctggtggacgttcccgcctttgcgtgtcttagcgctctcgtgctcataaccgacaggcatggcctgcaggagcctagacgggtggaggagctccaaaacagaatcgcttcctgcttaaaggagcacgtggccgccgtggcgggtgagccgcaacccgcatcatgtctgtccaggttgctggggaaactacccgaactccgcaccttgtgcacccagggtctgcagcgtatcttctatctcaagcttgaagacttggtacccccaccacctatcatagataaaattttcatggatactctcccattttag

SEQ ID NO: 79269 - DNA, 1959 bp, Artificial Sequence
  derived and/or modified sequence
atgaccagcgcccagtacaagatcaagatcctgattgagggcctgcaccacggccagaggcctggccctgccccaccccggcagcccggcagcttctgctgggccctgaaggcagatggcatcatgtggctggccaaggcctgctggagcatccagagcgagatgccctgcatccaggcccagtatggcaccccagcccccagccctggcccccgggaccacctggccagtgaccccctgaccccagagttcatcaagcccaccatggacctggccagccctgaggccgccccagctgcccccacagccctgcccagcttcagcaccttcatggatggctacacaggagaatttgacaccttcctgtaccagctgcccggcaccgtgcagccctgcagcagcgccagcagcagcgccagcagcaccagcagcagcagcgccaccagccctgccagcgccagcttcaagtttgaggacttccaggtgtatggctgctacccaggccccctgagcggccctgtggatgaggccctgagcagcagcggcagtgactactacggcagcccctgcagcgcccccagccccagcacccccagcttccagcccccccagctgagcccctgggatggcagctttggccacttcagccccagccagacctatgagggcctgcgggcctggacagagcagctgcccaaggccagcggccccccccagcccccagccttcttctccttcagcccccccaccggccccagccccagcctggcccagagccccctgaagctgttccccagccaggccacccaccagctgggggagggggagagctacagcatgcccacagccttccctggcctggcccccaccagcccccacctggagggcagcggcatcctggacacccctgtgaccagcaccaaggcccggagcggggcccctgggggcagcgagggccgctgtgctgtgtgtggggacaatgccagctgccagcactatggagtgaggacctgtgagggctgcaagggcttcttcaagaggacagtgcagaagaatgccaagtacatctgcctggccaacaaggactgccctgtggacaagagaagaagaaaccgctgccagttctgccgcttccagaagtgcctggccgtgggcatggtgaaggaggtggtgaggacagacagcctgaagggcagaagaggccgcctgcccagcaagcccaagcagcccccagatgccagccctgccaacctgctgaccagcctggtgcgggcccacctggacagcggccccagcacagccaagctggactacagcaagttccaggagctggtgctgccccactttgggaaggaggatgctggagatgtgcagcagttctatgacctgctgagcggcagcctggaggtgatcaggaagtgggccgagaagatccctggctttgctgagctgagccctgctgaccaggacctgctgctggagagcgccttcctggagctgttcatcctgcggctggcctaccgcagcaagccaggagagggcaagctgatcttctgcagcggcctggtgctgcaccggctgcagtgtgcccggggctttggagactggattgacagcatcctggccttcagccgcagcctgcacagcctgctggtggatgtgcctgcctttgcctgcctgagcgccctggtgctgatcacagacagacatggcctgcaggagccccggcgggtggaggagctgcagaacagaattgccagctgcctgaaggagcacgtggccgctgtggccggggagccccagcctgccagctgcctgagccggctgctgggcaagctgcctgagctgcggaccctgtgcacccagggcctgcagaggatcttctacctgaagctggaggacctggtgcccccaccacccatcatcgacaagatcttcatggacaccctgcccttctag

SEQ ID NO: 79270 - DNA, 1959 bp, Artificial Sequence
  derived and/or modified sequence
atgaccagcgcccagtacaagatcaagatcctgatcgagggcctgcaccacggacagaggccggggccggccccccctagacagcccggctctttttgttgggccctcaaagccgacggaattatgtggctcgcaaaggcttgctggtcaatacaatccgaaatgccatgtattcaggcccaatacggcactccagccccatcacccggtccccgtgatcacctggcgtctgatccccttacccccgaattcataaagcccacaatggatctggcttctcctgaagccgcccccgcagccccaaccgctttacccagcttctccacctttatggatggctatacgggcgaattcgatacatttctttatcagctacctggtaccgtgcagccctgtagctcggcctcttcttcagctagttccacctcatcctcctctgccacctcgccagccagtgcctcctttaaatttgaagatttccaggtttacggttgttaccccggtcccctgtccggcccggtggatgaagcgctgagtagcagcggtagtgattactacggttccccttgctcagcgcccagcccctcgaccccttcttttcagccaccccaacttagcccatgggacggcagtttcgggcacttttccccctcgcaaacttatgagggcctccgcgcctggacagagcagctcccaaaagcaagtggcccaccccagccaccagccttttttagtttctccccgcccaccggccctagtccttctcttgctcagtccccactgaagctcttcccctctcaagctacgcatcagttaggagaaggcgagagttattctatgccgacggcctttccaggcctggcccctacttcccctcatctcgaggggtccggcattctggatactccagtgacatcaacaaaggcaagaagcggggcccctggggggtcagaggggcggtgtgccgtctgtggagacaacgccagctgccaacactatggcgtgaggacgtgcgaagggtgtaagggattctttaagcgcacagttcagaaaaacgcaaaatatatttgcctcgccaacaaagactgcccagtcgataaaaggcgccgtaaccgctgtcagttttgtagatttcaaaagtgtctggccgtggggatggtgaaagaagttgttaggacagatagcctcaaggggaggcgagggcggctgccgtccaaaccaaagcagccccctgacgcaagtcccgccaatctgctgaccagcctcgttcgagctcacctcgactcgggcccgtctaccgcaaaattggattatagtaaattccaggaactggtattgcctcacttcggcaaggaggacgccggggacgttcaacaattctacgacttgctgtcgggatccctcgaggtgattagaaagtgggcagagaaaatcccaggctttgctgagctgagccccgcggaccaggatctccttctggagtccgcgtttttagagctcttcattttgagattagcttataggagcaagcctggtgagggaaagctaatcttctgctcaggactcgtgctccatcggctccaatgtgcacgtgggttcggcgattggatagatagcattctggcgttctccagaagcctacattcactactcgtggacgttccggcttttgcttgcctctccgccctggtgctgatcacagaccgtcacgggctgcaagagccccggcgagtcgaagagctccagaataggatagcctcttgtctgaaagagcatgtggctgcagtagctggcgaaccacaacctgcctcgtgccttagccgtttgttgggcaaactgcctgaattgaggaccttatgcacccaaggactccagcgcatattctacctgaagctcgaagatctggtaccaccgcctccaatcattgataaaatatttatggacactcttccattttag

SEQ ID NO: 79271 - DNA, 2132 bp, Artificial Sequence
  derived and/or modified sequence
ttcctggtgtaagctttggtatggatggtggccgtctccctacagactgggagctgttagagggcagggatcctagctgacacatctatgtcctcgccttggttggaggcctccaccatggacagaggccaggccctgcccctcccaggcagcctggctccttctgctgggccctgaaggcagacgggataatgtggttggccaaggcctgttggtccatccagagtgagatgccctgtatccaagcccaatatgggacaccagcaccgagtccgggaccccgtgaccacctggcaagcgaccccctgacccctgagttcatcaagcccaccatggacctggccagccccgaggcagcccccgctgcccccactgccctgcccagcttcagcaccttcatggacggctacacaggagagtttgacaccttcctctaccagctgccaggaacagtccagccatgctcctcagcctcctcctcggcctcctccacatcctcgtcctcagccacctcccctgcctctgcctccttcaagttcgaggacttccaggtgtacggctgctaccccggccccctgagcggcccagtggatgaggccctgtcctccagtggctctgactactatggcagcccctgctcggccccgtcgccctccacgcccagcttccagccgccccagctctctccctgggatggctccttcggccacttctcgcccagccagacttacgaaggcctgcgggcatggacagagcagctgcccaaagcctctgggcccccacagcctccagccttcttttccttcagtcctcccaccggccccagccccagcctggcccagagccccctgaagttgttcccctcacaggccacccaccagctgggggagggagagagctattccatgcctacggccttcccaggtttggcacccacttctccacaccttgagggctcggggatactggatacacccgtgacctcaaccaaggcccggagcggggccccaggtggaagtgaaggccgctgtgctgtgtgtggggacaacgcttcatgccagcattatggtgtccgcacatgtgagggctgcaagggcttcttcaagcgcacagtgcagaaaaacgccaagtacatctgcctggctaacaaggactgccctgtggacaagaggcggcgaaaccgctgccagttctgccgcttccagaagtgcctggcggtgggcatggtgaaggaagttgtccgaacagacagcctgaaggggcggcggggccggctaccttcaaaacccaagcagcccccagatgcctcccctgccaatctcctcacttccctggtccgtgcacacctggactcagggcccagcactgccaaactggactactccaagttccaggagctggtgctgccccactttgggaaggaagatgctggggatgtacagcagttctacgacctgctctccggttctctggaggtcatccgcaagtgggcggagaagatccctggctttgctgagctgtcaccggctgaccaggacctgttgctggagtcggccttcctggagctcttcatcctccgcctggcgtacaggtctaagccaggcgagggcaagctcatcttctgctcaggcctggtgctacaccggctgcagtgtgcccgtggcttcggggactggattgacagtatcctggccttctcaaggtccctgcacagcttgcttgtcgatgtccctgccttcgcctgcctctctgcccttgtcctcatcaccgaccggcatgggctgcaggagccgcggcgggtggaggagctgcagaaccgcatcgccagctgcctgaaggagcacgtggcagctgtggcgggcgagccccagccagccagctgcctgtcacgtctgttgggcaaactgcccgagctgcggaccctgtgcacccagggcctgcagcgcatcttctacctcaagctggaggacttggtgccccctccacccatcattgacaagatcttcatggacacgctgcccttctgacccctgcctgggaacacgtgtgcacatgcgcactctcatatgccaccccatgtgcctttagtccacggacccccagagcacccccaagcctgggcttgagctgca

SEQ ID NO: 79272 - DNA, 3511 bp, Artificial Sequence
  derived and/or modified sequence
tttctccgccggctgcgggaaccggttccaggagcgcgggagctcgtctgccaggagacccagccgggagggaccgatgctgcgtgatgcaaccccttcgagggactgagtcaagaaaccaaggctgggggtctcgtggagtcaggcggagctggggattaggactcggggcttgtgtctcccaggcgtgtttttttgttgttgttttgtttttttgccgcaacatcttccttatactgggtggggtgggggcgggggtggtctgtatttccagacctcctccatggtggtctggctgtgtggagggcagggcacagttccttgacttggctcattcccccccaacgccccccctttcttttttttttgagatggagtctcgctctgttgcccaggctggagtgcagtagcgtgatctcggctcactgcaatctccgtctcccgggttcaagcgaatctcctgcctcagcctccagagtagctgggactacaggcacccaccaccacgcccggctaatttttgtatttttagtagagacagggtttcaccatattggccaggctggtctggaactcctgaccttgtgatccgcctgcctcggcctcctaaagtgctgggattacaggcgtgagccaccgcgcctggcaggctcattccctttttatgccttcgtttttgatagatgacctggggatgggagaaatgctgcagaggtggtttatttacagtgaattgttaatttggttgtggggctagtattaggggcacattgggaaaacacaggctgggcagaggttggtaggttcacaacagttatgcccactgggtgctgatggatttgggggctgtcgtcggcctggcttggggccctagtggtggggctacaaggcttgctcctagatctactccaagtgaacatttaagatcagtgacttggatggagacttaaaaaggaagtcagctgactccgtgtagtcatccagagctgtgaggaatgacaagtgcacagtataaaatcaagattctaattgaaggcctccaccatggacagaggccaggccctgcccctcccaggcagcctggctccttctgctgggccctgaaggcagacgggataatgtggttggccaaggcctgttggtccatccagagtgagatgccctgtatccaagcccaatatgggacaccagcaccgagtccgggaccccgtgaccacctggcaagcgaccccctgacccctgagttcatcaagcccaccatggacctggccagccccgaggcagcccccgctgcccccactgccctgcccagcttcagcaccttcatggacggctacacaggagagtttgacaccttcctctaccagctgccaggaacagtccagccatgctcctcagcctcctcctcggcctcctccacatcctcgtcctcagccacctcccctgcctctgcctccttcaagttcgaggacttccaggtgtacggctgctaccccggccccctgagcggcccagtggatgaggccctgtcctccagtggctctgactactatggcagcccctgctcggccccgtcgccctccacgcccagcttccagccgccccagctctctccctgggatggctccttcggccacttctcgcccagccagacttacgaaggcctgcgggcatggacagagcagctgcccaaagcctctgggcccccacagcctccagccttcttttccttcagtcctcccaccggccccagccccagcctggcccagagccccctgaagttgttcccctcacaggccacccaccagctgggggagggagagagctattccatgcctacggccttcccaggtttggcacccacttctccacaccttgagggctcggggatactggatacacccgtgacctcaaccaaggcccggagcggggccccaggtggaagtgaaggccgctgtgctgtgtgtggggacaacgcttcatgccagcattatggtgtccgcacatgtgagggctgcaagggcttcttcaagcgcacagtgcagaaaaacgccaagtacatctgcctggctaacaaggactgccctgtggacaagaggcggcgaaaccgctgccagttctgccgcttccagaagtgcctggcggtgggcatggtgaaggaagttgtccgaacagacagcctgaaggggcggcggggccggctaccttcaaaacccaagcagcccccagatgcctcccctgccaatctcctcacttccctggtccgtgcacacctggactcagggcccagcactgccaaactggactactccaagttccaggagctggtgctgccccactttgggaaggaagatgctggggatgtacagcagttctacgacctgctctccggttctctggaggtcatccgcaagtgggcggagaagatccctggctttgctgagctgtcaccggctgaccaggacctgttgctggagtcggccttcctggagctcttcatcctccgcctggcgtacaggtctaagccaggcgagggcaagctcatcttctgctcaggcctggtgctacaccggctgcagtgtgcccgtggcttcggggactggattgacagtatcctggccttctcaaggtccctgcacagcttgcttgtcgatgtccctgccttcgcctgcctctctgcccttgtcctcatcaccgaccggcatgggctgcaggagccgcggcgggtggaggagctgcagaaccgcatcgccagctgcctgaaggagcacgtggcagctgtggcgggcgagccccagccagccagctgcctgtcacgtctgttgggcaaactgcccgagctgcggaccctgtgcacccagggcctgcagcgcatcttctacctcaagctggaggacttggtgccccctccacccatcattgacaagatcttcatggacacgctgcccttctgacccctgcctgggaacacgtgtgcacatgcgcactctcatatgccaccccatgtgcctttagtccacggacccccagagcacccccaagcctgggcttgagctgcagaatgactccaccttctcacctgctccaggaggtttgcagggagctcaagcccttggggagggggatgccttcatgggggtgaccccacgatttgtcttatcccccccagcctggccccggcctttatgttttttgtaagataaaccgtttttaacacatagcgccgtgctgtaaataagcccagtgctgctgtaaatacaggaagaaagagcttgaggtgggagcggggctgggaggaagggatgggccccgccttcctgggcagcctttccagcctcctgctggctctctcttcctaccctccttccacatgtacataaactgtcactctaggaagaagacaaatgacagattctgacatttatatttgtgtattttcctggatttatagtatgtgacttttctgattaatatatttaatatattgaataaaaaatagacatgtagttgg

SEQ ID NO: 79273 - DNA, 2029 bp, Artificial Sequence
  derived and/or modified sequence
tgtaggcctccaccatggacagaggccaggccctgcccctcccaggcagcctggctccttctgctgggccctgaaggcagacgggataatgtggttggccaaggcctgttggtccatccagagtgagatgccctgtatccaagcccaatatgggacaccagcaccgagtccgggaccccgtgaccacctggcaagcgaccccctgacccctgagttcatcaagcccaccatggacctggccagccccgaggcagcccccgctgcccccactgccctgcccagcttcagcaccttcatggacggctacacaggagagtttgacaccttcctctaccagctgccaggaacagtccagccatgctcctcagcctcctcctcggcctcctccacatcctcgtcctcagccacctcccctgcctctgcctccttcaagttcgaggacttccaggtgtacggctgctaccccggccccctgagcggcccagtggatgaggccctgtcctccagtggctctgactactatggcagcccctgctcggccccgtcgccctccacgcccagcttccagccgccccagctctctccctgggatggctccttcggccacttctcgcccagccagacttacgaaggcctgcgggcatggacagagcagctgcccaaagcctctgggcccccacagcctccagccttcttttccttcagtcctcccaccggccccagccccagcctggcccagagccccctgaagttgttcccctcacaggccacccaccagctgggggagggagagagctattccatgcctacggccttcccaggtttggcacccacttctccacaccttgagggctcggggatactggatacacccgtgacctcaaccaaggcccggagcggggccccaggtggaagtgaaggccgctgtgctgtgtgtggggacaacgcttcatgccagcattatggtgtccgcacatgtgagggctgcaagggcttcttcaagcgcacagtgcagaaaaacgccaagtacatctgcctggctaacaaggactgccctgtggacaagaggcggcgaaaccgctgccagttctgccgcttccagaagtgcctggcggtgggcatggtgaaggaagttgtccgaacagacagcctgaaggggcggcggggccggctaccttcaaaacccaagcagcccccagatgcctcccctgccaatctcctcacttccctggtccgtgcacacctggactcagggcccagcactgccaaactggactactccaagttccaggagctggtgctgccccactttgggaaggaagatgctggggatgtacagcagttctacgacctgctctccggttctctggaggtcatccgcaagtgggcggagaagatccctggctttgctgagctgtcaccggctgaccaggacctgttgctggagtcggccttcctggagctcttcatcctccgcctggcgtacaggtctaagccaggcgagggcaagctcatcttctgctcaggcctggtgctacaccggctgcagtgtgcccgtggcttcggggactggattgacagtatcctggccttctcaaggtccctgcacagcttgcttgtcgatgtccctgccttcgcctgcctctctgcccttgtcctcatcaccgaccggcatgggctgcaggagccgcggcgggtggaggagctgcagaaccgcatcgccagctgcctgaaggagcacgtggcagctgtggcgggcgagccccagccagccagctgcctgtcacgtctgttgggcaaactgcccgagctgcggaccctgtgcacccagggcctgcagcgcatcttctacctcaagctggaggacttggtgccccctccacccatcattgacaagatcttcatggacacgctgcccttctgacccctgcctgggaacacgtgtgcacatgcgcactctcatatgccaccccatgtgcctttagtccacggacccccagagcacccccaagcctgggcttgagctgca

SEQ ID NO: 79274 - DNA, 1959 bp, Artificial Sequence
  derived and/or modified sequence
atgactagtgcacagtataaaatcaagattttaatcgagggtctgcaccacggccagaggcctggtccagccccacccaggcagccgggatcattttgttgggcactcaaggccgacgggatcatgtggctggcaaaagcttgctggtctatccaaagcgagatgccatgcattcaggcacagtatggcaccccagccccttctcctgggcctagggatcacctcgcctccgaccccctgaccccagagttcataaagccaaccatggacttggcctcccctgaagctgcccctgctgcacctacagcattaccatccttcagtaccttcatggacggctatacaggcgaattcgacacctttttgtaccaactacctggcacagtgcagccatgcagttccgccagcagcagtgcttcatccacgagttcatctagcgcaacctctccagcctcagcttctttcaagtttgaggacttccaggtctacgggtgctacccaggacctctgtctggccctgtggatgaggccctgagttcttccggaagcgactattacggtagtccatgctctgcacctagtccttctaccccaagcttccagcccccacaactgagcccttgggatgggtccttcgggcacttttcgccatcccaaacttacgaaggcctgagagcctggactgagcagctgcctaaagctagtggtcctccccagccccctgccttcttctcattttctcccccaactgggcctagccccagcctggcacagagcccactgaagctgttcccttctcaggcaacccatcagctgggcgaaggcgaaagctattcgatgcctacagcttttcccggactggctcctacctctcctcacttagaaggctcaggtatattagacactccagttacctcaaccaaagccaggtccggcgcacccggaggaagtgaaggaagatgtgccgtgtgtggcgataatgcctcatgtcagcactacggagttcggacttgtgagggctgtaaaggattctttaaacggacagtccagaagaatgctaagtacatttgcctggctaacaaggactgccctgtagacaagaggcgacgcaatcgctgccagttctgcaggttccaaaagtgcttggccgtcggaatggtgaaagaggtagtcagaaccgactcgctgaaagggagacggggacggttgccatcaaagccgaaacagcctcccgacgccagccctgcaaatttacttacaagcttagtgagggcacatctggatagcggcccaagcacagcaaagctggactactccaagttccaggaactggtcctaccacacttcggtaaggaagacgccggagacgtccagcaattctatgacctgcttagcggatcgttggaagtaataaggaagtgggccgagaagatacctgggttcgctgaattgagccctgctgaccaggacctcctcctcgaatctgccttccttgaactgtttatcctgcgtttagcctatcggtctaagcccggagaagggaagctgatcttttgctcaggccttgtacttcaccgactccaatgcgcccgaggtttcggagattggatcgatagtatcctggcattcagtagaagtttgcactccctgctcgtggatgttcccgcattcgcttgcttgagcgccctggtgctcattaccgacagacacggccttcaggagccgagaagggtggaggagctgcagaacagaatagccagttgcctcaaagaacatgtcgcggcagttgcaggtgaaccccagccagcctcctgtctttctagattgttaggtaagcttccggagctacgtacgctgtgtacacaagggctgcagcggattttctacctgaagctggaggatcttgtgccgcctcccccaataatcgataaaatatttatggataccttacctttctag

SEQ ID NO: 79275 - DNA, 1959 bp, Artificial Sequence
  derived and/or modified sequence
atgaccagcgcccagtacaagatcaagatcctgatcgagggcctgcaccacggccagagacccggccccgccccccccagacagcccggcagcttctgctgggccctgaaggccgacggcatcatgtggctggccaaggcctgctggagcatccagagcgagatgccctgcatccaggcccagtacggcacccccgcccccagccccggccccagagaccacctggccagcgaccccctgacccccgagttcatcaagcccaccatggacctggccagccccgaggccgcccccgccgcccccaccgccctgcccagcttcagcaccttcatggacggctacaccggcgagttcgacaccttcctgtaccagctgcccggcaccgtgcagccctgcagcagcgccagcagcagcgccagcagcaccagcagcagcagcgccaccagccccgccagcgccagcttcaagttcgaggacttccaggtgtacggctgctaccccggccccctgagcggccccgtggacgaggccctgagcagcagcggcagcgactactacggcagcccctgcagcgcccccagccccagcacccccagcttccagcccccccagctgagcccctgggacggcagcttcggccacttcagccccagccagacctacgagggcctgagagcctggaccgagcagctgcccaaggccagcggccccccccagccccccgccttcttcagcttcagcccccccaccggccccagccccagcctggcccagagccccctgaagctgttccccagccaggccacccaccagctgggcgagggcgagagctacagcatgcccaccgccttccccggcctggcccccaccagcccccacctggagggcagcggcatcctggacacccccgtgaccagcaccaaggccagaagcggcgcccccggcggcagcgagggcagatgcgccgtgtgcggcgacaacgccagctgccagcactacggcgtgagaacctgcgagggctgcaagggcttcttcaagagaaccgtgcagaagaacgccaagtacatctgcctggccaacaaggactgccccgtggacaagagaagaagaaacagatgccagttctgcagattccagaagtgcctggccgtgggcatggtgaaggaggtggtgagaaccgacagcctgaagggcagaagaggcagactgcccagcaagcccaagcagccccccgacgccagccccgccaacctgctgaccagcctggtgagagcccacctggacagcggccccagcaccgccaagctggactacagcaagttccaggagctggtgctgccccacttcggcaaggaggacgccggcgacgtgcagcagttctacgacctgctgagcggcagcctggaggtgatcagaaagtgggccgagaagatccccggcttcgccgagctgagccccgccgaccaggacctgctgctggagagcgccttcctggagctgttcatcctgagactggcctacagaagcaagcccggcgagggcaagctgatcttctgcagcggcctggtgctgcacagactgcagtgcgccagaggcttcggcgactggatcgacagcatcctggccttcagcagaagcctgcacagcctgctggtggacgtgcccgccttcgcctgcctgagcgccctggtgctgatcaccgacagacacggcctgcaggagcccagaagagtggaggagctgcagaacagaatcgccagctgcctgaaggagcacgtggccgccgtggccggcgagccccagcccgccagctgcctgagcagactgctgggcaagctgcccgagctgagaaccctgtgcacccagggcctgcagagaatcttctacctgaagctggaggacctggtgccccccccccccatcatcgacaagatcttcatggacaccctgcccttctag

SEQ ID NO: 79276 - protein, 502 aa, Artificial Sequence
  derived and/or modified sequence
MGSPGRGAGLYFSSSQGLGLIPSPGLSMWRLPRALCVHAAKTSKLSGPWSRPAAFMSTLLINQPQYAWLKELGLREENEGVYNGSWGGRGEVITTYCPANNEPIARVRQASVADYEETVKKAREAWKIWADIPAPKRGEIVRQIGDALREKIQVLGSLVSLEMGKILVEGVGEVQEYVDICDYAVGLSRMIGGPILPSERSGHALIEQWNPVGLVGIITAFNFPVAVYGWNNAIAMICGNVCLWKGAPTTSLISVAVTKIIAKVLEDNKLPGAICSLTCGGADIGTAMAKDERVNLLSFTGSTQVGKQVGLMVQERFGRSLLELGGNNAIIAFEDADLSLVVPSALFAAVGTAGQRCTTARRLVMDRPGNYVEPTIVTGLGHDASIAHTETFAPILYVFKFKNEEEVFAWNNEVKQGLSSSIFTKDLGRIFRWLGPKGSDCGIVNVNIPTSGAEIGGAFGGEKHTGGGRESGSDAWKQYMRRSTCTINYSKDLPLAQGIKFQ

SEQ ID NO: 79277 - DNA, 1509 bp, Artificial Sequence
  derived and/or modified sequence
atgggctccccaggtcgtggagctgggctgtatttttccagttcgcagggcttggggctcatcccgtccccgggactgagcatgtggaggctgccccgagccttgtgcgttcacgctgcaaagactagcaaactgtccgggccttggagccgtcccgccgcatttatgtcaacgcttctgatcaaccagccccaatatgcttggctcaaggaactggggctcagggaggaaaatgagggagtctataacggatcttggggcggaaggggggaggttataactacctactgtcctgccaacaatgagcctatcgctagagtacgacaagctagcgtggcagactacgaggagaccgttaagaaggccagggaggcctggaagatttgggctgacatccctgctcctaagagaggagaaatagttcggcagattggagatgccctcagggaaaaaattcaggtcttaggtagtctagtctcactggaaatgggaaagattcttgtggaaggcgtgggcgaagtgcaagagtacgttgacatatgcgattacgcagtcggcctgagccggatgatcggcgggcccatactcccaagcgagagatcaggtcatgccctaattgagcaatggaacccagtggggctggtcggtatcatcacagccttcaacttccccgtagctgtctacggctggaacaacgctatcgccatgatttgcggtaacgtgtgcctgtggaaaggggcgccaaccacttcattgatcagcgtcgccgtaactaagatcattgccaaggtgctggaggacaacaagttaccaggggctatctgttcccttacatgcggcggcgcggacataggcactgcaatggctaaagacgaaagagtaaacctgctttcatttaccggttccacacaggtgggcaagcaggtaggcctcatggtgcaggagagatttggccggtctctgctggagctaggaggcaacaatgccatcattgcgttcgaagacgcagatctttctctggtggtgccttctgctctcttcgcagccgtgggaaccgccgggcagagatgcacaacagctcggcgtctcgtgatggatagaccggggaactatgtggaacccacgatagtgaccggtttaggtcacgacgcgtcaatcgcgcataccgaaaccttcgcacctatactgtacgtgtttaagttcaaaaacgaagaggaagttttcgcctggaataacgaggtgaagcagggcttaagcagcagcatattcacaaaggacctgggcaggatctttcggtggctgggtcctaagggctccgactgtggaatcgtgaacgtcaacattccaaccagtggggcagagatagggggcgccttcggaggcgagaagcataccggaggtggcagagagtccgggtcggacgcctggaaacaatacatgcgtcgaagtacatgcactatcaactacagcaaggaccttcccttggctcagggtataaaatttcagtag

SEQ ID NO: 79278 - DNA, 1509 bp, Artificial Sequence
  derived and/or modified sequence
atgggcagccctggccgcggggccggcctgtacttcagcagcagccagggcctgggcctcatccccagccctggcctgtccatgtggaggctgccccgggccctgtgtgtgcatgctgccaagaccagcaagctgagcggcccctggagcaggcctgctgccttcatgagcaccctgctgatcaaccagccccagtatgcctggctgaaggagctgggcctgcgggaggagaatgaaggagtgtacaacggctcctggggcggccgcggggaggtgatcaccacctactgcccagccaacaatgagcccatcgcccgggtgcggcaggcctctgtggccgactatgaggagaccgtgaagaaggcccgggaggcctggaagatctgggccgacatcccagcccccaagagaggagagatcgtgcggcagattggagatgccctgcgggagaagatccaggtgctgggcagcctggtgtccctggagatgggcaagatcctggtggagggcgtgggggaggtgcaggagtatgtggacatctgtgactatgctgtgggcctgagcaggatgattggaggccccatcctgcccagcgagaggagcggccacgccctgattgagcagtggaaccctgtgggcctggtgggcatcatcacagccttcaacttccctgtggccgtgtatggctggaacaatgccatcgccatgatctgtggaaatgtgtgcctgtggaagggggcccccaccaccagcctcatctctgtggccgtgaccaagatcatcgccaaggtgctggaggacaacaagctgcccggggccatctgcagcctgacctgtggcggcgctgacatcggcacagccatggccaaggatgagcgggtgaacctgctgtccttcaccggcagcacccaggtgggcaagcaggtgggcctgatggtgcaggagagatttggccgcagcctgctggagctgggcggcaacaatgccatcatcgcctttgaagatgctgacctgagcctggtggtgcccagcgccctgtttgctgctgtgggcacagctggccagcgctgcaccacagcccggcggctggtgatggaccggcccggcaactacgtggagcccaccatcgtgacaggcctgggccatgatgccagcatcgcccacacagagacctttgcccccatcctgtatgtgttcaagttcaagaatgaggaggaggtgtttgcctggaacaatgaggtgaagcagggcctgagcagcagcatcttcaccaaggacctgggccgcatcttccgctggctgggccccaagggcagtgactgtggcatcgtgaatgtgaacatccccaccagcggggctgagattggaggagcctttggaggagagaagcacactggaggcggccgggagagcggcagtgatgcctggaagcagtacatgagaagaagcacctgcaccatcaactacagcaaggacctgcccctggcccagggcatcaagttccagtag

SEQ ID NO: 79279 - DNA, 1935 bp, Artificial Sequence
  derived and/or modified sequence
aggggcagacggggcggtggcggggtcgtgcccagtgggaggggtcgggtctgcccaatgggttctcccgggcggggggcggggctctatttcagcagctctcagggccttgggctcatcccgagtcccgggctcagtatgtggcgccttcctcgcgcgctgtgtgtgcacgctgcaaagaccagcaagctctctggaccttggagcaggcctgccgccttcatgtccactctcctcatcaatcagccccagtatgcgtggctgaaagagctggggctccgcgaggaaaacgagggcgtgtataatggaagctggggaggccggggagaggttattacgacctattgccctgctaacaacgagccaatagcaagagtccgacaggccagtgtggcagactatgaagaaactgtaaagaaagcaagagaagcatggaaaatctgggcagatattcctgctccaaaacgaggagaaatagtaagacagattggcgatgccttgcgggagaagatccaagtactaggaagcttggtgtctttggagatggggaaaatcttagtggaaggtgtgggtgaagttcaggagtatgtggatatctgtgactatgctgttggtttatcaaggatgattggaggacctatcttgccttctgaaagatctggccatgcactgattgagcagtggaatcccgtaggcctggttggaatcatcacggcattcaatttccctgtggcagtgtatggttggaacaacgccatcgccatgatctgtggaaatgtctgcctctggaaaggagctccaaccacttccctcattagtgtggctgtcacaaagataatagccaaggttctggaggacaacaagctgcctggtgcaatttgttccttgacttgtggtggagcagatattggcacagcaatggccaaagatgaacgagtgaacctgctgtccttcactgggagcactcaggtgggaaaacaggtgggcctgatggtgcaggagaggtttgggagaagtctgttggaacttggaggaaacaatgccattattgcctttgaagatgcagacctcagcttagttgttccatcagctctcttcgctgctgtgggaacagctggccagaggtgtaccactgcgaggcgactggttatggatcgccctggaaattatgtagaaccgacaattgtgacaggtcttggccacgatgcgtccattgcacacacagagacttttgctccgattctctatgtctttaaattcaagaatgaagaagaggtctttgcatggaataatgaagtaaaacagggactttcaagtagcatctttaccaaagatctgggcagaatctttcgctggcttggacctaaaggatcagactgtggcattgtaaatgtcaacattccaacaagtggggctgagattggaggtgcctttggaggagaaaagcacactggtggtggcagggagtctggcagtgatgcctggaaacagtacatgagaaggtctacttgtactatcaactacagtaaagaccttcctctggcccaaggaatcaagtttcagtaaaggtgttttagatgaacatcccttaatttgaggtgttccagcagctgtttttggagaagacaaagaaaattaaagttttccctgaataaatgcattattatgactgtgacagtgactaatccccctatgaccccaaagccctgattaaatcaagagattccttttttaaaaatcaaaataaaattgttacaacatagccatagttactaaaagatgagttaggtggatttttattatgtcaactagttgtacatggctttttaaaagttaatgattattttgtaattagaaaaaaatagtacgtaccagggtaggaatttgggaaaatacagaaccgaggagaaaacagaagtctttgcagtagataca

SEQ ID NO: 79280 - DNA, 1509 bp, Artificial Sequence
  derived and/or modified sequence
atgggcagccccggccggggcgccggcctgtacttcagcagcagccagggtctcggtctcataccatcgcctggactgagcatgtggagacttccaagagccctctgtgtgcatgccgcaaaaacatccaagctgagcggaccttggagccgtcccgcagcgttcatgtcaacattactgattaatcagccccagtatgcctggttgaaagaactgggcctcagggaggagaatgagggtgtatacaatggcagctggggaggcaggggcgaagtgatcaccacatattgcccggcgaacaacgagcccatcgctcgcgtccgccaagcatccgtcgccgattatgaggagaccgtcaaaaaggctcgcgaagcttggaagatttgggctgacattcccgccccaaaacgaggcgaaatcgtccggcagattggggatgcgctgcgggagaagattcaagttcttggctctcttgtttccttagaaatgggaaaaatattagtggagggggtgggggaggtacaggagtacgtcgacatttgcgattatgccgtaggcctgtcccggatgattggcggccctatccttcctagcgagcgctcaggacacgcactgattgagcagtggaatcccgttgggctcgtggggattattaccgcatttaacttccccgttgccgtgtatggttggaacaacgcaattgcaatgatctgtggcaacgtctgtctgtggaagggagccccaaccacttctttgattagtgtggccgtaacaaagatcatcgctaaggtgctcgaagacaacaaactgcctggcgccatatgtagcctcacatgcgggggcgccgacataggcactgccatggctaaggatgagcgggtgaaccttttaagttttactggctctacgcaggtaggaaagcaagtagggttgatggtccaggagcgctttgggcggtcactgctggagttgggtggaaataatgctatcatagcttttgaggacgccgacctttccttggtggtcccatcagcactgttcgcggccgtcgggacagctggacagaggtgtactaccgctcgacgtttagtaatggatcgccctgggaactacgtcgagcccaccattgtcaccggactaggccatgacgcaagcatagcacatactgagacctttgctccaattctgtacgtcttcaagtttaagaacgaggaggaagtgttcgcttggaacaacgaggtcaagcagggcctgtcgagcagcatcttcaccaaggacctggggcggatttttcgatggttggggccgaagggctccgattgcgggattgtaaacgtcaatatccctacgtccggcgctgagataggcggcgccttcggcggcgaaaaacatacaggcgggggaagggagtcaggttccgacgcttggaaacagtacatgcggcggtctacatgcaccatcaactactctaaggacctgccccttgcccagggaataaaatttcagtag

SEQ ID NO: 79281 - DNA, 1509 bp, Artificial Sequence
  derived and/or modified sequence
atgggatctcccggtagaggggctggcctttatttcagcagctcacaaggattaggcctcattccctctcccggactttccatgtggcggctgccacgcgctctctgtgttcatgccgcaaaaactagtaaactgtccggaccctggagtaggccagcagccttcatgtcaacattgttaatcaatcagcctcagtacgcatggctgaaagagctgggtctgcgggaggaaaacgaaggcgtatacaatggctcttgggggggaaggggggaagtaattaccacctactgtccagctaataatgaacctatagcgagagttcgccaggcatctgttgccgactatgaggaaacagtcaaaaaagcacgcgaggcctggaaaatttgggccgacataccggctcctaagagaggcgagattgtgagacagattggtgacgctcttcgcgagaagattcaggtgctaggtagtttggtgtcactggagatgggaaagatcttggtggaaggagtgggcgaagtgcaggaatacgtggacatctgcgactatgctgttggcctttcaaggatgattggtggtcccatcctaccttcagaacggtccggccacgccctgatagagcagtggaatcctgtgggccttgtgggtatcatcaccgcatttaattttcctgtagctgtgtacgggtggaacaacgcgattgctatgatttgcggtaacgtctgtctttggaagggggcacccacaaccagcttaattagtgtcgccgttacgaaaatcatagcaaaagttcttgaagataataagctgccaggcgcaatctgcagtctaacttgtggaggagctgacatcggcactgcaatggccaaggatgaaagggttaacctgctgtcatttaccggatccacgcaagtcggcaaacaagttgggcttatggtgcaggagaggtttgggaggagccttcttgagttaggagggaacaatgcaattatcgccttcgaggatgccgacctgtccttggttgtacccagtgctctctttgcagccgtgggcaccgccggacaacgctgtacaaccgccagacgcctggttatggatagaccaggtaactacgtggaaccaacaatcgtcacaggtctcggacacgatgcctccatcgctcatacagagacatttgccccaattctttatgtgtttaaatttaagaacgaagaagaggtgtttgcttggaacaacgaagtgaagcaaggcctctcctcttccatattcacaaaggatctgggccgtatctttcggtggttaggtcccaagggatccgactgtggtatcgtgaatgtcaatattcctaccagcggagcagaaatcggtggtgcattcggcggtgagaagcatactggaggcggacgcgagtctggatctgatgcctggaagcagtatatgcgtcgctctacttgcaccatcaattattctaaagacctacctctcgctcaggggatcaagttccagtag

SEQ ID NO: 79282 - DNA, 1509 bp, Artificial Sequence
  derived and/or modified sequence
atgggcagccccggcagaggcgccggcctgtacttcagcagcagccagggcctgggcctgatccccagccccggcctgagcatgtggagactgcccagagccctgtgcgtgcacgccgccaagaccagcaagctgagcggcccctggagcagacccgccgccttcatgagcaccctgctgatcaaccagccccagtacgcctggctgaaggagctgggcctgagagaggagaacgagggcgtgtacaacggcagctggggcggcagaggcgaggtgatcaccacctactgccccgccaacaacgagcccatcgccagagtgagacaggccagcgtggccgactacgaggagaccgtgaagaaggccagagaggcctggaagatctgggccgacatccccgcccccaagagaggcgagatcgtgagacagatcggcgacgccctgagagagaagatccaggtgctgggcagcctggtgagcctggagatgggcaagatcctggtggagggcgtgggcgaggtgcaggagtacgtggacatctgcgactacgccgtgggcctgagcagaatgatcggcggccccatcctgcccagcgagagaagcggccacgccctgatcgagcagtggaaccccgtgggcctggtgggcatcatcaccgccttcaacttccccgtggccgtgtacggctggaacaacgccatcgccatgatctgcggcaacgtgtgcctgtggaagggcgcccccaccaccagcctgatcagcgtggccgtgaccaagatcatcgccaaggtgctggaggacaacaagctgcccggcgccatctgcagcctgacctgcggcggcgccgacatcggcaccgccatggccaaggacgagagagtgaacctgctgagcttcaccggcagcacccaggtgggcaagcaggtgggcctgatggtgcaggagagattcggcagaagcctgctggagctgggcggcaacaacgccatcatcgccttcgaggacgccgacctgagcctggtggtgcccagcgccctgttcgccgccgtgggcaccgccggccagagatgcaccaccgccagaagactggtgatggacagacccggcaactacgtggagcccaccatcgtgaccggcctgggccacgacgccagcatcgcccacaccgagaccttcgcccccatcctgtacgtgttcaagttcaagaacgaggaggaggtgttcgcctggaacaacgaggtgaagcagggcctgagcagcagcatcttcaccaaggacctgggcagaatcttcagatggctgggccccaagggcagcgactgcggcatcgtgaacgtgaacatccccaccagcggcgccgagatcggcggcgccttcggcggcgagaagcacaccggcggcggcagagagagcggcagcgacgcctggaagcagtacatgagaagaagcacctgcaccatcaactacagcaaggacctgcccctggcccagggcatcaagttccagtag

SEQ ID NO: 79283 - protein, 538 aa, Artificial Sequence
  derived and/or modified sequence
MVAGWLTNYSQDSVTFEDVAVDFTQEEWTLLDQTQRNLYRDVMLENYKNLVAVDWESHINTKWSAPQQNFLQGKTSSVVEMERNHFGEELFDFNQCEKALSEHSCLKTHRRTYFRKKTCECNQCEKAFRKPSIFTLHKKTDIGEELPNCNQCETAFSQHLHLVCKKTSQNLHLVCKKTHTQEKPYKCSDCEKGLPSSSHLRECVRIYGGERPYTHKEYVETFSHSTALFVHMQTQDGEKFYECKACGKPFTESSYLTQHLRTHSRVLPIEHKKFGKAFAFSPDLAKHIRLRTRGKHYVCNECGKEFTCFSKLNIHIRVHTGEKPYECNKCGKAFTDSSGLIKHRRTHTGEKPYECKECGKAFANSSHLTVHMRTHTGEKPYQCKECGKAFINSSSFKSHMQTHPGVKPYDCQQCGKAFIRSSFLIRHLRSHSAERPFECEECGKAFRYSSHLSQHKRIHTGERPYKCQKCGQAFSISSGLTVHMRTHTGERPFECQECGKAFTRSTYLIRHLRSHSVEKPYKECGQTFSNSSCLTECV

SEQ ID NO: 79284 - protein, 458 aa, Artificial Sequence
  derived and/or modified sequence
MERNHFGEELFDFNQCEKALSEHSCLKTHRRTYFRKKTCECNQCEKAFRKPSIFTLHKKTDIGEELPNCNQCETAFSQHLHLVCKKTSQNLHLVCKKTHTQEKPYKCSDCEKGLPSSSHLRECVRIYGGERPYTHKEYVETFSHSTALFVHMQTQDGEKFYECKACGKPFTESSYLTQHLRTHSRVLPIEHKKFGKAFAFSPDLAKHIRLRTRGKHYVCNECGKEFTCFSKLNIHIRVHTGEKPYECNKCGKAFTDSSGLIKHRRTHTGEKPYECKECGKAFANSSHLTVHMRTHTGEKPYQCKECGKAFINSSSFKSHMQTHPGVKPYDCQQCGKAFIRSSFLIRHLRSHSAERPFECEECGKAFRYSSHLSQHKRIHTGERPYKCQKCGQAFSISSGLTVHMRTHTGERPFECQECGKAFTRSTYLIRHLRSHSVEKPYKECGQTFSNSSCLTECV

SEQ ID NO: 79285 - DNA, 2566 bp, Artificial Sequence
  derived and/or modified sequence
atcttaacagcgcgttcccgttggcgtctgaggaacagcatctctgccttcctgttcacggtgaccttcgcttggtgtcctcctggcctcagcaacctgacaattctgtcgtgtcccgatcatctttctcaagatgttttctgtcttcatgagtcaaaatttgaagaggaaaggatggtggctgggtggttgacaaattactctcaggactcagtgacctttgaggatgtggctgtggacttcacccaggaggagtggactttgctggatcaaactcagagaaacttatacagagatgtgatgctggagaactataagaatctagttgcagtagattgggagagtcatattaataccaaatggtcagcacctcagcagaattttttgcaggggaaaacatccagtgtggtggaaatggagagaaaccattttggagaggaactgtttgactttaaccaatgtgaaaaagccttgagtgaacactcatgccttaagactcacaggagaacttactttagaaagaaaacctgtgagtgtaatcaatgtgaaaaagccttcagaaaaccctctatctttactttacacaagaaaactgatatcggagaggaacttcctaactgtaatcaatgtgaaacagccttcagccaacatctacatcttgtttgcaagaaaactagccaaaatctacatcttgtttgcaagaaaactcacactcaagagaaaccatataaatgcagtgactgtgaaaaaggcttaccttcctcctcacacctcagagaatgtgtaagaatttatggtggagagagaccatatactcataaggagtatgtcgaaaccttttctcattctacagccctttttgtacacatgcaaactcaagatggagaaaaattctatgaatgtaaagcatgtgggaaacccttcactgagtcgtcatatcttactcaacatttaagaactcatagtagagtgttacctatagaacataagaaatttggcaaagcctttgctttttccccagatcttgctaaacatataagacttagaactagaggaaaacactatgtttgtaatgaatgtggcaaagaatttacttgtttctcaaaactcaacattcacataagggttcacactggagaaaaaccgtatgagtgcaacaaatgtgggaaagccttcactgattcatcaggtcttataaaacacaggcgaactcacactggagaaaagccttatgaatgtaaggaatgtgggaaagcttttgctaactcttcacatcttactgtacatatgagaactcacactggtgagaagccttatcaatgtaaggaatgtggaaaagcctttattaattcctcttcctttaaaagtcacatgcagactcatcctggtgtaaaaccctatgactgtcaacagtgtgggaaagccttcattcgatcctcatttcttattcgacatttgagaagtcacagtgcagaaaggccttttgaatgtgaggaatgtgggaaagcctttagatactcctcgcaccttagtcaacataaaagaatacatacaggggagaggccatataaatgtcaaaagtgtgggcaagccttcagtatctcatcaggccttacagtacacatgagaactcacactggtgaacggccctttgaatgtcaggaatgtgggaaagcctttactcggtccacatatcttattcgacatctaagaagtcatagtgtggagaaaccatataaggaatgtgggcaaacctttagtaattcctcatgccttactgaatgtgtgtgaattggggctgatacttggaaagaatgtggtaaagccactacttcctcacacttactgaacatgtactcattcatagtggcaatgtacacagtcataaggaatgtgggaagccttccttggtgtctcagatcttaacaattccaatagaagagaagacatatgaatgtaaggaatgtgggaaaatcttggctccttccataggccttactattcatgtgtctgtgcatcctaggaaacaaactgaacgtaggaaacctgtcgatgcttacatcttactgagtctgtttgaactcatgctggagagaaatgctatgaatgtgaggaaggtggaaaagctttcattattttcctcgggccttactgagcttgtgagcacattggatataaatgcacgtcctctggctgtaaggaatgtgttgaaacctttcactctgccttataccttaatattcagctgtgatctcacaagtgtgaaaaatcttatgaatgtaaaatgtgtggagattcttctttgtttttagcttccactttgggaacatgtcaaagcacacattgagaagtcccatgagtgaaagagatgttggaaagcccttgaacttggtcgttaggaaacatccacactgaagaggaacctgactgtatggaaggtcaaaaaggctgtattaatttacatgcaaaaagtcacactagaggaatgccatatcagaatgcttttggtaaatatacatgttttaaagaggttatatatcattaataaaaatatctagctggtctg

SEQ ID NO: 79286 - DNA, 3040 bp, Artificial Sequence
  derived and/or modified sequence
gttcggtggtgtcccggtgcagccacgcgagagtagaagggtggaaaggggaggtgcccagtgaaatggagcctgtcccgtgcactttcgggcatttcgagcatcttgtgggctctcccaagtcgcggcccctcctctgagagccacagtcaggtctgtcctcaggggtcgaggcggctgcgctggggcctcggcccgggaggaggcggggggcacggcctttccattttccctgctcccctctgcagaagcctcatagggcccggcgcggcggctcacgcctgtcattcccagcgctttgggcggattgggtaggaggattacttgaggccaggagttcaagaccaggcagggcaacatagggagacccccccccccaaccatctctaatggaaaaaaaaaaaaaagtctccacatccagcgttgtgccttttctctataaggaacagcatctctgccttcctgttcacggtgaccttcgcttggtgtcctcctggcctcagcaacctgacaattctgtcgtgtcccgagagatggctaatgaatggcgcttgatgacagatgagtaatgcctgttgctgaaagattgacgatcatctttctcaagatgttttctgtcttcatgagtcaaaatttgaagaggaaaggatggtggctgggtggttgacaaattactctcaggactcagtgacctttgaggatgtggctgtggacttcacccaggaggagtggactttgctggatcaaactcagagaaacttatacagagatgtgatgctggagaactataagaatctagttgcagtagattgggagagtcatattaataccaaatggtcagcacctcagcagaattttttgcaggggaaaacatccagtgtggtggaaatggagagaaaccattttggagaggaactgtttgactttaaccaatgtgaaaaagccttgagtgaacactcatgccttaagactcacaggagaacttactttagaaagaaaacctgtgagtgtaatcaatgtgaaaaagccttcagaaaaccctctatctttactttacacaagaaaactgatatcggagaggaacttcctaactgtaatcaatgtgaaacagccttcagccaacatctacatcttgtttgcaagaaaactagccaaaatctacatcttgtttgcaagaaaactcacactcaagagaaaccatataaatgcagtgactgtgaaaaaggcttaccttcctcctcacacctcagagaatgtgtaagaatttatggtggagagagaccatatactcataaggagtatgtcgaaaccttttctcattctacagccctttttgtacacatgcaaactcaagatggagaaaaattctatgaatgtaaagcatgtgggaaacccttcactgagtcgtcatatcttactcaacatttaagaactcatagtagagtgttacctatagaacataagaaatttggcaaagcctttgctttttccccagatcttgctaaacatataagacttagaactagaggaaaacactatgtttgtaatgaatgtggcaaagaatttacttgtttctcaaaactcaacattcacataagggttcacactggagaaaaaccgtatgagtgcaacaaatgtgggaaagccttcactgattcatcaggtcttataaaacacaggcgaactcacactggagaaaagccttatgaatgtaaggaatgtgggaaagcttttgctaactcttcacatcttactgtacatatgagaactcacactggtgagaagccttatcaatgtaaggaatgtggaaaagcctttattaattcctcttcctttaaaagtcacatgcagactcatcctggtgtaaaaccctatgactgtcaacagtgtgggaaagccttcattcgatcctcatttcttattcgacatttgagaagtcacagtgcagaaaggccttttgaatgtgaggaatgtgggaaagcctttagatactcctcgcaccttagtcaacataaaagaatacatacaggggagaggccatataaatgtcaaaagtgtgggcaagccttcagtatctcatcaggccttacagtacacatgagaactcacactggtgaacggccctttgaatgtcaggaatgtgggaaagcctttactcggtccacatatcttattcgacatctaagaagtcatagtgtggagaaaccatataaggaatgtgggcaaacctttagtaattcctcatgccttactgaatgtgtgtgaattggggctgatacttggaaagaatgtggtaaagccactacttcctcacacttactgaacatgtactcattcatagtggcaatgtacacagtcataaggaatgtgggaagccttccttggtgtctcagatcttaacaattccaatagaagagaagacatatgaatgtaaggaatgtgggaaaatcttggctccttccataggccttactattcatgtgtctgtgcatcctaggaaacaaactgaacgtaggaaacctgtcgatgcttacatcttactgagtctgtttgaactcatgctggagagaaatgctatgaatgtgaggaaggtggaaaagctttcattattttcctcgggccttactgagcttgtgagcacattggatataaatgcacgtcctctggctgtaaggaatgtgttgaaacctttcactctgccttataccttaatattcagctgtgatctcacaagtgtgaaaaatcttatgaatgtaaaatgtgtggagattcttctttgtttttagcttccactttgggaacatgtcaaagcacacattgagaagtcccatgagtgaaagagatgttggaaagcccttgaacttggtcgttaggaaacatccacactgaagaggaacctgactgtatggaaggtcaaaaaggctgtattaatttacatgcaaaaagtcacactagaggaatgccatatcagaatgcttttggtaaatatacatgttttaaagaggttatatatcattaataaaaatatctagctggtctg

SEQ ID NO: 79287 - DNA, 2991 bp, Artificial Sequence
  derived and/or modified sequence
catttacaggaggtgagcatgaagtggccaatgggaaaattctaggaggtattgggactcatgaaggttctgtttcggagcccttgagctgccgcttggccagttcccacactgtggagtatgctttcgttttcaacaaatcccagctcttgttcttttgttgcttcattctttctttgctttgctgggcgttttgtctaattctttgttcaaaacgccagtaacctggacagcttgcagtcaagaccccctaccggtgacacttgcgctcttcggggaggtaaacagcatttcctctcagctctgggttggaaaaagccgcagcagctgatgggcccgggaacccgaggccccgccccctaggtggtcctagcctttgcgcgtgcgcggcgtgtctgcgtgggcgcatgcgcataacggccgccatcttaacagcgcgttcccgttggcgtctgaggaacagcatctctgccttcctgttcacggtgaccttcgcttggtgtcctcctggcctcagcaacctgacaattctgtcgtgtcccgatcatctttctcaagatgttttctgtcttcatgagtcaaaatttgaagaggaaaggatggtggctgggtggttgacaaattactctcaggactcagtgacctttgaggatgtggctgtggacttcacccaggaggagtggactttgctggatcaaactcagagaaacttatacagagatgtgatgctggagaactataagaatctagttgcagtagattgggagagtcatattaataccaaatggtcagcacctcagcagaattttttgcaggggaaaacatccagtgtggtggaaatggagagaaaccattttggagaggaactgtttgactttaaccaatgtgaaaaagccttgagtgaacactcatgccttaagactcacaggagaacttactttagaaagaaaacctgtgagtgtaatcaatgtgaaaaagccttcagaaaaccctctatctttactttacacaagaaaactgatatcggagaggaacttcctaactgtaatcaatgtgaaacagccttcagccaacatctacatcttgtttgcaagaaaactagccaaaatctacatcttgtttgcaagaaaactcacactcaagagaaaccatataaatgcagtgactgtgaaaaaggcttaccttcctcctcacacctcagagaatgtgtaagaatttatggtggagagagaccatatactcataaggagtatgtcgaaaccttttctcattctacagccctttttgtacacatgcaaactcaagatggagaaaaattctatgaatgtaaagcatgtgggaaacccttcactgagtcgtcatatcttactcaacatttaagaactcatagtagagtgttacctatagaacataagaaatttggcaaagcctttgctttttccccagatcttgctaaacatataagacttagaactagaggaaaacactatgtttgtaatgaatgtggcaaagaatttacttgtttctcaaaactcaacattcacataagggttcacactggagaaaaaccgtatgagtgcaacaaatgtgggaaagccttcactgattcatcaggtcttataaaacacaggcgaactcacactggagaaaagccttatgaatgtaaggaatgtgggaaagcttttgctaactcttcacatcttactgtacatatgagaactcacactggtgagaagccttatcaatgtaaggaatgtggaaaagcctttattaattcctcttcctttaaaagtcacatgcagactcatcctggtgtaaaaccctatgactgtcaacagtgtgggaaagccttcattcgatcctcatttcttattcgacatttgagaagtcacagtgcagaaaggccttttgaatgtgaggaatgtgggaaagcctttagatactcctcgcaccttagtcaacataaaagaatacatacaggggagaggccatataaatgtcaaaagtgtgggcaagccttcagtatctcatcaggccttacagtacacatgagaactcacactggtgaacggccctttgaatgtcaggaatgtgggaaagcctttactcggtccacatatcttattcgacatctaagaagtcatagtgtggagaaaccatataaggaatgtgggcaaacctttagtaattcctcatgccttactgaatgtgtgtgaattggggctgatacttggaaagaatgtggtaaagccactacttcctcacacttactgaacatgtactcattcatagtggcaatgtacacagtcataaggaatgtgggaagccttccttggtgtctcagatcttaacaattccaatagaagagaagacatatgaatgtaaggaatgtgggaaaatcttggctccttccataggccttactattcatgtgtctgtgcatcctaggaaacaaactgaacgtaggaaacctgtcgatgcttacatcttactgagtctgtttgaactcatgctggagagaaatgctatgaatgtgaggaaggtggaaaagctttcattattttcctcgggccttactgagcttgtgagcacattggatataaatgcacgtcctctggctgtaaggaatgtgttgaaacctttcactctgccttataccttaatattcagctgtgatctcacaagtgtgaaaaatcttatgaatgtaaaatgtgtggagattcttctttgtttttagcttccactttgggaacatgtcaaagcacacattgagaagtcccatgagtgaaagagatgttggaaagcccttgaacttggtcgttaggaaacatccacactgaagaggaacctgactgtatggaaggtcaaaaaggctgtattaatttacatgcaaaaagtcacactagaggaatgccatatcagaatgcttttggtaaatatacatgttttaaagaggttatatatcattaataaaaatatctagctggtctg

SEQ ID NO: 79288 - DNA, 1377 bp, Artificial Sequence
  derived and/or modified sequence
atggagagaaaccacttcggcgaggagctgttcgacttcaaccagtgcgagaaggccctgagcgagcacagctgcctgaagacccacagaagaacctacttcagaaagaagacctgcgagtgcaaccagtgcgagaaggccttcagaaagcccagcatcttcaccctgcacaagaagaccgacatcggcgaggagctgcccaactgcaaccagtgcgagaccgccttcagccagcacctgcacctggtgtgcaagaagaccagccagaacctgcacctggtgtgcaagaagacccacacccaggagaagccctacaagtgcagcgactgcgagaagggcctgcccagcagcagccacctgagagagtgcgtgagaatctacggcggcgagagaccctacacccacaaggagtacgtggagaccttcagccacagcaccgccctgttcgtgcacatgcagacccaggacggcgagaagttctacgagtgcaaggcctgcggcaagcccttcaccgagagcagctacctgacccagcacctgagaacccacagcagagtgctgcccatcgagcacaagaagttcggcaaggccttcgccttcagccccgacctggccaagcacatcagactgagaaccagaggcaagcactacgtgtgcaacgagtgcggcaaggagttcacctgcttcagcaagctgaacatccacatcagagtgcacaccggcgagaagccctacgagtgcaacaagtgcggcaaggccttcaccgacagcagcggcctgatcaagcacagaagaacccacaccggcgagaagccctacgagtgcaaggagtgcggcaaggccttcgccaacagcagccacctgaccgtgcacatgagaacccacaccggcgagaagccctaccagtgcaaggagtgcggcaaggccttcatcaacagcagcagcttcaagagccacatgcagacccaccccggcgtgaagccctacgactgccagcagtgcggcaaggccttcatcagaagcagcttcctgatcagacacctgagaagccacagcgccgagagacccttcgagtgcgaggagtgcggcaaggccttcagatacagcagccacctgagccagcacaagagaatccacaccggcgagagaccctacaagtgccagaagtgcggccaggccttcagcatcagcagcggcctgaccgtgcacatgagaacccacaccggcgagagacccttcgagtgccaggagtgcggcaaggccttcaccagaagcacctacctgatcagacacctgagaagccacagcgtggagaagccctacaaggagtgcggccagaccttcagcaacagcagctgcctgaccgagtgcgtgtag

SEQ ID NO: 79289 - DNA, 1377 bp, Artificial Sequence
  derived and/or modified sequence
atggagagaaatcacttcggagaagagctttttgacttcaaccaatgtgagaaggccctatcagaacactcctgcctgaaaacacaccgcagaacctactttaggaagaagacatgtgaatgcaatcaatgtgaaaaggcttttcgcaaaccaagcatcttcacacttcacaagaagaccgacattggagaggagctaccaaattgtaaccaatgcgagacggctttttcacagcacctccatcttgtatgcaagaagactagccagaacctgcacttggtgtgcaagaaaacacacacacaagagaaaccctataaatgctccgactgcgagaaggggttaccatctagttcccatctgagggaatgcgtaaggatctatggcggcgagagaccatatacccacaaagaatacgtggagacgttcagtcattccacagccctgttcgtgcatatgcaaacccaggacggagagaagttctatgagtgtaaagcctgtggaaagccgtttaccgagagtagctatctgacacagcacctgagaacccacagcagagttttgcccattgagcacaagaagttcgggaaggcctttgctttttcgcccgacctggcaaagcacataaggctgagaacccgcggtaaacattatgtttgcaacgaatgtggcaaggaatttacttgcttctcaaagctgaacatccacatcagagtccacaccggggagaagccttacgaatgcaataaatgtggcaaggcctttacagacagctctggtctcatcaagcacagaaggacccacacaggagagaaaccttatgaatgcaaggaatgcggcaaggctttcgccaacagcagccacctcactgtgcacatgcgcacccacactggcgaaaaaccttatcagtgcaaggagtgcgggaaagcgttcataaatagtagctctttcaagagtcacatgcagactcaccctggcgtgaagccctacgattgccaacagtgtggtaaagcatttatacgtagcagttttctgatcagacatcttagatcccacagtgctgaaagaccattcgaatgcgaagaatgtgggaaggcctttaggtactcctcgcacctttcacagcacaaacgaattcataccggtgaacggccatataaatgtcaaaagtgtggccaggcattctcaatctcctccggacttacagtccatatgcgtacccacacgggggaacgcccctttgaatgtcaggagtgtggaaaagccttcacaaggtccacatatcttattcggcacctccgtagccacagcgtggaaaaaccttataaggaatgtggacagactttctctaactcgtcatgcctgaccgagtgtgtctag

SEQ ID NO: 79290 - DNA, 1377 bp, Artificial Sequence
  derived and/or modified sequence
atggagaggaaccactttggagaggagctgtttgacttcaaccagtgtgagaaggccctgtctgagcacagctgcctgaagacccacaggaggacctacttcaggaagaagacctgtgagtgcaaccagtgtgagaaggccttcaggaagcccagcatcttcaccctgcacaagaagacagacatcggggaggagctgcccaactgcaaccagtgtgaaacagccttcagccagcacctgcacctggtgtgcaagaagaccagccagaacctgcacctggtgtgcaagaagacccacacccaggagaagccctacaagtgcagcgactgtgagaagggcctgcccagcagcagccacctgcgggagtgtgtgcgcatctatggaggagagcggccctacacccacaaggagtatgtggagaccttcagccacagcacagccctgtttgtgcacatgcagacccaggatggagagaagttctatgagtgcaaggcctgtgggaagcccttcacagagagcagctacctgacccagcacctgcggacccacagccgggtgctgcccatcgagcacaagaagtttgggaaggcctttgccttctccccagacctggccaagcacatccggctgcggacccggggcaagcactacgtgtgcaatgaatgtgggaaggagttcacctgcttcagcaagctgaacatccacatccgggtgcacactggagagaagccctatgagtgcaacaagtgtgggaaggccttcacagacagcagcggcctcatcaagcacaggaggacccacactggagagaagccctatgagtgcaaggaatgtgggaaggcctttgccaacagcagccacctgactgtgcacatgaggacccacactggagagaagccctaccagtgcaaggaatgtgggaaggccttcatcaacagcagcagcttcaagagccacatgcagacccaccctggggtgaagccctatgactgccagcagtgtgggaaggccttcatccgcagcagcttcctgatccgccacctgcggagccacagcgctgagcggccctttgaatgtgaagaatgtgggaaggccttccgctacagcagccacctgagccagcacaagaggatccacactggagagcggccctacaagtgccagaagtgtggccaggccttcagcatcagcagcggcctgactgtgcacatgaggacccacactggagagcggccctttgagtgccaggagtgtgggaaggccttcaccaggagcacctacctgatccgccacctgcggagccacagcgtggagaagccctacaaggaatgtggccagaccttcagcaacagcagctgcctgacagaatgtgtgtag

SEQ ID NO: 79291 - DNA, 1377 bp, Artificial Sequence
  derived and/or modified sequence
atggagcggaaccacttcggcgaggagctgttcgacttcaaccagtgcgagaaagccttgtccgagcactcctgtctgaagacccatcgcaggacttattttcgaaaaaagacttgcgagtgcaaccagtgtgagaaggcattcagaaagccctccatcttcacactccataagaagactgatattggggaggagctaccaaactgtaaccagtgtgagacagctttttcccagcatttgcacctcgtgtgcaaaaagacaagccagaacctgcatctagtctgcaaaaagacccacacccaggagaaaccttacaagtgttccgattgcgagaagggcctacctagctccagccacctgagagagtgtgtgcggatctacggcggggagagaccttacacccacaaggagtatgtagagaccttctcccattcaacggctctatttgttcatatgcagacacaggacggagagaaattttacgaatgcaaggcttgtggtaaaccttttactgaatcttcttaccttactcagcacttacggacccacagtagagtcctcccgattgagcataagaagtttggtaaggcatttgccttctccccagacctggcgaagcatatccgcctccgtacccgtggcaagcactacgtgtgtaacgagtgtggaaaagagttcacatgtttctcgaaattgaacatccacatccgcgttcacacaggggaaaagccgtatgagtgcaacaagtgtggtaaagcattcaccgattcctcaggattgatcaagcacaggcgcacgcacaccggcgagaaaccctatgagtgcaaagagtgtggcaaggccttcgcaaattcctcacacttgaccgtccacatgcgcacccatactggcgaaaaaccatatcaatgtaaggagtgtggaaaagccttcattaatagtagcagttttaagtcgcacatgcaaactcatcccggcgtcaaaccctatgactgtcagcagtgtggcaaagcgtttatccgatcaagttttttgatcagacacctccgaagccattctgctgaacggcccttcgagtgcgaggaatgcggcaaggcttttcgctacagcagccatttgtcacagcataaaaggatccacactggggagaggccatacaagtgtcagaagtgcggccaggccttcagtatttcatcgggtcttacagtacacatgaggacccataccggggaacggccctttgagtgccaggaatgcggtaaggcattcacacgctcgacctacctgatccgacatctccggagccattctgtcgagaagccatataaagagtgcgggcagacgttctccaatagctcctgtttgacggagtgcgtttag

SEQ ID NO: 79292 - DNA, 1377 bp, Artificial Sequence
  derived and/or modified sequence
atggaacggaaccacttcggtgaggagttattcgatttcaatcagtgtgaaaaagcactcagcgagcacagctgtttaaaaactcataggcggacctattttagaaagaaaacctgcgagtgtaaccagtgtgagaaggcttttcgcaagccctccatcttcaccctacacaagaaaaccgacataggtgaggaactgcctaactgtaaccagtgtgaaacggccttcagccagcatttgcacctcgtgtgcaaaaaaacgtcgcagaatctacacctggtgtgtaagaagacgcacactcaggaaaagccctacaagtgttccgattgtgagaagggcctgccatcaagctcccaccttcgcgagtgcgttagaatttatggcggtgagcgcccatacacgcacaaggagtacgtggagaccttctcacacagcaccgccctctttgttcacatgcagacgcaggatggagagaagttttatgagtgtaaagcctgtggaaagcccttcaccgagagcagctatctgacacagcacctacgaacacactcaagggtgctgccaatcgaacataaaaaatttggcaaggccttcgcattttcgccagatttggcgaaacacataagactgcgcacaaggggaaaacattacgtgtgcaatgaatgcggcaaagaattcacatgtttctcgaaactgaatatccacattagggtgcacacaggcgaaaagccgtacgagtgtaacaaatgcggcaaggccttcacagattctagtggcctgatcaaacacaggcggacacacaccggcgagaaaccatatgagtgcaaggagtgcggcaaagccttcgccaatagctctcacctgacagttcacatgaggactcacacaggagaaaagccatatcaatgtaaggaatgcgggaaggctttcataaattcctcatccttcaaatcacacatgcagacccaccccggagttaagccttatgattgccagcagtgtggcaaggcatttattcgttcaagctttctaattcgtcatctgcggtcgcattcagcagaaaggccttttgaatgtgaagagtgtggcaaggcctttcgatactcatctcatctcagccaacacaaacgaatccacaccggtgaacgaccatacaaatgccagaagtgtggacaggccttcagcatcagcagtgggctgaccgttcatatgcggactcacacgggcgagcgcccattcgagtgccaggaatgtggtaaggccttcacacgttctacctaccttatcagacatctcaggagtcattcggttgaaaaaccctacaaggagtgcggccagacattttccaacagctcgtgtcttacggaatgcgtctag

SEQ ID NO: 79293 - DNA, 2112 bp, Artificial Sequence
  derived and/or modified sequence
aacagcgcgttcccgttggcgtctgaggaacagcatctctgccttcctgttcacggtgaccttcgcttggtgtcctcctggcctcagcaacctgacaattctgtcgtgtcccgattgggagagtcatattaataccaaatggtcagcacctcagcagaattttttgcaggggaaaacatccagtgtggtggaaatggagagaaaccattttggagaggaactgtttgactttaaccaatgtgaaaaagccttgagtgaacactcatgccttaagactcacaggagaacttactttagaaagaaaacctgtgagtgtaatcaatgtgaaaaagccttcagaaaaccctctatctttactttacacaagaaaactgatatcggagaggaacttcctaactgtaatcaatgtgaaacagccttcagccaacatctacatcttgtttgcaagaaaactagccaaaatctacatcttgtttgcaagaaaactcacactcaagagaaaccatataaatgcagtgactgtgaaaaaggcttaccttcctcctcacacctcagagaatgtgtaagaatttatggtggagagagaccatatactcataaggagtatgtcgaaaccttttctcattctacagccctttttgtacacatgcaaactcaagatggagaaaaattctatgaatgtaaagcatgtgggaaacccttcactgagtcgtcatatcttactcaacatttaagaactcatagtagagtgttacctatagaacataagaaatttggcaaagcctttgctttttccccagatcttgctaaacatataagacttagaactagaggaaaacactatgtttgtaatgaatgtggcaaagaatttacttgtttctcaaaactcaacattcacataagggttcacactggagaaaaaccgtatgagtgcaacaaatgtgggaaagccttcactgattcatcaggtcttataaaacacaggcgaactcacactggagaaaagccttatgaatgtaaggaatgtgggaaagcttttgctaactcttcacatcttactgtacatatgagaactcacactggtgagaagccttatcaatgtaaggaatgtggaaaagcctttattaattcctcttcctttaaaagtcacatgcagactcatcctggtgtaaaaccctatgactgtcaacagtgtgggaaagccttcattcgatcctcatttcttattcgacatttgagaagtcacagtgcagaaaggccttttgaatgtgaggaatgtgggaaagcctttagatactcctcgcaccttagtcaacataaaagaatacatacaggggagaggccatataaatgtcaaaagtgtgggcaagccttcagtatctcatcaggccttacagtacacatgagaactcacactggtgaacggccctttgaatgtcaggaatgtgggaaagcctttactcggtccacatatcttattcgacatctaagaagtcatagtgtggagaaaccatataaggaatgtgggcaaacctttagtaattcctcatgccttactgaatgtgtgtgaattggggctgatacttggaaagaatgtggtaaagccactacttcctcacacttactgaacatgtactcattcatagtggcaatgtacacagtcataaggaatgtgggaagccttccttggtgtctcagatcttaacaattccaatagaagagaagacatatgaatgtaaggaatgtgggaaaatcttggctccttccataggccttactattcatgtgtctgtgcatcctaggaaacaaactgaacgtaggaaacctgtcgatgcttacatcttactgagtctgtttgaactcatgctggagagaaatgctatgaatgtgaggaaggtggaaaagctttcattattttcctcgggccttactgagcttgtgagcacattggatataaatgcacgtcctctggctgtaaggaatgtgttgaaacctttcactctgccttataccttaatattcagctgtgatctcacaagtgtgaaaaatcttatgaatgtaaaatgtgtggagattcttctttgtttttagcttccactttgggaacatgtc

SEQ ID NO: 79294 - protein, 454 aa, Artificial Sequence
  derived and/or modified sequence
MTWRAAASTCAALLILLWALTTEGDLKVEMMAGGTQITPLNDNVTIFCNIFYSQPLNITSMGITWFWKSLTFDKEVKVFEFFGDHQEAFRPGAIVSPWRLKSGDASLRLPGIQLEEAGEYRCEVVVTPLKAQGTVQLEVVASPASRLLLDQVGMKENEDKYMCESSGFYPEAINITWEKQTQKFPHPIEISEDVITGPTIKNMDGTFNVTSCLKLNSSQEDPGTVYQCVVRHASLHTPLRSNFTLTAARHSLSETEKTDNFSIHWWPISFIGVGLVLLIVLIPWKKICNKSSSAYTPLKCILKHWNSFDTQTLKKEHLIFFCTRAWPSYQLQDGEAWPPEGSVNINTIQQLDVFCRQEGKWSEVPYVQAFFALRDNPDLCQCCRIDPALLTVTSGKSIDDNSTKSEKQTPREHSDAVPDAPILPVSPIWEPPPATTSTTPVLSSQPPTLLLPLQ

SEQ ID NO: 79295 - DNA, 1365 bp, Artificial Sequence
  derived and/or modified sequence
atgacctggagagccgccgccagcacctgcgccgccctgctgatcctgctgtgggccctgaccaccgagggcgacctgaaggtggagatgatggccggcggcacccagatcacccccctgaacgacaacgtgaccatcttctgcaacatcttctacagccagcccctgaacatcaccagcatgggcatcacctggttctggaagagcctgaccttcgacaaggaggtgaaggtgttcgagttcttcggcgaccaccaggaggccttcagacccggcgccatcgtgagcccctggagactgaagagcggcgacgccagcctgagactgcccggcatccagctggaggaggccggcgagtacagatgcgaggtggtggtgacccccctgaaggcccagggcaccgtgcagctggaggtggtggccagccccgccagcagactgctgctggaccaggtgggcatgaaggagaacgaggacaagtacatgtgcgagagcagcggcttctaccccgaggccatcaacatcacctgggagaagcagacccagaagttcccccaccccatcgagatcagcgaggacgtgatcaccggccccaccatcaagaacatggacggcaccttcaacgtgaccagctgcctgaagctgaacagcagccaggaggaccccggcaccgtgtaccagtgcgtggtgagacacgccagcctgcacacccccctgagaagcaacttcaccctgaccgccgccagacacagcctgagcgagaccgagaagaccgacaacttcagcatccactggtggcccatcagcttcatcggcgtgggcctggtgctgctgatcgtgctgatcccctggaagaagatctgcaacaagagcagcagcgcctacacccccctgaagtgcatcctgaagcactggaacagcttcgacacccagaccctgaagaaggagcacctgatcttcttctgcaccagagcctggcccagctaccagctgcaggacggcgaggcctggccccccgagggcagcgtgaacatcaacaccatccagcagctggacgtgttctgcagacaggagggcaagtggagcgaggtgccctacgtgcaggccttcttcgccctgagagacaaccccgacctgtgccagtgctgcagaatcgaccccgccctgctgaccgtgaccagcggcaagagcatcgacgacaacagcaccaagagcgagaagcagacccccagagagcacagcgacgccgtgcccgacgcccccatcctgcccgtgagccccatctgggagcccccccccgccaccaccagcaccacccccgtgctgagcagccagccccccaccctgctgctgcccctgcagtag

SEQ ID NO: 79296 - DNA, 1365 bp, Artificial Sequence
  derived and/or modified sequence
atgacatggagggcagccgcctcgacgtgtgcagctctgttgatcctgctttgggcactgaccacagagggagacctgaaggtggaaatgatggcaggcggcacacaaatcaccccccttaacgataacgtgaccattttctgtaatatcttctattcccagcctcttaatatcaccagcatggggattacttggttttggaaaagtttgacctttgataaggaagtgaaggtatttgagttctttggcgaccatcaggaagcctttcgacctggcgcaatagtgtccccgtggaggttgaaatcaggcgatgcctctctaagattaccgggcattcagttggaagaggctggggaataccggtgtgaggtggtggtaactcctctcaaggcacagggaaccgtccagcttgaggtcgtagcatctcctgcctctcggctcctgctggatcaggtgggaatgaaagagaacgaagataagtacatgtgtgaatcatctggattttatccagaagcaatcaatatcacttgggaaaaacaaactcaaaagtttccccaccctatagaaatctccgaggatgtgatcaccggcccaacgattaagaatatggacggtacattcaacgtgacatcatgcctgaaactgaacagctcccaggaagacccaggaacggtgtaccaatgcgtcgtgaggcacgcctccttgcacacccctctccgatcaaattttacgctcacggcagctcggcatagcctgtcagaaacagaaaagaccgacaacttttcaatacactggtggcctattagcttcatcggcgtgggcctggttctcctgatcgtgctgattccctggaaaaaaatctgcaacaagtcaagctctgcttacacaccattaaagtgcattttgaagcactggaacagctttgatacacagacacttaaaaaggaacacctgatatttttctgcacgagggcttggccatcatatcagctgcaagatggagaggcttggccacctgagggtagcgtgaacatcaacaccattcagcagctggatgtcttctgtcgacaggaaggaaaatggtccgaggtgccatatgtacaggccttctttgcactcagagataacccggacttgtgtcagtgctgtaggatagatcccgctctgctgaccgttacaagtgggaaatccatagatgataattccaccaaaagcgagaagcagacgcccagggaacacagcgacgcggtacccgatgcccctatcctgcctgtctctccaatttgggagcctcccccagcaacaacttctacaaccccagtgctgtcttcacagccccctacactcctgctgcccttacagtag

SEQ ID NO: 79297 - DNA, 1365 bp, Artificial Sequence
  derived and/or modified sequence
atgacctggcgagctgcggcttccacttgtgctgctcttttgatcttgctgtgggccttgacaaccgaaggcgatttgaaagtagagatgatggctggtggcactcaaattacgccgctcaacgataatgtgacaattttttgcaacatcttctactcccagcctctcaacattacatcaatgggcatcacatggttctggaagtctctcaccttcgataaagaggttaaggtgtttgaatttttcggcgaccaccaggaggccttccggccaggtgcaatcgtcagtccttggcggctgaaatccggagacgcgagccttcgcctgcctggaattcagctcgaagaggcgggcgagtatcggtgcgaggttgttgtgacccccctcaaggcacagggaaccgtgcagctcgaagtggtggcctcaccggcctcccggttattactcgaccaagtggggatgaaggaaaacgaggataaatacatgtgtgagagcagcggcttctatcccgaagccattaacatcacatgggaaaagcagacacagaagtttccacacccaatagagatctccgaagatgtcatcaccgggcctaccattaagaatatggacgggacctttaatgtgacttcctgtttaaaactcaattcatcccaggaagaccccggcacggtgtaccagtgtgtagtgcggcatgcttcgctgcatacacccttgagaagcaatttcaccctgacagccgcacggcactccctatcagagacagaaaagacggataacttctccattcattggtggccgatttctttcatcggggttggcctggtcctgttgatagtgttgatcccctggaaaaagatctgcaacaagagctcatccgcatacacccccttaaaatgcattttaaagcattggaattccttcgacacccagacactcaaaaaagagcatcttatcttcttttgcactagagcttggccctcctaccaactgcaggatggggaggcctggccacctgagggttcggtgaatattaacacaatccagcagctcgatgtcttctgccgccaagaaggtaaatggtcagaagtgccctatgttcaggcctttttcgccttgcgagataacccagacctgtgtcagtgctgtcgaatcgacccagctctgcttacagtgacctccggaaaatccatcgatgataactcaaccaaatccgagaagcagacccctagagagcactcagacgccgtgccagacgcccccatactacctgtgtcacctatctgggagccgcctcctgccacgacatcaaccacacctgtactgtcctctcaaccaccaacccttctactacccctacaatag

SEQ ID NO: 79298 - DNA, 1365 bp, Artificial Sequence
  derived and/or modified sequence
atgacctggagggctgctgccagcacctgtgccgccctgctgatcctgctgtgggccctgaccacagaaggagacctgaaggtggagatgatggccggcggcacccagatcacccccctgaatgacaacgtgaccatcttctgcaacatcttctacagccagcccctgaacatcacctccatgggcatcacctggttctggaagagcctgacctttgacaaggaggtgaaggtgtttgagttcttcggggaccaccaggaggccttccggcctggggccatcgtgagcccctggaggctgaagtctggagatgccagcctgcggctgcccggcatccagctggaggaggccggggagtaccgctgtgaggtggtggtgacccccctgaaggcccagggcaccgtgcagctggaggtggtggccagccctgccagccggctgctgctggaccaggtgggcatgaaggaaaatgaagacaagtacatgtgtgagagcagcggcttctacccagaggccatcaacatcacctgggagaagcagacccagaagttcccccaccccatcgagatcagtgaagatgtgatcaccggccccaccatcaagaacatggatggcaccttcaacgtgaccagctgcctgaagctgaacagcagccaggaggaccccggcaccgtgtaccagtgtgtggtgagacatgccagcctgcacacccccctgcggagcaacttcaccctgacagctgcccggcacagcctgtctgaaacagagaagacagacaacttcagcatccactggtggcccatctccttcatcggcgtgggcctggtgctgctgattgtgctgatcccctggaagaagatctgcaacaagagcagcagcgcctacacccccctgaagtgcatcctgaagcactggaacagctttgacacccagaccctgaagaaggagcacctgatcttcttctgcacccgggcctggcccagctaccagctgcaggatggagaggcctggcccccagagggctctgtgaacatcaacaccatccagcagctggatgtgttctgccggcaggagggcaagtggagcgaggtgccctacgtgcaggccttctttgccctgcgggacaacccagacctgtgccagtgctgcagaattgatcctgccctgctgactgtgaccagcggcaagagcattgatgacaacagcaccaagtctgagaagcagaccccccgggagcacagtgatgctgtgcctgatgcccccatcctgcctgtgagccccatctgggagcccccaccagccaccaccagcaccacccctgtgctgagcagccagccccccaccctgctgctgcccctgcagtag

SEQ ID NO: 79299 - DNA, 1365 bp, Artificial Sequence
  derived and/or modified sequence
atgacctggcgggccgccgccagcacctgcgccgccctgctgatcctgctgtgggctctgacaaccgagggggatctgaaggtggaaatgatggcgggcggcacccagatcacccctctgaatgataacgtaactattttctgcaacatattttatagccagcccctgaacatcacctcaatgggcatcacatggttctggaaatctcttacgttcgataaagaagtgaaggtttttgaattctttggtgaccaccaagaagcattcaggccaggcgctattgtgagtccatggcgcctgaagagtggagatgccagtttgcgcctccctggcattcagctcgaggaagctggcgaatatcggtgcgaggtcgttgtgaccccactgaaggcacagggaactgttcagctagaggtcgtcgcctctccggcatccaggctgctcctcgatcaagttggcatgaaggagaacgaggacaagtacatgtgcgaatcttctgggttttatcctgaggccataaatataacctgggagaagcaaacacagaaatttccgcacccgattgaaatcagcgaggacgtaatcacagggcctacaatcaaaaacatggatggtacatttaacgtgacaagttgtctcaaactaaatagctctcaggaagatcccggcacagtgtaccagtgcgtcgttcggcacgccagcctgcacactcccctgcgctctaattttactctgaccgctgctagacactcactttctgaaaccgagaagaccgacaactttagtatccactggtggccgatttcgtttatcggagttggtcttgtgctgctcattgttctcataccatggaagaaaatatgcaataagagttcatctgcttacactccactcaagtgcatccttaagcattggaacagcttcgatacccaaacactgaagaaagaacatctaatctttttctgtaccagagcttggcccagttaccagctccaggacggcgaggcctggcctcccgagggcagtgtaaacattaacacaatccagcagttagatgtcttttgtcgacaggagggtaagtggagcgaggtgccctatgtgcaggcctttttcgccctgagagataacccggatctttgccagtgctgcaggatcgatccagcactcttgaccgtgacttcaggaaagtccattgacgacaatagcactaagtccgagaagcagaccccacgagagcatagtgatgccgtgcctgatgctccaatcctgccagtctccccgatatgggaacccccccccgcaaccacctctaccactcctgtgctgagctcccagcctccaactctgctgctgccactgcaatag

SEQ ID NO: 79300 - DNA, 1365 bp, Artificial Sequence
  derived and/or modified sequence
atgacctggcgggccgccgccagcacctgcgccgccctgctgatccttctgtgggctctgaccaccgaaggtgacttaaaggtagaaatgatggccggaggtacgcagataacccccctgaatgacaacgtgaccatattctgcaacattttctatagccagccactaaatatcacctcaatggggatcacctggttctggaaatctctgacatttgataaggaggtgaaggtgtttgagttttttggcgaccatcaagaggccttcagacctggcgccatcgtctctccttggagactcaagagcggagatgccagcttgcgacttccaggtatccagttagaggaggctggcgaatacaggtgcgaagtggtggtgacaccacttaaggcacaagggacggtgcagcttgaagtggtcgcctctccagctagtcggctactgctggatcaagtgggtatgaaggagaacgaggataaatacatgtgtgaatcaagcggattctatccagaggcaattaacataacatgggaaaagcagacccagaaatttccccatcccatagaaatcagtgaagacgttatcactgggcccactattaagaatatggacggaacgttcaacgttaccagctgtttaaagctgaactcaagccaggaggaccccggtactgtctatcaatgcgtagtgagacacgcatctctacacacccctttgcgttccaactttactctgactgcagcacgccatagcctctcggaaactgaaaaaaccgacaatttcagcatccactggtggcctatcagtttcatcggcgtcggactggtgctgctcatcgtgcttattccttggaaaaagatttgtaataaatccagctccgcatacacaccactgaagtgcatacttaagcactggaattctttcgatacacagacgctcaagaaagaacacctaatattcttctgcactcgagcctggcccagctatcaacttcaggacggagaagcctggccgccagaggggtcagtgaatatcaacacaatccagcagctggacgttttctgtcgtcaggaggggaagtggagcgaagtgccatatgttcaagcattctttgcactgagagacaacccagatctttgtcagtgttgccgaatagaccctgcgctcctcaccgtcacaagcggcaaatcaatcgatgataacagcacgaaaagcgaaaaacagacccctcgcgaacattccgatgctgtaccggacgctcccattcttccagtttcacccatttgggaaccaccaccagccaccacctcaaccacaccagttttatcttctcagccacccaccctgttattgccacttcagtag

SEQ ID NO: 79301 - DNA, 1365 bp, Artificial Sequence
  derived and/or modified sequence
atgacctggagagccgctgcgtcgacctgcgctgcccttctgatcctgctatgggcgctgaccactgaaggggacctcaaggttgagatgatggcgggaggcacacagatcacccccctgaacgataacgtaactatcttctgcaatatcttctattcccagcctctaaatatcacttctatgggaatcacttggttctggaagtcactgacatttgacaaggaagtaaaagtgtttgagtttttcggcgaccaccaagaggcattccgtcctggcgctatcgtgagcccttggcggctgaaatctggtgacgcctctctccgcctgccaggtattcaactcgaggaggccggagaatataggtgcgaagtcgtcgtgacacctcttaaagctcagggcacggtgcagctggaggtcgtcgcctcacctgccagcaggcttctcttagaccaagtgggaatgaaagagaacgaagacaagtacatgtgcgaatcatccggcttctacccagaggctatcaatatcacctgggaaaaacagacccaaaagttcccccaccccattgaaatatctgaagacgtgataactggccctactatcaagaatatggatgggacattcaatgttacctcttgtcttaagctgaattcttctcaggaggatccagggacagtatatcagtgcgtggtgaggcatgcctcactgcatacacctctcagatccaattttaccttaactgctgctcgacatagcctgtccgaaaccgagaaaactgataatttctctatccactggtggccaatatcattcattggagtcggactcgtcttattgattgtcctgattccatggaagaagatatgtaataagagctccagcgcgtacacacccctgaaatgtatactaaaacactggaacagcttcgatacacagactctaaaaaaagaacacctcattttcttctgcactcgggcttggccatcttatcagctccaagacggagaggcatggccaccggaggggagtgtaaacatcaataccatccagcagttagatgtattttgtaggcaggagggcaaatggtctgaagtaccttacgtccaagcgtttttcgcgctcagagataaccctgacctctgtcaatgctgtcggatcgaccctgcattgctgaccgtcactagtggcaaatcaatcgatgataactctacaaagagcgagaaacaaactccacgggaacactcggacgccgtgccagacgccccaatactacccgtttcccctatttgggaaccgccacctgctacaacaagcactacccccgtgctctcctcccagcccccaacactcctgctccctctgcaatag

SEQ ID NO: 79302 - DNA, 1365 bp, Artificial Sequence
  derived and/or modified sequence
atgacttggcgcgcagcagccagcacctgtgcagccttgctgatacttctgtgggctctaaccacggaaggagacctcaaggtggaaatgatggctgggggaacccaaatcacacccctgaatgacaacgtaacgatcttctgtaatattttttatagccagccgctgaatatcactagcatgggaatcacatggttctggaagtcactgacctttgacaaggaagttaaggtgtttgaattttttggagatcaccaggaggcttttaggccaggtgcaatcgtgtccccctggcgcctgaagtccggggatgcgagtttacggcttcctgggatacaactggaggaagccggtgagtaccgctgtgaggtggtagtgactcctctgaaggcccagggaactgtgcaactggaagtggtagccagccccgcttctaggttattgttggaccaggtcggcatgaaggagaatgaggacaagtatatgtgtgagagctctggtttttacccggaggctattaacattacatgggaaaagcagacgcagaagtttccacatccgatcgagatttcggaagacgtcataaccggaccaacgatcaaaaatatggacggaacatttaatgttacgtcatgtctgaagttaaattcctcacaagaggaccctggcaccgtgtatcagtgcgtagtccggcacgcatcattacacactcctcttcgatcaaactttacattaacagccgctcggcacagtttgtcagagacagagaagaccgataacttttccattcattggtggcctatatctttcatcggcgtgggcttggtgctgctaatcgtattgattccctggaaaaaaatttgtaataaatcgtcttccgcctacaccccactgaaatgcattttaaagcactggaacagtttcgacactcagacacttaaaaaagaacacctgatcttcttttgcaccagggcgtggcccagttaccagttgcaagacggagaagcctggcctcccgaggggagcgtaaacatcaacacaattcaacagctggacgtgttttgtcggcaggaaggcaaatggagtgaagtgccctacgttcaagccttctttgcgttacgcgataatcctgatctatgccaatgttgtcggatcgacccggctctcctgacagtgacaagcggcaaatccattgacgacaattctaccaagtcagagaagcaaacccctcgtgagcactccgatgcggtgcctgatgccccaattcttcccgtgagtcctatatgggaaccgcctcccgcaaccaccagtaccactccggtcctgtccagtcagcctcctacgttgctcctgccgcttcaatag

SEQ ID NO: 79303 - DNA, 6438 bp, Artificial Sequence
  derived and/or modified sequence
aaagtgcggcgcgggtggggctggtcacgcgcctggcttcctgcagtgcgaacctgggaaatccaggcgacttcgcagttgccgaagggatctgaagaagtgggatgtgcaaaagcgccggctggaaatcccggctgtgtctccgtcaactctttacgcaacagaggtctccccctgcccttggtttctaccgggccgcctgctcccactcggcgaaaaaaattacacaacagcagccgcggcgatgacgtggagggctgccgcctccacgtgcgcggcgctcctgattctgctgtgggcgctgacgaccgaaggtgatctgaaagtagagatgatggcaggggggactcagatcacacccctgaatgacaatgtcaccatattctgcaatatcttttattcccaacccctcaacatcacgtctatgggtatcacctggttttggaagagtctgacgtttgacaaagaagtcaaagtctttgaattttttggagatcaccaagaggcattccgacctggagccattgtgtctccatggaggctgaagagtggggacgcctcactgcggctgcctggaatccagctggaggaagcaggagagtaccgatgtgaggtggtggtcacccctctgaaggcacagggaacagtccagcttgaagttgtggcttccccagccagcagattgttgctggatcaagtgggcatgaaagagaatgaagacaaatatatgtgtgagtcaagtgggttctacccagaggctattaatataacatgggagaagcagacccagaagtttccccatcccatagagatttctgaggatgtcatcactggtcccaccatcaagaatatggatggcacatttaatgtcactagctgcttgaagctgaactcctctcaggaagaccctgggactgtctaccagtgtgtggtacggcatgcgtccttgcatacccccttgaggagcaactttaccctgactgctgctcggcacagtctttctgaaactgagaagacagataatttttccattcattggtggcctatttcattcattggtgttggactggttttattaattgttttgattccttggaaaaagatatgtaacaaatcatcttcagcctatactcctctcaagtgcattctgaaacactggaactcctttgacactcagactctgaagaaagagcacctcatattcttttgcactcgggcatggccgtcttaccagctgcaggatggggaggcttggcctcctgagggaagtgttaatattaatactattcaacaactagatgttttctgcagacaggagggcaaatggtccgaggttccttatgtgcaagccttctttgccttgcgagacaacccagatctttgtcagtgttgtagaattgaccctgctctcctaacagttacatcaggcaagtccatagatgataattccacaaagtctgagaaacaaacccctagggaacactcggatgcagttccggatgccccaatccttcctgtctcccctatctgggaacctcctccagccacaacatcaacaactccagttctatcctcccaacccccaactttactgttacccctacagtaaatgcctgatggacctggtgccactagggtccaagttcccttttcattacaggaccttgggcaaataagaggggacctgggcaagttctctgatgacctgatagatatatagaggctttccaaaacctaactcaggtgtttgaccttacttggggtgatgttatgttgctcttaaactcttaactactacagagaaacaggtagccctgcaggcagcagaaaaattcagagatgaacaacatgtcttctatagccactcaataaggaaagaaggtgagaaacaaccagcattcacatacccaataggaagcgaggcagtgccccttgaacaacataattcggaccccagtggtaccttagatgagtggcaaagaaaacattttcaaatgtgcttattagagggcctacagaggaccagagccaagcctcttaattaccccaaactctccatgatagatcaaaaactagatgaaaatccctcagcctttttggaaaggctgagagaggctgtagtgaaacacacttccttgtctcctgttaggtatgtttatacctcacataaataattcaattgagggacagctaattttgaaagacaagtttattactcagacagcccctgatatcagaaggaagctagagaaacaggccatgggattagatagcaccttacaaaacctcctgaaggtagccacctcggtcttttataatagggaccaggaggaggcccaggggaaggagaggaaacacaagaaaaaggcagagactctggtggccactttgtataaaacccagtatccccaaggtacacctgctagttgctaccaatgtggcaaactagggcacttcaaaagggactgcccaggcagcaagaagaagccacctcaaccctgtccagtatacaatggggaccactggaaggcagactgtcctgggaagcataggtcactgagtccagagccagtctcacaaatggtccagcaggactgatgggtcctggggctcaactccctggctccagtggctcagactgctgttactacccgggagcaccaggtgattctggagttcgaagggaggaaggtagacttctttctggacactggagccaggcttctgttttcctctccaattcaggccttcgttcctcccatagcacaaccatgatgggcatctcaggaaagactttaacttgatatttttctcaacctattagttgcagtcagagggacctactgtttacacaggcctttttagtcatgcctgaaagtcccactcctttattagatagagatattccagcacgtatgggggccaccatccttatggctccaggacaaactccgcctccccttagtggaaaccagtattaacccagaggtttgggcaactcagggaagaagtggccggactataaccactataccagtctggatccacctcaaggatcccactttttttcctaaccagagacaataccctctgaagccagaaagtagaaaagggctagacgccagcattgataacctaaaggcacaaggcctccttaggccttgcagtagcccttgaaacaccccaatattaggggtgcaaaaatccaatggggaagggagactagttcaggacctctgccttattcatgaggctgtgattacgattcatccagtagatcccagtccctatactttgctaactcaaatatccaagggaactaaatggttcacagttctgggcctaaaggatgcctttttctgtatacctttataccctgactcccaatacttgtttacctttgaagacccctccaatcaaaccacccagttaacctggactgtactgcctcagggatttagagatagcccccacctatttgggcaagtattgtcaagagatctcttcgaattcttccattctcaggttaaagttttacaatatgtagatgacattctcctctgtgccccaactgaggaagtttcttgagacggcactgaggctctccttaatttcctagctggaaagggatataaggcttcaaaatctaaggctcagctctatcagactttggtaaattacctaggtctggtcttgtcagaagggaacaagagcactaggcgaggagaggattaatcccatttcctcccttcctctccccagaaccctcaagcagctgagggatgcttgggcattacaggtttttgtaggttatagatacccaggtatgataaaataggttgccctttatatcaccttataaaagaaattcaagtggctaaaactcacttcctgacctgggaacctgaaggtcaaaaggccattaatcagttaaaacaagccttgcttaaagcaccagcccccagtctttctgtagggaagtcctttaatctttatgtatcataaaggaaaggaatgaccctgggagttttaattcaagttcaaggcccagctcaacagccagtaggttacttaagtagagagcttgacttggaggctaaaggatggccagcttgcctctgagcagttacagtagtggccctgctagtcccagaggccaccaagttaaccctggggaataacctgtttatgcctcacataaataatgtggcaggcttgctgtcctctaaagcgagtctctggctaacagacagctgcctcctcaagtatcagactttgctgctagaggaatctgcagtccagttaaaaacctgaccttgcctgatcccagacactttcctcccagaggaaactggagaaactgaacataattgtgaacagactgtagtacaacctatgccgctagggaggatctcaaagaaattcccctagaaaatccagactggacccactttatggatgggagctcttttgtaggacagggagtctgaaaagtgggatatgcagtagtcaccctaaataacattgaaaatgtgcctctctcaccaggcacacacactcaatcagttgagctgatccctctcacaagagcacttgaactaagcaaaggaaagacagctaacatttatactgactccaagtgtacctttctagttctccttgcccatgctgccatctgaaaggaaaggcacttcctcaccgctaatgggtcttgcattaaataccatcaagacatcaacaggctattatcctcagtgttcctcccatgagaattagtggtcagacattgcagagggcatcagaagcgggtagatgaaatagcgaaaggaaacaggctagcagaccaaagagctaagtcagcagtaagaaggccccaaggtcccaaaacacttgaggcccctctgatttgggagggctacataagggaaataaagcctcagtattcccctacagagatagaatgggccacctctcgaggtatacttttcaaccctcaggatggttacaatcagaagattgcaaagtacgcttgccagcctccagccaatggaagattcttaaaatcctccactgagcctttcacttaggaaagcataagacatcagtgcatccaaagattgttctcaggagaaaatctactaaaaatggtcaaataggttgttaatactcgtgaaaccctcttaaaaataatccctttaacagatgacttcttccccaccacaatcaaaggatgggaagttactcaggggaggactggcagatagacttcacccatatgcccaaaataaatggcattcaatgtcttttggtgtgggtgcataccttcattaactgggtagaggcattcccatgcccaacagaaaaggcctctgaggtggtgagaatactaattagttaaataattcctcactttgggctccctaagtacttccaaaacaacaatggtccctcatttaaagaagcctctacccagtagggccgagtctgctaggactttttattgggtttggtaatacgtcacaccctttagcctctactgtgtcagccatgtcccatttatacaagacaaattgctgggtctgtcctgagcggtttgctcagttcagtaacactaaggaacctcttgatgacttggtatttactgtcttagcattccctttgttagctttacctttagccattaaagacttgtcaggcataaatggaacatggtatgggaacactttcaactgagtaactaactcctcccaggaaagcatttcctccctggtgccagaaaacactttccccaaagataagcctcacaccctcaggctaggaaaagttggccgggtaatagcaaatgcctcctcctgttttaaaagcagaggaaaaggaccatacctgggagatctcaaatattataacaccatacttgtaattgctgaaagctcggaagtttggagaaaaagacataagaaggatgatctaagaaaattggaagccatatggaggggaggctttcagaattcagcgtctcctcctggttgaaagtcctgctgggaatggcaggctctgggtaaccaccctgacacatggcactataatgtaaaaaacaacacataggccttcccagacatgcaccctcatgggattccagaccccctgtatgatgcttagtagtagtggcctacaaatctgtgggtgaacagaacaggagacttctggactgacagcccctgtcacaagggggcattatctgagatattggccagggcatatcgtgtccctggtcttttgaaactccatttgtcggccaggtgtggtggcttacgactgtaatcccagcactttgggaggctgaggcaggtagatgatgaggtcaggagttcaagactagcctggacaatatggtgaaaccccgtctgtactaataatacaaaaaaaaaaaaaaaaaaa

SEQ ID NO: 79304 - DNA, 2429 bp, Artificial Sequence
  derived and/or modified sequence
cctgcccttggtttctaccgggccgcctgctcccactcggcgaaaaaaattacacaacagcagccgcggcgatgacgtggagggctgccgcctccacgtgcgcggcgctcctgattctgctgtgggcgctgacgaccgaaggtgatctgaaagtagagatgatggcaggggggactcagatcacacccctgaatgacaatgtcaccatattctgcaatatcttttattcccaacccctcaacatcacgtctatgggtatcacctggttttggaagagtctgacgtttgacaaagaagtcaaagtctttgaattttttggagatcaccaagaggcattccgacctggagccattgtgtctccatggaggctgaagagtggggacgcctcactgcggctgcctggaatccagctggaggaagcaggagagtaccgatgtgaggtggtggtcacccctctgaaggcacagggaacagtccagcttgaagttgtggcttccccagccagcagattgttgctggatcaagtgggcatgaaagagaatgaagacaaatatatgtgtgagtcaagtgggttctacccagaggctattaatataacatgggagaagcagacccagaagtttccccatcccatagagatttctgaggatgtcatcactggtcccaccatcaagaatatggatggcacatttaatgtcactagctgcttgaagctgaactcctctcaggaagaccctgggactgtctaccagtgtgtggtacggcatgcgtccttgcatacccccttgaggagcaactttaccctgactgctgctcggcacagtctttctgaaactgagaagacagataatttttccattcattggtggcctatttcattcattggtgttggactggttttattaattgttttgattccttggaaaaagatatgtaacaaatcatcttcagcctatactcctctcaagtgcattctgaaacactggaactcctttgacactcagactctgaagaaagagcacctcatattcttttgcactcgggcatggccgtcttaccagctgcaggatggggaggcttggcctcctgagggaagtgttaatattaatactattcaacaactagatgttttctgcagacaggagggcaaatggtccgaggttccttatgtgcaagccttctttgccttgcgagacaacccagatctttgtcagtgttgtagaattgaccctgctctcctaacagttacatcaggcaagtccatagatgataattccacaaagtctgagaaacaaacccctagggaacactcggatgcagttccggatgccccaatccttcctgtctcccctatctgggaacctcctccagccacaacatcaacaactccagttctatcctcccaacccccaactttactgttacccctacagtaaatgcctgatggacctggtgccactagggtccaagttcccttttcattacaggaccttgggcaaataagaggggacctgggcaagttctctgatgacctgatagatatatagaggctttccaaaacctaactcaggtgtttgaccttacttggggtgatgttatgttgctcttaaactcttaactactacagagaaacaggtagccctgcaggcagcagaaaaattcagagatgaacaacatgtcttctatagccactcaataaggaaagaaggtgagaaacaaccagcattcacatacccaataggaagcgaggcagtgccccttgaacaacataattcggaccccagtggtaccttagatgagtggcaaagaaaacattttcaaatgtgcttattagagggcctacagaggaccagagccaagcctcttaattaccccaaactctccatgatagatcaaaaactagatgaaaatccctcagcctttttggaaaggctgagagaggctgtagtgaaacacacttccttgtctcctgttaggtatgtttatacctcacataaataattcaattgagggacagctaattttgaaagacaagtttattactcagacagcccctgatatcagaaggaagctagagaaacaggccatgggattagatagcaccttacaaaacctcctgaaggtagccacctcggtcttttataatagggaccaggaggaggcccaggggaaggagaggaaacacaagaaaaaggcagagactctggtggccactttgtataaaacccagtatccccaaggtacacctgctagttgctaccaatgtggcaaactagggcacttcaaaagggactgcccaggcagcaagaagaagccacctcaaccctgtccagtatacaatggggaccactggaaggcagactgtcctgggaagcataggtcactgagtccagagccagcttctgttttcctctccaattcaggccttc

SEQ ID NO: 79305 - protein, 327 aa, Artificial Sequence
  derived and/or modified sequence
MTSVRENILFGMGNPLLDISAVVDKDFLDKFDELVKKFKVEYHAGGSTQNSIKVAQWMIQQPHKAATFFGCIGIDKFGEILKRKAAEAHVDAHYYEQNEQPTGTCAACITGDNRSLIANLAAANCYKKEKHLDLEKNWMLVEKARVCYIAGFFLTVSPESVLKVAHHASENNRIFTLNLSAPFISQFYKESLMKVMPYVDILFGNETEAATFAREQGFETKDIKEIAKKTQALPKMNSKRQRIVIFTQGRDDTIMATESEVTAFAVLDQDQKEIIDTNGAGDAFVGGFLSQLVSDKPLTECIRAGHYAASIIIRRTGCTFPEKPDFH

SEQ ID NO: 79306 - DNA, 984 bp, Artificial Sequence
  derived and/or modified sequence
atgacttcggtacgtgagaacatcctgtttggtatgggcaatccgctgcttgacattagcgctgttgtcgataaagacttcctggacaaattcgatgagcttgtcaaaaaatttaaggtcgagtaccacgctggcggatccacccaaaacagtattaaagtggcgcaatggatgattcagcaacctcataaggcggcaaccttctttggatgcataggcatcgataaatttggagaaatcctgaagcgcaaggcagctgaagcacatgtcgacgctcactactatgagcaaaacgaacaaccaacaggaacctgcgccgcctgcattaccggtgataacagaagtctcatcgccaacctggccgccgcgaattgttataagaaagagaagcacctggatctggagaagaattggatgctggttgagaaagctcgggtgtgctatatcgccggcttcttcttaaccgtctccccagagagtgtactgaaggtggcccatcatgccagtgagaacaacaggatcttcactcttaacctgagcgctcccttcatctcccagttttacaaggaatcactgatgaaagtaatgccttacgtggatatccttttcgggaatgaaacagaagccgcgacatttgcacgggagcaggggttcgagacaaaggacatcaaagaaatcgcaaagaaaacccaggcgctacccaaaatgaactctaagcggcaacgcattgtgatcttcacccagggtagagatgacactatcatggcgactgaatcagaagtaacggcttttgcggtgctcgaccaagatcagaaggagatcattgatacaaatggggctggggatgctttcgttggcggatttctctcacagctggtcagcgacaagccactgacagagtgtattcgtgcaggccactatgcagcttcaattatcatcagacgtaccggatgcaccttccctgagaagcctgacttccactag

SEQ ID NO: 79307 - DNA, 1187 bp, Artificial Sequence
  derived and/or modified sequence
agtcgctgagtgcctgagccgggaagcagttgctgtggtacctgctgctgcccgagcggacgtagagcatcggacgcgggcgccgtggcgctgggcaggagggcgaagccatgacgtcagtcagagaaaatattctctttggaatgggaaatcctctgcttgacatctctgctgtagtggacaaagatttccttgataagtttgatgaacttgtgaaaaaattcaaagtcgaatatcatgctggtggctctacccagaattcaattaaagtggctcagtggatgattcaacagccacacaaagcagcaacattttttggatgcattgggatagataaatttggggagatcctgaagagaaaagctgctgaagcccatgtggatgctcattactacgagcagaatgagcagccaacaggaacttgtgctgcatgcatcactggtgacaacaggtccctcatagctaatcttgctgctgccaattgttataaaaaggaaaaacatcttgatctggagaaaaactggatgttggtagaaaaagcaagagtttgttatatagcaggcttttttcttacagtttccccagagtcagtattaaaggtggctcaccatgcttctgaaaacaacaggattttcactttgaatctatctgcaccgtttattagccagttctacaaggaatcattgatgaaagttatgccttatgttgatatactttttggaaatgagacagaagctgccacttttgctagagagcaaggctttgagactaaagacattaaagagatagccaaaaagacacaagccctgccaaagatgaactcaaagaggcagcgaatcgtgatcttcacccaagggagagatgacactataatggctacagaaagtgaagtcactgcttttgctgtcttggatcaagaccagaaagaaattattgataccaatggagctggagatgcatttgttggaggttttctgtctcaactggtctctgacaagcctctgactgaatgtatccgtgctggccactatgcagcaagcatcataattagacggactggctgcacctttcctgagaagccagacttccactgatggaagagctgaaaacacaagcccaggagtgcagacactgccctaattgcttcctgagaattcccatattaataaagaagaaaattatctgcc

SEQ ID NO: 79308 - DNA, 984 bp, Artificial Sequence
  derived and/or modified sequence
atgacctctgtgcgggagaacatcctgtttggcatgggcaaccccctgctggacatctctgctgtggtggacaaggacttcctggacaagtttgatgagctggtgaagaagttcaaggtggagtaccacgccggcggcagcacccagaacagcatcaaggtggcccagtggatgatccagcagccccacaaggccgccaccttcttcggctgcatcggcatcgacaagtttggagagatcctgaagaggaaggctgctgaggcccacgtggatgcccactactatgagcagaatgagcagcccaccggcacctgtgccgcctgcatcaccggggacaacagaagcctgattgccaacctggccgccgccaactgctacaagaaggagaagcacctggacctggagaagaactggatgctggtggagaaggcccgggtgtgctacatcgccggcttcttcctgactgtgtccccagagagcgtgctgaaggtggcccaccacgccagcgagaacaaccgcatcttcaccctgaacctgagcgcccccttcatcagccagttctacaaggagagcctgatgaaggtgatgccctacgtggacatcctgtttggaaatgaaacagaagctgccacctttgcccgggagcagggctttgagaccaaggacatcaaggagatcgccaagaagacccaggccctgcccaagatgaacagcaagaggcagagaattgtcatcttcacccagggcagagatgacaccatcatggccacagaaagtgaggtgacagcctttgctgtgctggaccaggaccagaaggagatcatcgacaccaacggggctggagatgcctttgtgggcggcttcctgagccagctggtgtctgacaagcccctgacagagtgcatccgggccggccactacgccgccagcatcatcatccggaggacaggctgcaccttccctgagaagccagacttccactag

SEQ ID NO: 79309 - DNA, 984 bp, Artificial Sequence
  derived and/or modified sequence
atgaccagcgtgcgggagaacatcctgttcggcatgggcaacccccttcttgacatcagcgctgttgtcgacaaagacttcttagataaatttgacgaactcgtcaagaagtttaaagtggaataccacgccggcggctcgacacagaattccataaaggtcgcgcagtggatgatccaacaaccacacaaagccgcaacttttttcgggtgcatcgggatcgacaaattcggagaaattttgaagagaaaggccgctgaggcccacgtagatgctcattactacgaacagaacgagcaaccaacagggacctgtgccgcctgcattacaggggacaatcgtagcctcattgccaatctggccgccgcgaattgttacaaaaaagaaaaacaccttgatttagagaagaattggatgctcgtggagaaggcccgcgtttgctatattgcagggttcttcctcaccgtgagtccggagtccgtgctcaaggtggcccaccacgcgtcagagaacaaccgaatcttcaccctcaacctgtccgccccgtttatcagccagttctacaaggagagcctgatgaaggtgatgccttatgtggacattctgtttggtaacgagacagaagccgcaacttttgcgagagagcaaggctttgagaccaaagatattaaggaaatcgccaaaaaaactcaggcactccctaagatgaatagtaaacgacaacgaatagtgatttttactcaggggcgggacgatacaattatggccacagagtctgaagtaactgcattcgccgtacttgatcaagaccagaaagaaattattgacacaaacggcgccggtgatgccttcgtgggggggttcttgagccaattggtttccgacaaaccgctgacagaatgtatacgagcaggccattacgcagcctccatcatcatccggcggaccggttgcacctttcctgagaaacccgattttcactag

SEQ ID NO: 79310 - DNA, 984 bp, Artificial Sequence
  derived and/or modified sequence
atgacttcggtgagagaaaacattctctttggtatgggcaaccctctgctggatatatccgccgtggtggataaggatttccttgacaagtttgacgagctagtgaaaaagtttaaagtggagtaccatgctggtggttcgacgcaaaacagcataaaagtggcccagtggatgattcaacaaccacacaaggctgcaactttctttggttgtatcggcattgataagttcggagagatacttaagcggaaagcggctgaagcacatgtggatgcacactattatgagcaaaatgagcagcccacagggacctgtgcggcttgcatcactggcgacaaccgctccctgatcgccaaccttgccgctgccaactgttacaagaaagagaagcatctcgacttggagaagaactggatgctggtggaaaaggcacgtgtatgctatatagcgggattctttctgaccgtgtcaccggagagcgtcttgaaggtggcacatcacgcttcagagaataatcgtatcttcactctcaacctgtctgcaccctttatttctcagttttacaaggagtcgctcatgaaagtcatgccctacgtcgatatcctttttggtaacgagaccgaggctgctaccttcgcacgcgagcagggattcgagaccaaagatatcaaagaaattgccaaaaaaactcaggccctgcctaaaatgaactctaagagacagagaattgtgatttttactcaggggagggacgatactattatggccaccgagagcgaggtgacggccttcgctgtcctggaccaggatcagaaggagatcatcgacaccaatggagcaggcgacgctttcgtgggcggattcctgagtcagttggtgtccgataagcccctcactgaatgcatccgggctggtcactacgccgcatctatcatcatccggagaaccggttgcacctttcccgagaagccggatttccactag

SEQ ID NO: 79311 - DNA, 984 bp, Artificial Sequence
  derived and/or modified sequence
atgaccagcgtgagagagaacatcctgttcggcatgggcaaccccctgctggacatcagcgccgtggtggacaaggacttcctggacaagttcgacgagctggtgaagaagttcaaggtggagtaccacgccggcggcagcacccagaacagcatcaaggtggcccagtggatgatccagcagccccacaaggccgccaccttcttcggctgcatcggcatcgacaagttcggcgagatcctgaagagaaaggccgccgaggcccacgtggacgcccactactacgagcagaacgagcagcccaccggcacctgcgccgcctgcatcaccggcgacaacagaagcctgatcgccaacctggccgccgccaactgctacaagaaggagaagcacctggacctggagaagaactggatgctggtggagaaggccagagtgtgctacatcgccggcttcttcctgaccgtgagccccgagagcgtgctgaaggtggcccaccacgccagcgagaacaacagaatcttcaccctgaacctgagcgcccccttcatcagccagttctacaaggagagcctgatgaaggtgatgccctacgtggacatcctgttcggcaacgagaccgaggccgccaccttcgccagagagcagggcttcgagaccaaggacatcaaggagatcgccaagaagacccaggccctgcccaagatgaacagcaagagacagagaatcgtgatcttcacccagggcagagacgacaccatcatggccaccgagagcgaggtgaccgccttcgccgtgctggaccaggaccagaaggagatcatcgacaccaacggcgccggcgacgccttcgtgggcggcttcctgagccagctggtgagcgacaagcccctgaccgagtgcatcagagccggccactacgccgccagcatcatcatcagaagaaccggctgcaccttccccgagaagcccgacttccactag

SEQ ID NO: 79312 - protein, 305 aa, Artificial Sequence
  derived and/or modified sequence
MAAAEEEPKPKKLKVEAPQALRENILFGMGNPLLDISAVVDKDFLDKYSLKPNDQILAEDKHKELFDELVKKFKVEYHAGGSTQNSIKVAQWMIQQPHKAATFFGCIGIDKFGEILKRKAAEAHVDAHYYEQNEQPTGTCAACITGDNRSLIANLAAANCYKKEKHLDLEKNWMLVEKARVCYIAEAATFAREQGFETKDIKEIAKKTQALPKMNSKRQRIVIFTQGRDDTIMATESEVTAFAVLDQDQKEIIDTNGAGDAFVGGFLSQLVSDKPLTECIRAGHYAASIIIRRTGCTFPEKPDFH

SEQ ID NO: 79313 - DNA, 918 bp, Artificial Sequence
  derived and/or modified sequence
atggctgcggcggaggaggagccaaaaccaaagaagctgaaggtagaggcacctcaggcactcagagaaaatatcctttttggtatgggcaaccctctgttagacatctctgcggttgttgataaggatttcctcgataagtactcattgaagccaaacgaccagatactggccgaggacaagcacaaggagctgttcgacgaactggtgaagaaatttaaggttgaataccatgcaggcggctcaacccagaatagcatcaaagtcgctcaatggatgattcaacaaccccacaaagccgcaaccttctttggatgtatcggcattgataagttcggcgaaatactcaagcgcaaggctgctgaggcccatgttgacgctcattactacgaacagaatgagcagccgaccgggacatgcgctgcttgtattaccggagataaccgcagtctgatcgcgaatctcgccgccgctaattgctataagaaagagaagcatttggacctggagaaaaattggatgcttgtcgagaaagccagggtgtgctacatcgcagaggccgccacattcgcccgcgaacaaggctttgagacaaaagatattaaggaaatcgccaaaaaaacccaggccctgccaaagatgaactccaaaaggcagaggattgtgatctttacgcagggaagagacgacaccataatggctactgagagcgaagttaccgccttcgccgttcttgatcaggatcaaaaggagataattgatacgaacggtgcaggagacgccttcgttggcggttttctgagtcagctggtttcggataagcccttgaccgagtgtattagagcaggccattatgccgccagcataattatccgacggaccggatgcacgttccccgagaaaccagattttcactag

SEQ ID NO: 79314 - DNA, 1249 bp, Artificial Sequence
  derived and/or modified sequence
gatgcgaagagggggcgggaccagagagtggatggcagaggtgggctgtagagccaaagtggggtgggagcgcgaagatggcagctgctgaggaggagccgaagcccaaaaagctgaaggtggaggcgccgcaagcgctgagagaaaatattctctttggaatgggaaatcctctgcttgacatctctgctgtagtggacaaagatttccttgataagtattctctgaaaccaaatgaccaaatcttggctgaagacaaacacaaggaactgtttgatgaacttgtgaaaaaattcaaagtcgaatatcatgctggtggctctacccagaattcaattaaagtggctcagtggatgattcaacagccacacaaagcagcaacattttttggatgcattgggatagataaatttggggagatcctgaagagaaaagctgctgaagcccatgtggatgctcattactacgagcagaatgagcagccaacaggaacttgtgctgcatgcatcactggtgacaacaggtccctcatagctaatcttgctgctgccaattgttataaaaaggaaaaacatcttgatctggagaaaaactggatgttggtagaaaaagcaagagtttgttatatagcagaagctgccacttttgctagagagcaaggctttgagactaaagacattaaagagatagccaaaaagacacaagccctgccaaagatgaactcaaagaggcagcgaatcgtgatcttcacccaagggagagatgacactataatggctacagaaagtgaagtcactgcttttgctgtcttggatcaagaccagaaagaaattattgataccaatggagctggagatgcatttgttggaggttttctgtctcaactggtctctgacaagcctctgactgaatgtatccgtgctggccactatgcagcaagcatcataattagacggactggctgcacctttcctgagaagccagacttccactgatggaagagctgaaaacacaagcccaggagtgcagacactgccctaattgcttcctgagaattcccatattaataaagaagaaaattatctgccattttttcctactataataatgctgaatcttaatttagagggtacaagggtatggtaatgcttgtagaatctttattatctcaacaatctaaaaaatgatgtttatttccatagtttgatagtgccacttaaatgccaattaaacaagaatataacatttc

SEQ ID NO: 79315 - DNA, 918 bp, Artificial Sequence
  derived and/or modified sequence
atggctgctgctgaggaggagcccaagcccaagaagctgaaggtggaggccccccaggccctgcgggagaacatcctgtttggcatgggcaaccccctgctggacatctctgctgtggtggacaaggacttcctggacaagtacagcctgaagcccaatgaccagatcctggccgaggacaagcacaaggagctgtttgatgagctggtgaagaagttcaaggtggagtaccacgccggcggcagcacccagaacagcatcaaggtggcccagtggatgatccagcagccccacaaggccgccaccttcttcggctgcattggaattgacaagtttggagagatcctgaagaggaaggctgctgaggcccacgtggatgcccactactatgagcagaatgagcagcccaccggcacctgtgccgcctgcatcactggagacaacagaagcctcatcgccaacctggccgccgccaactgctacaagaaggagaagcacctggacctggagaagaactggatgctggtggagaaggcccgggtgtgctacatcgccgaggccgccacctttgcccgggagcagggctttgagaccaaggacatcaaggagatcgccaagaagacccaggccctgcccaagatgaacagcaagaggcagagaattgtcatcttcacccagggcagagatgacaccatcatggccacagaaagtgaggtgacagcctttgctgtgctggaccaggaccagaaggagatcatcgacaccaacggggctggagatgcctttgtgggcggcttcctgagccagctggtgtctgacaagcccctgacagagtgcatccgggccggccactacgccgccagcatcatcatccggaggacaggctgcaccttccctgagaagccagacttccactag

SEQ ID NO: 79316 - DNA, 918 bp, Artificial Sequence
  derived and/or modified sequence
atggccgccgccgaggaggagcccaagcccaagaagctgaaggtggaggctccacaggccctccgagagaatatcttatttgggatggggaaccccctgttggacatttccgctgtcgtggacaaagactttctggataaatactctttaaagcccaatgatcaaatactcgccgaagacaagcacaaggagctcttcgacgagctggtgaagaagtttaaagtggagtatcacgctgggggaagcacacagaacagtatcaaagtggcccagtggatgatacaacagccacacaaggccgcaacattcttcggttgcatagggatcgacaagttcggggagattctaaagcgaaaagcagccgaagcccatgttgatgctcactactacgaacagaatgaacagcccaccggaacttgtgcagcctgcatcacaggagataaccgttcccttatcgcgaacttagccgctgcaaactgttacaagaaggaaaagcacctggatttagagaagaattggatgcttgtcgagaaggctcgggtgtgttatatcgcagaggcggcaacttttgcccgtgagcagggctttgagaccaaggacattaaggagattgcgaagaagacccaggcactgccgaaaatgaactctaagcgccaacggattgtgatcttcacacaaggccgggatgataccattatggccacggaatcggaagttacggccttcgccgtgttggaccaggaccagaaagagattatagacactaatggtgctggtgacgcctttgtgggaggtttcctgagtcaactcgtgtcagataagcctttaacagagtgtatcagagccggacattacgccgcctctatcatcatccgacgtacagggtgcacgttccctgagaagcccgactttcactag

SEQ ID NO: 79317 - DNA, 918 bp, Artificial Sequence
  derived and/or modified sequence
atggccgcagctgaagaagagccgaagcccaaaaagctgaaggtagaagctccacaggctctgcgggaaaacatactcttcggaatggggaacccactcctggacatttctgccgtggtggataaagacttcctggacaaatattctctcaagcccaatgaccaaattctcgcagaagacaagcacaaggagctgtttgatgaacttgtgaaaaaatttaaggtggagtatcacgctggcggttcaacccagaactccatcaaagtagcacagtggatgatccagcagcctcataaggccgctacttttttcggctgcattggaattgataagttcggagaaatcctcaaacgaaaagccgcagaggcacacgtagatgctcactattacgagcagaatgagcagcccacaggcacttgtgccgcatgcattaccggcgacaaccgcagcctgattgcaaacctggcagctgccaactgctataagaaggagaagcacctcgatctggaaaagaactggatgcttgtcgagaaagcgcgagtgtgttatatcgcagaggccgctacctttgcacgcgagcagggattcgaaacaaaggacatcaaagagatcgccaagaaaacacaggccttgccaaagatgaattcaaaaaggcagcggatcgttattttcacgcagggccgagatgataccatcatggccactgagtctgaggtcaccgctttcgctgtgctcgatcaggatcagaaggaaattatcgacacaaacggcgctggagacgcgtttgtagggggtttcctatctcaactggtgagtgataaacccctcactgagtgcatacgagccggacattatgctgcctccattattattcggagaaccgggtgtactttccccgaaaagcctgactttcactag

SEQ ID NO: 79318 - DNA, 918 bp, Artificial Sequence
  derived and/or modified sequence
atggccgccgccgaggaggagcccaagcccaagaagctgaaggtggaggccccccaggccctgagagagaacatcctgttcggcatgggcaaccccctgctggacatcagcgccgtggtggacaaggacttcctggacaagtacagcctgaagcccaacgaccagatcctggccgaggacaagcacaaggagctgttcgacgagctggtgaagaagttcaaggtggagtaccacgccggcggcagcacccagaacagcatcaaggtggcccagtggatgatccagcagccccacaaggccgccaccttcttcggctgcatcggcatcgacaagttcggcgagatcctgaagagaaaggccgccgaggcccacgtggacgcccactactacgagcagaacgagcagcccaccggcacctgcgccgcctgcatcaccggcgacaacagaagcctgatcgccaacctggccgccgccaactgctacaagaaggagaagcacctggacctggagaagaactggatgctggtggagaaggccagagtgtgctacatcgccgaggccgccaccttcgccagagagcagggcttcgagaccaaggacatcaaggagatcgccaagaagacccaggccctgcccaagatgaacagcaagagacagagaatcgtgatcttcacccagggcagagacgacaccatcatggccaccgagagcgaggtgaccgccttcgccgtgctggaccaggaccagaaggagatcatcgacaccaacggcgccggcgacgccttcgtgggcggcttcctgagccagctggtgagcgacaagcccctgaccgagtgcatcagagccggccactacgccgccagcatcatcatcagaagaaccggctgcaccttccccgagaagcccgacttccactag

SEQ ID NO: 79319 - protein, 651 aa, Artificial Sequence
  derived and/or modified sequence
MLREEATKKSKEKEPGMALPQGRLTFRDVAIEFSLEEWKCLNPAQRALYRAVMLENYRNLEFVDSSLKSMMEFSSTRHSITGEVIHTGTLQRHKSHHIGDFCFPEMKKDIHHFEFQWQEVERNGHEAPMTKIKKLTGSTDRSDHRHAGNKPIKDQLGLSFHSHLPELHMFQTKGKISNQLDKSIGASSASESQRISCRLKTHISNKYGKNFLHSSFTQIQEICMREKPCQSNECGKAFNYSSLLRRHHITHSREREYKCDVCGKIFNQKQYIVYHHRCHTGEKTYKCNECGKTFTQMSSLVCHRRLHTGEKPYKCNECGKTFSEKSSLRCHRRLHTGEKPYKCNECGKTFGRNSALVIHKAIHTGEKPYKCNECGKTFSQKSSLQCHHILHTGEKPYKCEECDNVYIRRSHLERHRKIHTGEGSYKCKVCDKVFRSDSYLAEHQRVHTGEKPYKCNKCGRSFSRKSSLQYHHTLHTGEKPYTCNECGKVFSRRENLARHHRLHAGEKPYKCEECDKVFSRRSHLERHRRIHTGEKPYKCKVCDKAFRSDSCLANHTRVHTGEKPYKCNKCAKVFNQKGILAQHQRVHTGEKPYKCNECGKVFNQKASLAKHQRVHTAEKPYKCNECGKAFTGQSTLIHHQAIHGCRETLQM

SEQ ID NO: 79320 - protein, 114 aa, Artificial Sequence
  derived and/or modified sequence
MLREEATKKSKEKEPGMALPQGRLTFRDVAIEFSLEEWKCLNPAQRALYRAVMLENYRNLEFVDSSLKSMMEFSSTRHSITGEVIHTGTLQRHKSHHIGDFCFPEMKKDIHHFE

SEQ ID NO: 79321 - DNA, 1956 bp, Artificial Sequence
  derived and/or modified sequence
atgctgagagaggaggccaccaagaagagcaaggagaaggagcccggcatggccctgccccagggcagactgaccttcagagacgtggccatcgagttcagcctggaggagtggaagtgcctgaaccccgcccagagagccctgtacagagccgtgatgctggagaactacagaaacctggagttcgtggacagcagcctgaagagcatgatggagttcagcagcaccagacacagcatcaccggcgaggtgatccacaccggcaccctgcagagacacaagagccaccacatcggcgacttctgcttccccgagatgaagaaggacatccaccacttcgagttccagtggcaggaggtggagagaaacggccacgaggcccccatgaccaagatcaagaagctgaccggcagcaccgacagaagcgaccacagacacgccggcaacaagcccatcaaggaccagctgggcctgagcttccacagccacctgcccgagctgcacatgttccagaccaagggcaagatcagcaaccagctggacaagagcatcggcgccagcagcgccagcgagagccagagaatcagctgcagactgaagacccacatcagcaacaagtacggcaagaacttcctgcacagcagcttcacccagatccaggagatctgcatgagagagaagccctgccagagcaacgagtgcggcaaggccttcaactacagcagcctgctgagaagacaccacatcacccacagcagagagagagagtacaagtgcgacgtgtgcggcaagatcttcaaccagaagcagtacatcgtgtaccaccacagatgccacaccggcgagaagacctacaagtgcaacgagtgcggcaagaccttcacccagatgagcagcctggtgtgccacagaagactgcacaccggcgagaagccctacaagtgcaacgagtgcggcaagaccttcagcgagaagagcagcctgagatgccacagaagactgcacaccggcgagaagccctacaagtgcaacgagtgcggcaagaccttcggcagaaacagcgccctggtgatccacaaggccatccacaccggcgagaagccctacaagtgcaacgagtgcggcaagaccttcagccagaagagcagcctgcagtgccaccacatcctgcacaccggcgagaagccctacaagtgcgaggagtgcgacaacgtgtacatcagaagaagccacctggagagacacagaaagatccacaccggcgagggcagctacaagtgcaaggtgtgcgacaaggtgttcagaagcgacagctacctggccgagcaccagagagtgcacaccggcgagaagccctacaagtgcaacaagtgcggcagaagcttcagcagaaagagcagcctgcagtaccaccacaccctgcacaccggcgagaagccctacacctgcaacgagtgcggcaaggtgttcagcagaagagagaacctggccagacaccacagactgcacgccggcgagaagccctacaagtgcgaggagtgcgacaaggtgttcagcagaagaagccacctggagagacacagaagaatccacaccggcgagaagccctacaagtgcaaggtgtgcgacaaggccttcagaagcgacagctgcctggccaaccacaccagagtgcacaccggcgagaagccctacaagtgcaacaagtgcgccaaggtgttcaaccagaagggcatcctggcccagcaccagagagtgcacaccggcgagaagccctacaagtgcaacgagtgcggcaaggtgttcaaccagaaggccagcctggccaagcaccagagagtgcacaccgccgagaagccctacaagtgcaacgagtgcggcaaggccttcaccggccagagcaccctgatccaccaccaggccatccacggctgcagagagaccctgcagatgtag

SEQ ID NO: 79322 - DNA, 345 bp, Artificial Sequence
  derived and/or modified sequence
atgctgagagaggaggccaccaagaagagcaaggagaaggagcccggcatggccctgccccagggcagactgaccttcagagacgtggccatcgagttcagcctggaggagtggaagtgcctgaaccccgcccagagagccctgtacagagccgtgatgctggagaactacagaaacctggagttcgtggacagcagcctgaagagcatgatggagttcagcagcaccagacacagcatcaccggcgaggtgatccacaccggcaccctgcagagacacaagagccaccacatcggcgacttctgcttccccgagatgaagaaggacatccaccacttcgagtag

SEQ ID NO: 79323 - DNA, 1956 bp, Artificial Sequence
  derived and/or modified sequence
atgctgagggaggaggccacgaagaagagtaaagaaaaggaacccggcatggccctgccccaaggccgtttgacttttagagacgttgctatagagttctcactcgaagaatggaagtgcctcaatccagcccagagagccttatatcgtgccgttatgctagaaaattatcggaatcttgaatttgtggatagcagcctgaaaagcatgatggagttttcaagcaccaggcactcaataaccggggaagtgatccacaccggtaccctgcagcgacataaaagccaccatataggagatttttgcttccccgagatgaaaaaggacatccaccatttcgagttccaatggcaggaagtggagcgcaatggacatgaagcccctatgactaagatcaaaaaattgacggggtccaccgatagaagcgatcaccgacacgcagggaacaagcccataaaagatcaactgggactgtcgtttcatagtcacctgcctgagctacatatgttccagactaagggcaagatttcaaaccagcttgacaagtctataggggcatcaagcgccagcgagtcccaaaggatatcatgcagattgaagacacacattagcaacaagtacgggaagaactttctgcattcctcctttacgcagatacaggagatatgcatgcgagagaaaccctgccagagcaacgaatgtggcaaggcgtttaattactcttcactcctgaggaggcatcatatcactcattccagagagagggagtataagtgtgacgtgtgtgggaagatttttaaccaaaaacagtatatcgtatatcaccatcgctgtcacacaggagagaaaacttacaaatgtaatgagtgcggcaagaccttcacacagatgagctctctggtgtgtcataggaggctccacaccggcgagaaaccgtataagtgcaacgaatgtggcaaaaccttctctgagaagagttctctgaggtgccatcggagacttcacacaggcgaaaaaccttacaaatgcaatgagtgtggcaagacctttggtcgcaatagtgcactggtcatccacaaggctatacatacaggggagaagccttataaatgtaatgagtgcgggaaaacattcagccagaaaagctctctccagtgccatcatatcctacacacgggcgaaaagccctacaagtgcgaggagtgtgacaacgtgtatattcggaggtcccacctggagcgacatcggaaaatccatacaggggaaggatcttacaagtgcaaagtatgcgataaggtctttagatctgacagttacctggctgaacaccaaagagtccacacaggcgagaagccatacaaatgtaacaagtgcggccggagtttctcacggaaaagttctctccaatatcatcacacattgcacacaggcgaaaagccgtatacatgtaacgagtgtgggaaagtgttctcccgtagggaaaaccttgcacgacaccaccgtctgcatgcaggtgagaagccatacaagtgcgaagagtgcgataaagtcttttcaagaagatcacacctagagagacaccgaagaatccacaccggcgaaaaaccgtacaaatgcaaagtgtgcgacaaggcgtttcgaagcgattcatgcctggctaaccacacaagggtgcataccggagagaaaccttacaagtgcaacaaatgtgctaaggtttttaaccagaaggggatcctcgcacagcaccagcgagttcacacaggggagaaaccatataaatgtaacgaatgtggaaaggtgttcaatcagaaggccagtttggctaaacaccagagagtgcacacggctgagaaaccatataagtgtaacgaatgtggtaaggcattcactggccagtcaacactaatccaccatcaggccattcacggttgtagggaaaccctgcaaatgtag

SEQ ID NO: 79324 - DNA, 1956 bp, Artificial Sequence
  derived and/or modified sequence
atgcttcgtgaagaggcgaccaaaaaatcaaaggagaaggagccgggcatggctcttccccagggacgcctcacgttccgcgacgtggccatagagttttcccttgaggaatggaaatgtctgaatcccgcacagcgtgctctttaccgcgctgtgatgctggagaactataggaacttggagttcgtcgatagcagcctcaaaagcatgatggaattttccagcactcgacactcaatcacgggggaggttatccacactggaacactgcagagacataagtctcaccacattggggacttttgttttcctgaaatgaagaaagacattcaccactttgaatttcagtggcaggaggtcgagcgcaatgggcacgaagcgcccatgaccaagattaagaagctgacaggctccactgatcggagcgatcatcggcatgcaggaaataaaccaattaaggatcagctgggcctctcctttcattctcacctgccagaattgcacatgttccagacaaaggggaaaatttcaaatcagctggacaagtccattggggcctccagcgcctcagagtcccaacggatttcttgccgtctcaaaactcatattagcaacaaatacggtaagaacttcctgcattcttcatttacccagatccaggaaatttgcatgcgggagaagccttgccagtcaaatgaatgtgggaaggcctttaattactcgtcgctgctgaggcggcatcacattacccacagccgcgagcgggaatacaaatgtgatgtgtgtggcaagatcttcaaccagaaacaatatatcgtgtatcatcatagatgccacaccggggaaaaaacttacaaatgcaatgagtgtggtaagacttttactcagatgagtagtctagtgtgccacaggcggctccatacaggtgaaaaaccatataagtgcaacgagtgtgggaagacgttctcagagaagtcttccttgaggtgccatcgtagactgcatacgggtgagaaaccatataaatgtaacgagtgtgggaagacatttggacggaactcagctctcgtgattcataaggccattcatacgggagaaaaaccttacaaatgtaatgagtgcgggaagaccttctcacaaaaaagttctctccagtgccatcatatcctacacacaggggagaagccctataagtgtgaagaatgtgataacgtctatattcgtagatcacacctcgaaaggcatcgcaagattcataccggagagggaagttataagtgcaaggtgtgcgacaaggtttttcggtcagatagctaccttgcagagcaccagcgggtgcacactggagagaagccctacaaatgcaacaagtgtggtaggagtttcagcagaaaatcatctttgcagtaccaccataccctccacactggggaaaagccttatacctgtaacgagtgcggcaaagtctttagcagacgcgaaaacttggcacgccaccaccggcttcacgctggcgagaaaccttacaagtgtgaggagtgtgataaggttttctccaggcgttcacatctcgagcgacacaggcgaattcacactggggagaagccctataaatgtaaagtgtgcgataaagcttttcggtcagattcctgcctggccaatcacacccgcgttcacaccggagaaaagccatacaagtgtaacaagtgcgccaaggtctttaatcaaaaggggattctggcccagcaccaacgggtccataccggagagaagccctataaatgcaatgagtgcggcaaggtcttcaaccagaaggctagtctggccaaacaccagcgggttcatactgccgagaagccgtacaagtgcaacgaatgcgggaaggcttttacaggccagagcacccttatccaccaccaagctatccacggatgtagagaaactcttcagatgtag

SEQ ID NO: 79325 - DNA, 345 bp, Artificial Sequence
  derived and/or modified sequence
atgttacgagaagaggctaccaaaaagagcaaagaaaaggagcctgggatggcactcccacagggccgtctgaccttccgcgatgtagctatcgagttcagcctggaagagtggaagtgtctgaatcctgctcaacgcgccttgtaccgtgctgttatgctcgagaattatcgaaatctggagttcgtggacagctccctgaagtctatgatggaattttcatccactcgacactctattactggcgaagtgatccatacaggcaccctgcagcggcataagagtcaccacatcggtgatttttgctttccggagatgaagaaagacattcaccatttcgagtag

SEQ ID NO: 79326 - DNA, 1956 bp, Artificial Sequence
  derived and/or modified sequence
atgctgcgggaggaggccaccaagaagagcaaggagaaggagcccggcatggccctgccccagggccgcctgaccttcagagatgtggccatcgagttcagcctggaggagtggaagtgcctgaacccagcccagagggccctgtacagagctgtgatgctggagaactacagaaacctggagtttgtggacagcagcctgaagtccatgatggagttcagcagcaccaggcacagcatcactggagaggtgatccacacaggcaccctgcagaggcacaagagccaccacatcggggacttctgcttccctgagatgaagaaggacatccaccactttgagttccagtggcaggaggtggagagaaatggacatgaggcccccatgaccaagatcaagaagctgaccggcagcacagacagaagtgaccacagacatgctggcaacaagcccatcaaggaccagctgggcctgtccttccacagccacctgcctgagctgcacatgttccagaccaagggcaagatcagcaaccagctggacaagagcatcggggccagcagcgccagcgagagccagaggatcagctgccgcctgaagacccacatcagcaacaagtatggcaagaacttcctgcacagcagcttcacccagatccaggagatctgcatgagggagaagccctgccagagcaatgaatgtgggaaggccttcaactacagcagcctgctgcggcggcaccacatcacccacagccgggagcgggagtacaagtgtgatgtgtgtgggaagatcttcaaccagaagcagtacatcgtgtaccaccaccgctgccacactggagagaagacctacaagtgcaatgaatgtgggaagaccttcacccagatgagcagcctggtgtgccaccggcggctgcacactggagagaagccctacaagtgcaatgaatgtgggaagaccttcagcgagaagagcagcctgcgctgccaccggcggctgcacactggagagaagccctacaagtgcaatgaatgtgggaagaccttcggcaggaacagcgccctggtgatccacaaggccatccacactggagagaagccctacaagtgcaatgaatgtgggaagaccttcagccagaagagcagcctgcagtgccaccacatcctgcacactggagagaagccctacaagtgtgaagaatgtgacaacgtgtacatccgccgcagccacctggagcggcacaggaagatccacactggagagggcagctacaagtgcaaggtgtgtgacaaggtgttcagaagtgacagctacctggccgagcaccagagggtgcacactggagagaagccctacaagtgcaacaagtgtggccgctccttcagcaggaagagcagcctgcagtaccaccacaccctgcacactggagagaagccctacacctgcaatgaatgtgggaaggtgttcagccggcgggagaacctggcccggcaccaccggctgcacgccggggagaagccctacaagtgtgaagaatgtgacaaggtgttcagccgccgcagccacctggagcggcaccggcgcatccacactggagagaagccctacaagtgcaaggtgtgtgacaaggccttcagaagtgacagctgcctggccaaccacaccagggtgcacactggagagaagccctacaagtgcaacaagtgtgccaaggtgttcaaccagaagggcatcctggcccagcaccagagggtgcacactggagagaagccctacaagtgcaatgaatgtgggaaggtgttcaaccagaaggccagcctggccaagcaccagagggtgcacacagctgagaagccctacaagtgcaatgaatgtgggaaggccttcaccggccagagcaccctcatccaccaccaggccatccacggctgccgggagaccctgcagatgtag

SEQ ID NO: 79327 - DNA, 345 bp, Artificial Sequence
  derived and/or modified sequence
atgctgcgggaggaggccaccaagaagagcaaggagaaggagcccggcatggccctgccccagggccgcctgaccttcagagatgtggccatcgagttcagcctggaggagtggaagtgcctgaacccagcccagagggccctgtacagagctgtgatgctggagaactacagaaacctggagtttgtggacagcagcctgaagtccatgatggagttcagcagcaccaggcacagcatcactggagaggtgatccacacaggcaccctgcagaggcacaagagccaccacatcggggacttctgcttccctgagatgaagaaggacatccaccactttgaatag

SEQ ID NO: 79328 - DNA, 1956 bp, Artificial Sequence
  derived and/or modified sequence
atgctgcgggaggaggccaccaagaagagcaaggagaaggagcccggtatggctttaccgcagggccgtcttacattccgggatgtagcaattgaattttccctcgaagagtggaagtgcctgaatcccgcccaacgcgcactctatagggcagtgatgcttgagaattaccgcaatctggagtttgttgatagcagtctaaagtcaatgatggagttttcaagcacccggcatagtattacaggtgaggtgatccacacgggcaccctgcagcggcataaatctcaccatattggtgatttctgtttcccagagatgaaaaaagacattcatcattttgaatttcagtggcaggaagtggaaaggaacgggcacgaagcccctatgacaaaaatcaagaagctaacaggaagcaccgatagatcagaccaccgtcacgccgggaataaaccaattaaagatcaactgggcctgagttttcacagtcaccttcccgaattacacatgttccagactaagggcaaaatcagcaaccagcttgacaaaagtattggtgcctcatccgctagcgagagtcagaggatcagttgccgcttaaagacccacatatctaataagtatggcaaaaatttcctccactcttctttcacccagatccaagaaatctgcatgagagagaagccatgccagtccaacgaatgcggaaaggccttcaactactcgtcactgcttaggcggcatcatattacacactctagagagcgcgaatataagtgtgatgtgtgcggtaagattttcaaccaaaagcaatatatcgtttatcaccatagatgtcatactggtgagaaaacctacaagtgtaatgaatgtggtaagacatttactcagatgtcctcattagtgtgccaccggagactacatacaggggaaaaaccatataagtgtaatgagtgtggaaagacattcagtgaaaaatcctcactgagatgccatagacggctccacaccggagaaaagccatacaagtgtaacgagtgcggcaagactttcggcagaaacagcgcactggtgattcataaagcgattcatacaggagaaaagccatacaagtgcaatgagtgcggaaagacattctcgcagaagagctccttgcagtgccaccacatattacatacaggcgaaaagccatacaaatgcgaagaatgtgacaacgtctatatcagaagatcccatctggaacggcatcgaaaaatccacaccggagaaggaagttataaatgcaaagtctgcgacaaggtctttagaagcgatagctatctcgctgagcaccagagagtccacacgggcgaaaaaccctacaagtgcaataaatgtgggaggagcttctcacggaaatcttctcttcagtatcatcacaccctgcataccggagaaaaaccctacacatgtaacgaatgtgggaaagtcttctccaggagggaaaacctcgcccggcatcatcgactgcatgctggcgagaagccatacaaatgtgaagagtgcgacaaagtgttttcgaggagatcccacctagagcggcatcgtagaatacatactggagagaaaccgtataaatgcaaagtctgcgacaaggcctttaggtctgatagttgcctggccaatcacacaagggtgcataccggcgaaaaaccttacaagtgtaataaatgcgcgaaagtgttcaatcagaaaggcatcctggcccagcaccagcgggtgcacaccggtgaaaagccatataagtgcaacgagtgcgggaaggtattcaatcagaaggcctcactggcgaaacatcaacgagtccatacagccgaaaaaccgtataaatgcaacgagtgcggcaaggccttcaccggacagtccaccctcatccaccaccaagctatccacgggtgcagggagacactgcagatgtag

SEQ ID NO: 79329 - DNA, 1956 bp, Artificial Sequence
  derived and/or modified sequence
atgctgcgggaggaggccaccaagaagagcaaggagaaggagcccggtatggcacttccacaaggaagactgacctttagggatgttgccatcgaattctctcttgaagaatggaaatgtctcaacccagcccagcgcgccctatacagggcagtcatgttggaaaattatagaaatttagaattcgtggatagtagtttgaagagcatgatggaattctcctctaccagacattcaattaccggagaagttatccacacggggaccctgcagaggcataaatcacatcacatcggggacttttgctttccagaaatgaaaaaagatatccatcactttgaattccagtggcaggaggttgagcgcaacggccatgaggcccctatgacaaagatcaagaaactgaccggatctaccgatagatccgatcacaggcatgccggcaataagccaataaaagaccagcttggtctctcattccactcacatctgcctgagttacatatgttccagacaaaaggtaagatatccaaccagctagataagtccattggcgcaagctctgcaagcgaatcccagcgcatttcatgcagattgaaaacacatattagtaacaaatacggcaagaatttcttgcactcgtcgttcactcagatccaggagatatgcatgcgggaaaaaccctgccaaagcaatgaatgtggcaaggctttcaattattctagtctgctgcgcaggcatcacattactcacagcagggaacgggaatataagtgtgatgtatgcgggaaaatcttcaaccaaaagcaatacattgtgtaccatcaccggtgccatacaggggagaagacatataaatgcaatgagtgtggcaaaacattcactcagatgtccagcttagtctgccaccggcggctccacacaggcgagaagccttataagtgtaacgagtgcggaaagactttcagcgaaaaatcttctctgcgttgccaccggagactgcacaccggcgaaaaaccatacaagtgcaacgagtgcggaaagaccttcgggcgcaattccgcactggtgatccataaggcaatccatacgggtgagaaaccgtataagtgtaatgagtgcggtaaaaccttttctcagaagtcttccctgcagtgtcatcacatcctgcacactggagagaagccctacaaatgtgaggaatgcgataacgtctatattcgtcggtcacacttggagaggcacagaaagatccacacaggcgaaggcagttacaaatgcaaggtgtgtgataaggtgtttcgttccgatagctacttagctgagcaccagcgggtacataccggagaaaagccttataaatgcaacaagtgcggacggagcttcagcaggaagtcttccctgcagtaccaccatactctccacaccggggaaaagccctacacttgtaacgaatgtggaaaggtgtttagtcgcagggagaatttggctagacatcaccgcctgcatgctggcgagaaaccatacaaatgcgaggaatgcgataaggtctttagcagacgatcccatttggagagacacaggaggatccatacaggcgaaaagccttataagtgcaaggtctgtgacaaggctttccgtagtgattcatgcttagctaatcacacccgggtgcacaccggagaaaagccctataaatgtaacaagtgtgcaaaggtgtttaatcagaagggtattctggcccagcaccagcgggttcatacgggcgaaaagccgtacaaatgtaatgaatgcgggaaggtcttcaatcaaaaggcttccctcgctaaacaccaaagagtgcataccgcagaaaagccgtacaaatgtaacgagtgcggcaaggcattcaccggccagagtacactgatccaccatcaagcaatccacggctgccgcgagaccctacagatgtag

SEQ ID NO: 79330 - DNA, 345 bp, Artificial Sequence
  derived and/or modified sequence
atgctgcgggaggaggccaccaagaagagcaaggagaaggagcccgggatggccctgccacaaggaagacttactttcagggacgtggctatcgagttttctctggaggagtggaaatgtttaaatcctgctcagcgcgccctctacagagcggtgatgctggagaactaccgcaatctggaattcgtggactctagtctcaagtcaatgatggagttctcaagcactaggcacagtataaccggcgaagtcatccacaccggcacattgcaaagacataaatcccaccatatcggcgacttctgctttccggagatgaagaaagatattcaccatttcgaatag

SEQ ID NO: 79331 - DNA, 1956 bp, Artificial Sequence
  derived and/or modified sequence
atgctgagagaagaagccacaaagaagtcgaaagagaaagaacccggtatggccctgccccagggaagactgacattccgcgacgtggccattgagtttagcttagaggaatggaagtgtctgaatcccgcacaacgcgctctgtaccgagctgttatgctagaaaattatcggaatctagaattcgtggacagctccctgaaaagtatgatggagttctcctcaactagacattcaattactggagaggtgatccataccggcacactgcagagacataagtctcaccacattggcgatttttgtttccccgagatgaagaaagatatccatcattttgagttccagtggcaggaagtggaacgcaatggccacgaagcccctatgacgaagattaaaaagttgacgggcagcaccgaccggtcggaccatagacatgccggtaacaagccgatcaaggatcagctcgggctcagttttcacagtcatctgccggaactgcacatgttccaaacaaaagggaaaatcagtaaccagctggataagagtatcggggcttcatctgcgagcgaatcacaacgaatctcctgccggttgaaaacacacattagtaataaatatggcaaaaactttctgcacagcagtttcacacagatccaagaaatttgtatgcgtgaaaaaccttgtcagtccaacgagtgtgggaaggcgttcaattactctagtctcctccgaaggcaccacatcacacacagcagggaacgcgagtataagtgcgatgtgtgcggcaagatattcaaccagaaacagtacattgtgtatcaccaccggtgtcacacaggagagaaaacgtataagtgtaacgaatgtggcaaaacttttactcagatgagctcacttgtctgccacagacgcttgcatacaggcgagaagccatataagtgcaacgagtgtggtaaaaccttctccgaaaagtctagtcttcgctgtcataggcggctgcacactggagagaaaccctataaatgcaacgagtgtggcaaaacatttggacgcaacagcgcacttgtgattcataaagcgattcacactggcgagaagccttataagtgcaatgagtgcggtaaaacattcagccagaagtccagtttacagtgtcaccacatactccatacaggcgagaagccttacaagtgtgaagagtgtgataatgtatatatccggaggagccatctcgagcgtcaccgcaaaatccacaccggagagggctcatacaaatgcaaagtctgcgacaaggtctttaggtctgactcctatttggccgagcatcagagggtgcatacaggagaaaaaccctataaatgtaacaagtgtggtcgctccttctcaagaaagagctcgctgcagtatcatcatacacttcacacaggggaaaagccttacacttgcaacgaatgcgggaaagtgttcagccgccgagaaaatttagccaggcatcatcgcctgcacgccggagagaagccttataaatgcgaggaatgtgataaggtcttctctcgcagatcccatctggagcgccaccggcgaatacataccggcgaaaagccatataaatgcaaagtctgtgacaaagctttccggagcgatagctgtttggcaaaccacaccagggtgcacactggcgagaaaccctataagtgtaacaagtgcgccaaggttttcaatcagaaaggcatccttgcccagcaccagcgtgtgcacacaggggaaaaaccatacaagtgcaacgagtgcggcaaggtctttaatcagaaggccagcctggccaaacatcaaagggtccacaccgctgagaagccctataagtgtaatgagtgcgggaaggcctttactgggcagagcacactcatccatcaccaggccatccacggttgccgtgaaacattgcagatgtag

SEQ ID NO: 79332 - DNA, 1956 bp, Artificial Sequence
  derived and/or modified sequence
atgctacgggaggaggctacgaaaaaatccaaggagaaggaacccggtatggctctgccacaggggagactaactttccgcgacgttgctatcgaatttagtctggaagagtggaagtgcctgaatccagctcagagagccctgtatagagccgtaatgctggaaaactacagaaatctcgagttcgtggacagctctctgaaaagtatgatggagttttcatctacccgacactcaattaccggggaggtaattcatacaggcaccctccagagacataagagccatcacattggcgacttttgttttccggagatgaagaaagacatccatcacttcgagttccaatggcaggaagtggagcgaaacggccacgaagctcccatgactaagattaaaaaactgactggctccacggaccgcagcgaccatcgacatgccggaaataaacccattaaggaccagcttggtctatcatttcatagccacttacccgagctccacatgttccaaaccaaaggcaagattagcaatcagctggataagtctattggcgctagcagcgcctcagaaagccagcgaatctcatgccgcctgaaaacccacatctccaataagtacggtaagaactttctccatagctcattcacccagatccaagaaatctgcatgcgggagaaaccctgccagtccaatgaatgcggaaaggctttcaattactccagcctcctgcggcgacatcatatcacacattcccgagaacgcgagtacaagtgtgacgtctgtggtaagatctttaatcagaagcaatatattgtgtaccaccataggtgtcatactggcgaaaagacctataagtgcaatgagtgtgggaaaacattcacccagatgtcaagcctggtatgtcataggcggctgcatacaggcgaaaagccctacaaatgcaacgagtgcggcaaaacttttagcgagaaaagttctctccggtgccatcgcagacttcacaccggtgagaaaccgtataagtgcaacgaatgcgggaagacctttggacgaaacagcgcactcgtgatacataaggccatccacaccggagaaaaaccctataagtgcaatgagtgcggcaagaccttctcccagaaatcctctctccaatgtcaccacatactccataccggggaaaaaccctacaaatgtgaggagtgcgataacgtttatatcaggcggagccatttggaacgtcaccgtaaaattcatacaggagaaggaagctataaatgtaaggtatgtgacaaggtgttccggtccgacagctatctcgctgagcaccaacgagttcataccggggaaaaaccgtacaaatgtaacaaatgcgggcgatcattctctcgtaagtcaagtctgcagtaccatcatacccttcacacaggcgagaaaccctacacttgtaatgaatgtggcaaagtcttttccagacgcgagaatctagccagacatcataggctccatgccggagagaagccgtacaaatgtgaggaatgtgacaaggtcttctcacgaagaagccatctcgagagacaccgtagaattcacactggcgagaagccatacaaatgcaaggtgtgtgataaagcttttcgctcagattcatgcctggctaatcacactcgcgtccacactggcgaaaaaccctataaatgcaacaaatgtgccaaggtgttcaaccaaaagggtattcttgcccagcaccagcgggttcataccggagaaaagccatacaaatgtaatgaatgcggtaaagtgttcaaccagaaggcatcgctggccaagcatcagcgcgtgcacacagcagagaaaccttacaagtgcaatgaatgcgggaaggcgttcaccggccaatccacgcttattcaccatcaagctatacacggatgcagagagacactgcagatgtag

SEQ ID NO: 79333 - DNA, 345 bp, Artificial Sequence
  derived and/or modified sequence
atgcttagggaggaagcgaccaaaaagtcgaaagagaaagagcccggaatggcgctcccccaggggcgtcttacatttagagatgtggctatcgagttcagcctagaagagtggaagtgtctgaaccccgctcagagggccctctatagggcggtgatgctggagaattatagaaacctggaattcgtagactcttcacttaagagcatgatggagttttcttccactcgtcacagtataaccggtgaagttattcatacagggacattacagaggcataagtcacaccatattggtgacttctgttttcccgaaatgaaaaaggatatccatcacttcgagtag

SEQ ID NO: 79334 - DNA, 2697 bp, Artificial Sequence
  derived and/or modified sequence
cgtggactgaaagttgcacggcggcgtgtgcgtttcctagttgtctggtgctgctatataggggacgtggggtccccacagacctgcaggttccggcccctcttttctcaacccagagcaaattgaaacgtccgggtaacacaccgctgtgccacggttttggcgagggctgacaattgtgagctgtagaagtaccagcctaacaactgttcaagtgactcctgacctagatgggtggtttcatgcacctccagtacaactgtggctcctagcagctgtggcacaggatttccaaagactcatgttacgtgaggaagccaccaagaagagcaaagaaaaggagccagggatggctcttcctcagggacgcttgactttcagggatgtggctatagagttctctttggaggagtggaaatgcctgaaccctgcacagagggctttatacagggctgtgatgttggagaactacaggaacctggagtttgtggatagctctttaaaatccatgatggagttctcatcaaccaggcacagtattacaggagaagtgatccacacagggacgttgcaaagacataaaagtcatcacattggagatttttgcttcccagaaatgaagaaagatattcatcactttgagtttcagtggcaagaagttgaaagaaatggccatgaagcacccatgacaaaaatcaaaaagttgactggtagtacagaccgaagtgatcacaggcatgctggaaacaagcctattaaagatcagcttggattaagctttcattcgcatctgcctgaactccacatgtttcagactaaagggaaaattagtaaccaattggacaagtctatcggtgcttcctcagcttcagaatcccaaagaatttcttgtaggctcaaaactcatatttctaataagtatgggaagaatttcctccattcttcattcacacaaatacaggaaatatgcatgagagaaaaaccttgccaaagtaatgagtgtggcaaagcctttaattatagctcactcttaaggagacaccacataacccattcaagagagagagaatataaatgtgatgtatgtggcaagatctttaatcagaagcaatacattgtatatcatcatagatgtcacactggtgagaaaacttacaagtgtaatgagtgtgggaagaccttcactcagatgtcatcccttgtatgccatcgtagacttcatactggagagaaaccttacaagtgtaatgagtgtggcaagaccttcagtgagaagtcatcccttagatgccatcgtagacttcatactggagagaaaccttacaagtgtaatgagtgtggcaagacttttggtcgaaattcagcccttgtaattcataaggcaattcatactggagagaaaccttacaagtgtaatgagtgtggcaagaccttcagtcagaaatcatcccttcaatgccatcatatacttcacactggagagaaaccttacaaatgtgaagaatgtgacaatgtttacattcgcagatcacaccttgaaagacataggaagattcatactggagagggatcatacaaatgtaaggtttgtgacaaggttttccggagtgattcataccttgcagaacatcagagagttcatactggagagaaaccatacaagtgtaataaatgtggcaggagtttcagtcggaagtcatcccttcaataccatcatacacttcacactggagagaaaccttacacatgtaatgaatgtggcaaggtttttagtcgaagagaaaaccttgcacgtcatcatagacttcatgctggagagaaaccttacaaatgtgaagaatgtgacaaagttttcagtcgcagatcacaccttgaaagacataggagaattcatactggggaaaaaccatacaaatgtaaggtttgtgacaaggctttccggagtgattcatgccttgcaaaccatacgagagttcatactggagagaaaccttacaagtgtaataaatgtgcgaaggtttttaatcaaaaaggaatccttgcacaacatcagagagttcatactggagagaaaccttacaagtgtaatgaatgtggcaaggtttttaatcaaaaagcaagccttgcaaaacatcagagagttcatactgcagagaaaccttacaagtgtaatgagtgtggcaaagcctttactggacagtcaacacttattcaccatcaagcaatccatgggtgtagggaaactttacaaatgtaatgattgtcacaaagtcttcagtaatgctacaaccattgcaaatcattacagaatccatattgaagagagatctacaagtgtaataaatgtggcaaatttttcagacgtcattcataacttgtagttcatcagtgaactcatactggagagaaaccttacaaatatcatgactgtgacaaggtcttcagtcaagcttcatcctatgcaaaacatagaattcatacaggagagaaacctcacaagtgtgatgattgtggcaaagcctttacttcatgttcacacctcattagacatcagagaattcatactggacagatgccttacaaatgtaagggtggcaaggtcttcactctgtggtcattccatgcagaacatcagaaaattcatttttgagataattgttccaaataaaatgaatataaaaaatcataaaactttaa

SEQ ID NO: 79335 - DNA, 2504 bp, Artificial Sequence
  derived and/or modified sequence
cacagacccggaagcggatggcgtggactgaaagttgcacggcggcgtgtgcgtttcctagttgtctggtgctgctatataggggacgtggggtccccacagacctgcaggttccggcccctcttttctcaacccagagcaaattgaaacgtccgggatttccaaagactcatgttacgtgaggaagccaccaagaagagcaaagaaaaggagccagggatggctcttcctcagggacgcttgactttcagggatgtggctatagagttctctttggaggagtggaaatgcctgaaccctgcacagagggctttatacagggctgtgatgttggagaactacaggaacctggagtttgtggatagctctttaaaatccatgatggagttctcatcaaccaggcacagtattacaggagaagtgatccacacagggacgttgcaaagacataaaagtcatcacattggagatttttgcttcccagaaatgaagaaagatattcatcactttgagtttcagtggcaagaagttgaaagaaatggccatgaagcacccatgacaaaaatcaaaaagttgactggtagtacagaccgaagtgatcacaggcatgctggaaacaagcctattaaagatcagcttggattaagctttcattcgcatctgcctgaactccacatgtttcagactaaagggaaaattagtaaccaattggacaagtctatcggtgcttcctcagcttcagaatcccaaagaatttcttgtaggctcaaaactcatatttctaataagtatgggaagaatttcctccattcttcattcacacaaatacaggaaatatgcatgagagaaaaaccttgccaaagtaatgagtgtggcaaagcctttaattatagctcactcttaaggagacaccacataacccattcaagagagagagaatataaatgtgatgtatgtggcaagatctttaatcagaagcaatacattgtatatcatcatagatgtcacactggtgagaaaacttacaagtgtaatgagtgtgggaagaccttcactcagatgtcatcccttgtatgccatcgtagacttcatactggagagaaaccttacaagtgtaatgagtgtggcaagaccttcagtgagaagtcatcccttagatgccatcgtagacttcatactggagagaaaccttacaagtgtaatgagtgtggcaagacttttggtcgaaattcagcccttgtaattcataaggcaattcatactggagagaaaccttacaagtgtaatgagtgtggcaagaccttcagtcagaaatcatcccttcaatgccatcatatacttcacactggagagaaaccttacaaatgtgaagaatgtgacaatgtttacattcgcagatcacaccttgaaagacataggaagattcatactggagagggatcatacaaatgtaaggtttgtgacaaggttttccggagtgattcataccttgcagaacatcagagagttcatactggagagaaaccatacaagtgtaataaatgtggcaggagtttcagtcggaagtcatcccttcaataccatcatacacttcacactggagagaaaccttacacatgtaatgaatgtggcaaggtttttagtcgaagagaaaaccttgcacgtcatcatagacttcatgctggagagaaaccttacaaatgtgaagaatgtgacaaagttttcagtcgcagatcacaccttgaaagacataggagaattcatactggggaaaaaccatacaaatgtaaggtttgtgacaaggctttccggagtgattcatgccttgcaaaccatacgagagttcatactggagagaaaccttacaagtgtaataaatgtgcgaaggtttttaatcaaaaaggaatccttgcacaacatcagagagttcatactggagagaaaccttacaagtgtaatgaatgtggcaaggtttttaatcaaaaagcaagccttgcaaaacatcagagagttcatactgcagagaaaccttacaagtgtaatgagtgtggcaaagcctttactggacagtcaacacttattcaccatcaagcaatccatgggtgtagggaaactttacaaatgtaatgattgtcacaaagtcttcagtaatgctacaaccattgcaaatcattacagaatccatattgaagagagatctacaagtgtaataaatgtggcaaatttttcagacgtcattcataacttgtagttcatcagtgaactcatactggagagaaaccttacaaatatcatgactgtgacaaggtcttcagtcaagcttcatcctatgcaaaacatagaattcatacaggagagaaacctcacaagtgtgatgattgtggcaaagcctttacttcatgttcacacctcattagacatcagagaattcatactggacagatgccttacaaatgtaagggtggcaaggtcttcactctgtggtcattccatgcagaacatca

SEQ ID NO: 79336 - DNA, 553 bp, Artificial Sequence
  derived and/or modified sequence
aggtcccgcttctgtcctgcgccgattggcacagacccggaagcggatggcgtggactgaaagttgcacggcggcgtgtgcgtttcctagttgtctggtgctgctatataggggacgtggggtccccacagacctgcaggttccggcccctcttttctcaacccagagcaaattgaaacgtccgggtgagagtccgatttccaaagactcatgttacgtgaggaagccaccaagaagagcaaagaaaaggagccagggatggctcttcctcagggacgcttgactttcagggatgtggctatagagttctctttggaggagtggaaatgcctgaaccctgcacagagggctttatacagggctgtgatgttggagaactacaggaacctggagtttgtggatagctctttaaaatccatgatggagttctcatcaaccaggcacagtattacaggagaagtgatccacacagggacgttgcaaagacataaaagtcatcacattggagatttttgcttcccagaaatgaagaaagatattcatcactttgagt

SEQ ID NO: 79337 - protein, 517 aa, Artificial Sequence
  derived and/or modified sequence
MARLTKRRQADTKAIQHLWAAIEIIRNQKQIANIDRITKYMSRVHGMHPKETTRQLSLAVKDGLIVETLTVGCKGSKAGIEQEGYWLPGDEISIKKKNTNKQEMGTYLRFIVSRMKERKVNEGKYRSYEEFKADAQLLLHNTVIFYGADSEQADIARMLYKDTCHELDELQLCKNCFYLSNARPDNWFCYPCIPNHELVWAKMKGFGFWPAKVMQKEDNQVDVRFFGHHHQRAWIPSENIQDITVNIHRLHVKRSMGWKKACDELELHQRFLREGRFWKSKNEDRGEEEAESSISSTSNEQLKVTQEPRAKKGRRNQSVEPKKEEPEPETEAVSSSQEIPTMPQPIEKVSVSTQTKKLSASSPRMLHRSTQTTNDGVCQSMCHDKYTKIFNDFKDRMKSDHKRETERVVREALEKLRSEMEEEKRQAVNKAVANMQGEMDRKCKQVKEKCKEEFVEEIKKLATQHKQLISQTKKKQWCYNCEEEAMYHCCWNTSYCSIKCQQEHWHAEHKRTCRRKR

SEQ ID NO: 79338 - DNA, 1554 bp, Artificial Sequence
  derived and/or modified sequence
atggccagactgaccaagagaagacaggccgacaccaaggccatccagcacctgtgggccgccatcgagatcatcagaaaccagaagcagatcgccaacatcgacagaatcaccaagtacatgagcagagtgcacggcatgcaccccaaggagaccaccagacagctgagcctggccgtgaaggacggcctgatcgtggagaccctgaccgtgggctgcaagggcagcaaggccggcatcgagcaggagggctactggctgcccggcgacgagatcagcatcaagaagaagaacaccaacaagcaggagatgggcacctacctgagattcatcgtgagcagaatgaaggagagaaaggtgaacgagggcaagtacagaagctacgaggagttcaaggccgacgcccagctgctgctgcacaacaccgtgatcttctacggcgccgacagcgagcaggccgacatcgccagaatgctgtacaaggacacctgccacgagctggacgagctgcagctgtgcaagaactgcttctacctgagcaacgccagacccgacaactggttctgctacccctgcatccccaaccacgagctggtgtgggccaagatgaagggcttcggcttctggcccgccaaggtgatgcagaaggaggacaaccaggtggacgtgagattcttcggccaccaccaccagagagcctggatccccagcgagaacatccaggacatcaccgtgaacatccacagactgcacgtgaagagaagcatgggctggaagaaggcctgcgacgagctggagctgcaccagagattcctgagagagggcagattctggaagagcaagaacgaggacagaggcgaggaggaggccgagagcagcatcagcagcaccagcaacgagcagctgaaggtgacccaggagcccagagccaagaagggcagaagaaaccagagcgtggagcccaagaaggaggagcccgagcccgagaccgaggccgtgagcagcagccaggagatccccaccatgccccagcccatcgagaaggtgagcgtgagcacccagaccaagaagctgagcgccagcagccccagaatgctgcacagaagcacccagaccaccaacgacggcgtgtgccagagcatgtgccacgacaagtacaccaagatcttcaacgacttcaaggacagaatgaagagcgaccacaagagagagaccgagagagtggtgagagaggccctggagaagctgagaagcgagatggaggaggagaagagacaggccgtgaacaaggccgtggccaacatgcagggcgagatggacagaaagtgcaagcaggtgaaggagaagtgcaaggaggagttcgtggaggagatcaagaagctggccacccagcacaagcagctgatcagccagaccaagaagaagcagtggtgctacaactgcgaggaggaggccatgtaccactgctgctggaacaccagctactgcagcatcaagtgccagcaggagcactggcacgccgagcacaagagaacctgcagaagaaagagatag

SEQ ID NO: 79339 - DNA, 1554 bp, Artificial Sequence
  derived and/or modified sequence
atggcccgcctgaccaaacggagacaggcagacactaaggccatacagcatctgtgggcagccattgagatcatacgaaatcagaaacagattgcgaacattgatagaatcacaaaatatatgagcagggttcacggaatgcaccctaaagaaaccactagacaactgtccctggctgtgaaagatgggctgatcgtggaaacactgactgtgggctgcaaaggaagtaaggccggcatagagcaggaagggtactggctgccaggtgacgagatttcgataaaaaaaaagaacactaataaacaagagatgggaacatacctgcgcttcatcgtaagtagaatgaaagagcggaaagtcaacgagggaaaatatcggtcttatgaagaattcaaggctgatgcgcaattgctgctacacaacaccgtgattttctatggcgccgattccgagcaggctgacatcgctcgtatgctgtacaaggacacatgtcacgaactggatgagctgcagctatgtaagaactgcttttatctgtctaatgcccggcctgataactggttctgctacccctgtattccgaaccacgagctggtctgggccaaaatgaagggcttcggtttctggcccgccaaagtaatgcagaaggaggacaatcaggttgacgtgagattcttcggacatcatcaccaacgggcctggattccaagcgagaatatccaggacatcacagttaacattcatcgattacacgtaaaaaggtctatgggatggaaaaaggcctgtgacgagctggaattacaccaacgtttcttgagagagggacggttttggaaatccaaaaatgaggacaggggcgaagaagaggcggagtccagtatctcaagcacttcaaacgagcagctcaaagtaactcaggagccaagagctaaaaaggggcgtagaaaccagtcagttgagccaaaaaaggaagaacccgaacccgaaaccgaagcggtttcgtcctcacaagaaattcctaccatgccacagcccatcgagaaggtgagcgtgagcacccaaacaaagaaactaagcgccagcagcccgcggatgctccataggtccacacagaccaccaacgatggggtttgccaatccatgtgccacgacaagtacaccaaaattttcaacgactttaaggaccgcatgaaatctgatcacaaacgggagaccgagcgcgtagtgcgggaggccctggaaaagttgagatccgagatggaagaggaaaagaggcaggcagtcaataaggccgtggccaatatgcagggcgagatggaccgaaagtgtaagcaggttaaagagaagtgtaaggaagagttcgtggaggaaattaagaaactggccacccaacataagcagctcatttcccaaactaagaagaaacagtggtgctataactgtgaggaggaggccatgtatcattgttgctggaataccagttactgttccatcaaatgtcagcaggaacactggcatgccgaacacaaaagaacttgcagacgaaaaaggtag

SEQ ID NO: 79340 - DNA, 1554 bp, Artificial Sequence
  derived and/or modified sequence
atggcccggctgaccaagaggcggcaggccgacaccaaggccatccagcacctgtgggccgccatcgagatcatccggaaccagaagcagatcgccaacatcgaccgcatcaccaagtacatgagccgggtgcacggcatgcaccccaaggagaccacccggcagctgagcctggccgtgaaggatggcctgattgtggagaccctgactgtgggctgcaagggcagcaaggccggcatcgagcaggagggctactggctgcctggagatgagatcagcatcaagaagaagaacaccaacaagcaggagatgggcacctacctgcgcttcatcgtgtccaggatgaaggagaggaaggtgaatgaaggcaagtaccgctcctatgaggagttcaaggcagatgcccagctgctgctgcacaacacagtcatcttctacggggctgacagcgagcaggccgacatcgccaggatgctgtacaaggacacctgccacgagctggatgagctgcagctgtgcaagaactgcttctacctgagcaatgcccggccagacaactggttctgctacccctgcatccccaaccacgagctggtgtgggccaagatgaagggcttcggcttctggccagccaaggtgatgcagaaggaggacaaccaggtggatgtgcgcttcttcggccaccaccaccagagggcctggatccccagcgagaacatccaggacatcaccgtgaacatccaccggctgcacgtgaagaggtccatgggctggaagaaggcctgtgatgagctggagctgcaccagcgcttcctgcgggagggccgcttctggaagagcaagaatgaagatagaggagaggaggaggccgagagcagcatcagcagcaccagcaatgagcagctgaaggtgacccaggagccccgggccaagaagggcagaagaaaccagagcgtggagcccaagaaggaggagcctgagcctgagacagaggccgtgagcagcagccaggagatccccaccatgccccagcccatcgagaaggtgtctgtgtccacccagaccaagaagctgagcgccagcagccccaggatgctgcacaggagcacccagaccaccaatgatggagtgtgccagagcatgtgccacgacaagtacaccaagatcttcaatgacttcaaggacaggatgaagagtgaccacaagcgggagacagagcgggtggtgcgggaggccctggagaagctgcggtctgagatggaggaggagaagaggcaggccgtgaacaaggctgtggccaacatgcagggcgagatggacaggaagtgcaagcaggtgaaggagaagtgcaaggaggagtttgtggaggagatcaagaagctggccacccagcacaagcagctgatcagccagaccaagaagaagcagtggtgctacaactgtgaggaggaggccatgtaccactgctgctggaacaccagctactgcagcatcaagtgccagcaggagcactggcatgctgagcacaagaggacctgcaggaggaagaggtag

SEQ ID NO: 79341 - DNA, 1554 bp, Artificial Sequence
  derived and/or modified sequence
atggcccggctgaccaagcggcggcaggccgacaccaaggccatccaacacttatgggcagcgatcgaaatcattaggaatcagaagcagattgcaaacattgatcgtatcacgaagtacatgagcagagttcacgggatgcaccccaaggagacaacacgtcagttaagcttggctgtcaaagatggactgattgtggaaacgcttactgttgggtgtaaggggtcgaaggcaggaatagagcaggaaggatactggctgccgggagacgagattagtattaaaaaaaagaatactaataagcaggagatggggacgtacctcagattcatcgtgtccagaatgaaagagcgaaaggtcaatgagggcaaatatcggagctatgaggagtttaaagcggacgcccaactgctgttacacaatactgtgatcttttacggggcagatagcgagcaggccgacatagcccggatgctgtataaagacacttgtcatgaactagacgagctccagctctgcaagaactgtttctaccttagtaacgcccgcccagacaactggttctgctatccatgtatccctaaccatgaactggtttgggctaaaatgaaaggattcggcttttggcctgcaaaggtcatgcagaaagaggacaaccaggtggatgtgcggttctttgggcaccaccatcaacgggcctggatcccgtctgagaacattcaggatattactgtgaacatccaccggctgcacgtaaagcggtccatgggatggaagaaagcttgtgatgaactggaactccaccagcgcttcctcagggaaggacgattttggaaaagcaaaaacgaagatcgcggcgaggaggaggccgaatcttcaattagctcaacatccaacgagcagttgaaagttacccaagaacctcgggccaagaaaggtcgtagaaatcagtcagtggaacccaagaaggaagagcctgaacccgaaaccgaggctgtgagctcaagccaggagattccaacgatgccgcaaccgatcgaaaaggtgtcagttagcacccagaccaaaaagctgagcgcgagctcgccccggatgctccatcggagtacccagactacaaacgatggtgtgtgccaaagcatgtgtcatgataagtacactaaaatctttaacgactttaaagaccggatgaaaagcgatcacaagcgggagacggagagggtagtccgtgaggccctggagaaattacgatcagaaatggaagaggagaagcgccaggcagtgaataaagctgtggcaaatatgcagggagagatggacagaaaatgcaagcaggttaaggagaagtgtaaggaggaattcgtagaggagataaaaaagctggctacgcaacacaagcagctgattagtcagactaagaagaaacagtggtgttataattgcgaggaggaagcgatgtaccactgctgctggaatacaagctattgctctatcaaatgccagcaggagcactggcacgcggagcacaaaagaacctgtcgacggaaaagatag

SEQ ID NO: 79342 - DNA, 1554 bp, Artificial Sequence
  derived and/or modified sequence
atggctcgcctcaccaagagacggcaggctgacactaaggcgattcagcacttgtgggcagccattgaaataataaggaatcagaaacagatcgctaatattgacagaattaccaaatacatgagtcgtgtgcacggcatgcatcctaaggagacaacccgacagctgtccctggccgtcaaagacggtctcattgtagaaaccctgacagttgggtgcaagggtagcaaagccggaatcgagcaagaaggttactggctccctggcgatgagatctcgatcaagaagaaaaacaccaacaagcaggagatgggcacctacctccgcttcattgtttcaagaatgaaggagaggaaagtgaacgaaggaaagtatcgcagttacgaagaattcaaggctgatgctcagctgctgctgcacaacaccgttatattttacggagctgattcagaacaggctgacattgccaggatgctgtacaaggatacctgccacgagctggacgagttgcaactctgcaagaattgcttctacctgtcgaatgcaagaccagacaattggttttgttacccgtgcattccgaaccacgagctggtgtgggccaagatgaagggatttggcttttggcccgcaaaggtgatgcagaaagaagataatcaggtcgatgttcgcttctttggacaccatcaccagcgggcatggatcccgtccgaaaacattcaggacatcacagttaatattcatcgtctgcacgtcaaaaggtctatgggatggaagaaagcgtgtgatgaactggagctccatcagaggtttctgcgggaaggcaggttttggaagtcaaaaaatgaagatcgtggtgaggaagaagctgaaagtagcataagctcaacatccaacgaacaacttaaggtcacacaggagccgagagctaagaagggacgccgaaatcagagcgtcgagccgaaaaaagaggagcccgagccagagacggaagctgtcagcagctcacaggaaatacccacaatgccccagccaattgaaaaggtgagcgttagtacccaaaccaaaaagctgtctgcctcgagccccagaatgctgcacaggagcactcagacgacaaacgacggagtttgccagtccatgtgccatgacaaatacacaaagatcttcaatgatttcaaagatcgtatgaaatcggatcataaacgggagactgagcgcgtagtcagggaggctctagagaagctcagaagcgagatggaggaggagaaacggcaggccgtcaataaggccgtggccaatatgcagggagaaatggaccgtaaatgtaaacaggtgaaggaaaagtgtaaagaggaattcgtggaggaaatcaaaaaactggccacacagcacaaacagctgatctcccagaccaagaaaaagcaatggtgttataattgtgaggaggaggccatgtaccattgttgttggaacaccagctactgctccatcaaatgccagcaagagcactggcacgcagaacataagcggacttgccgtagaaagcggtag

SEQ ID NO: 79343 - DNA, 1774 bp, Artificial Sequence
  derived and/or modified sequence
gtgtgtgtggatacggagtgcatgtgtggagacagaggaatatgctccaacaaatttcggatagaggcgccgaagacaggacgtggggaagctaaagaagtaaacaggtcatggcacgtttaacaaaaagacgacaggcggatacaaaagctatccagcatctttgggcagccattgagattatacggaaccagaagcagattgccaacattgaccgtattacaaagtatatgtctcgagtccacggtatgcaccctaaagagaccacccgtcagctgagcttagctgtgaaagatggtcttattgtcgaaactctaacagtgggctgcaaaggttcaaaagctggtattgaacaagaaggatattggttgccaggagatgagattagcattaagaagaagaatacaaacaaacaggagatgggcacatacctcagattcattgtctcccgcatgaaggagaggaaagtgaatgaagggaaataccgaagttatgaagagttcaaagctgatgcccaattgcttctccacaataccgtgattttctatggagcagacagtgagcaagctgacattgcgaggatgctatataaagacacatgtcatgagctggatgaactgcagctttgcaagaattgcttttacttgtcaaatgctcgtcctgacaactggttctgttatccttgtatacctaatcatgagctggtttgggctaaaatgaaaggttttgggttttggccagccaaagtcatgcagaaagaagacaatcaagtcgacgttcgcttctttggccaccaccaccagagggcctggattccttctgaaaacattcaagatatcacagtcaacattcatcggctgcacgtgaagcgcagtatgggttggaaaaaggcctgtgatgagctggagctgcatcagcgtttcctacgagaagggagattttggaaatctaagaatgaggaccgaggtgaggaagaggcagaatccagtatctcctccaccagtaatgagcagctaaaggtcactcaagaaccaagagcaaagaaaggacgacgtaatcaaagtgtggagcccaaaaaggaagaaccagagcctgaaacagaagcagtaagttctagccaggaaatacccacgatgcctcagcccatcgaaaaagtctccgtgtcaactcagacaaagaagttaagtgcctcttcaccaagaatgctgcatcggagcacccagaccacaaacgacggcgtgtgtcagagcatgtgccatgacaaatacaccaagatcttcaatgacttcaaagaccggatgaagtcggaccacaagcgggagacagagcgtgttgtccgagaagctctggagaagctgcgttctgaaatggaagaagaaaagagacaagctgtaaataaagctgtagccaacatgcagggtgagatggacagaaaatgtaagcaagtaaaggaaaagtgtaaggaagaatttgtagaagaaatcaagaagctggcaacacagcacaagcaactgatttctcagaccaagaagaagcagtggtgctacaactgtgaggaggaggccatgtaccactgctgctggaacacatcctactgctccatcaagtgccagcaggagcactggcacgcggagcacaagcgcacctgccgccggaaaagatgaagctggcccttcccggagtcaccccgatgattactcttttcagacacagcggtttttgtttccaagaagccaaaattgtttagaatttgcttcccattttgcaccagcct

SEQ ID NO: 79344 - protein, 568 aa, Artificial Sequence
  derived and/or modified sequence
MARLTKRRQADTKAIQHLWAAIEIIRNQKQIANIDRITKYMSRVHGMHPKETTRQLSLAVKDGLIVETLTVGCKGSKAGIEQEGYWLPGDEIDWETENHDWYCFECHLPGEVLICDLCFRVYHSKCLSDEFRLRDSSSPWQCPVCRSIKKKNTNKQEMGTYLRFIVSRMKERAIDLNKKGKDNKHPMYRRLVHSAVDVPTIQEKVNEGKYRSYEEFKADAQLLLHNTVIFYGADSEQADIARMLYKDTCHELDELQLCKNCFYLSNARPDNWFCYPCIPNHELVWAKMKGFGFWPAKVMQKEDNQVDVRFFGHHHQRAWIPSENIQDITVNIHRLHVKRSMGWKKACDELELHQRFLREGRFWKSKNEDRGEEEAESSISSTSNEQLKVTQEPRAKKGRRNQSVEPKKEEPEPETEAVSSSQEIPTMPQPIEKVSVSTQTKKLSASSPRMLHRSTQTTNDGVCQSMCHDKYTKIFNDFKDRMKSDHKRETERVVREALEKLRSEMEEEKRQAVNKAVANMQGEMDRKCKQVKEKCKEEFVEEIKKLATQHKQLISQTKKKQWVNTSLF

SEQ ID NO: 79345 - protein, 528 aa, Artificial Sequence
  derived and/or modified sequence
MSRVHGMHPKETTRQLSLAVKDGLIVETLTVGCKGSKAGIEQEGYWLPGDEIDWETENHDWYCFECHLPGEVLICDLCFRVYHSKCLSDEFRLRDSSSPWQCPVCRSIKKKNTNKQEMGTYLRFIVSRMKERAIDLNKKGKDNKHPMYRRLVHSAVDVPTIQEKVNEGKYRSYEEFKADAQLLLHNTVIFYGADSEQADIARMLYKDTCHELDELQLCKNCFYLSNARPDNWFCYPCIPNHELVWAKMKGFGFWPAKVMQKEDNQVDVRFFGHHHQRAWIPSENIQDITVNIHRLHVKRSMGWKKACDELELHQRFLREGRFWKSKNEDRGEEEAESSISSTSNEQLKVTQEPRAKKGRRNQSVEPKKEEPEPETEAVSSSQEIPTMPQPIEKVSVSTQTKKLSASSPRMLHRSTQTTNDGVCQSMCHDKYTKIFNDFKDRMKSDHKRETERVVREALEKLRSEMEEEKRQAVNKAVANMQGEMDRKCKQVKEKCKEEFVEEIKKLATQHKQLISQTKKKQWVNTSLF

SEQ ID NO: 79346 - DNA, 1707 bp, Artificial Sequence
  derived and/or modified sequence
atggccagactgaccaagagaagacaggccgacaccaaggccatccagcacctgtgggccgccatcgagatcatcagaaaccagaagcagatcgccaacatcgacagaatcaccaagtacatgagcagagtgcacggcatgcaccccaaggagaccaccagacagctgagcctggccgtgaaggacggcctgatcgtggagaccctgaccgtgggctgcaagggcagcaaggccggcatcgagcaggagggctactggctgcccggcgacgagatcgactgggagaccgagaaccacgactggtactgcttcgagtgccacctgcccggcgaggtgctgatctgcgacctgtgcttcagagtgtaccacagcaagtgcctgagcgacgagttcagactgagagacagcagcagcccctggcagtgccccgtgtgcagaagcatcaagaagaagaacaccaacaagcaggagatgggcacctacctgagattcatcgtgagcagaatgaaggagagagccatcgacctgaacaagaagggcaaggacaacaagcaccccatgtacagaagactggtgcacagcgccgtggacgtgcccaccatccaggagaaggtgaacgagggcaagtacagaagctacgaggagttcaaggccgacgcccagctgctgctgcacaacaccgtgatcttctacggcgccgacagcgagcaggccgacatcgccagaatgctgtacaaggacacctgccacgagctggacgagctgcagctgtgcaagaactgcttctacctgagcaacgccagacccgacaactggttctgctacccctgcatccccaaccacgagctggtgtgggccaagatgaagggcttcggcttctggcccgccaaggtgatgcagaaggaggacaaccaggtggacgtgagattcttcggccaccaccaccagagagcctggatccccagcgagaacatccaggacatcaccgtgaacatccacagactgcacgtgaagagaagcatgggctggaagaaggcctgcgacgagctggagctgcaccagagattcctgagagagggcagattctggaagagcaagaacgaggacagaggcgaggaggaggccgagagcagcatcagcagcaccagcaacgagcagctgaaggtgacccaggagcccagagccaagaagggcagaagaaaccagagcgtggagcccaagaaggaggagcccgagcccgagaccgaggccgtgagcagcagccaggagatccccaccatgccccagcccatcgagaaggtgagcgtgagcacccagaccaagaagctgagcgccagcagccccagaatgctgcacagaagcacccagaccaccaacgacggcgtgtgccagagcatgtgccacgacaagtacaccaagatcttcaacgacttcaaggacagaatgaagagcgaccacaagagagagaccgagagagtggtgagagaggccctggagaagctgagaagcgagatggaggaggagaagagacaggccgtgaacaaggccgtggccaacatgcagggcgagatggacagaaagtgcaagcaggtgaaggagaagtgcaaggaggagttcgtggaggagatcaagaagctggccacccagcacaagcagctgatcagccagaccaagaagaagcagtgggtgaacaccagcctgttctag

SEQ ID NO: 79347 - DNA, 1587 bp, Artificial Sequence
  derived and/or modified sequence
atgagcagagtgcacggcatgcaccccaaggagaccaccagacagctgagcctggccgtgaaggacggcctgatcgtggagaccctgaccgtgggctgcaagggcagcaaggccggcatcgagcaggagggctactggctgcccggcgacgagatcgactgggagaccgagaaccacgactggtactgcttcgagtgccacctgcccggcgaggtgctgatctgcgacctgtgcttcagagtgtaccacagcaagtgcctgagcgacgagttcagactgagagacagcagcagcccctggcagtgccccgtgtgcagaagcatcaagaagaagaacaccaacaagcaggagatgggcacctacctgagattcatcgtgagcagaatgaaggagagagccatcgacctgaacaagaagggcaaggacaacaagcaccccatgtacagaagactggtgcacagcgccgtggacgtgcccaccatccaggagaaggtgaacgagggcaagtacagaagctacgaggagttcaaggccgacgcccagctgctgctgcacaacaccgtgatcttctacggcgccgacagcgagcaggccgacatcgccagaatgctgtacaaggacacctgccacgagctggacgagctgcagctgtgcaagaactgcttctacctgagcaacgccagacccgacaactggttctgctacccctgcatccccaaccacgagctggtgtgggccaagatgaagggcttcggcttctggcccgccaaggtgatgcagaaggaggacaaccaggtggacgtgagattcttcggccaccaccaccagagagcctggatccccagcgagaacatccaggacatcaccgtgaacatccacagactgcacgtgaagagaagcatgggctggaagaaggcctgcgacgagctggagctgcaccagagattcctgagagagggcagattctggaagagcaagaacgaggacagaggcgaggaggaggccgagagcagcatcagcagcaccagcaacgagcagctgaaggtgacccaggagcccagagccaagaagggcagaagaaaccagagcgtggagcccaagaaggaggagcccgagcccgagaccgaggccgtgagcagcagccaggagatccccaccatgccccagcccatcgagaaggtgagcgtgagcacccagaccaagaagctgagcgccagcagccccagaatgctgcacagaagcacccagaccaccaacgacggcgtgtgccagagcatgtgccacgacaagtacaccaagatcttcaacgacttcaaggacagaatgaagagcgaccacaagagagagaccgagagagtggtgagagaggccctggagaagctgagaagcgagatggaggaggagaagagacaggccgtgaacaaggccgtggccaacatgcagggcgagatggacagaaagtgcaagcaggtgaaggagaagtgcaaggaggagttcgtggaggagatcaagaagctggccacccagcacaagcagctgatcagccagaccaagaagaagcagtgggtgaacaccagcctgttctag

SEQ ID NO: 79348 - DNA, 1707 bp, Artificial Sequence
  derived and/or modified sequence
atggcccggctcactaaacgccgccaggctgatactaaagcaatacagcacttgtgggctgctatcgagattatcaggaatcaaaagcagattgccaatattgatcgtatcactaaatacatgtccagagttcacggaatgcaccccaaggaaacgacaagacagctgagcctggccgtcaaggacggtctgattgtggagacgctgaccgttggctgtaaagggtcaaaagctgggatcgaacaggagggatattggctgcccggggacgaaatcgactgggagacagaaaaccatgactggtattgtttcgagtgccaccttccaggagaggtgcttatctgtgacctgtgtttcagggtctatcactcgaagtgtttgagcgacgagtttcggcttagagacagctctagcccttggcaatgccctgtttgtcgttccatcaaaaaaaaaaatactaacaaacaggagatgggtacttacctacggttcatcgtcagccgtatgaaagaacgagctatagacctaaacaagaaaggcaaggataataaacacccaatgtatcgccgattagtgcactccgctgtggatgtccctacgatccaggaaaaggtgaacgaggggaagtataggagttacgaagaattcaaagctgatgcacagctgctgctgcataacactgtgattttctacggcgccgactcagaacaggccgatatcgccagaatgctgtacaaggatacatgccacgagctcgacgaacttcagctctgcaaaaattgtttttatctctccaatgctcggcctgacaactggttctgctacccttgcatccccaaccatgagctggtctgggccaagatgaaggggttcggattctggcccgccaaggtgatgcaaaaggaggacaaccaggttgatgttcgattcttcggacatcaccatcagagagcctggattccatccgagaatatacaggacattactgttaatattcatcggttgcacgtcaaacggtccatgggctggaagaaggcttgcgacgagttagagctgcatcaacggttcttgagagaaggacgcttttggaaaagcaaaaacgaagaccggggggaggaggaggccgagtcaagcatttcttctactagcaacgaacagctgaaagttacccaggagccacgggcgaaaaaaggaagacggaatcaatcagtcgagcctaaaaaagaagaacccgaaccagaaacggaggcagtgtcgagctcacaggagatccccacaatgccacagcccatagagaaagtctcagtgtcaactcaaacaaagaagctgtctgcttccagtcccagaatgctgcacaggagcactcaaaccaccaacgacggggtgtgccaatccatgtgccacgataaatatactaagatcttcaacgacttcaaggacagaatgaagagtgaccataagcgcgagactgagagagtagttcgcgaagcacttgagaaactgagatcagagatggaggaggaaaaacggcaggcggttaataaggcggtggcaaatatgcagggggagatggatagaaaatgcaaacaggtgaaagagaaatgtaaggaagaattcgtcgaagagatcaaaaaactggccacccagcataagcagttaataagccagactaagaagaagcaatgggtgaacacttcattgttttag

SEQ ID NO: 79349 - DNA, 1587 bp, Artificial Sequence
  derived and/or modified sequence
atgagtagggtgcatggcatgcatcccaaagagacaactcggcagctgtcactggcggtaaaagatggactcatcgttgaaacgctcaccgtgggatgtaagggcagcaaggctggcatcgagcaggagggttactggttgcctggtgacgaaattgactgggagaccgagaaccacgactggtactgcttcgagtgtcacctgcctggagaagtgctaatctgcgacctatgttttcgcgtgtaccacagcaagtgcctgagcgacgagttcagactgcgagactcgagttctccctggcagtgtccagtgtgccgaagcataaagaaaaagaataccaataaacaggagatggggacttacctacgattcatagtaagtagaatgaaggaacgtgctatcgaccttaataagaaggggaaggataataaacaccccatgtacagaagactggtgcattctgccgtggacgtgcccacaatccaagagaaggtcaacgagggcaaatataggagctatgaagagtttaaagcagatgcgcagctgttgcttcacaacacggtcatcttctacggtgccgattcagagcaggccgacatagcgagaatgttgtacaaggatacatgccacgaattggacgagctgcagctgtgcaagaactgcttttatctgagcaacgccaggcccgataactggttctgttatccttgcattcccaaccacgagcttgtctgggccaagatgaaggggtttggtttctggcccgcgaaagtgatgcagaaagaggataaccaggtggatgtccgattctttgggcaccaccaccaacgggcctggattccatccgaaaacatccaagacattacagtcaacatccataggttacacgttaaaagatcaatgggctggaagaaggcctgcgacgaactcgagttacatcagcgcttcttaagagagggaagattctggaaatccaaaaatgaggatcggggggaagaggaagccgaatcttcaattagtagcacatccaatgagcaactgaaagtgacgcaagagcctcgtgccaaaaagggacgccggaatcagtcagtggagcctaagaaagaggagccagagcctgagacggaggctgtttcctcctctcaggaaattccaactatgccgcagccgatcgagaaggtgtctgtgtcaacccagaccaagaagctgtcagccagttccccccggatgttacataggtcgacccagaccacaaatgacggggtatgccaatcaatgtgtcatgacaaatacaccaagatttttaacgactttaaggacagaatgaaatcggatcataagagggaaacggagcgagtggtgagagaagctctcgagaagctgcgctccgagatggaggaggagaaacgccaagccgtgaataaagcagttgctaatatgcagggcgaaatggaccggaagtgcaaacaagtgaaggaaaagtgtaaggaggagtttgtggaagagattaaaaagttggctacccagcacaagcagctgatatctcaaactaaaaaaaaacaatgggtgaacacatccctgttttag

SEQ ID NO: 79350 - DNA, 1707 bp, Artificial Sequence
  derived and/or modified sequence
atggcccggctgaccaagaggcggcaggccgacaccaaggccatccagcacctgtgggccgccatcgagatcatccggaaccagaagcagatcgccaacatcgaccgcatcaccaagtacatgagccgggtgcacggcatgcaccccaaggagaccacccggcagctgagcctggccgtgaaggatggcctgattgtggagaccctgactgtgggctgcaagggcagcaaggccggcatcgagcaggagggctactggctgcctggagatgaaattgactgggagacagaaaatcatgactggtactgctttgagtgccacctgcctggagaggtgctgatctgtgacctgtgcttccgggtgtaccacagcaagtgcctgagtgatgagttccggctgcgggacagcagcagcccctggcagtgccctgtgtgccgcagcatcaagaagaagaacaccaacaagcaggagatgggcacctacctgcgcttcatcgtgtccaggatgaaggagcgggccatcgacctgaacaagaagggcaaggacaacaagcaccccatgtacagaaggctggtgcacagcgctgtggatgtgcccaccatccaggagaaggtgaatgaaggcaagtaccgctcctatgaggagttcaaggcagatgcccagctgctgctgcacaacacagtcatcttctatggagctgacagcgagcaggccgacatcgccaggatgctgtacaaggacacctgccacgagctggatgagctgcagctgtgcaagaactgcttctacctgagcaatgcccggccagacaactggttctgctacccctgcatccccaaccacgagctggtgtgggccaagatgaagggcttcggcttctggccagccaaggtgatgcagaaggaggacaaccaggtggatgtgcgcttcttcggccaccaccaccagagggcctggatccccagcgagaacatccaggacatcaccgtgaacatccaccggctgcacgtgaagaggtccatgggctggaagaaggcctgtgatgagctggagctgcaccagcgcttcctgcgggagggccgcttctggaagagcaagaatgaagatagaggagaggaggaggccgagagcagcatcagcagcaccagcaatgagcagctgaaggtgacccaggagccccgggccaagaagggcagaagaaaccagagcgtggagcccaagaaggaggagcctgagcctgagacagaagctgtgagcagcagccaggagatccccaccatgccccagcccatcgagaaggtgtctgtgtccacccagaccaagaagctgagcgccagcagccccaggatgctgcacaggagcacccagaccaccaatgatggagtgtgccagagcatgtgccacgacaagtacaccaagatcttcaatgacttcaaggacaggatgaagagtgaccacaagcgggagacagagcgggtggtgcgggaggccctggagaagctgcggtctgagatggaggaggagaagaggcaggccgtgaacaaggctgtggccaacatgcagggcgagatggacaggaagtgcaagcaggtgaaggagaagtgcaaggaggagtttgtggaggagatcaagaagctggccacccagcacaagcagctgatcagccagaccaagaagaagcagtgggtgaacaccagcctcttctag

SEQ ID NO: 79351 - DNA, 1587 bp, Artificial Sequence
  derived and/or modified sequence
atgagccgggtgcacggcatgcaccccaaggagaccacccggcagctgagcctggccgtgaaggatggcctgattgtggagaccctgactgtgggctgcaagggcagcaaggccggcatcgagcaggagggctactggctgcctggagatgaaattgactgggagacagaaaatcatgactggtactgctttgagtgccacctgcctggagaggtgctgatctgtgacctgtgcttccgggtgtaccacagcaagtgcctgagtgatgagttccggctgcgggacagcagcagcccctggcagtgccctgtgtgccgcagcatcaagaagaagaacaccaacaagcaggagatgggcacctacctgcgcttcatcgtgtccaggatgaaggagcgggccatcgacctgaacaagaagggcaaggacaacaagcaccccatgtacagaaggctggtgcacagcgctgtggatgtgcccaccatccaggagaaggtgaatgaaggcaagtaccgctcctatgaggagttcaaggcagatgcccagctgctgctgcacaacacagtcatcttctatggagctgacagcgagcaggccgacatcgccaggatgctgtacaaggacacctgccacgagctggatgagctgcagctgtgcaagaactgcttctacctgagcaatgcccggccagacaactggttctgctacccctgcatccccaaccacgagctggtgtgggccaagatgaagggcttcggcttctggccagccaaggtgatgcagaaggaggacaaccaggtggatgtgcgcttcttcggccaccaccaccagagggcctggatccccagcgagaacatccaggacatcaccgtgaacatccaccggctgcacgtgaagaggtccatgggctggaagaaggcctgtgatgagctggagctgcaccagcgcttcctgcgggagggccgcttctggaagagcaagaatgaagatagaggagaggaggaggccgagagcagcatcagcagcaccagcaatgagcagctgaaggtgacccaggagccccgggccaagaagggcagaagaaaccagagcgtggagcccaagaaggaggagcctgagcctgagacagaagctgtgagcagcagccaggagatccccaccatgccccagcccatcgagaaggtgtctgtgtccacccagaccaagaagctgagcgccagcagccccaggatgctgcacaggagcacccagaccaccaatgatggagtgtgccagagcatgtgccacgacaagtacaccaagatcttcaatgacttcaaggacaggatgaagagtgaccacaagcgggagacagagcgggtggtgcgggaggccctggagaagctgcggtctgagatggaggaggagaagaggcaggccgtgaacaaggctgtggccaacatgcagggcgagatggacaggaagtgcaagcaggtgaaggagaagtgcaaggaggagtttgtggaggagatcaagaagctggccacccagcacaagcagctgatcagccagaccaagaagaagcagtgggtgaacaccagcctcttctag

SEQ ID NO: 79352 - DNA, 1707 bp, Artificial Sequence
  derived and/or modified sequence
atggcccggctgaccaagcggcggcaggccgacaccaaggccatccagcacctgtgggcagccattgaaatcattcgcaaccagaaacagattgcgaacattgatcggatcacaaaatatatgagcagggtccacggaatgcacccgaaagagacaaccagacagttatctttagctgtgaaagatggcctcatcgtggaaaccctcaccgtgggatgtaaagggtccaaggctggaatcgagcaggaagggtattggttacctggtgatgaaatcgattgggaaacggagaatcacgattggtattgcttcgagtgtcacctccctggcgaggtgttaatttgcgacttgtgctttagagtctaccatagtaagtgtctcagcgacgagtttcgcctgagagactctagctctccgtggcagtgcccggtttgtcgttccatcaagaaaaaaaatacaaataagcaggagatgggaacctatctcaggtttattgtttcacgcatgaaggagcgcgctatcgatctgaataagaagggcaaggataacaaacatcctatgtaccgacggctggtgcattcagctgttgacgtccctacaatacaggaaaaagtgaacgaggggaagtaccggtcctacgaggaattcaaagcagatgcacagttattgcttcataatacagtgatattctacggtgccgacagtgagcaggcagatatagccagaatgctgtacaaggacacttgccacgagctcgacgagctccagctgtgtaagaactgcttttacctgagcaacgcacgacccgataactggttttgctacccatgcattcctaaccacgaactcgtgtgggccaaaatgaaaggcttcgggttctggcccgctaaggtgatgcagaaagaagacaaccaggttgacgtgcgtttctttggacaccaccaccagcgcgcttggattccaagcgagaacatccaggacattaccgtcaatatacatcgtctacacgtgaagagatccatgggttggaaaaaagcctgtgacgaattggagttacatcagcgcttcctaagggaagggcgcttttggaagagtaagaacgaagatcgcggtgaagaggaggccgaaagctctatctcttcaacctcaaacgagcagctgaaggtgacacaggaaccaagagctaaaaagggacgacggaaccagtccgtggagccaaaaaaggaggagcccgagcccgagacagaagccgtttcctcaagtcaggaaattcccacaatgccccaacccatcgaaaaagttagcgtcagcactcagaccaagaagctttctgcctcatcgcctcgaatgctgcatagaagtacacaaaccacaaacgacggagtctgccaatctatgtgtcatgataagtacactaaaatttttaacgatttcaaggacaggatgaagtctgatcataagcgagagacggagcgggtcgttagggaggccctcgaaaagctacggtccgagatggaggaggaaaagagacaggccgtgaataaggctgttgcgaatatgcagggggagatggacaggaaatgtaagcaagtcaaagagaaatgtaaagaggaatttgtcgaagagatcaagaagctggctacccaacacaaacagcttatctctcaaacgaagaaaaaacaatgggtgaacaccagcctcttttag

SEQ ID NO: 79353 - DNA, 1587 bp, Artificial Sequence
  derived and/or modified sequence
atgagccgggtgcacggcatgcaccccaaggagaccacccggcagctgtctctggctgtcaaagacgggctgatcgttgagactctgacagtggggtgcaagggctctaaggctggcatcgagcaggaaggttattggttgcctggagatgagatagactgggagactgaaaaccacgattggtactgttttgagtgccatctaccgggtgaggtgctgatctgtgacctatgtttcagagtctaccactccaagtgcctgtcagatgagttccgactgcgtgacagctcctccccatggcagtgccccgtgtgtcggagcatcaagaagaagaatactaacaagcaggagatggggacgtacctgcgttttatcgtgagcaggatgaaagagcgagctattgatcttaataagaagggaaaggacaacaagcaccccatgtaccggcggctggtgcactccgccgtggacgtgcccacaatccaggagaaagtgaacgaaggcaaatatcgcagttatgaagagtttaaggccgatgctcaactgctcctgcataacaccgtgatcttctatggcgccgatagcgagcaggccgatatcgctaggatgctgtataaagatacttgccacgagctcgacgagctccaactatgtaaaaactgtttctatcttagcaatgccaggccagataactggttttgctacccctgcatacctaaccacgaactggtttgggcgaaaatgaaggggttcggcttttggccggctaaagtgatgcagaaagaggataaccaggtggatgttcggttcttcggccatcatcaccagcgagcttggatccctagcgagaacatccaagatatcacagtgaacatacatcggctccacgttaagcgctccatggggtggaaaaaggcatgtgacgaattagaactgcaccagcgcttcctccgtgaaggcaggttctggaagtctaagaatgaagatcgcggtgaagaagaggccgaatctagtatctcatccacctctaatgagcagttaaaagtcacccaggaaccacgagccaagaaagggagacgtaatcagagtgtggaacctaagaaagaagagccagaaccagagacagaagccgtttcctcatcacaggaaatccctaccatgccccagccgatcgaaaaagtttccgtcagcacccagaccaaaaaactgtccgcgagctcacctaggatgttgcaccgaagtacacagaccaccaacgacggcgtatgccaatctatgtgtcatgataagtacactaagattttcaatgattttaaggatagaatgaagagcgaccataaaagagagactgaaagggtcgtgagagaggctctggagaaacttagaagcgaaatggaagaggaaaagcgacaggcagtcaacaaagccgtcgccaacatgcagggagaaatggataggaaatgtaagcaagtgaaagaaaagtgcaaagaggagttcgtggaggaaatcaagaaactggccacacaacacaagcagctgatcagccagacgaagaagaaacaatgggtaaatacatcgttattttag

SEQ ID NO: 79354 - DNA, 1707 bp, Artificial Sequence
  derived and/or modified sequence
atggcgagactgactaaacgacgccaagccgacactaaagcaattcaacacctgtgggccgcaattgagatcattcggaaccagaagcagattgcaaacatcgacagaatcactaaatacatgtctagggttcacggtatgcacccaaaggagaccacccggcagctgtcactggcggtcaaagacggacttattgtggaaactctcactgtcggctgcaaaggtagcaaagcagggatagaacaggagggttactggctgccaggagacgaaatcgactgggaaacggagaatcatgattggtactgttttgaatgtcatctgccaggagaggtgcttatttgtgacctgtgcttccgtgtgtaccattctaaatgcttgagcgacgaattccggctgcgcgattcatccagtccttggcagtgccctgtgtgcagatcgattaaaaagaaaaataccaataaacaagagatggggacatacctgaggtttatagtgtctagaatgaaggaacgtgctatagacctcaacaagaaggggaaggacaacaagcatcccatgtaccggcgacttgttcactcagctgtcgatgtgccaaccatccaggagaaagtgaatgaagggaagtacagatcttacgaggagtttaaagctgacgcgcaacttctgcttcataacactgtaatattttacggagcagactccgaacaggcagatatcgctagaatgctttataaggatacttgccacgaactcgatgaattacagctttgtaagaattgtttctacctaagcaacgccagacccgacaactggttctgctacccatgtatccccaatcatgagttagtttgggctaaaatgaaagggttcggcttctggcctgccaaagtgatgcagaaagaagacaatcaagtggatgtacgttttttcgggcatcaccaccaacgtgcttggattccttcagaaaatattcaagacatcacagtaaatatccatcggcttcacgttaaacgctccatggggtggaaaaaggcgtgcgacgaactcgagctccaccagcggttccttcgcgagggaagattttggaaatctaaaaacgaggacagaggggaggaggaagcggaatcttcaatctcctccacatctaatgagcaactaaaagtgacgcaggagcccagggccaagaaaggcagaagaaatcaaagtgtcgagcctaaaaaagaggaacccgagccagagacagaggctgtgagtagttctcaggagattccaaccatgccccaacctatcgagaaagtttctgtgtccacacaaacaaagaaacttagcgcaagctcaccacggatgttgcacagatcaactcagaccaccaatgatggcgtgtgccagagcatgtgccatgataagtataccaaaatctttaacgactttaaagacagaatgaaaagcgatcacaaaagggaaaccgaacgggtggtgagggaagcactggagaaactcagatctgaaatggaggaggaaaagcggcaggcagtgaataaggccgtggcgaacatgcagggtgaaatggaccgaaaatgtaagcaggtaaaggagaaatgtaaggaggagttcgttgaggagattaagaagctcgcaacccagcataaacagttgataagccagactaagaaaaaacagtgggtgaatacaagtctcttttag

SEQ ID NO: 79355 - DNA, 1587 bp, Artificial Sequence
  derived and/or modified sequence
atgtctagggtccatggaatgcacccaaaagagaccacacgccagctgtctttagcagtgaaggacggattgattgtggaaacattaaccgtgggctgcaaaggttctaaagcagggatcgagcaggagggctactggctgccgggtgatgagatcgattgggagactgagaatcatgattggtattgcttcgaatgtcatttaccaggtgaggtcttgatatgcgacctctgttttagagtgtatcacagtaaatgccttagtgatgagttccggttacgggatagttctagcccttggcaatgccccgtttgccggagtataaagaagaaaaataccaacaagcaggagatgggtacatacctcaggttcatcgttagcaggatgaaagagagggcaatagatctcaataaaaaaggcaaggacaacaagcacccgatgtacagaaggctggtgcattccgccgtcgatgtgcctacaatacaggaaaaggttaacgagggcaaataccggagctatgaggagtttaaggcggacgctcaactcttgctgcataacaccgttatattttatggcgctgacagcgaacaggccgacatcgccagaatgctgtataaggatacctgtcatgagttagacgagctgcaattatgtaaaaactgcttctacctcagcaacgccaggcccgataactggttttgttacccatgcatccctaaccatgagctggtgtgggccaagatgaaggggtttggattttggcccgctaaagtgatgcaaaaggaagataaccaggtcgacgttagattctttggtcatcaccaccaacgtgcatggatccccagtgaaaacatacaggatatcactgtcaacatccaccgcctccacgtgaagcgctcaatgggctggaagaaggcgtgtgatgagctggagctccaccagcgatttctgcgcgagggacggttttggaagtcaaagaacgaggatagaggtgaagaagaagctgaaagcagtatctcctctacctctaatgaacagttaaaggtgactcaggagcctcgggcaaagaaaggaagacggaatcagagtgtcgaacctaaaaaggaggaacctgaaccagaaacggaggctgtgtctagctctcaggaaatccccactatgccccaacccatcgagaaagtttctgtatccactcagacaaaaaagctttcagccagtagtccacgcatgctgcatagaagtacacagacaactaacgacggagtgtgtcaaagcatgtgccatgataaatataccaaaatatttaacgatttcaaggacagaatgaagagcgaccacaagagggagaccgaacgggtggtgcgggaggccctggaaaaacttcggtcggagatggaggaggagaaaaggcaggccgtgaacaaggcagtggcaaatatgcagggcgaaatggaccgaaagtgtaaacaagtgaaagagaagtgtaaggaggaattcgtggaagagatcaagaaactggccactcagcataaacagcttatctctcagacaaaaaagaaacagtgggtcaacactagtctgttttag

SEQ ID NO: 79356 - DNA, 1707 bp, Artificial Sequence
  derived and/or modified sequence
atggcacgtttaacaaaaagacgacaggcggatacaaaagctatccagcatctttgggcagccattgagattatacggaaccagaagcagattgccaacattgaccgtattacaaagtatatgtctcgagtccacggtatgcaccctaaagagaccacccgtcagctgagcttagctgtgaaagatggtcttattgtcgaaactctaacagtgggctgcaaaggttcaaaagctggtattgaacaagaaggatattggttgccaggagatgagattgactgggaaacagaaaatcatgactggtattgttttgaatgccatttgcctggagaggtgttgatatgtgacctgtgttttcgtgtgtatcattccaagtgtttgtctgatgagttcaggcttagagacagcagtagtccctggcagtgcccagtttgcaggagcattaagaagaagaatacaaacaaacaggagatgggcacatacctcagattcattgtctcccgcatgaaggagagggctatagatcttaataaaaaggggaaggacaataaacacccgatgtacaggaggctggtgcactcagctgtggacgttcccaccattcaagagaaagtgaatgaagggaaataccgaagttatgaagagttcaaagctgatgcccaattgcttctccacaataccgtgattttctatggagcagacagtgagcaagctgacattgcgaggatgctatataaagacacatgtcatgagctggatgaactgcagctttgcaagaattgcttttacttgtcaaatgctcgtcctgacaactggttctgttatccttgtatacctaatcatgagctggtttgggctaaaatgaaaggttttgggttttggccagccaaagtcatgcagaaagaagacaatcaagtcgacgttcgcttctttggccaccaccaccagagggcctggattccttctgaaaacattcaagatatcacagtcaacattcatcggctgcacgtgaagcgcagtatgggttggaaaaaggcctgtgatgagctggagctgcatcagcgtttcctacgagaagggagattttggaaatctaagaatgaggaccgaggtgaggaagaggcagaatccagtatctcctccaccagtaatgagcagctaaaggtcactcaagaaccaagagcaaagaaaggacgacgtaatcaaagtgtggagcccaaaaaggaagaaccagagcctgaaacagaagcagtaagttctagccaggaaatacccacgatgcctcagcccatcgaaaaagtctccgtgtcaactcagacaaagaagttaagtgcctcttcaccaagaatgctgcatcggagcacccagaccacaaacgacggcgtgtgtcagagcatgtgccatgacaaatacaccaagatcttcaatgacttcaaagaccggatgaagtcggaccacaagcgggagacagagcgtgttgtccgagaagctctggagaagctgcgttctgaaatggaagaagaaaagagacaagctgtaaataaagctgtagccaacatgcagggtgagatggacagaaaatgtaagcaagtaaaggaaaagtgtaaggaagaatttgtagaagaaatcaagaagctggcaacacagcacaagcaactgatttctcagaccaagaagaagcagtgggtaaataccagtcttttttag

SEQ ID NO: 79357 - DNA, 2285 bp, Artificial Sequence
  derived and/or modified sequence
agtgttcttgcagggctgctgatgggtggtcctgttcttttcgcggtcctgtttgcgcagagatgaaacggggaacttagcgtatccctaccgctctttttgatgacaggagtaaagggctgttcagactacctaaacaatgttgttaagagaagcactcgtacttctcagacttcgctgttccggaccccgcgagccaggggcaggcaccgggtccacccggggctgagctgcggcggcgcctgacaatgccccctcgcgccccggcctcggcgcccgctcccggctccagcgcgcctgcacgtacgtagccttcacgtgtgtgtggatacggagtgcatgtgtggagacagaggaatatgctccaacaaatttcggatagaggcgccgaagacaggacgtggggaagctaaagaagtaaacaggtcatggcacgtttaacaaaaagacgacaggcggatacaaaagctatccagcatctttgggcagccattgagattatacggaaccagaagcagattgccaacattgaccgtattacaaagtatatgtctcgagtccacggtatgcaccctaaagagaccacccgtcagctgagcttagctgtgaaagatggtcttattgtcgaaactctaacagtgggctgcaaaggttcaaaagctggtattgaacaagaaggatattggttgccaggagatgagattgactgggaaacagaaaatcatgactggtattgttttgaatgccatttgcctggagaggtgttgatatgtgacctgtgttttcgtgtgtatcattccaagtgtttgtctgatgagttcaggcttagagacagcagtagtccctggcagtgcccagtttgcaggagcattaagaagaagaatacaaacaaacaggagatgggcacatacctcagattcattgtctcccgcatgaaggagagggctatagatcttaataaaaaggggaaggacaataaacacccgatgtacaggaggctggtgcactcagctgtggacgttcccaccattcaagagaaagtgaatgaagggaaataccgaagttatgaagagttcaaagctgatgcccaattgcttctccacaataccgtgattttctatggagcagacagtgagcaagctgacattgcgaggatgctatataaagacacatgtcatgagctggatgaactgcagctttgcaagaattgcttttacttgtcaaatgctcgtcctgacaactggttctgttatccttgtatacctaatcatgagctggtttgggctaaaatgaaaggttttgggttttggccagccaaagtcatgcagaaagaagacaatcaagtcgacgttcgcttctttggccaccaccaccagagggcctggattccttctgaaaacattcaagatatcacagtcaacattcatcggctgcacgtgaagcgcagtatgggttggaaaaaggcctgtgatgagctggagctgcatcagcgtttcctacgagaagggagattttggaaatctaagaatgaggaccgaggtgaggaagaggcagaatccagtatctcctccaccagtaatgagcagctaaaggtcactcaagaaccaagagcaaagaaaggacgacgtaatcaaagtgtggagcccaaaaaggaagaaccagagcctgaaacagaagcagtaagttctagccaggaaatacccacgatgcctcagcccatcgaaaaagtctccgtgtcaactcagacaaagaagttaagtgcctcttcaccaagaatgctgcatcggagcacccagaccacaaacgacggcgtgtgtcagagcatgtgccatgacaaatacaccaagatcttcaatgacttcaaagaccggatgaagtcggaccacaagcgggagacagagcgtgttgtccgagaagctctggagaagctgcgttctgaaatggaagaagaaaagagacaagctgtaaataaagctgtagccaacatgcagggtgagatggacagaaaatgtaagcaagtaaaggaaaagtgtaaggaagaatttgtagaagaaatcaagaagctggcaacacagcacaagcaactgatttctcagaccaagaagaagcagtgggtaaataccagtcttttttagacccttatttctgaaaatgtaccacaggtatgatgcccgttaattcagaaggtagctgtggcacatgcagaagatgtttctgaaataagatcaaatgtgaaatggtcagctttagttttaaaaattttattaaaagtcctatgatctctc

SEQ ID NO: 79358 - protein, 247 aa, Artificial Sequence
  derived and/or modified sequence
MAARVLRARGAAWAGGLLQRAAPCSLLPRLRTWTSSSNRSREDSWLKSLFVRKVDPRKDAHSNLLAKKETSNLYKLQFKRCCQRFTKINTTLVLWWGLGTRGMASRTKLEFLEFRKARSDMLLSRKNQLLLEFSFWNEPVPRSGPNIYELRSYQLRPGTMIEWGNYWARAIRFRQDGNEAVGGFFSQIGQLYMVHHLWAYRDLQTREDIRNAAWHKHGWEELVYYTVPLIQEMESRIMIPLKTSPLQ

SEQ ID NO: 79359 - DNA, 744 bp, Artificial Sequence
  derived and/or modified sequence
atggccgccagggtgctgagagcccggggggctgcatgggcgggggggttgctgcagagggccgctccttgcagcctcctgcctcgtctcaggacctggacctctagttccaacaggagtcgcgaggattcctggctgaaaagccttttcgttagaaaggtggatcctaggaaagatgcgcatagcaacctcttggccaaaaaagagacctccaatttgtacaagcttcagttcaaaagatgctgtcagcgatttactaaaataaacacaacattggtcctgtggtggggactgggaacccgtgggatggctagcagaactaaactcgagtttctggagtttcggaaggcccgtagcgatatgctgttgtccaggaagaaccagttactcctggaattcagtttttggaatgagccagtgcctcggtcgggccccaatatctatgaacttagatcctatcagctacggcccggaactatgatcgaatggggcaattactgggcccgggctatcaggtttagacaggacggtaatgaggccgtcggcgggtttttttctcagattgggcaactgtatatggtgcatcatttgtgggcctaccgagacctgcaaacgagggaggatatcaggaacgccgcctggcacaagcacggatgggaagaactcgtgtactacaccgtgccactgatacaggagatggagagtcgcataatgattcctctgaagacatcacctctgcagtag

SEQ ID NO: 79360 - DNA, 1882 bp, Artificial Sequence
  derived and/or modified sequence
gggcggtgggagccgaggcgccgagcaagatggcggcgcgagtgctgcgcgcccgcggagcggcctgggccggcggcctcctgcagcgggcggccccctgcagcctcctgcccaggctccggacatggacatcttccagcaacagatctcgagaagacagctggctaaaatccttatttgtccggaaagttgatccaagaaaagatgcccactccaatctcctagccaaaaaggaaacaagcaatctatacaaattacagttcaagaggtgttgccaaagattcacgaagataaacactacccttgtactttggtggggacttggaacacgtggtatggcgagcaggaccaagctggaatttttggaatttcgtaaggcaagaagtgacatgcttctctccaggaagaatcagctcctgttggagttcagtttctggaatgagcctgtgccaagatccggacctaatatatatgaactcaggtcttaccaactccgaccaggaaccatgattgaatggggcaattactgggctcgtgcaatccgcttcagacaggatggtaacgaagccgtcggaggattcttctctcagattgggcagctgtacatggtgcaccatctttgggcttacagggatcttcagaccagggaagacatacggaatgcagcatggcacaaacatggctgggaggaattggtatattacacagttccacttattcaggaaatggaatccagaatcatgatcccactgaagacctcgcccctccagtaaagctgtagagtttctatgtgcctacatacatttctgtgacaagtatttgtcgtaaattaattttaattgtgtatcaagtgaaaaagaaacactgaggttttaagctgctgtatatagcttgtgagaaacctcttttctttaaaatttacataatcacaagaaaggaaagaattacagttggactgattgtgacagtgccttgtcgtcctctttgaaacaccccgtgttgtccagtataccttataacactgagccacttctccccaccctccagaaggggtccacgttgaattctgaatcatcttgaaaataagattccaaccacaaaaaaaatttagccatttctttactaaaaaaaaccaaaaaacaaatctgttttataatcacagatttttagacaaatttcttgtatcaggaagaaatacaaattttgtcatgtttctcaagcagtttttctgagtagtttctgaggaggaacaaattacaagtgtacccaataactgaaaatgttttaactcactctcatttgtaagcagtccacatagtagacaatgggttttccaagctgggcaaggtacatttaatcagtaaatcagtttcacatcatgtattgtgatgtttcaatgtgagacacaaaaacaatggcttgaaacttgtgtatcatatgtgattttgaaatgaacaccttgaatagcactaatttttatttgtggtatttttctataacaaaacaagtagctctaggaaaagaggttttattttgtaaacgatcatttgtgacctcagacactctctggctaatattttaataagctcacagcagataattctgagatcatgggtgaggggtggtgcatgttgagatttaaattggcataaagctgcatactttttgtctagctgtttgatttcattttttaatatagtatgccaattttgtgactgttaccatgtgaaagtcctgttgaaatgaacaattgtctgccccacaatcaagaatgtatgtgtaaagtgtgaataaatctcatatcaaatgtcaaacttttacatgtgaatgattttctcaaagaacatagaaaagtcaataaaatcctcttaatttccacata

SEQ ID NO: 79361 - DNA, 744 bp, Artificial Sequence
  derived and/or modified sequence
atggccgcccgggtgctgcgggcccggggagctgcctgggccggcggcctgctgcagagagctgccccctgcagcctgctgccccggctgcggacctggaccagcagcagcaacagaagccgggaggacagctggctgaagagcctgtttgtgaggaaggtggaccccaggaaggatgcccacagcaacctgctggccaagaaggagaccagcaacctgtacaagctgcagttcaagcgctgctgccagcgcttcaccaagatcaacaccaccctggtgctgtggtggggcctgggcacccggggcatggccagcaggaccaagctggagttcctggagttcaggaaggcccggagtgacatgctgctgagcaggaagaaccagctgctgctggagttctccttctggaatgaacctgtgcccaggagcggccccaacatctatgagctgcggagctaccagctgcggcccggcaccatgattgagtggggcaactactgggcccgggccatccgcttccggcaggatggaaatgaggccgtgggcggcttcttcagccagatcggccagctgtacatggtgcaccacctgtgggcctacagagacctgcagacccgggaggacatcagaaatgctgcctggcacaagcacggctgggaggagctggtgtactacacagtgcccctcatccaggagatggagagccgcatcatgatccccctgaagaccagccccctgcagtag

SEQ ID NO: 79362 - DNA, 744 bp, Artificial Sequence
  derived and/or modified sequence
atggccgcccgggtgctgcgggcccggggcgccgcctgggccggcggactgcttcagcgcgctgcgccatgctcgcttctcccacgtctgcgcacttggacatccagttcaaacaggagcagagaagattcctggttgaagtctctgtttgtcaggaaggtggatccaaggaaggacgcacattctaacctcctggccaagaaagagacttcaaacctttacaaacttcagtttaagcggtgttgccaacgttttactaagatcaatacaaccttggtgctctggtgggggcttggaacccgtgggatggcgtcccggactaaattagaattcctggagtttaggaaggcccgcagtgacatgttgctgtcacgcaagaaccagttgttgctggaattttctttctggaatgagcctgtgccaaggagcggtccgaatatttacgaacttaggtcataccagctacgaccaggcacaatgattgagtgggggaattactgggcaagggccataaggttcaggcaggatgggaacgaagccgtgggcgggttcttctcccagattggccagttatatatggttcaccacttatgggcttaccgtgatctgcagaccagagaggacattcgaaacgccgcctggcataagcacgggtgggaggagctcgtgtattataccgtcccacttattcaagagatggaaagcagaatcatgattcctctcaagaccagtccactccagtag

SEQ ID NO: 79363 - DNA, 744 bp, Artificial Sequence
  derived and/or modified sequence
atggccgctagggtcttgagagctagaggagcagcatgggctggcggtttgctgcaaagagcagccccttgtagccttctccccagactccgaacctggacctcaagctctaatcgcagcagagaggacagctggttgaagtctctgttcgtgcgcaaagtggaccctcgaaaggatgcccacagcaacttactcgcaaagaaggagacttcaaacttgtacaagctccagttcaagcgttgttgtcagcgatttaccaagataaacaccactctcgtgctatggtggggtctgggcacccgcggaatggcaagcaggacaaaactggaattccttgagttccgaaaggcacggagcgatatgctgctctcccggaagaaccagcttctcctggaattctccttttggaacgagcccgtcccaagatcaggaccaaatatatatgaactgagaagctatcagttgagacccggtactatgatcgagtggggcaactactgggctagggccatcaggttccgtcaggatgggaatgaggccgttggcggatttttctcacagatcgggcaactttatatggtccatcatttatgggcctatcgagacttgcaaaccagggaggatattcggaatgcggcttggcataaacacggttgggaagagttggtatactacacagtgcccctcattcaagagatggagtccagaataatgatacctctcaagacttccccactgcagtag

SEQ ID NO: 79364 - DNA, 744 bp, Artificial Sequence
  derived and/or modified sequence
atggccgccagagtgctgagagccagaggcgccgcctgggccggcggcctgctgcagagagccgccccctgcagcctgctgcccagactgagaacctggaccagcagcagcaacagaagcagagaggacagctggctgaagagcctgttcgtgagaaaggtggaccccagaaaggacgcccacagcaacctgctggccaagaaggagaccagcaacctgtacaagctgcagttcaagagatgctgccagagattcaccaagatcaacaccaccctggtgctgtggtggggcctgggcaccagaggcatggccagcagaaccaagctggagttcctggagttcagaaaggccagaagcgacatgctgctgagcagaaagaaccagctgctgctggagttcagcttctggaacgagcccgtgcccagaagcggccccaacatctacgagctgagaagctaccagctgagacccggcaccatgatcgagtggggcaactactgggccagagccatcagattcagacaggacggcaacgaggccgtgggcggcttcttcagccagatcggccagctgtacatggtgcaccacctgtgggcctacagagacctgcagaccagagaggacatcagaaacgccgcctggcacaagcacggctgggaggagctggtgtactacaccgtgcccctgatccaggagatggagagcagaatcatgatccccctgaagaccagccccctgcagtag

SEQ ID NO: 79365 - DNA, 1901 bp, Artificial Sequence
  derived and/or modified sequence
atttgagtgaaatctacaacccgaggcggctagtgctcccgcactactgggatctgagatcttcggagatgactgtcgcccgcagtacggagccagcagaagtccgacccttcctgggaatgggctgtaccgagaggtccgactagccccagggttttagtgagggggcagtggaactcagcgagggactgagagcttcacagcatgcacgagtttgatgccagagaaaaagtcgggagataaaggagccgcgtgtcactaaattgccgtcgcagccgcagccactcaagtgccggacttgccggattcagaagccagccagagcccacaatacagcttcgagtcattacctcagaagatttgtttaatctgtggggatgaagcatcaggctgtcattatggtgtccttacctgtgggagctgtaaggtcttctttaagagggcaatggaagggcagcacaactacttatgtgctggaagaaatgactgcatcgttgataaaatccgcagaaaaaactgcccagcatgtcgccttagaaagtgctgtcaggctggcatggtccttggaggtcgaaaatttaaaaagttcaataaagtcagagttgtgagagcactggatgctgttgctctcccacagccagtgggcgttccaaatgaaagccaagccctaagccagagattcactttttcaccaggtcaagacatacagttgattccaccactgatcaacctgttaatgagcattgaaccagatgtgatctatgcaggacatgacaacacaaaacctgacacctccagttctttgctgacaagtcttaatcaactaggcgagaggcaacttctttcagtagtcaagtggtctaaatcattgccaggttttcgaaacttacatattgatgaccagataactctcattcagtattcttggatgagcttaatggtgtttggtctaggatggagatcctacaaacacgtcagtgggcagatgctgtattttgcacctgatctaatactaaatgaacagcggatgaaagaatcatcattctattcattatgccttaccatgtggcagatcccacaggagtttgtcaagcttcaagttagccaagaagagttcctctgtatgaaagtattgttacttcttaatacaattcctttggaagggctacgaagtcaaacccagtttgaggagatgaggtcaagctacattagagagctcatcaaggcaattggtttgaggcaaaaaggagttgtgtcgagctcacagcgtttctatcaacttacaaaacttcttgataacttgcatgatcttgtcaaacaacttcatctgtactgcttgaatacatttatccagtcccgggcactgagtgttgaatttccagaaatgatgtctgaagttattgctgcacaattacccaagatattggcagggatggtgaaaccccttctctttcataaaaagtgaatgtcatctttttcttttaaagaattaaattttgtggtatgtctttttgttttggtcaggattatgaggtcttgagtttttataatgttcttctgaaagccttacatttataacatcatagtgtgtaaatttaaaagaaaaattgtgaggttctaattattttcttttataaagtataattagaatgtttaactgttttgtttacccatattttcttgaagaatttacaagattgaaaaagtactaaaattgttaaagtaaactatcttatccatattatttcataccatgtaggtgaggatttttaacttttgcatctaacaaatcatcgacttaagagaaaaaatcttacatgtaataacacaaagctattatatgttatttctaggtaactccctttgtgtcaattatatttccaaaaatgaacctttaaaat

SEQ ID NO: 79366 - protein, 438 aa, Artificial Sequence
  derived and/or modified sequence
MRGPSGPPGLLYVPHLLLCLLCLLPPPLQYAAGQSQMPKDQPLWALLEQYCHTIMTLTNLSGPYSYCNTTLDQIGTCWPRSAAGALVERPCPEYFNGVKYNTTRNAYRECLENGTWASKINYSQCEPILDDKQRKYDLHYRIALVVNYLGHCVSVAALVAAFLLFLALRSIRCLRNVIHWNLITTFILRNVMWFLLQLVDHEVHESNEVWCRCITTIFNYFVVTNFFWMFVEGCYLHTAIVMTYSTERLRKCLFLFIGWCIPFPIIVAWAIGKLYYENEQCWFGKEPGDLVDYIYQGPIILVLLINFVFLFNIVRILMTKLRASTTSETIQYRKAVKATLVLLPLLGITYMLFFVNPGEDDLSQIMFIYFNSFLQSFQGFFVSVFYCFFNGEVRSAVRKRWHRWQDHHSLRVPMARAMSIPTSPTRISFHSIKQTAAV

SEQ ID NO: 79367 - DNA, 1317 bp, Artificial Sequence
  derived and/or modified sequence
atgcggggccccagtggccctccagggctgctgtatgtgccgcacttgctcctgtgtttactttgtctcttgcctccccctctgcagtatgcagcaggtcaaagtcaaatgccaaaggatcagccactttgggcactgctcgaacagtactgccatacgattatgacgcttacgaacctcagcggaccctacagctattgtaatactaccctggaccagattggaacgtgctggccgcgcagcgcagctggcgcacttgtggagaggccctgtcctgaatatttcaatggcgtgaagtataatacaacacgcaatgcgtaccgtgaatgccttgagaatggtacctgggcctccaaaatcaattattcccagtgcgagcccatcctcgatgataagcagagaaaatatgacttgcattaccgcatcgcccttgtcgtgaattatctgggtcactgcgtgtccgtcgctgcgctggtggctgcattcctgctctttctggccctaagatcaatacggtgcttgcggaacgtcatccactggaatctgatcacgacattcatcctgaggaacgtaatgtggttcctcctccagcttgtggatcatgaggtccatgaaagcaacgaggtctggtgtcgatgtattacaaccatttttaattatttcgtggtgaccaattttttttggatgttcgtggaagggtgctatttacacaccgctatcgtgatgacctactcaaccgaaaggctacggaaatgccttttcctgtttataggctggtgcattcctttccccatcattgtggcctgggcgattggaaagctgtactatgagaacgaacaatgctggtttggcaaggagcctggcgacctagtagactatatctaccagggacctattatcctggtacttctcattaacttcgtttttctgttcaacatcgtaaggattttgatgacaaagcttcgcgcctctacaacttccgaaactatccaatataggaaggctgtaaaggccaccttagtgttgctgccactgctgggaatcacatatatgctgttcttcgtaaatcctggcgaagacgacctgtcccagataatgttcatttatttcaactctttcctacagtcttttcagggattcttcgtttctgtattttattgtttttttaacggcgaggttagatctgctgtcaggaagaggtggcaccgttggcaggatcatcattctctgcgagttcctatggctagggccatgagtatcccaacatcgcccacaaggatttcattccatagtataaaacaaacagccgccgtttag

SEQ ID NO: 79368 - DNA, 1317 bp, Artificial Sequence
  derived and/or modified sequence
atgaggggccccagcggccccccaggcctgctgtatgtgccccacctgctgctgtgcctgctgtgcctgctgcccccacccctgcagtatgctgctggccagagccagatgcccaaggaccagcccctgtgggccctgctggagcagtactgccacaccatcatgaccctgaccaacctgagcggcccctacagctactgcaacaccaccctggaccagatcggcacctgctggcccaggtctgctgctggggccctggtggagcggccctgcccagagtacttcaacggggtgaagtacaacaccaccagaaatgcctacagagaatgtctggagaatggcacctgggccagcaagatcaactacagccagtgtgagcccatcctggatgacaagcagaggaaatatgacctgcactaccgcatcgccctggtggtgaactacctgggccactgtgtgtctgtggccgccctggtggccgccttcctgctcttcctggccctgcggagcatccgctgcctgagaaatgtcatccactggaacctgatcaccaccttcatcctgagaaatgtgatgtggttcctgctgcagctggtggaccacgaggtgcatgagagcaatgaggtgtggtgccgctgcatcaccaccatcttcaactactttgtggtgaccaacttcttctggatgtttgtggagggctgctacctgcacacagccatcgtgatgacctacagcacagagcggctgaggaaatgtctcttcctgttcatcggctggtgcatccccttccccatcatcgtggcctgggccatcggcaagctgtactatgaaaatgagcagtgctggtttgggaaggagcccggggacctggtggactacatctaccagggccccatcatcctggtgctgctgatcaactttgtgttcctgttcaacatcgtgcgcatcctgatgaccaagctgcgggccagcaccaccagcgagaccatccagtacaggaaggctgtgaaggccaccctggtgctgctgcccctgctgggcatcacctacatgctgttctttgtgaaccctggagaagatgacctgagccagatcatgttcatctacttcaacagcttcctgcagagcttccagggcttctttgtgtctgtgttctactgcttcttcaacggggaggtgcgctctgctgtgaggaagcgctggcaccgctggcaggaccaccacagcctgcgggtgcccatggcccgggccatgagcatccccaccagccccacccgcatctccttccacagcatcaagcagacagctgctgtgtag

SEQ ID NO: 79369 - DNA, 1317 bp, Artificial Sequence
  derived and/or modified sequence
atgcggggccccagcggcccccccggcctgctgtacgtgccccacctactgctctgccttctctgcttactgccacccccccttcagtacgccgcaggccagtcacaaatgcccaaagaccaaccgttgtgggcactccttgaacagtattgccacacaattatgacccttactaatctgagcggcccctatagttactgcaatactacccttgaccaaatcggtacgtgttggccaaggagcgccgccggggccctggtggaacgaccatgcccagagtattttaatggagtaaaatataatacgacaaggaacgcttacagggagtgtctggaaaacgggacgtgggcttctaaaatcaattatagccagtgcgagcctattctggacgacaaacagaggaagtatgatctgcactacaggatcgccctggtggttaactatctcggacattgtgtatccgttgctgccctagttgccgccttccttcttttcctcgcactgcggagcatccgatgtctgaggaatgttatacactggaacttaatcaccacatttattttgaggaatgtgatgtggtttttgctgcaattggtcgatcatgaagtccatgaatccaatgaggtctggtgccgctgtatcaccaccatcttcaactattttgtggtcaccaattttttttggatgtttgtggaaggatgctatctccacacagccatcgtgatgacatattctacagagcgtctccgaaagtgcctttttttgtttatcggctggtgtatcccctttcccatcatcgtggcctgggctattggaaagctgtattacgagaatgaacagtgttggttcggaaaagagccaggcgacctagttgactatatctaccagggccccattattctcgtgctgctgattaactttgtttttctctttaacatagtgcgcatcctcatgacaaagctccgggcctctacaactagcgagaccattcagtacaggaaggcagtcaaggcgactctcgtgctgctgcccttgctgggaatcacatacatgttgttcttcgtcaacccaggtgaggatgacctgagccaaatcatgtttatttacttcaactccttccttcagagtttccaggggttttttgttagtgttttctactgcttcttcaacggcgaggtgcgtagtgccgtcagaaaacgctggcacagatggcaggaccaccactcacttagggtcccaatggcccgcgcgatgtctatcccaacatcaccaactcgcatctccttccattctattaagcaaaccgcagccgtgtag

SEQ ID NO: 79370 - DNA, 1317 bp, Artificial Sequence
  derived and/or modified sequence
atgcgaggaccatctggccctccagggctactgtacgttcctcatttgctgctgtgtctcctgtgtttgttaccaccgccattgcagtatgcagcaggccagagccaaatgccaaaggatcagcctctgtgggccctcttggagcaatactgtcacaccatcatgacactaactaatctgtctggcccttacagttattgcaacactacactggaccagatcggtacttgttggccgcgtagcgcagcgggtgcgctcgtcgagcgcccttgccccgaatatttcaacggcgtcaaatacaacaccacaagaaatgcttatagagagtgtttggaaaatgggacttgggcttccaaaatcaattactcccaatgcgagcccatcctcgacgacaaacagcgtaagtatgatctgcattacagaatcgctttagttgtgaattatctgggacattgcgtttcagtggctgcccttgtcgcagctttcctcctgtttcttgcattgaggagcattcggtgtctgaggaacgttattcactggaatctgataacgacattcattctccggaatgtgatgtggttcctgcttcagctggtggaccatgaggtgcacgagtccaacgaagtgtggtgtcggtgtataacaaccatcttcaactacttcgttgtgacaaacttcttttggatgttcgtcgagggctgctacctgcataccgcgatcgtgatgacctattcaaccgagcggctcaggaagtgtctcttcttgtttatcggttggtgcatcccctttcccatcatcgtggcgtgggcgataggaaaactctattacgagaatgaacagtgctggttcgggaaagaacccggagacctagtcgattacatctaccagggcccaatcatcttagtgctcctgattaactttgtctttttattcaatatcgtaaggattctaatgaccaaactccgggcatccacaacgtcagagactattcaatacagaaaagccgtaaaagctaccctagtactgctgcctttgctgggcataacttatatgctcttcttcgtgaaccccggagaggacgacctgtctcagatcatgtttatttacttcaattcttttctgcagtctttccaaggctttttcgtgtcagtcttctattgcttttttaatggcgaggtccggtcggctgtgagaaagagatggcataggtggcaggatcatcacagcctgcgcgttccaatggcccgtgccatgtctataccaacctcaccaacacgaatctctttccattctatcaagcaaactgccgctgtgtag

SEQ ID NO: 79371 - DNA, 1600 bp, Artificial Sequence
  derived and/or modified sequence
ggggctggccagggtgtgaccaccgtgctgggcagcaggctccagtccctaacccccagccactactggcatgaggggtccctcagggcccccaggcctcctctacgtcccacacctcctcctctgcctgctctgcctcctcccaccgccgctccaatacgcagccgggcagagccagatgcccaaagaccagcccctgtgggcacttctggagcagtactgccacaccatcatgaccctcaccaacctctcaggtccctactcctactgcaacacgaccttggaccagatcggaacgtgctggccccgcagcgctgccggagccctcgtggagaggccgtgccccgagtacttcaacggcgtcaagtacaacacgacccggaatgcctatcgagaatgcttggagaatgggacgtgggcctcaaagatcaactactcacagtgtgagcccattttggatgacaagcagaggaagtatgacctgcactaccgcatcgcccttgtcgtcaactacctgggccactgcgtatctgtggcagccctggtggccgccttcctgcttttcctggccctgcggagcattcgctgtctgcggaatgtgattcactggaacctcatcaccacctttatcctgcgaaatgtcatgtggttcctgctgcagctcgttgaccatgaagtgcacgagagcaatgaggtctggtgccgctgcatcaccaccatcttcaactacttcgtggtgaccaacttcttctggatgtttgtggaaggctgctacctgcacacggccattgtcatgacctactccactgagcgcctgcgcaagtgcctcttcctcttcatcggatggtgcatccccttccccatcatcgtcgcctgggccatcggcaagctctactatgagaatgaacagtgctggtttggcaaggagcctggcgacctggtggactacatctaccaaggccccatcattctcgtgctcctgatcaatttcgtatttctgttcaacatcgtcaggatcctaatgacaaagttacgcgcgtccaccacatccgagacaatccagtacaggaaggcagtgaaggccaccctggtgctcctgcccctcctgggcatcacctacatgctcttcttcgtcaatcccggggaggacgacctgtcacagatcatgttcatctatttcaactccttcctgcagtcgttccagggtttcttcgtgtctgtcttctactgcttcttcaatggagaggtgcgctcagccgtgaggaagaggtggcaccgctggcaggaccatcactcccttcgagtccccatggcccgggccatgtccatccctacatcacccacacggatcagcttccacagcatcaagcagacggccgctgtgtgacccctcggtcgcccacctgcacagctcccctgtcctcctccaccttcttcctctgggttctctgtgctgggcaggctctcgtggggcaggagatgggaggggagagaccagctctccagcctggcaggaaagagggggtgcggcagccaagggggactgcaagggacagggatgagtgggggccaccaggctcagcgcaagaggaagcagagg

SEQ ID NO: 79372 - DNA, 1317 bp, Artificial Sequence
  derived and/or modified sequence
atgagaggccccagcggcccccccggcctgctgtacgtgccccacctgctgctgtgcctgctgtgcctgctgcccccccccctgcagtacgccgccggccagagccagatgcccaaggaccagcccctgtgggccctgctggagcagtactgccacaccatcatgaccctgaccaacctgagcggcccctacagctactgcaacaccaccctggaccagatcggcacctgctggcccagaagcgccgccggcgccctggtggagagaccctgccccgagtacttcaacggcgtgaagtacaacaccaccagaaacgcctacagagagtgcctggagaacggcacctgggccagcaagatcaactacagccagtgcgagcccatcctggacgacaagcagagaaagtacgacctgcactacagaatcgccctggtggtgaactacctgggccactgcgtgagcgtggccgccctggtggccgccttcctgctgttcctggccctgagaagcatcagatgcctgagaaacgtgatccactggaacctgatcaccaccttcatcctgagaaacgtgatgtggttcctgctgcagctggtggaccacgaggtgcacgagagcaacgaggtgtggtgcagatgcatcaccaccatcttcaactacttcgtggtgaccaacttcttctggatgttcgtggagggctgctacctgcacaccgccatcgtgatgacctacagcaccgagagactgagaaagtgcctgttcctgttcatcggctggtgcatccccttccccatcatcgtggcctgggccatcggcaagctgtactacgagaacgagcagtgctggttcggcaaggagcccggcgacctggtggactacatctaccagggccccatcatcctggtgctgctgatcaacttcgtgttcctgttcaacatcgtgagaatcctgatgaccaagctgagagccagcaccaccagcgagaccatccagtacagaaaggccgtgaaggccaccctggtgctgctgcccctgctgggcatcacctacatgctgttcttcgtgaaccccggcgaggacgacctgagccagatcatgttcatctacttcaacagcttcctgcagagcttccagggcttcttcgtgagcgtgttctactgcttcttcaacggcgaggtgagaagcgccgtgagaaagagatggcacagatggcaggaccaccacagcctgagagtgcccatggccagagccatgagcatccccaccagccccaccagaatcagcttccacagcatcaagcagaccgccgccgtgtag

SEQ ID NO: 79373 - protein, 160 aa, Artificial Sequence
  derived and/or modified sequence
MKEVGRPREVRGRPGKSRIQKELADITLDPPPNCSAGPKGDNIYEWRSTILGPPGSVYEGGVFFLDITFTPEYPFKPPKVTFRTRIYHCNINSQGVICLDILKDNWSPALTISKVLLSICSLLTDCNPADPLVGSIATQYMTNRAEHDRMARQWTKRYAT

SEQ ID NO: 79374 - DNA, 483 bp, Artificial Sequence
  derived and/or modified sequence
atgaaggaggtgggcagacccagagaggtgagaggcagacccggcaagagcagaatccagaaggagctggccgacatcaccctggaccccccccccaactgcagcgccggccccaagggcgacaacatctacgagtggagaagcaccatcctgggcccccccggcagcgtgtacgagggcggcgtgttcttcctggacatcaccttcacccccgagtaccccttcaagccccccaaggtgaccttcagaaccagaatctaccactgcaacatcaacagccagggcgtgatctgcctggacatcctgaaggacaactggagccccgccctgaccatcagcaaggtgctgctgagcatctgcagcctgctgaccgactgcaaccccgccgaccccctggtgggcagcatcgccacccagtacatgaccaacagagccgagcacgacagaatggccagacagtggaccaagagatacgccacctag

SEQ ID NO: 79375 - DNA, 483 bp, Artificial Sequence
  derived and/or modified sequence
atgaaggaggtggggcgtccccgggaagttcggggccgcccagggaagtctcggattcagaaagaactcgcagacatcactttggatcctcctcctaactgctcggctggccccaagggcgacaatatttacgaatggcgaagtacaatactggggccacccggctcagtgtacgaggggggcgtgttctttctggacataaccttcacccccgaataccctttcaagccccctaaagtcacctttaggacaaggatctaccactgcaacataaattctcagggtgtaatttgtctggatatcttaaaggataattggagtcctgccttgacaatttctaaggtgctcctctctatctgctctttattaactgattgtaaccccgccgacccgcttgtggggtcaattgccacacagtacatgaccaatcgagccgagcacgaccgcatggcccgccagtggacaaaaaggtacgccacatag

SEQ ID NO: 79376 - DNA, 483 bp, Artificial Sequence
  derived and/or modified sequence
atgaaggaggtgggccggccccgggaggtgcggggccggcctgggaagagccgcatccagaaggagctggccgacatcaccctggaccccccacccaactgcagcgctggccccaagggggacaacatctatgagtggaggagcaccatcctgggccccccaggctctgtgtatgagggcggcgtcttcttcctggacatcaccttcaccccagagtaccccttcaagccacccaaggtgaccttccgcacccgcatctaccactgcaacatcaacagccagggcgtcatctgcctggacatcctgaaggacaactggagccctgccctgaccatcagcaaggtgctgctgagcatctgcagcctgctgacagactgcaacccagctgaccccctggtgggcagcatcgccacccagtacatgaccaacagagctgagcatgacaggatggcccggcagtggaccaagagatatgccacctag

SEQ ID NO: 79377 - DNA, 483 bp, Artificial Sequence
  derived and/or modified sequence
atgaaggaggtgggccggccccgggaggtgcggggccggcccggcaaatctagaattcaaaaagaactcgctgacattaccctagacccccccccaaattgttcagccggccctaaaggggataatatctacgaatggagaagtacaattctgggcccaccaggatctgtttacgaaggaggcgtgttcttcttagatattactttcacaccagaatacccctttaagccccccaaggtcacctttcgcaccaggatctatcattgcaacatcaatagccagggagtcatctgcttggatatcctcaaagacaactggtctccagcattaacaattagtaaggtacttcttagcatttgctccctcctgacagactgcaacccggctgatcctctggtgggctctattgccactcagtatatgaccaatcgtgccgaacacgacagaatggctaggcagtggacaaagagatacgctacttag

SEQ ID NO: 79378 - DNA, 1224 bp, Artificial Sequence
  derived and/or modified sequence
agtctatccccagtgtgagctagagagcggaccatgaaggaagtgggcagaccccgggaagttagaggacgcccggggaaaagcagaattcagaaggagctggcggacatcactttagaccctccacctaattgcagtgctggtcccaaaggcgataacatctatgaatggagatcaaccattctagggcctccaggatccgtgtatgagggtggtgtattctttctcgatatcacttttacaccagaatatcccttcaagcctccaaaggttacatttcggacaagaatctatcattgtaatattaacagtcaaggtgttatttgcttggacatattgaaagataattggagtccagcactaaccatttctaaagtcctcctttctatctgctcacttcttacagactgtaatcctgccgaccccttggtgggaagtattgccactcagtatatgaccaacagagcagaacatgacagaatggccagacagtggaccaagagatacgctacataaattggggtttcacaattcttacattatttgtctgtcacagaagagagctgcttatgattttgaaggggtcagggagggtgggagttggtaaagagtagggtatttctataacagatattattcagtcttatttcctaagattttgttgtaacttaaggtatcttgctacagtagacagaattggtaatagcaacttttaaaattgtcattagttctgcaatattagctgaaatgtagtacagaaaagaatgtacatttagacatttgggttcagttgcttgtagtctgtaaatttaaaacagcttaatttggtacaggttacacatatggccatttatgtaaagtccctctaagactacatactttttgtttaaaacaaaattggaatttgttttcccttcttggaagggaacattgatatttaacagagtttttagagattgtcatctcatatatataaaatggacacgtggctataaaacaccatataagagatgagtagtgcgttttattttatatgccaatctactttgtttaaaaaaggtctgaatcaggacttgtgaaaacctgtagtgaaataccttaagctgttaactaactgtaaggcgtggaataggagttgctcagtggattggttctatgttgtggactacttaagtctgcatttgttactgtgctaataaacaatattaaaaaccacctaataaa

SEQ ID NO: 79379 - DNA, 483 bp, Artificial Sequence
  derived and/or modified sequence
atgaaagaagtgggacgtccacgcgaggttaggggccgacctggtaagagccgcattcagaaggagttagcagatatcacgctagatcctcctcctaactgctcagctggccctaagggcgataacatctacgagtggcggagcaccatcctcggacctcccggatcagtgtacgagggaggcgtgttctttctagacattacctttactcccgaatacccttttaaaccaccaaaagtgaccttccgcacccgaatctaccattgcaatattaattctcagggggtgatttgcctcgatatcctcaaagataattggtctccagcccttacaatcagcaaagtcctgctctctatttgttcacttttaacagactgtaatcctgcagatccattagttgggagcattgctacacagtatatgacgaaccgcgcagaacacgatagaatggcaaggcaatggacaaagcggtacgctacttag

SEQ ID NO: 79380 - protein, 397 aa, Artificial Sequence
  derived and/or modified sequence
MGREPWPEDRDLGFPQLFCQGPYSYCNTTLDQIGTCWPRSAAGALVERPCPEYFNGVKYNTTRNAYRECLENGTWASKINYSQCEPILDDKQRKYDLHYRIALVVNYLGHCVSVAALVAAFLLFLALRSIRCLRNVIHWNLITTFILRNVMWFLLQLVDHEVHESNEVWCRCITTIFNYFVVTNFFWMFVEGCYLHTAIVMTYSTERLRKCLFLFIGWCIPFPIIVAWAIGKLYYENEQCWFGKEPGDLVDYIYQGPIILVLLINFVFLFNIVRILMTKLRASTTSETIQYRKAVKATLVLLPLLGITYMLFFVNPGEDDLSQIMFIYFNSFLQSFQGFFVSVFYCFFNGEVRSAVRKRWHRWQDHHSLRVPMARAMSIPTSPTRISFHSIKQTAAV

SEQ ID NO: 79381 - DNA, 1194 bp, Artificial Sequence
  derived and/or modified sequence
atgggccgcgaaccttggccagaagatagggatctaggctttccccaattgttttgccaggggccctattcctactgtaacacgacccttgatcagatcggaacctgttggccgaggagtgcagctggagcactcgtggaaaggccttgtcccgaatactttaacggagtgaaatacaatacaacgcgtaacgcctatcgggagtgcctggaaaatggaacctgggcctctaagataaattattctcagtgcgaacctattctggatgacaagcaacgcaagtatgacctccattaccgaattgcactcgtcgtgaactatcttggccactgcgtgagtgtggccgccctcgtcgccgcctttctgcttttcttggccttacgctcaatccgctgtctacgaaatgtaatccactggaatctcatcactaccttcatcctgagaaacgtcatgtggttccttctccagctggtggaccatgaagttcatgagtctaatgaagtatggtgccgctgcattaccaccatcttcaactactttgtggtgacgaattttttttggatgttcgtcgaaggatgctatctgcacacagccatagtgatgacctactccacagaacgcctgaggaaatgcttattcctgttcatcgggtggtgcatcccattccccataatcgtagcgtgggctatcgggaaactgtactacgaaaacgagcagtgttggtttggcaaggagcccggggatctcgtggattacatttaccagggaccgattattctggttttattgattaactttgtgtttctcttcaatatcgtacggatcctgatgacaaaactacgagcctctacgactagtgaaaccattcagtatagaaaagccgttaaggcaactctcgtactgctgcctctgttggggataacctacatgctgttctttgtcaacccaggggaggacgacctgtcccaaattatgtttatctatttcaactccttcctacagtccttccagggcttctttgtgtcagtattttactgtttcttcaacggcgaagtgagatctgctgttcggaaacgctggcacagatggcaggatcaccactccctgagagttccaatggcaagggccatgtcgatacctactagtcctacacgcatctcttttcactccatcaaacagacagctgcagtatag

SEQ ID NO: 79382 - DNA, 1194 bp, Artificial Sequence
  derived and/or modified sequence
atgggccgggagccctggccagaggaccgggacctgggcttcccccagctgttctgccagggcccctacagctactgcaacaccaccctggaccagatcggcacctgctggcccaggtctgctgctggggccctggtggagcggccctgcccagagtacttcaatggagtgaagtacaacaccaccagaaatgcctaccgggagtgcctggagaatggcacctgggccagcaagatcaactacagccagtgtgagcccatcctggatgacaagcagaggaaatatgacctgcactacagaattgccctggtggtgaactacctgggccactgtgtgtctgtggccgccctggtggccgccttcctgctcttcctggccctgcggagcatccgctgcctgagaaatgtcatccactggaacctgatcaccaccttcatcctgagaaatgtgatgtggttcctgctgcagctggtggaccacgaggtgcatgagagcaatgaggtgtggtgccgctgcatcaccaccatcttcaactactttgtggtgaccaacttcttctggatgtttgtggagggctgctacctgcacacagccatcgtgatgacctacagcacagagcggctgaggaagtgcctcttcctgttcatcggctggtgcatccccttccccatcatcgtggcctgggccatcggcaagctgtactatgaaaatgagcagtgctggtttgggaaggagcccggggacctggtggactacatctaccagggccccatcatcctggtgctgctgatcaactttgtgttcctgttcaacatcgtgcgcatcctgatgaccaagctgcgggccagcaccaccagcgagaccatccagtacaggaaggctgtgaaggccaccctggtgctgctgcccctgctgggcatcacctacatgctgttctttgtgaaccctggagaagatgacctgagccagatcatgttcatctacttcaacagcttcctgcagagcttccagggcttctttgtgtctgtgttctactgcttcttcaatggagaggtgcgctctgctgtgaggaagcgctggcaccgctggcaggaccaccacagcctgcgggtgcccatggcccgggccatgagcatccccaccagccccacccgcatctccttccacagcatcaagcagacagctgctgtgtag

SEQ ID NO: 79383 - DNA, 1194 bp, Artificial Sequence
  derived and/or modified sequence
atgggccgggagccctggcccgaggaccgggacctgggcttcccccaactcttttgccaggggccttactcatattgtaatacgacactcgaccagattggaacatgctggcctcgaagtgccgcaggtgctctggtcgagcgcccctgccctgagtattttaatggtgtaaaatacaatacaacaagaaatgcatatcgagagtgtctggagaatggcacatgggcgtcaaaaatcaattatagccagtgtgagcccattcttgacgataaacaacgaaaatacgacctgcattatagaattgccttggtcgttaattacttaggacactgcgtgagcgtcgcggctcttgtcgctgccttcctactgtttctggcgctgagatctataagatgccttcgtaatgtcatccactggaatctaatcaccaccttcatactccggaacgttatgtggttcttgctgcagttagtcgaccatgaagtgcacgagagtaacgaggtgtggtgtaggtgtattacaaccatttttaactatttcgtggtgacaaattttttttggatgttcgtggaaggctgctatttgcatacagctattgtgatgacgtattccaccgagaggcttcgtaagtgcctgtttctgttcatcggttggtgcatcccttttcctatcatcgttgcatgggcgattggaaagctctactacgaaaacgagcagtgctggttcgggaaagagccgggagatttggtggactatatctaccagggacccatcatactggtactgctgataaatttcgtgtttttatttaatatcgtccgcattctcatgacaaagcttcgtgctagcaccacttccgaaacaatccaataccgcaaggcagtgaaggccacgctggtcctgcttcccctgctggggattacgtacatgctttttttcgtgaaccctggcgaggatgacctgtctcaaatcatgttcatctactttaatagcttcctccagtcttttcagggcttctttgtgagcgttttttactgtttctttaacggtgaagtgcgcagcgcggtacgtaagaggtggcacaggtggcaggatcaccactccttgcgcgtacctatggcacgggcaatgtccatcccgactagtcctactcgaatctctttccacagcattaaacagaccgccgcagtttag

SEQ ID NO: 79384 - DNA, 1194 bp, Artificial Sequence
  derived and/or modified sequence
atgggtagggagccctggcctgaggaccgcgatctcggattcccacaacttttctgccagggcccttactcatattgcaataccacgctggaccagattggcacctgttggcccagaagtgcagccggtgccctggtagaacgcccttgccccgagtactttaacggcgtcaaatataacaccaccagaaacgcctaccgggagtgccttgagaacggaacgtgggcgtccaagattaattattcacagtgtgagccaatcctggatgataagcagagaaaatacgacctccattataggatcgcactggtggtaaattacctggggcactgcgtctccgtggccgcacttgtggccgctttcctcttgtttctggccctgaggtcaatccgctgtctgagaaatgttattcattggaatctgattactaccttcatcctgagaaatgtgatgtggttcctgctccaacttgtggatcatgaagttcacgagagcaatgaggtgtggtgtaggtgtatcaccactatctttaactactttgtggtgaccaatttcttttggatgtttgtggaaggatgttatctgcatactgcaatagttatgacctacagcactgagaggcttagaaagtgcctgttcttgttcatcggatggtgtatcccttttcctataatcgtagcatgggccatagggaaactgtactatgagaatgaacagtgctggttcggcaaagagcccggtgacctggtggactatatctatcaagggcctattatcctcgtcctgctcatcaatttcgtgtttttgttcaacattgtccggattctgatgaccaaattgcgcgcaagtaccacaagtgagacgattcagtaccggaaagcagtaaaagcgaccctggtcctgttaccgctcttaggaattacttacatgctatttttcgtcaacccaggggaggacgacctgtcacagatcatgtttatatatttcaactcctttttgcagtctttccagggattttttgtcagtgtattctactgtttcttcaacggtgaggtccgttccgcagtgaggaagaggtggcaccgctggcaagatcaccactccctccgtgtgccaatggctcgagccatgtcaattcctacttctccgactcgtatcagcttccactcaatcaaacagacggcagcggtttag

SEQ ID NO: 79385 - DNA, 1407 bp, Artificial Sequence
  derived and/or modified sequence
atgggaagagagccttggcctgaagacagggacctgggctttcctcagctcttctgccaaggtccctactcctactgcaacacgaccttggaccagatcggaacgtgctggccccgcagcgctgccggagccctcgtggagaggccgtgccccgagtacttcaacggcgtcaagtacaacacgacccggaatgcctatcgagaatgcttggagaatgggacgtgggcctcaaagatcaactactcacagtgtgagcccattttggatgacaagcagaggaagtatgacctgcactaccgcatcgcccttgtcgtcaactacctgggccactgcgtatctgtggcagccctggtggccgccttcctgcttttcctggccctgcggagcattcgctgtctgcggaatgtgattcactggaacctcatcaccacctttatcctgcgaaatgtcatgtggttcctgctgcagctcgttgaccatgaagtgcacgagagcaatgaggtctggtgccgctgcatcaccaccatcttcaactacttcgtggtgaccaacttcttctggatgtttgtggaaggctgctacctgcacacggccattgtcatgacctactccactgagcgcctgcgcaagtgcctcttcctcttcatcggatggtgcatccccttccccatcatcgtcgcctgggccatcggcaagctctactatgagaatgaacagtgctggtttggcaaggagcctggcgacctggtggactacatctaccaaggccccatcattctcgtgctcctgatcaatttcgtatttctgttcaacatcgtcaggatcctaatgacaaagttacgcgcgtccaccacatccgagacaatccagtacaggaaggcagtgaaggccaccctggtgctcctgcccctcctgggcatcacctacatgctcttcttcgtcaatcccggggaggacgacctgtcacagatcatgttcatctatttcaactccttcctgcagtcgttccagggtttcttcgtgtctgtcttctactgcttcttcaatggagaggtgcgctcagccgtgaggaagaggtggcaccgctggcaggaccatcactcccttcgagtccccatggcccgggccatgtccatccctacatcacccacacggatcagcttccacagcatcaagcagacggccgctgtgtgacccctcggtcgcccacctgcacagctcccctgtcctcctccaccttcttcctctgggttctctgtgctgggcaggctctcgtggggcaggagatgggaggggagagaccagctctccagcctggcaggaaagagggggtgcggcagccaagggggactgcaagggacagggatgagtgggggccaccaggctcagcgcaagaggaagcagagg

SEQ ID NO: 79386 - DNA, 1194 bp, Artificial Sequence
  derived and/or modified sequence
atgggcagagagccctggcccgaggacagagacctgggcttcccccagctgttctgccagggcccctacagctactgcaacaccaccctggaccagatcggcacctgctggcccagaagcgccgccggcgccctggtggagagaccctgccccgagtacttcaacggcgtgaagtacaacaccaccagaaacgcctacagagagtgcctggagaacggcacctgggccagcaagatcaactacagccagtgcgagcccatcctggacgacaagcagagaaagtacgacctgcactacagaatcgccctggtggtgaactacctgggccactgcgtgagcgtggccgccctggtggccgccttcctgctgttcctggccctgagaagcatcagatgcctgagaaacgtgatccactggaacctgatcaccaccttcatcctgagaaacgtgatgtggttcctgctgcagctggtggaccacgaggtgcacgagagcaacgaggtgtggtgcagatgcatcaccaccatcttcaactacttcgtggtgaccaacttcttctggatgttcgtggagggctgctacctgcacaccgccatcgtgatgacctacagcaccgagagactgagaaagtgcctgttcctgttcatcggctggtgcatccccttccccatcatcgtggcctgggccatcggcaagctgtactacgagaacgagcagtgctggttcggcaaggagcccggcgacctggtggactacatctaccagggccccatcatcctggtgctgctgatcaacttcgtgttcctgttcaacatcgtgagaatcctgatgaccaagctgagagccagcaccaccagcgagaccatccagtacagaaaggccgtgaaggccaccctggtgctgctgcccctgctgggcatcacctacatgctgttcttcgtgaaccccggcgaggacgacctgagccagatcatgttcatctacttcaacagcttcctgcagagcttccagggcttcttcgtgagcgtgttctactgcttcttcaacggcgaggtgagaagcgccgtgagaaagagatggcacagatggcaggaccaccacagcctgagagtgcccatggccagagccatgagcatccccaccagccccaccagaatcagcttccacagcatcaagcagaccgccgccgtgtag

SEQ ID NO: 79387 - protein, 211 aa, Artificial Sequence
  derived and/or modified sequence
MAAAVRMNIQMLLEAADYLERREREAEHGYASMLPYNNKDRDALKRRNKSKKNNSSSRRAHLRLCLEKLKGLVPLGPESSRHTTLSLLTKAKLHIKKLEDCDRKAVHQIDQLQREQRHLKRQLEKLGIERIRMDSIGSTVSSERSDSDREEIDVDVESTDYLTGDLDWSSSSVSDSDERGSMQSLGSDEGYSSTSIKRIKLQDSHKACLGL

SEQ ID NO: 79388 - DNA, 812 bp, Artificial Sequence
  derived and/or modified sequence
agagaggctccctcagccctgctccgcggggtccacagcgggctccacagcgggctccatagcgggctccacagcggtccggcggcggcagcgagcccgtgggcagtgggggttggtcccgtggctccggcccccggtgcagaatggcggcggcggttcggatgaacatccagatgctgctggaggcggccgactatctggagcggcgggagagagaagctgaacatggttatgcctccatgttaccatacaataacaaggacagagatgccttaaaacggaggaacaaatccaaaaagaataacagcagtagcagacgggctcatcttcgcttgtgcctggagaagttgaaggggctggtgccacttggacccgaatcaagtcgacacactacgttgagtttattaacaaaagccaaattgcacataaagaaacttgaagattgtgacagaaaagccgttcaccaaatcgaccagcttcagcgagagcagcgacacctgaagaggcagctggagaagctgggcattgagaggatccggatggacagcatcggctccaccgtctcctcggagcgctccgactccgacagggaagaaatcgacgttgacgtggagagcacggactatctcacaggtgatctggactggagcagcagcagtgtgagcgactctgacgagcggggcagcatgcagagcctcggcagtgatgagggctattccagcaccagcatcaagagaataaagctgcaggacagtcacaaggcgtgtcttggtctctaagagagtgggcactgcggctgtctccttgaaggt

SEQ ID NO: 79389 - DNA, 636 bp, Artificial Sequence
  derived and/or modified sequence
atggccgccgcagtgaggatgaatatacagatgctccttgaggccgcggattacctggagaggcgggagcgggaagcagagcacggatatgcgagtatgttgccctacaataataaggacagagacgcactcaagcgtcgtaacaaaagtaaaaaaaataacagctcaagtcggcgggcgcacctgaggctctgtctggaaaaactaaaaggcctggtccctctgggccccgagtcttccagacacaccacgttgtccctgctgacaaaagctaaacttcacatcaagaaactggaagactgtgacagaaaggcagtacaccaaatcgaccagctccagcgtgagcagcgacatctgaagcgacagcttgagaagttaggaattgagaggattagaatggacagcatcggcagcaccgtgagcagtgagcggtcagattctgatagggaagagatcgacgtggatgtggagagcacagactatctgactggtgacctggactggagcagttcatctgtgagtgatagtgacgagagaggtagcatgcagagcttggggtccgatgaagggtattccagtacctctatcaagcgaatcaagctgcaggactctcataaggcatgtctgggcctgtag

SEQ ID NO: 79390 - DNA, 636 bp, Artificial Sequence
  derived and/or modified sequence
atggctgctgctgtgaggatgaacatccagatgctgctggaggccgctgactacctggagcggcgggagcgggaggccgagcacggctacgcctccatgctgccctacaacaacaaggacagagatgccctgaagagaagaaacaagagcaagaagaacaacagcagcagccggcgggcccacctgcggctgtgcctggagaagctgaagggcctggtgcccctgggccctgagagcagccgccacaccaccctgagcctgctgaccaaggccaagctgcacatcaagaagctggaggactgtgacaggaaggctgtgcaccagattgaccagctgcagcgggagcagaggcacctgaagaggcagctggagaagctgggcatcgagcgcatccgcatggacagcatcggcagcacagtgagcagcgagaggagtgacagcgaccgggaggagattgatgtggatgtggagagcacagactacctgactggagacctggactggagcagcagctctgtgtctgacagtgatgagcggggctccatgcagagcctgggcagtgatgagggctacagcagcaccagcatcaagaggatcaagctgcaggacagccacaaggcctgcctgggcctgtag

SEQ ID NO: 79391 - DNA, 636 bp, Artificial Sequence
  derived and/or modified sequence
atggccgccgccgtgcggatgaacatccagatgctgctggaggccgccgactacctggaacgcagggagagggaagccgagcacggatatgcctctatgctgccctacaacaacaaagatagggacgccttaaagagacgaaataagagtaaaaagaacaattctagctcaaggcgggcgcaccttcgcctgtgtctcgagaaactgaaggggcttgtgccgttagggcccgagtcaagtcggcacaccacactctccctgcttacgaaggctaagctccacattaagaaactcgaagattgcgacaggaaggcagtgcatcagatcgatcagctccagcgggagcaacggcacctaaagcgccagttggagaaactcggcatcgagagaatcaggatggattctatcgggtctaccgtgtccagcgagcgaagcgactccgaccgagaagagattgacgtcgacgtcgagtcaacagattacctcactggtgacttagactggtcttcatcttcagtgagcgacagtgacgagagagggagcatgcaaagcctcggttcagatgagggttattccagcaccagtatcaagagaatcaagctacaagactcacataaagcctgcctgggcctctag

SEQ ID NO: 79392 - DNA, 636 bp, Artificial Sequence
  derived and/or modified sequence
atggcagccgcagtaaggatgaacattcagatgcttcttgaagctgctgattacctggagaggcgggagcgggaagccgaacacggatacgcctcaatgttaccttataataataaagatcgggatgcactcaaacggcgaaataaaagtaaaaagaacaactcgagttctcgccgtgcacatctgaggttgtgtttggaaaagctgaaaggcctggtcccactgggcccagagagttccaggcacaccaccctgagcctgttgaccaaggccaaacttcatatcaaaaagctggaggactgcgataggaaagccgtccatcaaattgatcagttgcagagggaacagcggcacctgaaacggcaactcgaaaagctagggatagagagaattcgcatggactccataggctcaaccgtgtcctccgagcgaagtgattcagaccgcgaagagatcgacgtggatgtcgaaagtacagactatcttacaggggacttagactggtccagttccagcgttagcgattcggatgaaagaggatcaatgcagtcattgggctcagatgaaggttacagcagtacttcaatcaagcggattaaactccaggatagccacaaggcctgtctcggtctctag

SEQ ID NO: 79393 - DNA, 636 bp, Artificial Sequence
  derived and/or modified sequence
atggccgccgccgtgagaatgaacatccagatgctgctggaggccgccgactacctggagagaagagagagagaggccgagcacggctacgccagcatgctgccctacaacaacaaggacagagacgccctgaagagaagaaacaagagcaagaagaacaacagcagcagcagaagagcccacctgagactgtgcctggagaagctgaagggcctggtgcccctgggccccgagagcagcagacacaccaccctgagcctgctgaccaaggccaagctgcacatcaagaagctggaggactgcgacagaaaggccgtgcaccagatcgaccagctgcagagagagcagagacacctgaagagacagctggagaagctgggcatcgagagaatcagaatggacagcatcggcagcaccgtgagcagcgagagaagcgacagcgacagagaggagatcgacgtggacgtggagagcaccgactacctgaccggcgacctggactggagcagcagcagcgtgagcgacagcgacgagagaggcagcatgcagagcctgggcagcgacgagggctacagcagcaccagcatcaagagaatcaagctgcaggacagccacaaggcctgcctgggcctgtag

SEQ ID NO: 79394 - protein, 445 aa, Artificial Sequence
  derived and/or modified sequence
MSAEVIHQVEEALDTDEKEMLLFLCRDVAIDVVPPNVRDLLDILRERGKLSVGDLAELLYRVRRFDLLKRILKMDRKAVETHLLRNPHLVSDYRVLMAEIGEDLDKSDVSSLIFLMKDYMGRGKISKEKSFLDLVVELEKLNLVAPDQLDLLEKCLKNIHRIDLKTKIQKYKQSVQGAGTSYRNVLQAAIQKSLKDPSNNFRSIPEERYKMKSKPLGICLIIDCIGNETELLRDTFTSLGYEVQKFLHLSMHGISQILGQFACMPEHRDYDSFVCVLVSRGGSQSVYGVDQTHSGLPLHHIRRMFMGDSCPYLAGKPKMFFIQNYVVSEGQLEDSSLLEVDGPAMKNVEFKAQKRGLCTVHREADFFWSLCTADMSLLEQSHSSPSLYLQCLSQKLRQERKRPLLDLHIELNGYMYDWNSRVSAKEKYYVWLQHTLRKKLILSYT

SEQ ID NO: 79395 - DNA, 1338 bp, Artificial Sequence
  derived and/or modified sequence
atgtcagctgaggtgattcaccaggtagaagaggccctagacaccgatgagaaagaaatgctgctgttcctgtgtcgagacgtcgccattgatgttgtgcccccgaacgtcagagacctgttggatatcttgcgcgagcgtggtaagctaagcgtgggggatctggcggaactgttgtatagagtacggaggtttgacctcttgaaaaggatcctgaaaatggatcgcaaggccgtcgagactcacctcctaaggaacccccatcttgtttccgattatagagttctcatggcagaaatcggagaggatctggacaagtcagatgtgagttctctgatttttttaatgaaggattatatgggccgaggcaagatctcaaaagagaaatcgttcctggacttggttgttgaactggagaaactgaatctggtggccccggatcagcttgatctgttggagaaatgcctgaagaacatccatagaatagatctcaaaactaagatccagaagtacaaacaatccgtacagggggctgggactagctaccggaatgtactgcaggccgccatacagaagtctctcaaagacccctcgaataattttaggagcatccctgaggaacgttataaaatgaaatctaagccacttggcatctgtctaattattgactgtatagggaatgagactgagcttttgagagatacctttacctcattgggctatgaggtgcagaaattcctgcatctctctatgcacggaatttctcagattctgggtcagtttgcgtgcatgccggaacatagagattacgactcatttgtgtgcgtgttggtgagtagaggcggatctcaaagcgtctacggtgtggatcagactcatagcggattgccacttcaccatattagaaggatgttcatgggcgactcttgtccgtacctggccgggaaacctaaaatgtttttcatccaaaattacgtcgtgtcagaagggcagttggaagacagctcactgctcgaggttgatggtcctgccatgaaaaatgttgaatttaaagcccaaaagcgtgggctgtgcacagtgcatagagaggctgattttttctggtccttatgcacggccgatatgtccctattagaacagtcacacagctcgcctagcctctatctgcaatgcctgagccaaaagctaagacaggagagaaaacgccctctcctggatcttcacatagagcttaacgggtatatgtatgattggaactctcgggtgtcagccaaggaaaaatattatgtgtggctgcagcacaccctgcgcaaaaaactgattctgtcttacacctag

SEQ ID NO: 79396 - DNA, 1338 bp, Artificial Sequence
  derived and/or modified sequence
atgtctgctgaggtgatccaccaggtggaggaggccctggacacagatgagaaggagatgctgctcttcctgtgcagagatgtggccattgatgtggtgccccccaacgtgcgggacctgctggacatcctgcgggagcggggcaagctgtctgtgggggacctggccgagctgctgtacagagtgagaagatttgacctgctgaagaggatcctgaagatggacaggaaggctgtggagacccacctgctgaggaacccccacctggtgtctgactacagagtgctgatggccgagatcggggaggacctggacaagagtgatgtgagcagcctcatcttcctgatgaaggactacatgggccggggcaagatcagcaaggagaagagcttcctggacctggtggtggagctggagaagctgaacctggtggccccagaccagctggacctgctggagaagtgcctgaagaacatccacagaattgacctgaagaccaagatccagaagtacaagcagagcgtgcagggcgccggcaccagctacagaaatgtgctgcaggccgccatccagaagagcctgaaggaccccagcaacaacttccgcagcatccctgaggagcgctacaagatgaagagcaagcccctgggcatctgcctgatcatcgactgcattggaaatgaaacagagctgctgcgggacaccttcaccagcctgggctatgaggtgcagaagttcctgcacctgtccatgcacggcatcagccagatcctgggccagtttgcctgcatgcctgagcaccgggactatgacagctttgtgtgtgtgctggtgtccagaggaggcagccagagcgtgtatggagtggaccagacccacagcggcctgcccctgcaccacatccggaggatgttcatgggagacagctgcccctacctggccggcaagcccaagatgttcttcatccagaactacgtggtgtctgagggccagctggaggacagcagcctgctggaggtggatggccctgccatgaagaatgtggagttcaaggcccagaagaggggcctgtgcaccgtgcaccgggaggccgacttcttctggagcctgtgcacagctgacatgagcctgctggagcagagccacagcagccccagcctgtacctgcagtgcctgagccagaagctgcggcaggagaggaagaggcccctgctggacctgcacatcgagctgaatggctacatgtatgactggaacagccgggtgtctgccaaggagaagtactacgtgtggctgcagcacaccctgaggaagaagctgatcctgagctacacctag

SEQ ID NO: 79397 - DNA, 1338 bp, Artificial Sequence
  derived and/or modified sequence
atgagcgccgaggtgatccaccaggtggaggaggccctggacaccgatgagaaagaaatgctactctttctgtgccgagatgtggcaatcgacgtcgtcccacccaacgtgagggatctccttgatatactccgcgaacgagggaaattgtccgtaggcgatctcgccgaactgctttatagagtgcgcaggtttgatttgttaaagcgcatcctgaaaatggaccgaaaggcagtcgaaacacaccttttgagaaacccccacctggtttctgattatagagttctgatggcggagattggagaggacttggacaagagcgacgtgtcgtcgctaattttcctgatgaaagattacatgggccgaggcaagatctccaaagaaaaaagtttcctagaccttgtggtggagcttgaaaaattgaacctggtggcccccgatcagttggacctgttggagaaatgcctaaaaaatatacatcgcattgatttaaaaactaagattcaaaagtataaacagagtgtgcaaggcgcaggaacctcctacagaaacgtattgcaggccgcgatacagaagtcacttaaggatccttccaataattttagatcaataccggaagaacgatacaagatgaagtctaaacccctcggtatctgcctaatcattgactgtatcggaaacgagaccgaactactgcgtgatacctttacatccctcggctatgaagtgcagaagtttctacaccttagtatgcatggaatctctcagattctcgggcagtttgcttgcatgcccgagcatcgcgactacgattcattcgtgtgcgtactggtgtcccgcggaggttctcagtccgtgtacggggtcgatcagacacattcaggcctcccactccatcatatcagaagaatgtttatgggagatagttgtccttacctggctggaaaacccaagatgtttttcattcagaattatgtcgtttccgaagggcaattagaagactcaagccttcttgaggtggacggtcccgccatgaaaaatgttgagttcaaggcgcagaaacgggggctatgcaccgtacaccgcgaggccgactttttctggagtttgtgcacggccgacatgagcttactagagcagtcacatagttctccgagcctttaccttcagtgcctgtcccaaaagttgcgccaggagagaaaacgcccgctcctagatttgcacattgaactcaatggatacatgtacgactggaattcaagagtgagcgccaaagagaagtactatgtgtggctgcagcacaccctccggaaaaaactcatcctgtcttatacttag

SEQ ID NO: 79398 - DNA, 1338 bp, Artificial Sequence
  derived and/or modified sequence
atgtccgccgaagtcatccaccaggtcgaagaggctctggacaccgatgagaaggagatgcttctattcctctgcagagatgtggcaattgacgtcgtgcctcccaacgtcagagacctgctggacattttgagggagcgcggtaagctgtcagtcggcgacctggctgagctgctgtatagagtgagacggttcgatctcctgaaaagaatcctaaagatggataggaaggccgtggaaacccatctgctgcgcaatccccacctagtgtcagactatagagttttgatggctgagatcggcgaggatctggacaaatccgatgtgtcctcgttgatattccttatgaaggactacatgggcagaggaaagatcagcaaagaaaagtcgtttctcgacctcgtggtcgagctggagaagctgaacttggtggcccctgatcagctggatctcctcgagaagtgtctaaaaaacatccatcggattgatcttaagacaaagatccaaaagtacaagcagagtgtccaaggtgctgggaccagttatcgcaatgttcttcaggccgctattcaaaaatccctcaaagacccatccaacaactttcgatccatacctgaagagcgctacaaaatgaagtccaaaccgctcgggatctgtttaattatcgactgtataggcaacgagacggagttgctgcgggacacgttcacctctctagggtacgaggttcagaagttccttcatctgagcatgcacgggatcagtcaaatcttgggccagtttgcctgcatgcctgaacacagagattatgactctttcgtctgcgtactcgtaagtagaggcggaagtcagtctgtgtacggcgtggatcagactcattcaggccttccccttcatcacatccgaaggatgttcatgggcgattcctgcccctatttggctgggaagccaaaaatgtttttcattcagaactatgttgtttcagagggacaattggaggactcaagtctgctggaagtggacggtcccgctatgaaaaacgtagaatttaaggcacagaaaagggggttatgcactgtgcaccgcgaggcagacttcttttggagtttgtgtaccgccgacatgtctctgctggagcagagccacagctctccctcactgtacttgcagtgtctgagccagaagctccggcaagagagaaaacgtccactgctggacttgcatatcgaattaaacggctacatgtacgactggaattcaagggtgagtgccaaggagaagtactacgtatggcttcagcatacactgcgaaagaagttaatcctgtcttacacctag

SEQ ID NO: 79399 - DNA, 2056 bp, Artificial Sequence
  derived and/or modified sequence
cgagtctcaactaaaagggactcccggagctaggggtggggactcggcctcacacagtgagtgccggctattggacttttgtccagtgacagctgagacaacaaggaccacgggaggaggtgtaggagagaagcgccgcgaacagcgatcgcccagcaccaagtccgcttccaggctttcggtttctttgcctccatcttgggtgcgccttcccggcgtctaggggagcgaaggctgaggtggcagcggcaggagagtccggccgcgacaggacgaactcccccactggaaaggattctgaaagaaatgaagtcagccctcagaaatgaagttgactgcctgctggctttctgttgactggcccggagctgtactgcaagacccttgtgagcttccctagtctaagagtaggatgtctgctgaagtcatccatcaggttgaagaagcacttgatacagatgagaaggagatgctgctctttttgtgccgggatgttgctatagatgtggttccacctaatgtcagggaccttctggatattttacgggaaagaggtaagctgtctgtcggggacttggctgaactgctctacagagtgaggcgatttgacctgctcaaacgtatcttgaagatggacagaaaagctgtggagacccacctgctcaggaaccctcaccttgtttcggactatagagtgctgatggcagagattggtgaggatttggataaatctgatgtgtcctcattaattttcctcatgaaggattacatgggccgaggcaagataagcaaggagaagagtttcttggaccttgtggttgagttggagaaactaaatctggttgccccagatcaactggatttattagaaaaatgcctaaagaacatccacagaatagacctgaagacaaaaatccagaagtacaagcagtctgttcaaggagcagggacaagttacaggaatgttctccaagcagcaatccaaaagagtctcaaggatccttcaaataacttcaggagcatacctgaagagagatacaagatgaagagcaagcccctaggaatctgcctgataatcgattgcattggcaatgagacagagcttcttcgagacaccttcacttccctgggctatgaagtccagaaattcttgcatctcagtatgcatggtatatcccagattcttggccaatttgcctgtatgcccgagcaccgagactacgacagctttgtgtgtgtcctggtgagccgaggaggctcccagagtgtgtatggtgtggatcagactcactcagggctccccctgcatcacatcaggaggatgttcatgggagattcatgcccttatctagcagggaagccaaagatgttttttattcagaactatgtggtgtcagagggccagctggaggacagcagcctcttggaggtggatgggccagcgatgaagaatgtggaattcaaggctcagaagcgagggctgtgcacagttcaccgagaagctgacttcttctggagcctgtgtactgcggacatgtccctgctggagcagtctcacagctcaccatccctgtacctgcagtgcctctcccagaaactgagacaagaaagaaaacgcccactcctggatcttcacattgaactcaatggctacatgtatgattggaacagcagagtttctgccaaggagaaatattatgtctggctgcagcacactctgagaaagaaacttatcctctcctacacataagaaaccaaaaggctgggcgtagtggctcacacctgtaatcccagcactttgggaggccaaggagggcagatcacttcaggtcaggagttcgagaccagcctggccaacatggtaaacgctgtccctagtaaaaatacaaaaattagctgggtgtgggtgtgggtacctgtattcccagttacttgggaggctgaggtgggaggatcttttgaacccaggagttcagggtcatagcatgctgtgattgtgcctacgaatagccactgcataccaacctgggcaatatagcaagatcccatctcttta

SEQ ID NO: 79400 - DNA, 1338 bp, Artificial Sequence
  derived and/or modified sequence
atgagcgccgaggtgatccaccaggtggaggaggccctggacaccgacgagaaggagatgctgctgttcctgtgcagagacgtggccatcgacgtggtgccccccaacgtgagagacctgctggacatcctgagagagagaggcaagctgagcgtgggcgacctggccgagctgctgtacagagtgagaagattcgacctgctgaagagaatcctgaagatggacagaaaggccgtggagacccacctgctgagaaacccccacctggtgagcgactacagagtgctgatggccgagatcggcgaggacctggacaagagcgacgtgagcagcctgatcttcctgatgaaggactacatgggcagaggcaagatcagcaaggagaagagcttcctggacctggtggtggagctggagaagctgaacctggtggcccccgaccagctggacctgctggagaagtgcctgaagaacatccacagaatcgacctgaagaccaagatccagaagtacaagcagagcgtgcagggcgccggcaccagctacagaaacgtgctgcaggccgccatccagaagagcctgaaggaccccagcaacaacttcagaagcatccccgaggagagatacaagatgaagagcaagcccctgggcatctgcctgatcatcgactgcatcggcaacgagaccgagctgctgagagacaccttcaccagcctgggctacgaggtgcagaagttcctgcacctgagcatgcacggcatcagccagatcctgggccagttcgcctgcatgcccgagcacagagactacgacagcttcgtgtgcgtgctggtgagcagaggcggcagccagagcgtgtacggcgtggaccagacccacagcggcctgcccctgcaccacatcagaagaatgttcatgggcgacagctgcccctacctggccggcaagcccaagatgttcttcatccagaactacgtggtgagcgagggccagctggaggacagcagcctgctggaggtggacggccccgccatgaagaacgtggagttcaaggcccagaagagaggcctgtgcaccgtgcacagagaggccgacttcttctggagcctgtgcaccgccgacatgagcctgctggagcagagccacagcagccccagcctgtacctgcagtgcctgagccagaagctgagacaggagagaaagagacccctgctggacctgcacatcgagctgaacggctacatgtacgactggaacagcagagtgagcgccaaggagaagtactacgtgtggctgcagcacaccctgagaaagaagctgatcctgagctacacctag

SEQ ID NO: 79401 - DNA, 1155 bp, Artificial Sequence
  derived and/or modified sequence
atggctgaaattggcgaagatctggacaagagcgacgtctcatctttgatatttctgatgaaagactatatgggacgcggtaagattagtaaagagaaatctttcctggacctcgtggtggaactcgagaaactcaacttagttgcacctgaccagctggatctactggagaagtgccttaagaacattcacaggattgacctcaagaccaaaatccaaaagtacaaacagtccgtacaaggggccggtacatcctaccggaacgttctgcaagcagctattcagaaatccttgaaagaccccagtaacaactttcgtttgcacaacggtagatccaaggagcagagactcaaagaacagcttggtgcgcagcaagagccagttaagaagtctatacaggagtctgaagcctttcttccccagtccattcccgaagagagatataagatgaagtcgaaaccgcttggcatctgtcttatcattgattgcataggaaacgaaaccgagttacttcgggacacattcacaagcctggggtatgaagtgcagaagtttcttcacctgagtatgcatggtatttcacagatactgggtcagttcgcatgtatgccagagcaccgggattacgattccttcgtttgcgtgcttgtgtctcgcggcggaagccagtcggtatatggcgtggaccagacacattcaggactccccttgcaccacattcggagaatgtttatgggtgactcatgcccctatctcgctgggaaacccaagatgtttttcattcagaattacgttgtgagcgagggccagctggaggatagttccttgctggaagtggatgggcctgcaatgaagaatgtggaattcaaagcccagaaaaggggcttgtgcaccgtgcatcgggaagctgactttttttggtcgctgtgtaccgccgatatgagcctgttggagcagtcacacagtagtccatcactgtatcttcagtgtctgtcccaaaagttgcggcaagagcgcaagcgccccctgttggatctgcacatagaacttaatggatacatgtacgactggaactcacgggtgtctgcgaaggagaagtactatgtgtggctgcaacataccctgcgcaagaaactgatactgtcgtatacctag

SEQ ID NO: 79402 - DNA, 1155 bp, Artificial Sequence
  derived and/or modified sequence
atggccgagatcggggaggacctggacaagagtgatgtgagcagcctcatcttcctgatgaaggactacatgggccggggcaagatcagcaaggagaagagcttcctggacctggtggtggagctggagaagctgaacctggtggccccagaccagctggacctgctggagaagtgcctgaagaacatccacagaattgacctgaagaccaagatccagaagtacaagcagagcgtgcagggcgccggcaccagctacagaaatgtgctgcaggccgccatccagaagagcctgaaggaccccagcaacaacttccggctgcacaacggccgcagcaaggagcagaggctgaaggagcagctgggcgcccagcaggagcctgtgaagaagagcatccaggagagcgaggccttcctgccccagagcatccctgaggagcgctacaagatgaagagcaagcccctgggcatctgcctgatcatcgactgcattggaaatgaaacagagctgctgcgggacaccttcaccagcctgggctatgaggtgcagaagttcctgcacctgtccatgcacggcatcagccagatcctgggccagtttgcctgcatgcctgagcaccgggactatgacagctttgtgtgtgtgctggtgtcccggggcggcagccagagcgtgtatggagtggaccagacccacagcggcctgcccctgcaccacatccggaggatgttcatgggagacagctgcccctacctggccggcaagcccaagatgttcttcatccagaactacgtggtgtctgagggccagctggaggacagcagcctgctggaggtggatggccctgccatgaagaatgtggagttcaaggcccagaagaggggcctgtgcaccgtgcaccgggaggccgacttcttctggagcctgtgcacagctgacatgagcctgctggagcagagccacagcagccccagcctgtacctgcagtgcctgagccagaagctgcggcaggagaggaagaggcccctgctggacctgcacatcgagctgaatggctacatgtatgactggaacagccgggtgtctgccaaggagaagtactacgtgtggctgcagcacaccctgaggaagaagctgatcctgagctacacctag

SEQ ID NO: 79403 - DNA, 1155 bp, Artificial Sequence
  derived and/or modified sequence
atggccgagatcggcgaggacctggacaagagcgacgtgagcagcctgatttttctcatgaaagattatatgggccgggggaagatttctaaggaaaaaagtttcctagaccttgttgtggaattagagaagctcaatttagtggcccccgaccagctagacctcctggaaaagtgtctgaaaaatattcatcgcatagatctgaaaaccaagatccagaaatacaagcaatccgtgcaaggagcggggacctcctataggaacgtactgcaagcagcgatccaaaagagcctgaaagatcctagcaataacttccggcttcacaacggcaggtccaaagagcagaggcttaaagaacagctgggagcccagcaggagcctgtaaaaaagagcattcaggaaagcgaggcctttctaccccagtctattcctgaggagcgctacaagatgaaatctaagccgctcgggatctgtctaatcatcgactgcataggtaatgagacagaattgctgcgcgacaccttcacttccctgggctacgaagtacaaaagttcctgcatctttcgatgcacgggatctcgcagattctggggcaatttgcttgcatgccagagcacagagactacgacagttttgtgtgcgttcttgtgagcagaggaggcagtcagtctgtgtacggcgtggaccagacccatagcggcctacctctccaccacattcgccgcatgtttatgggcgactcttgcccatacttggccggcaaaccgaagatgtttttcattcaaaattacgttgtaagtgaagggcaactggaggacagcagcctgttagaggttgatggaccagcgatgaagaacgtggagttcaaagcacagaagagaggcctttgtacagtgcatcgtgaggccgacttcttttggagcttgtgcacagctgacatgtccctcctggagcagtctcactcttcgccgtccctgtacttgcagtgtctgagtcaaaaacttcggcaagagcgtaagcgcccattgctggatctgcacattgaactgaacggctacatgtatgattggaattcacgagtgtcagccaaggagaagtactacgtgtggctgcagcatacactcaggaaaaaactaatcctttcttacacgtag

SEQ ID NO: 79404 - DNA, 1155 bp, Artificial Sequence
  derived and/or modified sequence
atggccgaaatcggggaagacctggataaatcggatgtctcttccctaattttccttatgaaggattacatggggcgagggaaaatttcaaaggaaaagagctttctggacctagtcgtggaactggagaagctgaatctggtagccccagatcaactcgacctgctggagaaatgcctgaaaaacattcaccgaatcgaccttaaaacgaaaatacagaagtataagcaatcagtgcagggggctggaacttcttatcgcaacgtactccaggccgctatccagaagtcacttaaggacccgtcaaacaacttcagacttcacaatgggcgtagtaaggaacagagactgaaggaacagctgggtgcacagcaggagccagtgaaaaaatccatccaggaatctgaggccttcctgccccagtcaattccggaggaacggtataagatgaagagcaagccccttgggatctgtcttattatagattgtattgggaatgagacagagttactccgggacaccttcacgagcttgggctatgaggtacagaagtttctgcacctgagcatgcatgggatcagtcaaatactcggccaattcgcttgcatgcctgagcatcgtgactatgactcatttgtgtgcgttctcgtatctagaggtggttcacaaagcgtgtacggcgtggatcagactcacagcggtctgcctctgcatcacattaggcggatgtttatgggggacagctgcccatatcttgccggaaagcctaagatgttcttcattcagaattacgtggtgagcgaaggccaattggaggattcatcactacttgaggttgatggtcccgcaatgaaaaatgttgagtttaaggcgcaaaagaggggactgtgtactgtgcaccgagaggcagacttcttctggtcgctgtgcaccgctgatatgtctctgctagaacagtcacacagttccccttcgttgtaccttcagtgtttgtcccaaaagctgagacaagaacggaagaggcccctccttgatctacatattgagctgaacggttacatgtatgactggaatagccgtgtttcggctaaagagaaatattacgtttggctgcagcatacccttaggaagaagctcatcctgtcttatacctag

SEQ ID NO: 79405 - DNA, 1155 bp, Artificial Sequence
  derived and/or modified sequence
atggccgagatcggcgaggacctggacaagagcgacgtgagcagcctgatcttcctgatgaaggactacatgggcagaggcaagatcagcaaggagaagagcttcctggacctggtggtggagctggagaagctgaacctggtggcccccgaccagctggacctgctggagaagtgcctgaagaacatccacagaatcgacctgaagaccaagatccagaagtacaagcagagcgtgcagggcgccggcaccagctacagaaacgtgctgcaggccgccatccagaagagcctgaaggaccccagcaacaacttcagactgcacaacggcagaagcaaggagcagagactgaaggagcagctgggcgcccagcaggagcccgtgaagaagagcatccaggagagcgaggccttcctgccccagagcatccccgaggagagatacaagatgaagagcaagcccctgggcatctgcctgatcatcgactgcatcggcaacgagaccgagctgctgagagacaccttcaccagcctgggctacgaggtgcagaagttcctgcacctgagcatgcacggcatcagccagatcctgggccagttcgcctgcatgcccgagcacagagactacgacagcttcgtgtgcgtgctggtgagcagaggcggcagccagagcgtgtacggcgtggaccagacccacagcggcctgcccctgcaccacatcagaagaatgttcatgggcgacagctgcccctacctggccggcaagcccaagatgttcttcatccagaactacgtggtgagcgagggccagctggaggacagcagcctgctggaggtggacggccccgccatgaagaacgtggagttcaaggcccagaagagaggcctgtgcaccgtgcacagagaggccgacttcttctggagcctgtgcaccgccgacatgagcctgctggagcagagccacagcagccccagcctgtacctgcagtgcctgagccagaagctgagacaggagagaaagagacccctgctggacctgcacatcgagctgaacggctacatgtacgactggaacagcagagtgagcgccaaggagaagtactacgtgtggctgcagcacaccctgagaaagaagctgatcctgagctacacctag

SEQ ID NO: 79406 - DNA, 1047 bp, Artificial Sequence
  derived and/or modified sequence
atggctgagattggagaagaccttgacaagtccgatgtgtccagcctcatattcctgatgaaagactacatgggacgtggaaagattagcaaggagaagtcatttctagaccttgtcgtcgagcttgaaaaactcaatctggtcgcacccgatcaactcgacctgctcgagaagtgtctgaaaaatatacacaggatcgatttaaaaacaaagattcagaagtataaacagtccgtgcagggagctgggacttcttacaggaacgtccttcaggcagcgatccagaaatccctgaaggacccctcgaataacttccgcgaagagccagttaagaagtcaattcaggaatccgaggcattcctcccccagtcgatccccgaggagcgctacaagatgaagagcaagccactcgggatttgtctgataatcgactgtatcggcaatgaaactgagctgctgagggacacttttacaagcctaggatacgaggtacagaaatttcttcatctgtcgatgcacggcatcagtcagatactcggccaattcgcctgcatgccggaacaccgtgattacgattccttcgtctgcgtgctggtgtcacggggaggcagccaatccgtctacggcgtcgatcaaactcactccggcctcccactgcatcacatacggagaatgtttatgggggattcctgcccctacttagccggcaagcccaagatgtttttcatacaaaattatgttgtgagcgagggccagctggaggactccagtctgttagaagtggacgggcccgccatgaagaacgttgagttcaaggcacagaagcgaggattgtgcacagtacatcgcgaagcagacttcttctggtctctctgcaccgccgacatgtcactgcttgaacagtcccactcatctccctcactctatctgcagtgtctgtctcagaagttgcggcaggagaggggcacaattcccgggtccggcatcactgaaagtaaggatatgcacttctctagccttggatgtatcctgctagacgtgctgtag

SEQ ID NO: 79407 - DNA, 1047 bp, Artificial Sequence
  derived and/or modified sequence
atggccgagatcggggaggacctggacaagagtgatgtgagcagcctcatcttcctgatgaaggactacatgggccggggcaagatcagcaaggagaagagcttcctggacctggtggtggagctggagaagctgaacctggtggccccagaccagctggacctgctggagaagtgcctgaagaacatccacagaattgacctgaagaccaagatccagaagtacaagcagagcgtgcagggcgccggcaccagctacagaaatgtgctgcaggccgccatccagaagagcctgaaggaccccagcaacaacttccgggaggagcctgtgaagaagagcatccaggagagcgaggccttcctgccccagagcatccctgaggagcgctacaagatgaagagcaagcccctgggcatctgcctgatcatcgactgcattggaaatgaaacagagctgctgcgggacaccttcaccagcctgggctatgaggtgcagaagttcctgcacctgtccatgcacggcatcagccagatcctgggccagtttgcctgcatgcctgagcaccgggactatgacagctttgtgtgtgtgctggtgtcccggggcggcagccagagcgtgtatggagtggaccagacccacagcggcctgcccctgcaccacatccggaggatgttcatgggagacagctgcccctacctggccggcaagcccaagatgttcttcatccagaactacgtggtgtctgagggccagctggaggacagcagcctgctggaggtggatggccctgccatgaagaatgtggagttcaaggcccagaagaggggcctgtgcaccgtgcaccgggaggccgacttcttctggagcctgtgcacagctgacatgagcctgctggagcagagccacagcagccccagcctgtacctgcagtgcctgagccagaagctgcggcaggagcggggcaccatccctggcagcggcatcacagagagcaaggacatgcacttcagcagcctgggctgcatcctgctggatgtgctgtag

SEQ ID NO: 79408 - DNA, 1047 bp, Artificial Sequence
  derived and/or modified sequence
atggccgagatcggcgaggacctggacaagagcgacgtgagcagcttgatcttcctcatgaaggattacatgggtaggggtaagatctctaaggaaaagagtttcttggacctggtggtggagctggaaaagctcaaccttgtggccccagatcagcttgatttgttggaaaaatgtctcaaaaatatacaccgaatcgatttgaagacaaaaattcaaaagtacaaacaaagcgtgcaaggggcaggcacttcttaccggaacgtgctccaggcagctatccagaaatccctgaaggacccttccaacaattttcgagaggaaccggttaagaaatcaatccaggaaagtgaggccttcctgccccaatcaataccagaggaaaggtataagatgaagtctaagccgttaggcatttgtctgatcatcgactgcatcggcaacgagacagagcttctcagagacacttttaccagcctagggtacgaggtgcagaagtttctgcatctgtcgatgcacggcattagccagattctgggccaatttgcatgcatgccagagcatcgggactacgatagttttgtatgtgtgctcgtgagccgagggggcagccagtcagtttacggggtggaccagacacacagtggccttccactgcaccacataaggcgaatgtttatgggagatagctgtccatacctggcaggaaaaccaaaaatgttttttattcagaactacgtggtgagcgaaggccaacttgaagatagcagtctactggaggtcgatggtcccgccatgaagaatgtcgaatttaaagcccagaagcggggtctgtgcaccgtgcacagagaagccgactttttctggtctctgtgtacagccgacatgtccctgcttgaacagtcccacagctcaccctctctgtatctccaatgcttgtcccagaagctccgacaagagcgtgggacaattcctggctctggtataactgaaagcaaagatatgcacttcagctcactgggctgcatcctcttagacgtcctttag

SEQ ID NO: 79409 - DNA, 1047 bp, Artificial Sequence
  derived and/or modified sequence
atggctgaaatcggggaagacctggacaagagcgacgtctcttccttgattttcctgatgaaagattacatgggacgtgggaagatttcaaaggagaaatccttcctggatttagtggtggaactggagaaattgaatctggtggcccctgaccaactggatctcctggagaaatgtctcaagaatatccaccggatcgacttgaaaaccaagatacagaaatacaaacagtctgtacagggtgcaggcacatcctaccggaatgtgcttcaggctgccatccaaaagtcccttaaagatccctcaaataactttcgcgaggaaccagtcaagaaaagcattcaggagtcggaagccttcctgccacagtccatccccgaggagaggtacaaaatgaaatccaagcccctggggatctgtcttatcatcgattgcattggcaatgaaacagagctgctcagagacaccttcacatcactaggctatgaggttcagaagtttttgcacctgtctatgcatggaatcagtcagatccttggacaatttgcctgcatgcccgagcaccgggactatgactcgttcgtgtgcgtgctggtatcaagaggcggttcccaaagcgtgtatggggtggatcagacccattcgggactgcccctgcaccatattcggcgaatgttcatgggagactcctgcccttacttagccggaaagccaaagatgttctttatccagaactacgtggtctccgagggacagctggaggattctagcttgctggaagtcgacggcccagcgatgaagaatgtcgaattcaaagcccagaagcggggactgtgtacagttcaccgtgaagcagatttcttctggagcctgtgcactgctgacatgtccctgcttgaacaatcacactcaagccccagcctttacctccagtgtctctcccaaaagctcaggcaggagcgcggaacaattcctggatccggaataaccgaatcaaaggatatgcacttctcttctttagggtgcatccttttggacgtgctctag

SEQ ID NO: 79410 - DNA, 1047 bp, Artificial Sequence
  derived and/or modified sequence
atggccgagatcggcgaggacctggacaagagcgacgtgagcagcctgatcttcctgatgaaggactacatgggcagaggcaagatcagcaaggagaagagcttcctggacctggtggtggagctggagaagctgaacctggtggcccccgaccagctggacctgctggagaagtgcctgaagaacatccacagaatcgacctgaagaccaagatccagaagtacaagcagagcgtgcagggcgccggcaccagctacagaaacgtgctgcaggccgccatccagaagagcctgaaggaccccagcaacaacttcagagaggagcccgtgaagaagagcatccaggagagcgaggccttcctgccccagagcatccccgaggagagatacaagatgaagagcaagcccctgggcatctgcctgatcatcgactgcatcggcaacgagaccgagctgctgagagacaccttcaccagcctgggctacgaggtgcagaagttcctgcacctgagcatgcacggcatcagccagatcctgggccagttcgcctgcatgcccgagcacagagactacgacagcttcgtgtgcgtgctggtgagcagaggcggcagccagagcgtgtacggcgtggaccagacccacagcggcctgcccctgcaccacatcagaagaatgttcatgggcgacagctgcccctacctggccggcaagcccaagatgttcttcatccagaactacgtggtgagcgagggccagctggaggacagcagcctgctggaggtggacggccccgccatgaagaacgtggagttcaaggcccagaagagaggcctgtgcaccgtgcacagagaggccgacttcttctggagcctgtgcaccgccgacatgagcctgctggagcagagccacagcagccccagcctgtacctgcagtgcctgagccagaagctgagacaggagagaggcaccatccccggcagcggcatcaccgagagcaaggacatgcacttcagcagcctgggctgcatcctgctggacgtgctgtag

SEQ ID NO: 79411 - DNA, 501 bp, Artificial Sequence
  derived and/or modified sequence
atgggccccgaggccctgagcagcctgctgctgctgctgctggtggccagcggcgacgccgacatgaagggccacttcgaccccgccaagtgcagatacgccctgggcatgcaggacagaaccatccccgacagcgacatcagcgccagcagcagctggagcgacagcaccgccgccagacacagcagactggagagcagcgacggcgacggcgcctggtgccccgccggcagcgtgttccccaaggaggaggagtacctgcaggtggacctgcagagactgcacctggtggccctggtgggcacccagggcagacacgccggcggcctgggcaaggagttcagcagaagctacagactgagatacagcagagacggcagaagatggatgggctggaaggacagatggggccaggaggtgatcagcggcaacgaggaccccgagggcgtggtgctgaaggacctgggcccccccatggtggccagactggtgagattctag

SEQ ID NO: 79412 - DNA, 420 bp, Artificial Sequence
  derived and/or modified sequence
atgggccccgaggccctgagcagcctgctgctgctgctgctggtggccagcggcgacgccgacatgaagggccacttcgaccccgccaagtgcagatacgccctgggcatgcaggacagaaccatccccgacagcgacatcagcgccagcagcagctggagcgacagcaccgccgccagacacagcagactggagagcagcgacggcgacggcgcctggtgccccgccggcagcgtgttccccaaggaggaggagtacctgcaggtggacctgcagagactgcacctggtggccctggtgggcacccagggcagacacgccggcggcctgggcaaggagttcagcagaagctacagactgagatacagcagagacggcagaagatggatgggctggaaggacagatggggccaggagtag

SEQ ID NO: 79413 - DNA, 756 bp, Artificial Sequence
  derived and/or modified sequence
atgggccccgaggccctgagcagcctgctgctgctgctgctggtggccagcggcgacgccgacatgaagggccacttcgaccccgccaagtgcagatacgccctgggcatgcaggacagaaccatccccgacagcgacatcagcgccagcagcagctggagcgacagcaccgccgccagacacagcagactggagagcagcgacggcgacggcgcctggtgccccgccggcagcgtgttccccaaggaggaggagtacctgcaggtggacctgcagagactgcacctggtggccctggtgggcacccagggcagacacgccggcggcctgggcaaggagttcagcagaagctacagactgagatacagcagagacggcagaagatggatgggctggaaggacagatggggccaggaggtgatcagcggcaacgaggaccccgagggcgtggtgctgaaggacctgggcccccccatggtggccagactggtgagattctaccccagagccgacagagtgatgagcgtgtgcctgagagtggagctgtacggctgcctgtggagagacggcctgctgagctacaccgcccccgtgggccagaccatgtacctgagcgaggccgtgtacctgaacgacagcacctacgacggccacaccgtgggcggcctgcagtacggcggcctgggccagctggccgacggcgtggtgggcctggacgacttcagaaagagccaggagctgagagtgtggccctag

SEQ ID NO: 79414 - DNA, 192 bp, Artificial Sequence
  derived and/or modified sequence
atgggccccgaggccctgagcagcctgctgctgctgctgctggtggccagcggcgacgccgacatgaagggccacttcgaccccgccaagtgcagatacgccctgggcatgcaggacagaaccatccccgacagcgacatcagcgccagcagcagctggagcgacagcaccgccgccagacacagcagatag

SEQ ID NO: 79415 - DNA, 630 bp, Artificial Sequence
  derived and/or modified sequence
atgggccccgaggccctgagcagcctgctgctgctgctgctggtggccagcggcgacgccgacatgaagggccacttcgaccccgccaagtgcagatacgccctgggcatgcaggacagaaccatccccgacagcgacatcagcgccagcagcagctggagcgacagcaccgccgccagacacagcagactggagagcagcgacggcgacggcgcctggtgccccgccggcagcgtgttccccaaggaggaggagtacctgcaggtggacctgcagagactgcacctggtggccctggtgggcacccagggcagacacgccggcggcctgggcaaggagttcagcagaagctacagactgagatacagcagagacggcagaagatggatgggctggaaggacagatggggccaggaggtgatcagcggcaacgaggaccccgagggcgtggtgctgaaggacctgggcccccccatggtggccagactggtgagattctaccccagagccgacagagtgatgagcgtgtgcctgagagtggagctgtacggctgcctgtggagagacggcctgctgagctacaccgcccccgtgggccagaccatgtacctgagcgaggccgtgtactag

SEQ ID NO: 79416 - DNA, 144 bp, Artificial Sequence
  derived and/or modified sequence
agcgaggccgtgtacctgaacgacagcacctacgacggccacaccgtgggcggcctgcagtacggcggcctgggccagctggccgacggcgtggtgggcctggacgacttcagaaagagccaggagctgagagtgtggccctag

SEQ ID NO: 79417 - DNA, 444 bp, Artificial Sequence
  derived and/or modified sequence
atgggccccgaggccctgagcagcctgctgctgctgctgctggtggccagcggcgacgccgacatgaagggccacttcgaccccgccaagtgcagatacgccctgggcatgcaggacagaaccatccccgacagcgacatcagcgccagcagcagctggagcgacagcaccgccgccagacacagcagactggagagcagcgacggcgacggcgcctggtgccccgccggcagcgtgttccccaaggaggaggagtacctgcaggtggacctgcagagactgcacctggtggccctggtgggcacccagggcagacacgccggcggcctgggcaaggagttcagcagaagctacagactgagatacagcagagacggcagaagatggatgggctggaaggacagatggggccaggaggtgatcagcggcaacgaggacccctag

SEQ ID NO: 79418 - DNA, 140 bp, Artificial Sequence
  derived and/or modified sequence
tctgaggccgtgtacctcaacgactccacctatgacggacataccgtgggcggactgcagtatgggggtctgggccagctggcagatggtgtggtggggctggatgactttaggaagagtcaggagctgcgggtctggcc

SEQ ID NO: 79419 - DNA, 501 bp, Artificial Sequence
  derived and/or modified sequence
atgggcccagaggctctgtcttcactgctccttctgctgttagtggcctccggggacgccgatatgaaagggcactttgatcccgctaaatgtcggtacgcgttggggatgcaggaccgcacgataccagactcagacatctccgcctcctcatcttggtctgactctactgctgcgcggcactccaggctggagagttctgacggcgacggagcatggtgtcccgcaggtagtgtgtttcctaaggaggaggagtacctgcaagtggacctacagcggctccacttggtcgccctggtgggaacacagggccggcatgcggggggtctgggcaaggaatttagcaggtcttatcgcttgaggtacagtcgtgacggcagacgctggatggggtggaaagaccgatggggacaggaagtgatatccggcaacgaggaccctgaaggggttgtgctgaaagatctcgggcccccaatggtggcccggttggtcaggttctag

SEQ ID NO: 79420 - DNA, 420 bp, Artificial Sequence
  derived and/or modified sequence
atggggcccgaagccttgagctcactactcttactgttgttagtcgccagcggcgatgccgatatgaaaggtcatttcgaccccgccaagtgtcgctatgcgctgggtatgcaggaccgtactattccggatagtgacatctctgctagctcgagctggagcgattcaactgctgcacgacattctaggctggagagcagtgacggtgacggtgcctggtgtcctgccggtagcgtgttccccaaggaggaagagtatttgcaagtggatctccagaggctgcacctcgttgctctggtgggaacacaaggcagacacgcaggcggtttgggaaaagaattctcccgtagctaccgcctccgatacagcagagacgggcgcaggtggatgggatggaaggaccgatggggccaagagtag

SEQ ID NO: 79421 - DNA, 756 bp, Artificial Sequence
  derived and/or modified sequence
atgggcccagaagcgctatccagtcttctcctcttgctgcttgttgcgtcaggagacgctgacatgaaggggcactttgatccagccaagtgccgatacgccctgggtatgcaggacagaacaataccggattcagacatcagtgcctccagcagctggtcagactcaacagctgcccggcactctcggctggaatcaagtgacggcgacggggcatggtgtccggccggcagcgtctttccaaaggaggaggaatatctccaggttgatctgcagaggctccacctcgtcgcgctggtaggtactcagggtagacacgccgggggcctgggcaaggagttttctcgatcgtataggctccggtactcccgtgacggacgtcgatggatgggctggaaagatcggtggggccaggaagttatcagtggtaatgaagaccccgagggagtagttctgaaggacctgggtccaccaatggttgctagactggtgagattttacccccgggccgatcgcgtgatgtcggtgtgcctgcgagtcgagttgtacggatgtttgtggcgggatggccttttatcgtataccgcccccgtcggccagacaatgtacctgtctgaagctgtttacctcaacgattctacctacgatggtcatactgtcggaggtctgcagtatggggggctgggacagcttgccgatggagtcgtcggcttggatgatttccgaaaatctcaggagttgcgggtgtggccctag

SEQ ID NO: 79422 - DNA, 420 bp, Artificial Sequence
  derived and/or modified sequence
atgggcccagaggccctaagctcgctccttcttctgttactcgtcgcaagcggagacgcagacatgaagggccacttcgatccagcaaagtgccgctatgctctcgggatgcaggatagaacgatccccgacagtgacattagtgccagtagctcttggtctgacagtacagcagcgcggcattcgagactagagagtagcgacggtgacggagcctggtgccccgcgggtagcgtgtttcccaaggaagaagaatacctgcaagtggatctgcagcgattgcaccttgtagcccttgttggcacacaggggcggcatgccggtgggcttggtaaggaattctcccgctcttatcgcctgagatactcccgcgatggcaggagatggatgggctggaaagaccgttggggacaagaatag

SEQ ID NO: 79423 - DNA, 756 bp, Artificial Sequence
  derived and/or modified sequence
atgggaccggaggccctgagttccctactactgttactcctagtagcttccggcgatgccgatatgaaaggccattttgaccccgcaaagtgtcggtatgccctcgggatgcaggaccgcactattcccgactctgatatctccgcatccagtagctggagcgactctactgcagctcggcacagtaggctcgagtcaagtgacggagatggagcctggtgtcccgctggttccgtatttcccaaagaagaggaatacttgcaggtggacctgcagagactgcatttagtagctctagtgggaactcagggacgacacgccggggggctggggaaggagttttcgcgttcctatagactgcggtattctagagatggcagaagatggatgggatggaaggatagatggggtcaggaagtaatcagcggaaatgaggatcctgaaggcgtagtacttaaggatctcgggccacccatggtggcacggctggtgaggttctaccctagggcggacagggtcatgagtgtttgtctcagagtcgaactttatggctgcctgtggagagatgggctacttagctatacagctcccgtggggcagacaatgtacctatcagaagcagtttatcttaatgactccacctatgacggacataccgtgggaggtttacagtacggcggtctcggccagctggcagatggagtggtcggattggacgatttccgtaagagccaggaactgcgcgtgtggccctag

SEQ ID NO: 79424 - DNA, 420 bp, Artificial Sequence
  derived and/or modified sequence
atgggccctgaggccctgtcatccctgcttctcctgctgctcgtcgccagcggggatgcggacatgaaaggccatttcgatcccgcgaaatgtcggtacgccctcggcatgcaggaccgcactatcccagatagcgacatctccgccagtagctcttggtccgattccaccgccgccagacacagcagacttgagagctccgatggcgatggagcctggtgtccagccggatccgtgttcccaaaagaagaggagtacctgcaagttgatttacagcgccttcacttagtggcactggttggtactcaaggccggcacgccgggggtctgggcaaggagttctctagaagctatcgactgcgttattctcgagatgggcgccgctggatgggttggaaggacagatggggtcaagagtag

SEQ ID NO: 79425 - DNA, 756 bp, Artificial Sequence
  derived and/or modified sequence
atgggccccgaggcactgagctcgttactgctactgctcctggtggcgtctggcgacgccgacatgaagggccattttgacccagcaaagtgtcgatatgctctggggatgcaggataggaccattccagactctgacatttctgcgagctcctcttggtccgattcaaccgcagctcggcattcccgcttggagagcagcgacggggatggcgcttggtgtccggccggctccgtttttcctaaggaagaggagtacctgcaagtggatctccagaggctgcatctcgtggccctggtagggactcagggcaggcacgcagggggattgggtaaagaattttcaagatcttacagacttagatatagccgggatggccgacgttggatgggatggaaagacagatggggccaggaggtgatatcaggtaacgaggacccagagggcgtggttctgaaagacctcggaccccccatggtggctcggctggtgcgcttttaccctagggccgaccgcgtcatgtctgtgtgcctgcgggttgaattatacgggtgcctctggagagacgggttactgtcttatacagcaccagtaggtcagactatgtacctgtccgaggctgtctacctaaacgactctacttacgatggccatactgtgggtggcttacagtatggcggactgggtcagctcgcggacggagtggttggactggatgattttcgtaaatcccaggaactgagggtgtggccctag

SEQ ID NO: 79426 - DNA, 756 bp, Artificial Sequence
  derived and/or modified sequence
atgggtccagaagctctgtcctctttgttgttacttttgctcgtggcatctggcgatgctgatatgaaaggccacttcgatcccgccaaatgccgctatgctctgggaatgcaggaccgaaccattcctgatagtgatatctcggcgtcaagttcatggtcagactctacggcagctcggcactctcggttagagtcctccgacggtgatggagcatggtgccctgctggttccgtgttccccaaagaggaagagtatttacaggttgacctacaaagactacacttggtagccttggttgggacacagggccgtcatgcaggtggattgggtaaggaattttcacgctcctataggcttcgctactctcgggacggaagacgctggatggggtggaaggatagatggggacaggaggtgatttcagggaatgaggaccccgagggggtggtcctaaaagaccttggcccacctatggtggctaggctcgtgaggttctacccaagggcggaccgcgtgatgtcagtgtgtctccgtgtggagctgtacggctgcctctggcgtgacggtctcctgtcctacacagctccagtgggccaaaccatgtatctcagcgaagcggtttatctgaacgattctacttatgacggccatacggtaggaggtcttcaatacggaggtctcggccagcttgcggatggggtagtcggcctggacgactttaggaaatcccaagagctgcgagtgtggccttag

SEQ ID NO: 79427 - DNA, 420 bp, Artificial Sequence
  derived and/or modified sequence
atgggcccagaggccttgtcctctttattgttacttctcctcgtcgccagtggcgacgcggatatgaaaggccacttcgaccctgcaaagtgcagatacgccctgggtatgcaggacagaacaattccagattctgacatcagcgcttcgagttcgtggagtgacagtacagccgcacgccactctagactcgagagtagcgatggggacggcgcctggtgtcccgccggctcagtctttccaaaggaagaagagtaccttcaggtggacttgcagagacttcacttggtggcattggttggcacacaaggacgccacgccggaggcttgggaaaagagttctcacgtagctataggctgcggtactcccgcgatggacggcggtggatggggtggaaggatagatggggccaagagtag

SEQ ID NO: 79428 - DNA, 192 bp, Artificial Sequence
  derived and/or modified sequence
atgggccctgaagccctcagttccctactgctcctcctgctggtggcatctggagacgctgatatgaaaggccacttcgaccccgcaaagtgccggtatgcgctaggcatgcaggatagaactattccagactctgatatttctgcatcctctagctggtccgatagcactgctgcacgccacagccgctag

SEQ ID NO: 79429 - DNA, 756 bp, Artificial Sequence
  derived and/or modified sequence
atgggaccagaggctctttcttctcttctgcttctgctccttgtggcatccggcgacgcagacatgaaaggtcactttgatcccgcaaagtgtagatatgctctgggaatgcaggatcgtaccattcccgattcggacatctctgctagcagctcatggagtgatagcaccgcagcaagacattctcggctggagagcagtgatggggatggagcctggtgccctgccggttccgtgtttccaaaggaggaggaatatctccaagtggatctacaaaggcttcatcttgtcgccctagtgggaacccaagggcgtcatgccggcggattgggaaaggaattcagtagaagttataggctgaggtactctcgcgacgggagaagatggatgggatggaaggacaggtggggtcaggaggtgatttcagggaacgaggatccagaaggggtggtcttgaaggacctcggacccccaatggtggcgagactagtccgcttttatccccgggccgatagggtcatgtcggtgtgtctgcgcgtggaactttatgggtgcctgtggagagatggtttgctctcatataccgcacccgttgggcagactatgtacctgagcgaagccgtgtatctcaatgattctacttacgacggtcatacagtagggggacttcaatatggtggtctgggccagctagcggacggtgtggtcgggcttgacgattttcgtaagtcccaggagctgagggtctggccttag

SEQ ID NO: 79430 - DNA, 420 bp, Artificial Sequence
  derived and/or modified sequence
atggggccagaggccctcagcagtctgctactgctgctgcttgtggccagcggagatgctgatatgaaaggccactttgatcctgctaagtgcaggtacgcattaggtatgcaggacaggacaattccggattcggacataagcgcttcctctagctggagtgattctaccgcggctcgccatagccgcctcgagagttccgatggcgacggggcatggtgccctgcaggcagtgttttcccaaaagaggaggaatatctgcaggtcgacctccagcgcttgcatctagtggccctggtgggaacccagggtaggcacgcaggaggtctcgggaaggagttctcaagatcctaccgcctgcgatacagccgcgatggcaggcggtggatgggctggaaagataggtggggccaagaatag

SEQ ID NO: 79431 - DNA, 420 bp, Artificial Sequence
  derived and/or modified sequence
atgggccccgaagccctttcctcactgctactcctgctcctggtcgccagcggcgacgcggatatgaaaggtcatttcgatccggccaaatgtcgctacgcactgggtatgcaggaccgtactatccccgactccgatatttccgcctctagcagctggtctgatagcaccgctgcccgacactcacgcctggaaagctctgatggagacggggcctggtgccccgcgggatctgtatttccaaaggaggaggagtacctgcaggtcgatttacaacgacttcacctcgttgccctggtggggactcagggacgtcatgccggaggccttggcaaagaattctccagatcctatcgcttacgctacagccgggatggtcggagatggatgggttggaaagatcgatgggggcaggagtag

SEQ ID NO: 79432 - DNA, 192 bp, Artificial Sequence
  derived and/or modified sequence
atgggacctgaggctttgtctagtctattgttgctgctgctagtcgcatccggggacgcagacatgaagggtcactttgatcccgccaagtgtagatatgccctgggtatgcaggacagaaccatcccggattcggacatttcggcatcctctagttggagcgacagcactgccgcacgacactcgagatag

SEQ ID NO: 79433 - DNA, 630 bp, Artificial Sequence
  derived and/or modified sequence
atgggccccgaggcattatcctccttactcttactactgctagtcgccagcggggacgccgatatgaagggccattttgatcctgccaaatgtcgttatgctctgggaatgcaggaccgaactatccccgacagcgacataagcgcctcgtccagttggtccgacagtacggcagcaagacactcacgtctggagtcatcagatggggacggagcttggtgcccagccggcagcgttttccctaaggaggaggaatacctgcaagtagaccttcagcgcttgcatctcgtggctttggtcggaacgcaaggcagacatgctggcggcctcggaaaggagttcagccggtcgtatcggcttcgctactccagagacgggaggcgctggatgggatggaaagaccggtggggccaagaagtgatctctgggaacgaagatcccgaaggtgtggtgctgaaagacctgggccctccgatggtggcacgactggtgaggttctatccaagagcagaccgcgtcatgtccgtgtgcttgcgggtggaactatacgggtgtctgtggcgcgacggcctcttgtcatataccgcccccgttggccagaccatgtacttgtccgaagctgtctactag

SEQ ID NO: 79434 - DNA, 420 bp, Artificial Sequence
  derived and/or modified sequence
atgggacccgaagccctatcttccctgctgctcctgttattggtggccagtggtgatgccgacatgaagggccactttgatcctgcgaagtgccgatacgctttggggatgcaggaccgcacaattcccgatagcgacataagtgcctccagttcttggtcagacagtacagccgcgagacatagcaggttagagtcatccgatggcgacggcgcttggtgccctgcaggttccgtcttccccaaggaggaagaatacctgcaggtggaccttcagcggctccacctggttgccctggtgggcacgcaggggcgccatgctggcggtctcgggaaggagttttctagaagctaccggctgcgctactcaagagatggaaggaggtggatgggttggaaagatcgttgggggcaagaatag

SEQ ID NO: 79435 - DNA, 420 bp, Artificial Sequence
  derived and/or modified sequence
atgggacccgaagcactttcctcactcctgctgctcttgctcgtggccagcggcgatgccgatatgaaggggcattttgacccggcgaagtgtagatacgctctgggtatgcaggatcggactatcccagattcagacatctctgcctctagtagttggagcgatagcacagctgctcgacacagccggctggagtcgagtgatggtgacggagcatggtgtcccgctggaagcgttttccctaaagaagaggaatatttacaagttgacctgcagcggctgcatctggtggcactcgtgggcacccagggacggcacgcaggagggttggggaaggaattcagccgctcttatcgcctgagatatagccgcgatggccgcaggtggatggggtggaaagatcgatggggccaagagtag

SEQ ID NO: 79436 - DNA, 420 bp, Artificial Sequence
  derived and/or modified sequence
atggggcctgaggccctcagcagcctgttgctattgctcttggtcgcctcaggcgacgctgacatgaaagggcactttgacccagcaaaatgtcgctatgccttgggaatgcaggatagaacaattcctgatagtgacatctctgcgagctcaagctggagtgacagtaccgcggcacgtcacagcaggctggaatcatcagatggcgacggagcctggtgccctgccgggagtgtgttccccaaggaggaagagtatctgcaggtggatcttcagcggttgcacctggtggctctggtcggcacccaaggcagacatgccggaggtttgggtaaggaattctctaggtcttatcgcctcaggtacagcagagatgggcgccggtggatgggatggaaggatcggtggggtcaggaatag

SEQ ID NO: 79437 - DNA, 144 bp, Artificial Sequence
  derived and/or modified sequence
agtgaggctgtgtaccttaacgactccacctacgacggtcacacggtgggaggtctgcagtacggtggcctcggacaactcgccgatggtgtcgtgggcttggatgatttccgaaaatcacaggagttgcgagtctggccatag

SEQ ID NO: 79438 - DNA, 444 bp, Artificial Sequence
  derived and/or modified sequence
atggggcccgaagcgctttcttctcttcttctcctgctgctagtggctagcggggatgccgacatgaaggggcatttcgaccccgctaagtgcagatacgccctggggatgcaagatcgtaccataccagacagcgatatctctgcttcaagctcatggagcgattccaccgctgctcgccactctagactggaatcatctgacggagacggagcctggtgtcctgccggaagtgtcttccctaaggaggaagagtaccttcaggttgatttgcagcgcctgcacctggtggccctggtgggtactcagggtcgacatgctggtgggctgggaaaagagttctcaaggagctaccgtttgcgctactccagggatggtaggcggtggatggggtggaaagaccgctgggggcaggaagtaatcagcggcaatgaggacccctag

SEQ ID NO: 79439 - DNA, 420 bp, Artificial Sequence
  derived and/or modified sequence
atgggacctgaagctctgtcttctctgcttctgctgctgctcgtagcatcgggagatgctgatatgaaaggacacttcgaccccgctaaatgccggtatgcgctcggtatgcaggacaggaccattcccgactccgatatctcggctagcagttcctggtccgactcaaccgcggccaggcattctcggctggaaagctcggacggtgacggggcctggtgccccgccgggtctgtcttccctaaggaagaagaatatctgcaggtggacctgcagcgcctgcatctggtggcactggttgggacacaagggaggcacgctggcggacttgggaaagagttctcaagaagttacagactacggtacagcagagacggaagaagatggatggggtggaaagataggtgggggcaggagtag

SEQ ID NO: 79440 - DNA, 501 bp, Artificial Sequence
  derived and/or modified sequence
atgggccctgaggccctgagcagcctgctgctgctgctgctggtggccagcggagatgctgacatgaagggccactttgatcctgccaagtgccgctatgccctgggcatgcaggacaggaccatcccagacagcgacatcagcgccagcagctcctggagcgacagcacagctgcccggcacagccggctggagagcagtgatggagatggagcctggtgcccagctggcagcgtcttccccaaggaggaggagtacctgcaggtggacctgcagaggctgcacctggtggccctggtgggcacccagggcagacatgctgggggcctgggcaaggagttcagccgcagctaccgcctgcgctacagcagagatggaagacgctggatgggctggaaggaccgctggggccaggaggtgatctctggaaatgaagatcctgagggcgtggtgctgaaggacctgggcccccccatggtggcccggctggtgcgcttctag

SEQ ID NO: 79441 - DNA, 420 bp, Artificial Sequence
  derived and/or modified sequence
atgggccctgaggccctgagcagcctgctgctgctgctgctggtggccagcggagatgctgacatgaagggccactttgatcctgccaagtgccgctatgccctgggcatgcaggacaggaccatcccagacagcgacatcagcgccagcagctcctggagcgacagcacagctgcccggcacagccggctggagagcagtgatggagatggagcctggtgcccagctggcagcgtcttccccaaggaggaggagtacctgcaggtggacctgcagaggctgcacctggtggccctggtgggcacccagggcagacatgctgggggcctgggcaaggagttcagccgcagctaccgcctgcgctacagcagagatggaagacgctggatgggctggaaggaccgctggggccaggagtag

SEQ ID NO: 79442 - DNA, 756 bp, Artificial Sequence
  derived and/or modified sequence
atgggccctgaggccctgagcagcctgctgctgctgctgctggtggccagcggagatgctgacatgaagggccactttgatcctgccaagtgccgctatgccctgggcatgcaggacaggaccatcccagacagcgacatcagcgccagcagctcctggagcgacagcacagctgcccggcacagccggctggagagcagtgatggagatggagcctggtgcccagctggcagcgtcttccccaaggaggaggagtacctgcaggtggacctgcagaggctgcacctggtggccctggtgggcacccagggcagacatgctgggggcctgggcaaggagttcagccgcagctaccgcctgcgctacagcagagatggaagacgctggatgggctggaaggaccgctggggccaggaggtgatctctggaaatgaagatcctgagggcgtggtgctgaaggacctgggcccccccatggtggcccggctggtgcgcttctaccccagggctgacagagtgatgtctgtgtgcctgcgggtggagctgtatggctgcctgtggagagatggcctgctgagctacacagcccctgtgggccagaccatgtacctgtctgaggccgtgtacctgaatgacagcacctatgatggccacacagtgggcggcctgcagtatggaggcctgggccagctggctgatggagtggtgggcctggatgacttcaggaagagccaggagctgcgggtgtggccctag

SEQ ID NO: 79443 - DNA, 192 bp, Artificial Sequence
  derived and/or modified sequence
atgggccctgaggccctgagcagcctgctgctgctgctgctggtggccagcggagatgctgacatgaagggccactttgatcctgccaagtgccgctatgccctgggcatgcaggacaggaccatcccagacagcgacatcagcgccagcagctcctggagcgacagcacagctgcccggcacagcaggtag

SEQ ID NO: 79444 - DNA, 630 bp, Artificial Sequence
  derived and/or modified sequence
atgggccctgaggccctgagcagcctgctgctgctgctgctggtggccagcggagatgctgacatgaagggccactttgatcctgccaagtgccgctatgccctgggcatgcaggacaggaccatcccagacagcgacatcagcgccagcagctcctggagcgacagcacagctgcccggcacagccggctggagagcagtgatggagatggagcctggtgcccagctggcagcgtcttccccaaggaggaggagtacctgcaggtggacctgcagaggctgcacctggtggccctggtgggcacccagggcagacatgctgggggcctgggcaaggagttcagccgcagctaccgcctgcgctacagcagagatggaagacgctggatgggctggaaggaccgctggggccaggaggtgatctctggaaatgaagatcctgagggcgtggtgctgaaggacctgggcccccccatggtggcccggctggtgcgcttctaccccagggctgacagagtgatgtctgtgtgcctgcgggtggagctgtatggctgcctgtggagagatggcctgctgagctacacagcccctgtgggccagaccatgtacctgtctgaggccgtgtactag

SEQ ID NO: 79445 - DNA, 144 bp, Artificial Sequence
  derived and/or modified sequence
tctgaggccgtgtacctgaatgacagcacctatgatggccacacagtgggcggcctgcagtatggaggcctgggccagctggctgatggagtggtgggcctggatgacttcaggaagagccaggagctgcgggtgtggccctag

SEQ ID NO: 79446 - DNA, 444 bp, Artificial Sequence
  derived and/or modified sequence
atgggccctgaggccctgagcagcctgctgctgctgctgctggtggccagcggagatgctgacatgaagggccactttgatcctgccaagtgccgctatgccctgggcatgcaggacaggaccatcccagacagcgacatcagcgccagcagctcctggagcgacagcacagctgcccggcacagccggctggagagcagtgatggagatggagcctggtgcccagctggcagcgtcttccccaaggaggaggagtacctgcaggtggacctgcagaggctgcacctggtggccctggtgggcacccagggcagacatgctgggggcctgggcaaggagttcagccgcagctaccgcctgcgctacagcagagatggaagacgctggatgggctggaaggaccgctggggccaggaggtgatctctggaaatgaagacccctag

SEQ ID NO: 79447 - DNA, 501 bp, Artificial Sequence
  derived and/or modified sequence
atgggccccgaggccctgagcagcctgctgctgctgctgctggtggccagtggagatgctgacatgaagggtcacttcgaccccgccaaatgtcgatacgccctcggcatgcaggatcggactattccagacagtgacattagcgcaagcagttcatggtcagacagtacagcagcccggcacagtcgactggaatcatcagacggcgatggggcttggtgcccggcggggtctgtattcccgaaggaagaggagtaccttcaggtggatctacagcggcttcacctagttgctttggtaggcacacagggcaggcatgctggcggcttgggtaaagaattttcaagaagctatcgccttcggtacagcagggatgggcgacggtggatggggtggaaagatcgctggggccaggaggttatatccggaaatgaagatcccgaaggcgtcgtgctgaaagacctaggcccacccatggtcgccaggctcgtgcggttctag

SEQ ID NO: 79448 - DNA, 420 bp, Artificial Sequence
  derived and/or modified sequence
atgggccccgaggccctgagcagcctgctgctgctgctgctggtggcttcaggggacgccgacatgaaagggcattttgaccccgctaaatgccgttacgcccttggcatgcaggatcggactataccagactctgacattagcgcatcttcgtcttggagcgattctacagccgcccgccattcaaggctcgaaagtagcgacggtgatggggcctggtgtcccgccgggagtgtgtttcctaaggaagaagagtacctgcaagtcgatctgcagaggcttcacctggtggccttggttggcacccagggcagacatgccggaggactgggcaaggagtttagtaggtcatataggctgaggtatagcagagatggccggaggtggatggggtggaaagaccgctgggggcaagagtag

SEQ ID NO: 79449 - DNA, 756 bp, Artificial Sequence
  derived and/or modified sequence
atgggccccgaggccctgagcagcctgctgctgctgctgctggtggcttccggagatgctgacatgaagggacattttgaccctgcaaaatgtagatacgcgctaggcatgcaagacaggactattccagattccgacatatccgcttccagcagctggtctgattcgaccgccgcacgtcattctcgcctggaatccagtgacggcgatggcgcctggtgccctgcgggcagcgtgttccctaaggaagaagagtatctgcaggtggatctgcaacgcctccatctggtggcccttgtaggcactcagggaaggcatgcaggcggcctgggaaaggagttctctcgctcttacaggttgcggtattcccgggatggacgacgttggatggggtggaaagatcggtggggccaagaggtcattagcggcaatgaagaccccgagggagtcgtgctaaaggatctcgggcctcccatggtagctagactggttagattttaccccagggccgacagagttatgagcgtttgtcttcgcgttgaactgtacgggtgcctgtggagggacggcctgctaagctacaccgcccctgtggggcagactatgtacttaagcgaggccgtctatttgaacgatagtacttacgatggacatactgtgggtggactgcagtatggaggattgggccagttggcagatggcgttgtgggcttggatgattttaggaaaagccaagagctgcgggtttggccttag

SEQ ID NO: 79450 - DNA, 420 bp, Artificial Sequence
  derived and/or modified sequence
atgggccccgaggccctgagcagcctgctgctgctgctgctggtggcatccggcgacgccgacatgaaggggcatttcgaccccgccaagtgtagatacgcattggggatgcaagaccggactatacccgatagcgatatctccgcttcgtccagttggtctgactccacggccgccaggcattcccgcctcgagtcttcagacggtgatggcgcctggtgccccgccggctccgtgtttcctaaagaggaagagtacctgcaggtggatctgcagcggctgcatctcgtggcgttggtaggtacacaggggaggcacgctggcggactcgggaaagagttctctcggagctatagactacggtatagtcgtgatggacgccggtggatgggttggaaagataggtggggtcaggagtag

SEQ ID NO: 79451 - DNA, 756 bp, Artificial Sequence
  derived and/or modified sequence
atgggccccgaggccctgagcagcctgctgctgctgctgctggtggcttcaggcgacgcagatatgaagggtcacttcgaccctgcaaaatgtcgctacgccctgggaatgcaggataggaccatccccgactccgatatttctgcctcctcatcatggtctgatagcacggctgccaggcactccagactggagtcttctgatggcgatggcgcctggtgtcctgcaggctccgtctttcccaaggaggaggagtacctccaggtcgatttgcagaggctgcacttggtggcattggtgggcacccagggcagacacgctgggggcctggggaaagagttttccaggtcatacagactccgctactcacgcgacgggcggcgctggatgggatggaaggacaggtggggccaggaggtgatcagtggcaatgaggaccccgaaggcgtggttctgaaggacctcgggccccccatggtggctcgactggtgcgtttctaccctcgggccgatcgggttatgtcggtgtgccttagagttgagctgtacggttgtctctggagggatggattactctcttacactgccccggtcggtcaaacgatgtatttatccgaagccgtttacctcaacgattctacatacgacgggcataccgtcgggggcctgcagtacgggggccttggccaattggccgatggggttgtgggcctggacgattttcgcaagtcccaggagctccgggtctggccctag

SEQ ID NO: 79452 - DNA, 420 bp, Artificial Sequence
  derived and/or modified sequence
atgggccccgaggccctgagcagcctgctgctgctgctgctggtggcctctggcgatgcagatatgaaaggacattttgacccagccaagtgccggtacgcactgggtatgcaggatcggaccattcccgatagcgacatttcagcctcatcatcatggagtgactcaaccgccgctagacatagtagattagaatcaagcgatggcgacggcgcgtggtgccccgcaggctcagtcttcccgaaggaggaagagtacctgcaagtggatttacagcgccttcaccttgttgcgctggtggggacgcaggggcggcacgccggcggattgggcaaagaattcagtaggtcctatcgccttaggtattctagagacggacgccgctggatgggctggaaagatcgttggggtcaggaatag

SEQ ID NO: 79453 - DNA, 756 bp, Artificial Sequence
  derived and/or modified sequence
atgggccccgaggccctgagcagcctgctgctgctgctgctggtggcatctggcgatgcggatatgaaggggcacttcgatccggctaagtgtcggtacgctctcgggatgcaggatagaaccattcctgatagcgacattagcgcgagctctagttggtctgactcaaccgcagccaggcatagtcggcttgaaagctccgacggtgacggcgcatggtgtcccgctgggtccgtctttccaaaggaggaggagtatctgcaggtagatctgcagagactgcaccttgttgctttagttgggacacaggggcggcacgcggggggattaggaaaagaattctcacggtcatatcggcttcggtacagtcgggacggccggcgctggatggggtggaaggatcggtggggacaggaggttatctctggaaacgaagatcccgaaggagtcgtcctgaaggatctaggcccgcctatggtcgctaggcttgtgaggttctacccccgggcggacagggttatgtccgtatgcctgcgcgtggaactttacggttgcttatggcgcgacgggctcttatcctacaccgcccctgtgggacagaccatgtatctttcagaggccgtctatctgaacgattcaacctatgacggacacactgtgggagggctgcagtacggagggctgggccagttggctgacggcgtggtcgggttagatgacttccgcaaatctcaggaattacgcgtctggccctag

SEQ ID NO: 79454 - DNA, 756 bp, Artificial Sequence
  derived and/or modified sequence
atgggccccgaggccctgagcagcctgctgctgctgctgctggtggcaagcggcgacgcagatatgaagggccatttcgatcccgccaaatgccggtatgccctcggcatgcaggatcggactattcctgatagcgatatcagcgcctccagttcatggagcgacagcacagcggccaggcattcccgcctcgagagctctgatggagacggtgcatggtgccctgccggatccgtgttcccgaaagaggaggaatacctgcaggtcgatttacagaggttgcatctggttgccttggtgggaacccagggccgccatgcgggcgggctggggaaggagttctcccggagttacagacttcgatattctcgagatgggcggagatggatgggttggaaagatcgatggggccaggaagtgattagtgggaatgaagacccagagggcgtggtgctcaaggatctcggcccaccaatggtcgctcgccttgtacgattctatccgcgagccgatcgcgtgatgtcagtttgcctccgcgttgaactttacgggtgcttatggagagatggcctcttgtcctataccgcccctgtgggccaaaccatgtacctatctgaagctgtatatctgaacgatagcacctatgatgggcacaccgtgggaggactgcaatatggtggactcggtcaactggccgatggagtagtgggcctcgatgatttccgcaaaagccaggaattgcgcgtctggccttag

SEQ ID NO: 79455 - DNA, 420 bp, Artificial Sequence
  derived and/or modified sequence
atgggccccgaggccctgagcagcctgctgctgctgctgctggtggcctctggtgacgctgatatgaaagggcacttcgatccagctaaatgtcgatatgcccttgggatgcaagatcgcacaatcccagactccgacatctctgcttcaagttcttggtcagacagcactgcagcgagacactcgagattagagagcagtgatggggatggcgcttggtgtccagctggctccgtattccctaaggaagaggaatatctccaagttgacttgcagcggttgcacctggttgctctcgtcggaacacaaggccgccacgctggcggcttgggaaaggagttctcaaggtcataccgcctgcggtacagtcgcgatggacgtcgctggatgggctggaaagatcggtggggccaagaatag

SEQ ID NO: 79456 - DNA, 192 bp, Artificial Sequence
  derived and/or modified sequence
atgggccccgaggccctgagcagcctgctgctgctgctgctggtggcatcaggtgacgccgacatgaaaggccactttgacccagccaagtgcaggtacgccttaggtatgcaagatagaacaattccggactccgacattagcgcgagtagttcatggtcagatagtaccgctgcgcgtcactcaaggtag

SEQ ID NO: 79457 - DNA, 756 bp, Artificial Sequence
  derived and/or modified sequence
atgggccccgaggccctgagcagcctgctgctgctgctgctggtggcttcaggagacgcagatatgaagggccatttcgaccctgctaaatgccggtacgccctgggaatgcaggacagaaccattccggactccgacatcagcgcttcatccagctggtccgattccactgcagcgcgtcacagccggttagagagcagtgatggagacggtgcatggtgtcccgccgggtccgtgtttccaaaagaagaagagtacctgcaagtggatctccaacggctccatctggtcgcccttgtcgggacgcaggggaggcatgccggtggcttgggcaaagagttctctcgctcctacagactccggtatagccgagacgggcgccgctggatgggatggaaggatagatgggggcaggaagtcatcagcggcaatgaggatcctgaaggcgtagtgctaaaggacctaggacccccgatggtggccagactggttaggttttatccgcgggcggatcgagtaatgtctgtatgccttcgagtggaactgtatggctgcctctggagggacggactgctgtcgtataccgcccccgttggacaaactatgtatctgtccgaagccgtgtacctcaacgacagcacctatgacggccataccgtgggaggtctgcagtatggggggctaggccagcttgccgacggcgttgttggcctggatgattttcgcaagagccaggaacttcgcgtctggccctag

SEQ ID NO: 79458 - DNA, 420 bp, Artificial Sequence
  derived and/or modified sequence
atgggccccgaggccctgagcagcctgctgctgctgctgctggtggcctcaggagacgccgacatgaagggtcattttgaccctgctaaatgccggtacgccctgggtatgcaagatcgcacaatccctgactctgacatttccgcatctagctcctggtccgatagtactgccgcgcgacacagtcggctcgagagttctgacggagatggtgcctggtgcccagcgggctctgtctttcccaaagaggaagaatacctgcaggtggacttacagcgcttgcatctggttgcactagtgggtacccagggacgccacgccgggggcctgggtaaagaattttcccgatcctataggctacgctatagtagggacggccgacgttggatgggttggaaagaccggtggggacaggaatag

SEQ ID NO: 79459 - DNA, 420 bp, Artificial Sequence
  derived and/or modified sequence
atgggccccgaggccctgagcagcctgctgctgctgctgctggtggcctcaggggacgccgatatgaaaggtcatttcgaccccgccaagtgccgctacgccctgggtatgcaggaccgtacgatacccgactccgatatttctgcctcttccagctggagcgatagcactgcggccagacatagccggttggagtctagcgatggcgatggtgcatggtgtcccgccgggagcgtgttccctaaggaggaagagtacctgcaggtagatctccaacggcttcaccttgtggcccttgtgggaacgcaggggagacacgccggggggctaggcaaggagttctctaggagttaccggttgaggtactctagggacggacgcagatggatgggttggaaggatcgatggggacaggagtag

SEQ ID NO: 79460 - DNA, 192 bp, Artificial Sequence
  derived and/or modified sequence
atgggccccgaggccctgagcagcctgctgctgctgctgctggtggctagcggcgacgctgacatgaagggccatttcgatccagccaaatgtcgctacgctctggggatgcaggatcggacaatccccgattccgatatttctgccagcagttcttggtcagattcaaccgctgcaaggcattcacgttag

SEQ ID NO: 79461 - DNA, 630 bp, Artificial Sequence
  derived and/or modified sequence
atgggccccgaggccctgagcagcctgctgctgctgctgctggtggctagcggcgacgcagatatgaaaggacactttgatcccgccaagtgccgctatgcactggggatgcaggataggactatacccgattccgacatttctgcttcaagctcctggtccgatagcaccgccgctaggcacagccgattggagagctccgacggtgatggggcgtggtgtcctgccggcagcgttttcccgaaagaggaagagtacttgcaagtggacctgcaacggctgcacctggttgcactcgttgggacacagggccggcacgcaggaggcctcggtaaagaattttcaaggtcctaccgcctacggtatagtagagatggcaggagatggatgggatggaaggatcgctggggccaggaggtaattagcggaaacgaggacccagagggggtggttctcaaggatctcggccccccaatggtggcgcggctggtgcggttctaccccagggctgatagagtgatgtctgtttgcttgcgcgtcgagctgtatgggtgtctttggagagacggactgctgagctacaccgctcctgtgggtcagaccatgtatctttccgaagcagtgtattag

SEQ ID NO: 79462 - DNA, 420 bp, Artificial Sequence
  derived and/or modified sequence
atgggccccgaggccctgagcagcctgctgctgctgctgctggtggcctccggggatgcagatatgaagggacactttgacccagccaagtgccgctatgctttaggcatgcaggaccgcacaatcccagactccgatattagtgcctctagttcttggagcgactcaaccgccgctcgtcacagtcggctcgagtccagtgacggagacggcgcttggtgtcccgccggctccgtcttcccaaaagaggaggaatatctccaggtggacttacaaaggcttcacctcgtggcgctcgtcggaacccagggtcgtcacgctggtggcctgggaaaagagttctcccgtagttataggttgcgctactctagggacggtcgcagatggatgggatggaaggatagatgggggcaggaatag

SEQ ID NO: 79463 - DNA, 420 bp, Artificial Sequence
  derived and/or modified sequence
atgggccccgaggccctgagcagcctgctgctgctgctgctggtggctagcggggatgctgacatgaaaggacattttgatccagctaaatgtaggtatgccctgggcatgcaagacagaactatcccggatagtgatatctcagcaagcagctcatggtctgatagtactgccgccagacactcccgcctggagagcagcgacggcgacggggcctggtgtccggcggggtcagtatttccgaaagaggaggagtaccttcaggtggatctgcagcgcctgcacctggtcgcgctggttggcacacaaggccgccacgcggggggtctcgggaaggagttctcacgaagctatagattgcgatattcccgcgatggtcggcgctggatgggctggaaggaccgctggggacaggaatag

SEQ ID NO: 79464 - DNA, 420 bp, Artificial Sequence
  derived and/or modified sequence
atgggccccgaggccctgagcagcctgctgctgctgctgctggtggcttcgggcgacgccgacatgaaggggcatttcgatcccgccaaatgtcgatatgcgttgggtatgcaggatcggaccatcccagactccgatatcagcgcttcctctagctggtccgattctacggcagctaggcactctaggctggagtccagcgatggcgacggtgcctggtgcccagccggaagtgtcttccccaaggaggaggagtacctgcaggtcgacctgcagcgactgcaccttgttgcccttgtcggaacgcagggtcgtcacgccgggggattggggaaggagttctcaaggagctatcgattaaggtactcaagggacggaagaaggtggatgggttggaaggaccggtggggtcaagagtag

SEQ ID NO: 79465 - DNA, 144 bp, Artificial Sequence
  derived and/or modified sequence
agcgaggccgtgtacctgaacgacagcacctacgacggccacaccgttgggggcttacaatacggtggcctcggacagctagccgatggggtagtggggctggatgacttccgaaaatcccaggaactacgggtgtggccgtag

SEQ ID NO: 79466 - DNA, 444 bp, Artificial Sequence
  derived and/or modified sequence
atgggccccgaggccctgagcagcctgctgctgctgctgctggtggcaagtggggatgcggatatgaaaggacactttgacccagcaaaatgtaggtacgcactgggcatgcaggatcggaccattcctgattctgatatcagcgcatcttcttcgtggtctgactcaactgccgcgaggcattcaaggctcgagtcttccgatggggatggcgcttggtgtccagccgggagtgttttccctaaagaagaagagtatctgcaggtggatctccagcgccttcacctagttgcactggttggaacacagggtaggcacgcaggagggctagggaaggagttttcccgatcctatcgactgaggtactcacgagacggccgccggtggatgggctggaaggaccgttggggccaggaagtgattagcggaaatgaagatccatag

SEQ ID NO: 79467 - DNA, 420 bp, Artificial Sequence
  derived and/or modified sequence
atgggccccgaggccctgagcagcctgctgctgctgctgctggtggcatcaggcgatgccgacatgaagggccattttgatccggcaaaatgtcgctacgctctgggaatgcaagatcggaccatcccagactctgacattagcgcttcctccagctggtctgacagtactgccgccaggcatagcaggctggaatcatccgatggagacggcgcttggtgtcctgctggatcagtctttccgaaggaggaggaatatctacaagttgacctccagaggctgcacctcgtggcgctggtcggtacccaaggacggcacgcaggcggcctcgggaaggagttttcgcgttcgtatcgactgcgctactcaagagacggaaggcgttggatggggtggaaggacagatggggacaggagtag

SEQ ID NO: 79468 - DNA, 501 bp, Artificial Sequence
  derived and/or modified sequence
atgggcccagaagctttgtcctctctgctcctgctgctcttagtggccagcggcgacgctgacatgaaaggccattttgaccccgctaagtgccggtacgccctggggatgcaggatcgtacaataccagacagcgatatttccgcaagctcttcttggagtgatagcacagccgctcgccacagtaggctggaatccagcgacggcgacggagcctggtgccccgcaggtagcgtgtttcctaaagaggaggagtatctgcaggttgaccttcaacggctgcatctagtagcactggtgggaacccaaggccgacatgcagggggactcggaaaggagttttcgcggagttaccgccttaggtactccagagacggtagacgatggatgggttggaaagaccgttggggacaggaagtgatctccgggaatgaggatccagaaggggtggtgctcaaagacctcgggcctcccatggtcgccagattggtgcgattctag

SEQ ID NO: 79469 - DNA, 420 bp, Artificial Sequence
  derived and/or modified sequence
atgggacctgaagccttatcctcactcctgcttctcctcctggtggcgagcggtgatgccgatatgaaaggacattttgatcctgctaagtgccgttacgccttaggaatgcaggatagaactattcctgattcagatatcagtgcctcttcttcctggtctgatagcaccgctgcaaggcattcccggctggaatcaagcgatggggacggtgcgtggtgtcccgctggatccgtcttcccgaaggaagaggagtatctccaggtagacctacagcggctgcatcttgttgctttggttgggacacagggaagacacgctggcggtctaggaaaggaattctctagaagctaccggctcagatactctagagacggcaggcgttggatgggatggaaggacagatgggggcaggaatag

SEQ ID NO: 79470 - DNA, 756 bp, Artificial Sequence
  derived and/or modified sequence
atgggaccggaggccctcagctccctgctgctgctgcttttggtggcaagtggggacgctgatatgaagggtcactttgaccccgcaaaatgccgctacgctcttgggatgcaggaccggactatccctgatagtgacatatctgcctcaagctcctggtcagacagtacagctgcacgtcactctagactcgagagctccgatggtgatggcgcttggtgccccgcagggtcggtgttcccgaaagaggaagagtaccttcaagttgacctgcagcggttgcacctcgtggcgctcgtaggaactcaggggcgtcatgccggaggcctggggaaggagttttctcgctcttaccggctgcgctacagtcgggacgggagacgatggatggggtggaaggatagatgggggcaggaagttatatccggtaacgaagatccagaaggggtcgttttaaaagacctgggaccccctatggtcgctcgtctcgtgcgcttctaccctagagccgatagggtgatgtccgtgtgtcttagagtagagctgtacggatgtctatggagggacggcctgctgtcttacaccgcccctgtaggtcagaccatgtacttgtcagaagctgtgtatctgaacgatagtacatacgatgggcacactgtcggcggtttgcagtacggagggctggggcagctggcagacggcgtggtggggcttgatgactttcggaagagtcaggagttgcgtgtttggccttag

SEQ ID NO: 79471 - DNA, 420 bp, Artificial Sequence
  derived and/or modified sequence
atggggccagaagcactgtcaagcctgctgcttctgcttctggtagcctctggagatgccgatatgaagggacactttgacccggcaaagtgtcgctacgccctgggcatgcaggacagaacgattcctgatagtgatatcagtgccagctcttcctggagcgatagcaccgctgccaggcattctagactcgaaagttccgacggcgatggcgcttggtgcccagcgggatccgtgtttccgaaagaggaggaatatctgcaggttgacttacaaagactacatttagtggcattggtgggcacacaaggtcggcatgctggagggctgggaaaggaattctccaggagttacagactacggtattcccgtgatggccgaaggtggatgggatggaaggatagatgggggcaggaatag

SEQ ID NO: 79472 - DNA, 756 bp, Artificial Sequence
  derived and/or modified sequence
atgggccctgaggcgctaagctctcttttgttgctgttgctggtggccagcggcgacgctgatatgaaaggccacttcgatcctgccaagtgtcgctacgcattgggaatgcaggacagaacaatcccagacagtgacatcagcgctagtagctcttggtcggattccactgccgcacgccacagcagactcgagtcctccgacggggacggagcatggtgccccgctggctcggtgtttcctaaggaggaagagtacctacaagtcgatctgcagaggctccacctcgtggctctcgttggaacacaagggcgacatgccggtggtttaggtaaggaattctcccgctcctatagacttcgttactcgcgagacggtcgtcgctggatgggttggaaagacaggtgggggcaggaggtgatcagtggcaatgaagacccagagggtgtggtcctaaaggatctgggcccacctatggtggccagactggtgcgcttttatccacgggcagatcgcgttatgagcgtgtgtctgcgggtggaattgtacggctgtctgtggagagacggtcttctgagctatactgctcccgtgggccagacaatgtatctgtccgaggctgtctatctgaacgacagcacttatgatggacatacggttgggggactgcagtatggaggattgggccagcttgcagacggggtcgtgggtctcgacgatttccgcaagagtcaggagctgcgcgtatggccttag

SEQ ID NO: 79473 - DNA, 420 bp, Artificial Sequence
  derived and/or modified sequence
atggggcctgaggcactgtcatcactgctcctcctcctgctagtggcgtccggtgacgcagacatgaaaggacactttgatccagccaaatgccggtacgctctgggaatgcaagacaggacaataccagacagtgatatttcagcgtcaagcagttggtccgatagcacggccgctaggcacagcaggttggaaagttccgatggggatggtgcgtggtgccctgcgggaagtgtgtttcccaaggaagaggaatacctgcaggtggatctgcaaaggctccatctcgtggccctggtgggtactcagggacgtcacgcagggggtcttgggaaggaatttagcagaagctaccgattaagatactctcgggatgggcgtcgctggatgggctggaaggatcgatgggggcaggaatag

SEQ ID NO: 79474 - DNA, 756 bp, Artificial Sequence
  derived and/or modified sequence
atgggccctgaggcgctatctagtctgctgctgctcctgctcgttgcctccggcgatgcggacatgaagggccacttcgatccagctaaatgccggtacgccctgggcatgcaggacagaaccattcctgacagcgacatctccgctagtagtagctggagtgattctacagctgctcgccattcaagacttgagagcagcgacggcgatggcgcttggtgcccagctggcagtgtgttccctaaagaggaagaatacctgcaggtagatctgcagcgacttcacctcgtggctctggtcggtacacagggacgacatgccggaggcctgggtaaggagttctctagatcctacaggctgagatacagcagggacggaaggcgatggatgggatggaaggacagatgggggcaggaagtgatatccggcaatgaagaccccgagggcgtggtgctgaaggacctgggcccacccatggtggctaggctggtgcggttctaccccagagcagatcgcgtgatgagcgtatgtctccgcgtcgagctttacggctgcctatggcgggatggactgctgagctacaccgcacctgtcgggcagaccatgtacctatctgaggccgtgtacctgaacgattccacctatgacggacacactgtaggaggcctccagtacggcggactgggccagctggctgatggcgttgtgggtctagatgacttccgcaagagccaagagcttcgcgtttggccttag

SEQ ID NO: 79475 - DNA, 756 bp, Artificial Sequence
  derived and/or modified sequence
atgggaccagaggccctgtcctctctgttactattgctgcttgtggcctccggggatgccgatatgaaaggccactttgatccagctaagtgtcgttacgctcttggtatgcaggatcggaccataccagacagcgatatctctgcctcatcatcatggtccgacagcacagcagcgcgtcattcacgccttgaaagcagtgacggcgatggagcttggtgtcctgccggtagcgtttttcctaaagaagaagagtacctgcaagtggatctgcagcgcctgcatctcgtggctctagtagggacacagggcaggcacgccggtggcctgggcaaagaattcagtcggtcttaccgcctcaggtattcacgggacggtaggcggtggatgggctggaaggacagatggggacaggaagtcatatcaggtaatgaggatcccgaaggagtggtactaaaggacctgggaccccctatggttgctcgacttgtcagattctacccaagagctgatagggtcatgagtgtgtgtctgcgcgtcgagctgtacgggtgcctttggagggatgggttgctgagctacaccgcccctgtcgggcagaccatgtatctgtccgaagccgtgtacctgaacgattcaacgtacgacggacacactgtcgggggtcttcaatacggcggattgggccagctggccgacggagttgtgggcctggacgacttccgcaagtcccaggaactcagagtgtggccatag

SEQ ID NO: 79476 - DNA, 420 bp, Artificial Sequence
  derived and/or modified sequence
atgggacctgaagctctctcgagtcttctgctgctgctactggtcgcctcaggcgatgccgacatgaaaggccatttcgatccagctaagtgtcggtatgccttgggcatgcaggatagaactattcccgattcagatatttccgcaagcagtagctggtcggacagcacggccgctcggcatagccgcctggaaagtagcgatggtgatggcgcttggtgtccagccggaagcgtattccccaaagaagaagaatatctgcaagtagacctccagcgcctgcacctggtggccctagtaggcacccagggcagacatgctggtggcctcggcaaggagtttagtagatcttaccggctcagatattcgagagacggccgacgctggatgggctggaaggaccgatggggacaggagtag

SEQ ID NO: 79477 - DNA, 192 bp, Artificial Sequence
  derived and/or modified sequence
atgggtccggaggcactgtccagcttgctcctcctattactcgtcgctagcggcgatgccgacatgaaggggcacttcgatccagcaaaatgtcgctacgccttgggaatgcaagaccggacgatccccgactcagatatatccgcctctagctcctggtcggactccaccgctgcgcgacacagcaggtag

SEQ ID NO: 79478 - DNA, 756 bp, Artificial Sequence
  derived and/or modified sequence
atggggcctgaggctctgtcctccctgctcttactgctcctagtagcgtctggggacgctgatatgaaaggccactttgacccagccaagtgtagatatgccttaggtatgcaggatagaactatacccgatagcgacatttccgcaagtagtagttggtcggactcgacggccgctcgccattcccgtcttgaatctagtgacggcgacggtgcttggtgtcctgctggctctgttttccccaaggaagaggaatatctccaggttgatcttcagaggctgcacctagtggccctagttggaacacaaggcaggcacgctggtgggctgggaaaggaattctcaagatcctacaggctgcgttactcccgggacggcagacggtggatggggtggaaggaccggtggggccaggaggttataagtgggaatgaagaccccgagggcgtagttttaaaggatctcggcccaccaatggttgctcggctggtgcgattttaccctagggcagatcgtgtaatgtctgtctgtcttagagtggaactgtacggatgcctatggcgggatggactgctctcttacaccgccccagtcggtcagacaatgtatcttagcgaggcagtataccttaacgactctacatatgatggccacaccgtcggtgggctgcagtatggcggtctggggcagctggccgacggcgtggtgggactggacgactttaggaagagtcaggagcttcgcgtgtggccctag

SEQ ID NO: 79479 - DNA, 420 bp, Artificial Sequence
  derived and/or modified sequence
atggggccagaagccctgtccagcctgctgttgctgctgttggtcgcttcaggcgacgccgacatgaaaggacatttcgatccagcaaaatgcaggtatgcactgggcatgcaggataggactatacccgactcagatattagcgcatcctcatcatggagcgactccacagcagccaggcatagtcggcttgagagctcagacggtgatggtgcctggtgtcccgcagggagcgtgtttccaaaagaggaggaatatctgcaggttgacctgcaacggctgcatttggtggccctggtgggcactcagggcagacatgccggaggtctgggtaaggagttcagcaggagctataggttgaggtacagccgcgacggccgacggtggatggggtggaaggaccgctgggggcaggaatag

SEQ ID NO: 79480 - DNA, 420 bp, Artificial Sequence
  derived and/or modified sequence
atgggacctgaagccctttcttcactactgctcctgctgttggtcgcaagtggggacgccgacatgaagggtcatttcgatccagccaagtgtcgctacgcccttggcatgcaggatagaacgatcccggacagcgacatcagtgctagttcgagctggtccgactctacagccgctagacactcccggctggaatcaagtgacggcgatggcgcttggtgtccagccggttctgtcttcccaaaggaagaagaatacctccaggtggatcttcagcgactacacctcgtggccctcgtgggcacccagggtcgccacgcaggtggcctcggaaaggaattctcccggtcttataggttaagatactctagggatggcagaaggtggatgggctggaaggacaggtgggggcaagagtag

SEQ ID NO: 79481 - DNA, 192 bp, Artificial Sequence
  derived and/or modified sequence
atgggcccagaagctctgagctcactgctgctcctgttgctggtggcctccggagacgcggatatgaaaggccatttcgatccagcgaaatgtagatatgcgctgggcatgcaggacaggacaatcccagacagcgatatctccgcctcctcctcctggagtgactcaacagcagccaggcacagcaggtag

SEQ ID NO: 79482 - DNA, 630 bp, Artificial Sequence
  derived and/or modified sequence
atgggcccagaagccctgtcttccctgctccttctcctgcttgtggccagcggagatgccgacatgaaaggccatttcgatcctgccaaatgtcggtatgctcttggcatgcaggataggacaatacccgactctgatatttcagccagcagctcttggtcagattcaaccgctgctcggcatagtcgcctcgagtcctccgacggtgatggcgcttggtgccctgccggatcggtttttccaaaggaagaagagtatctgcaagtggatctgcagagactgcacctggtggccctagtgggcacgcaggggagacatgccggaggcttaggcaaagagttcagtagatcttacaggctgcgctacagccgcgatgggcgtcgctggatgggttggaaagaccgctggggccaggaggtcatctccggcaacgaggatcccgagggagtggtgctcaaggacttaggccctcccatggtggcccgacttgtccgtttctatcctcgagctgatagggttatgagtgtttgcctcagggtggaactctatggttgtctttggagagatggactactcagctatacagcacccgtaggccagacaatgtacctttccgaagccgtctactag

SEQ ID NO: 79483 - DNA, 420 bp, Artificial Sequence
  derived and/or modified sequence
atgggacctgaggctttgtcttccttactgttactgctgttggtagcctcaggggacgccgacatgaagggacactttgacccagcgaagtgtcgttatgcactgggcatgcaggaccggacgattcccgacagcgacattagcgcgagctcaagttggagcgactccactgctgcacgccattctcgcctcgaatcttccgatggcgatggggcatggtgcccggcagggagcgtgtttcccaaggaagaggagtatctgcaggttgacctgcagaggctccacctggtggctttagtgggcactcagggaagacacgcgggaggactgggtaaggaatttagcaggtcatacagactgcgctacagcagagacgggaggagatggatgggctggaaggatcgatggggacaggaatag

SEQ ID NO: 79484 - DNA, 420 bp, Artificial Sequence
  derived and/or modified sequence
atggggcctgaggccctatcatccctgctgctgctgctgctcgtcgcctctggtgatgccgacatgaagggacatttcgatcctgcaaaatgccgatacgccttaggaatgcaggatagaactataccagactcagatatttctgcgagttcctcctggagcgactcaaccgctgcacggcactctagacttgaaagctctgacggggacggggcttggtgcccagctggatcagtgttcccaaaggaggaggagtacctgcaggtcgaccttcagcggctccacctggtggcactggtgggtacccagggacgccacgccggaggactgggtaaggagtttagcagatcctatcgactccggtatagtagagatggtcgacgctggatgggttggaaggataggtgggggcaagagtag

SEQ ID NO: 79485 - DNA, 420 bp, Artificial Sequence
  derived and/or modified sequence
atggggccagaggccctcagctccctgctccttttgctactcgtggcctccggagatgctgatatgaaaggtcattttgaccctgctaaatgcaggtacgctctgggtatgcaagaccggacaatacctgattcagacattagcgcctcctcttcttggtccgatagcacagccgcacggcacagtagattggagtcatcagatggtgacggagcctggtgtcccgctggaagcgtttttccaaaagaggaggagtacctccaggtggatttgcagcgtctgcacctggtagctctggtggggacccagggccgacacgccggtggcctcggcaaggagttctctaggagttatcggctgcggtactcccgggatggcaggagatggatgggttggaaagacaggtggggccaggaatag

SEQ ID NO: 79486 - DNA, 144 bp, Artificial Sequence
  derived and/or modified sequence
tccgaggctgtgtatttgaacgattctacctacgatggccatactgttggtggacttcagtacggaggcctcggtcaactggccgatggcgtggtcgggctggatgattttaggaagagccaagaactgagggtttggccgtag

SEQ ID NO: 79487 - DNA, 444 bp, Artificial Sequence
  derived and/or modified sequence
atgggacccgaagcactcagtagcttactgctgctcctcctggtggcttcaggggatgccgacatgaagggtcacttcgatccagccaagtgcaggtacgctttgggcatgcaggatcgcacaatccctgacagcgacatctccgcctcctcttcgtggtcagactctacggctgccaggcactctcgactggagagttccgacggagatggcgcttggtgtcctgcagggagcgtgttcccaaaggaggaagagtatttacaggtggatctacagcggctgcatctcgtggccttggtcggcacccagggacggcacgcaggtggcttaggtaaggagttctctcggagctaccgcctccgatactcccgggacggtagacgctggatggggtggaaagatcgctggggacaagaggtaatttctggtaatgaagatccatag

SEQ ID NO: 79488 - DNA, 420 bp, Artificial Sequence
  derived and/or modified sequence
atgggacccgaagcgttaagcagtctacttcttctccttctagtggcttctggcgacgctgacatgaaaggacactttgaccctgcaaaatgccggtatgcccttggcatgcaggaccgaacaattcccgatagtgatatttccgcctcatcctcctggtccgactccactgctgctcgtcatagcagacttgagagtagtgacggtgacggtgcatggtgcccggctggcagcgtgtttcccaaggaagaggaatatctgcaggtcgatctgcagcggttgcacctagtggctctggtaggtacacaggggagacatgcaggaggtctcggcaaagaattctcacggagctaccggctgaggtattctcgggacgggagacgctggatgggctggaaggataggtgggggcaggagtag

SEQ ID NO: 79489 - DNA, 732 bp, Artificial Sequence
  derived and/or modified sequence
atgggccccgaggccctgagcagcctgctgctgctgctgctggtggcctccggcgatgcggacatgaaaggccactttgatcccgcaaaatgccggtatgccttggggatgcaggaccgcactatcccggattcagacatatctgccagctcgtcatggagcgacagtacggccgcccggcactcccgcttggagtcatcggatggggacggcgcctggtgccccgcgggcagcgtcttcccaaaggaggaggagtacctgcaggtggacttgcaaagactccaccttgttgctctggtggggacgcagggcaggcacgccggcggcctgggaaaagagttttctcgaagctacagactaaggtactctagggacggtcgcaggtggatgggctggaaggacagatggggacaagaggtgatatcaggcaatgaagatccagagggggttgtgttaaaagatctcggccctccaatggtcgcccgactagttcgcttttaccctcgagctgaccgcgtgatgtctgtgtgtctccgtgttgaattgtacggctgcctgtggcgggattgctctatgggcgtgtgggcttcatggcagatggtctggtggggttggatgaccctaggccgggtgagaagttgcggctcaggccaggctatgaccatgtgggatggtgctactacagccagccccgtggccatgtggcggtggagcttatcactgaccggatag

SEQ ID NO: 79490 - DNA, 732 bp, Artificial Sequence
  derived and/or modified sequence
atgggccccgaggccctgagcagcctgctgctgctgctgctggtggcctccggtgatgcagacatgaagggacattttgatccagccaaatgtcgctacgctctaggcatgcaggaccgaactatccctgacagcgacatctcggcttcaagctcttggagcgattcgacagcagcccgacacagcagactggaatccagcgatggtgacggggcttggtgtccagcaggcagcgttttccccaaggaggaggaatacctccaggtggatcttcaaagactccatctcgtggccctcgtgggaacacagggaaggcacgccggaggccttggcaaggagttctctcgctcttatcggctgcgctatagtcgggatgggaggcgttggatgggttggaaagatcgctggggacaagaagtgatatctggcaatgaggaccccgagggcgttgtgttgaaagacttaggtccaccaatggtagctaggttagtgagattctatcccagagctgaccgcgtcatgagtgtatgtctgcgcgtggaactatacggatgcctttggcgcgactgcagtatgggagtctgggcaagctggcagatggtgtggtggggatggatgactctgggtcgagtccggtcctgcggaagcggccaggccatgacaatgtgggacggggctaccaccgcgtcaccagtggccatgtggcggtggtccctgtcattgaccggctag

SEQ ID NO: 79491 - DNA, 732 bp, Artificial Sequence
  derived and/or modified sequence
atgggccccgaggccctgagcagcctgctgctgctgctgctggtggccagcggggacgctgatatgaagggacactttgaccccgccaaatgcagatatgcactcggaatgcaggacagaacaatcccagacagtgacatttccgccagttcttcatggtccgactccacggccgcccgccactcgcgtttggagtcatctgacggcgacggcgcttggtgccctgcaggaagtgtcttccctaaagaggaggagtatctgcaggttgacctccagcggcttcaccttgtcgcattagtggggactcagggaaggcatgcggggggactcggaaaagaattctcgagaagttatcggttgcgttactcccgcgacgggagaagatggatgggctggaaggatcgatggggtcaggaggtcatttcagggaacgaggacccagagggtgtcgtacttaaggatctgggaccgcctatggtcgcaaggctcgtccgcttctacccaagggcagatcgtgtcatgtctgtgtgcctgcgggtggagctgtatggatgtctgtggagagattgttctatgggagtttgggccagctggcagatggtatggtggggctggatgacgctggggcgtgtacgaagctgtgggtctggccaggcaatgacgatgtgggacggcgcgacgacagcaagccccgttgctatgtggcgctggagcttgagtcttacaggatag

SEQ ID NO: 79492 - DNA, 732 bp, Artificial Sequence
  derived and/or modified sequence
atgggccccgaggccctgagcagcctgctgctgctgctgctggtggcttctggtgatgcagatatgaaaggccatttcgaccccgccaaatgtagatatgccttgggaatgcaggacaggaccattcctgactcagatatctccgccagctcttcgtggagcgacagcactgctgcaagacattccaggctggaaagctctgatggagacggggcttggtgccccgctggctcagtgttcccaaaagaagaggagtatctgcaggtggatctgcagcgactccacctggtggctctagtggggactcaggggaggcacgccggcggactgggcaaagagttcagccggtcctaccgccttcggtactcacgagacggccgtagatggatgggatggaaagatcgatggggacaggaggtgatctcaggaaatgaggaccctgagggagttgtcttgaaagacctggggcctccaatggtagctcgcctggtgagattctatcctcgtgccgaccgcgtgatgtctgtgtgcctgcgggtggagttgtacggctgcctgtggcgggattgctcaatgggagtctgggcatcctggcagatggtatggtggggctggatgaccctcggaagagtgcgcagttgtggttcaggtcaggctatgactatgtgggatggagcgaccactgcgtcgcccgtggccatgtggaggtggagtctcagtttaacgggttag

SEQ ID NO: 79493 - DNA, 444 bp, Artificial Sequence
  derived and/or modified sequence
atggggcctgaagcactgagctcattgttattgctgcttctcgtcgcttcaggcgatgcagacatgaagggccacttcgaccccgcaaaatgcagatacgccttgggcatgcaggatcggacaatcccggactccgacatatcagctagctccagctggagtgactcaaccgcagccaggcatagtaggctggagtcatcagacggagacggtgcctggtgcccagctgggtccgtgttcccaaaggaggaagagtacctccaagtcgatcttcagcggcttcacttggtggctctagtggggacccagggcagacacgccggaggtttgggaaaggaattctctcggtcgtaccggttgcggtactcacgggacggtagaagatggatgggctggaaggatagatgggggcaggaagtcatcagtggtaacgaagacccatag

SEQ ID NO: 79494 - DNA, 444 bp, Artificial Sequence
  derived and/or modified sequence
atgggtcctgaggcactgagcagtctgctcctcctgctcctggttgcatccggagacgccgacatgaagggtcacttcgatcccgcaaagtgtaggtacgcgttagggatgcaggatcgaacaataccagactccgatatcagcgccagcagcagttggagcgacagcaccgctgcccgtcactcccgattagaatcatcggacggcgacggggcatggtgcccagctggtagcgtgttccctaaggaggaggaatacttgcaggtcgacctacagcggctgcacctggtagccctggtcggcactcagggcagacatgcgggaggcctggggaaagaattcagcagatcttatcggttgcggtactcaagagacggaaggaggtggatgggttggaaggacaggtgggggcaggaggtgatctcaggtaacgaggatccttag

SEQ ID NO: 79495 - DNA, 444 bp, Artificial Sequence
  derived and/or modified sequence
atgggcccagaagccctcagctctcttctgctgctcttgctggtggcctccggggacgctgatatgaaaggccacttcgacccagccaagtgtagatacgcactcggcatgcaggaccgtacgatacccgacagcgacatttctgcgtcaagttcatggagtgattccaccgccgcacgccattcccgtctagaatcttcagacggcgacggggcttggtgtccagccggatcggtgttccctaaggaggaagaatatctgcaggtcgacctgcaaagactacaccttgtcgctctggtggggacccagggacggcacgccggagggctgggcaaagaattttcacgctcctacagactgagatactctcgtgacgggagacggtggatgggctggaaagacagatggggccaggaggttataagcggaaatgaagacccgtag

SEQ ID NO: 79496 - DNA, 177 bp, Artificial Sequence
  derived and/or modified sequence
atgggccctgaggccctctcatcgcttttgctactgctactcgttgcaagtggcgacgccgacatgaagggtcattttgaccccgcaaaatgtaggtacgcgctgggcatgcaggacaggaccatccccgattccgacatctccgcctcctcatcctggagtgactcaaccgcgtag

SEQ ID NO: 79497 - DNA, 420 bp, Artificial Sequence
  derived and/or modified sequence
atgggacccgaggccctgagctccctcttactgctgctgcttgtagcgagcggggacgccgacatgaagggacattttgacccggctaagtgtaggtacgctctggggatgcaggacagaacaatccccgattccgacattagcgcctcaagctcgtggagtgattcgacggccgcacgacatagccgtctggagtcgagcgatggagatggtgcctggtgccccgcagggtctgtgttcccgaaggaggaggaatatttgcaagttgatctacagcgcctacacttagtggccctcgtgggtacccagggtcggcatgcgggaggtcttgggaaggaattttcaagaagctaccgcctcagatactctcgggacgggaggagatggatggggtggaaggaccgctggggacaggaatag

SEQ ID NO: 79498 - DNA, 420 bp, Artificial Sequence
  derived and/or modified sequence
atgggtccggaggccctgagtagcctgctgttactgctgcttgtggcctccggggacgcggatatgaagggccattttgatccagctaagtgccgttatgcactgggtatgcaggacaggactattcctgattctgacatctctgccagctctagctggtctgatagcactgctgccaggcatagtagacttgaatctagcgatggcgacggtgcatggtgtccggcaggcagtgtgttccccaaagaagaggagtatctgcaggtggatctccagagactgcacttagtcgctctcgtcgggacgcaaggacggcatgccggagggctggggaaagaatttagtcggtcctatcgcctccggtatagccgagatgggaggaggtggatgggatggaaggatcgatggggccaggagtag

SEQ ID NO: 79499 - DNA, 420 bp, Artificial Sequence
  derived and/or modified sequence
atggggcctgaggctctcagttccctgcttctcttactgttagtggcttccggcgacgcagacatgaaaggacacttcgatcccgcaaaatgccgctacgcccttggcatgcaggacaggaccatcccggactctgacataagtgcctcatcttcttggagcgacagtacagctgcacgccactcccggttagagagctcggatggcgacggcgcttggtgccctgctggctcagtgtttcctaaggaagaagaatatttacaggtagatcttcaacgcctgcaccttgtggcccttgtgggtacccagggcaggcacgcgggtggactcggcaaggaattctctcgatcatatcggctgcggtatagtcgggacggtcggagatggatgggctggaaggaccgctggggccaggaatag

SEQ ID NO: 79500 - DNA, 630 bp, Artificial Sequence
  derived and/or modified sequence
atggggcctgaggcactgtcttccctcctgctgctgctactggtggcttcgggcgacgccgatatgaaaggacacttcgacccagcaaaatgccggtatgccttaggtatgcaagatcgaaccatccctgatagcgacatctcagcgtcttctagctggtccgactccaccgccgcaagacacagtaggttggaatcttctgacggggacggggcatggtgtccagccggtagtgtattccccaaggaagaagagtatcttcaagtcgacctgcagaggttacatctcgtcgcccttgtggggacgcagggacgccacgcaggcggtttggggaaagagttctcccggtcatacaggctcaggtacagtagggacggcaggcgatggatggggtggaaagatcgatggggccaggaggtgatcagcggaaatgaagaccccgagggggtcgtgctgaaagacctggggcctcccatggtggctaggctggtcagattttaccctagggctgacagggttatgtcagtatgtcttcgtgtggagctgtatgggtgtctgtggagagacggcctgctttcctatacggctcccgtgggacaaacgatgtatctgtccgaggcagtgtattag

SEQ ID NO: 79501 - DNA, 630 bp, Artificial Sequence
  derived and/or modified sequence
atgggccctgaagccctaagctcccttctgctactcctgctggtggcctccggtgatgctgacatgaaagggcacttcgacccagcaaaatgcagatatgcacttggcatgcaggatcgcaccattcctgactctgatatctcagctagttcgtcctggtctgatagtacggctgccagacacagtcgcctcgaatcgtccgacggggatggggcatggtgtcctgctggttctgtctttccaaaagaagaggaatatctccaggtggatctacagcggctacacctagttgctctcgttggaacacaaggcaggcacgcgggtggactagggaaagagttttcccgaagctaccgactgcgctacagtagagacggacgcagatggatggggtggaaagataggtggggacaggaagtgatatccgggaatgaggatccagaaggagtggtgcttaaagacctgggcccacctatggttgcgcgattggtacggttttatccccgtgctgatagagttatgtctgtttgcctccgcgtggagctttacgggtgcctctggcgggacggtctgctgtcatataccgccccagtggggcaaactatgtacctgtccgaagcagtgtactag

SEQ ID NO: 79502 - DNA, 630 bp, Artificial Sequence
  derived and/or modified sequence
atgggtcccgaagcattaagctcccttctactgttgctgctcgtggcttccggggacgcagacatgaaggggcacttcgacccggcaaagtgccggtacgccttggggatgcaggaccgaacaatcccggattctgatatctcagcctcatcttcttggagtgactcaactgcagccagacactccagactggaaagctctgacggcgatggcgcatggtgtccagcaggcagtgtcttccccaaagaggaagagtacctccaggtggacctgcagcggctccaccttgtcgcgttagtgggaacccagggcagacatgcaggtggactgggcaaagagttttcaaggagttataggctcaggtacagtcgtgatggcaggcgctggatgggatggaaggatagatggggacaagaagtcataagtggcaatgaggatccagagggtgtggtcctgaaggacttaggcccacctatggtagcacgattggtcagattctaccccagggcggatcgggttatgagcgtctgcctccgagtggaactatacggctgtttatggcgggacggtctccttagttacaccgctccagttggacagaccatgtatctgtctgaggcggtttactag

SEQ ID NO: 79503 - DNA, 804 bp, Artificial Sequence
  derived and/or modified sequence
atgggacccgaagctcttagctcattactattgcttctgctggtcgccagtggggatgctgatatgaaagggcactttgatccagccaaatgccgctacgcgctggggatgcaagaccgaacgattccggactcagatatctccgccagctcgagctggtccgactccaccgctgcacgacacagcagactggagagctccgacggcgatggggcttggtgtccggcaggaagtgtgtttccaaaggaagaggagtaccttcaagtcgatctgcagagacttcatcttgtagcactagtagggacccagggaaggcatgctggcggactgggcaaggagttttcacgctcgtacagattgcggtactcacgggacggacggaggtggatgggatggaaagaccggtggggacaggaggtgattagtgggaatgaggatcccgagggggtggtccttaaagacctcggaccgcctatggtcgccaggctggtgcggttctaccctagagctgaccgtgtgatgtctgtctgtctccgtgtcgagctctatggctgcctgtggcgggacgggttacttagctacaccgctcccgtggggcaaactatgtacctctccgaagccgtctatttgaatgactccacctacgatgggcataccgttggtggcctgcagtatgggggtcttggccagctggccgatggcgtagtaggacttgatgattttcggaaatcccaggagttgcgcgtgtggcctggatacgactacgtaggctggagtaatcacagcttttctagcggttactag

SEQ ID NO: 79504 - DNA, 192 bp, Artificial Sequence
  derived and/or modified sequence
atggggcctgaggctctgtccagccttctcttactgttactggtggcatccggggatgcagatatgaagggacacttcgacccagcaaaatgccgctatgccttgggcatgcaggataggactatcccagattccgacatttcagcgtcaagctcctggagtgattccaccgcagccagacactcccgttag

SEQ ID NO: 79505 - DNA, 630 bp, Artificial Sequence
  derived and/or modified sequence
atgggccctgaggcgctttcctcgttattgctcctcctgctggtcgctagtggggacgcggacatgaaaggtcattttgaccccgcaaagtgcaggtacgcactgggaatgcaagatcgcactatccccgactctgatatcagcgcatcgagcagctggagtgatagcacggcagctcgccatagccgattggaatcttccgacggtgatggcgcatggtgtccagcagggagcgtcttccctaaggaagaagaatacctccaggtcgacttacaacgtctgcatcttgtggctttggtggggactcagggccgtcatgcaggcggattaggtaaagagtttagtcgaagttacaggttgcgctactcccgagacgggaggaggtggatggggtggaaagacagatgggggcaggaagtaatttctggcaatgaagacccagaaggggtggtgctgaaggatctgggaccaccgatggtggctcgacttgtgcgcttttaccctagagcggatagggtgatgtcagtctgtctgagagtggagctctatggatgtctctggcgggatggcttgctgagttacacagcccctgtcgggcagaccatgtatctctccgaggcagtgtattag

SEQ ID NO: 79506 - DNA, 192 bp, Artificial Sequence
  derived and/or modified sequence
atggggccagaggccttatcttctttgctgctgctgcttttagtggcctctggggacgccgacatgaagggccattttgacccagctaaatgccgatacgcccttgggatgcaggataggacgatacccgattccgatatttctgcctccagctcctggagtgactctaccgcagcccgacattcaagatag

SEQ ID NO: 79507 - DNA, 501 bp, Artificial Sequence
  derived and/or modified sequence
atgggcccagaggccctgtcgtcgctgcttctccttctgctggttgcgagcggcgacgctgacatgaagggccattttgatccggcaaagtgtcgctacgctctcggtatgcaggacagaacaattcctgacagcgacatatccgcatcttcttcttggagcgactccacagcagcaagacatagccggcttgaatccagtgacggggatggtgcttggtgccccgctggcagcgtttttcccaaagaggaagaatatctccaggtggatttacagagactgcacttagttgccctggtgggcacgcaggggagacatgcgggaggcttgggcaaagagttttctaggagttacagactgcggtattcgcgagatggccgtcggtggatggggtggaaggaccgatggggtcaagaagtcatctccggaaatgaggaccccgaaggggtggttctgaaggacctgggaccgcctatggtggccagactggtcagattttag

SEQ ID NO: 79508 - DNA, 462 bp, Artificial Sequence
  derived and/or modified sequence
atgggtccagaagcactaagctcacttttgctgctcctgctggtcgcaagcggcgatgctgacatgaaaggacattttgacccagccaagtgtcggtatgccctgggcatgcaggaccggactatacctgactctgatatctctgctagtagcagctggagtgattccaccgccgctagacactctaggctggagtcgtcagacggagacggtgcctggtgtcctgctggcagcgtgtttcccaaagaggaagagtatctgcaagtggacctgcagcgcctgcacctggtggcactcgtcggcactcagggcaggcatgccggtgggttggggaaggaattctcccggtcttataggttgaggtatagtagagatggaagacgatggatggggtggaaagatcgctgggggcaggaggttatctctggaaacgaggaccctgaaggagtggtgctgaagtag

SEQ ID NO: 79509 - DNA, 630 bp, Artificial Sequence
  derived and/or modified sequence
atgggtcccgaggctttgagcagcctgttgctactgctgctggtagcctctggggacgctgatatgaaggggcattttgatcccgctaaatgtcgttatgccctcgggatgcaggaccggacaatccctgactctgacatctccgcgtcaagctcctggagtgactctacggcggctcgccactctagacttgaatccagcgacggggacggcgcttggtgtcctgccggatctgtctttcccaaggaggaggagtatctgcaggtggatctgcaaaggttacatctggtcgccctggtaggcactcagggtcgccacgcgggaggactgggtaaagagttcagcaggtcgtacaggctgcgctactcacgggacggccgtcggtggatgggatggaaggaccggtggggtcaggaggtaatctcggggaatgaggaccctgagggtgtcgttctcaaggatttgggacctcctatggtcgcccgacttgtcaggttttatcccagagctgatcgcgtgatgtccgtgtgtctcagggtagagttgtatgggtgcctctggagggacggacttctgtcgtatactgccccagtcgggcaaaccatgtacttatccgaggcagtgtactag

SEQ ID NO: 79510 - DNA, 501 bp, Artificial Sequence
  derived and/or modified sequence
atgggacccgaggccttgtcctcgctcctgcttctcttgttagtggcgtccggtgacgctgacatgaagggccactttgatccggcaaagtgcagatatgccctgggaatgcaggatcgaaccatccccgacagcgatatatctgcctcctcatcgtggtctgactctaccgcagcaaggcactcccgcctcgaatcttctgacggcgacggagcctggtgtcctgctgggagtgtatttcctaaggaggaagagtatctccaagttgacctgcaacgcctgcatctggtggcgttggtcggcacacaggggaggcacgcaggtggtttgggcaaggagttttcaagaagttaccgtctcagatatagtagagatggacgacgctggatggggtggaaagatcggtggggacaggaggtgataagtgggaacgaggatcccgagggagtggtactgaaagacctcggacctccaatggttgcgcgtctcgtcaggttctag

SEQ ID NO: 79511 - DNA, 444 bp, Artificial Sequence
  derived and/or modified sequence
atgggcccagaagccttgagctcccttctgctgctgctgcttgtcgcctctggggatgccgacatgaaggggcatttcgatcccgcaaagtgcagatacgcgttgggcatgcaagacagaacgatccctgattccgatatttcagccagctcctcttggtcagatagtacagcggcacgccactcccggttggagagcagcgacggtgacggtgcatggtgccccgctggaagtgtattcccaaaagaagaagagtatctgcaagtggatctccagcgacttcacctagttgcattagtgggaacccagggacgacatgctggagggctagggaaggagttcagccgttcctataggctcagatactccagggatggtaggagatggatgggctggaaagatcggtggggacaggaggtaatcagcggaaatgaggacccctag

SEQ ID NO: 79512 - DNA, 732 bp, Artificial Sequence
  derived and/or modified sequence
atgggacccgaggccttgtccagccttttgctcttgctattagtggcctctggtgacgccgatatgaagggccattttgaccccgctaaatgccggtatgctcttggtatgcaggatcggaccatcccggattctgatatttccgcttcctctagttggtcagatagcactgcagcgaggcattctcgcctggaatcttccgacggcgacggcgcatggtgcccagccggatcggtgttcccaaaggaggaggagtacttacaggttgacctccagagattacacctggtggcacttgtcggcacacagggtagacacgccggaggtctgggcaaagaattctctcggtcttaccgtctgaggtacagccgagacggcaggcgttggatgggctggaaggataggtgggggcaggaagttatttccgggaacgaagatcccgagggagtagtgctgaaggatctcgggcctccgatggtcgcacgacttgtacgattctaccctcgagcggacagagtgatgagtgtgtgcctccgagttgagctatatgggtgtttgtggagggattgctccatgggggtgtgggcgtcttggcaaatggtgtggtggggctggatgactctggggagggtacggagttgcggcagtggacaggcaatgactatgtgggatggcgcaacaacggccagccccgttgctatgtggcgctggtccctcagtctgactgggtag

SEQ ID NO: 79513 - DNA, 192 bp, Artificial Sequence
  derived and/or modified sequence
atgggacccgaggcgctaagcagtcttcttctgttgctgcttgtggcttccggggacgccgacatgaaggggcatttcgacccagccaaatgccggtacgctctcggtatgcaggaccggacaatccctgactccgacatctctgcctcaagcagctggtctgatagcacagctgctagacatagccggtag

SEQ ID NO: 79514 - DNA, 501 bp, Artificial Sequence
  derived and/or modified sequence
atgggccctgaggccctgtccagcttattgttgctactcctcgtggcttccggggacgccgatatgaaggggcacttcgacccagctaagtgccgttacgcactcgggatgcaggacagaaccatccctgactctgacatttcggcctccagctcatggtcagacagcacagccgctcgccattcaagactggaaagctccgacggggatggagcatggtgtccagctggatctgtgtttcccaaggaggaggagtatttgcaggttgatcttcaacggctgcatctcgtagcacttgtaggaacccagggaagacacgccggtggactgggtaaagagttctctcgctcctacagactgaggtacagtagagacggacgccgttggatgggatggaaagatcgttggggccaggaggtgatcagtggtaacgaagatcccgagggcgtagtgctgaaggatcttggcccaccaatggtggcgagactagtgagattttag

SEQ ID NO: 79515 - DNA, 420 bp, Artificial Sequence
  derived and/or modified sequence
atgggtccagaagcattatccagtctcttgctgctgctgctggtagcttccggggatgctgatatgaaggggcattttgatccggctaaatgccgttatgcccttgggatgcaggatcgcaccatccccgactctgatattagcgcttcctctagctggtccgactctaccgcagctcggcactcacgactcgagtcaagcgatggcgatggagcctggtgtcccgctggatctgtgttccccaaagaagaggaatatctccaggtggatctccagcgtctccatctggttgccctagttgggacgcaggggaggcatgcgggaggactggggaaagaattcagtcgcagttaccgcctcagatattccagagatggtcggcgatggatggggtggaaagacaggtgggggcaggaatag

SEQ ID NO: 79516 - DNA, 192 bp, Artificial Sequence
  derived and/or modified sequence
atgggacccgaggctctgagctccttgctcttgctgctgctcgtggcgtctggcgacgctgatatgaaaggccatttcgacccggcaaaatgccggtacgcactggggatgcaggacagaaccatacccgatagcgatatatcagcttcgtcttcgtggtcagattcgaccgccgctcgtcattctcgatag

SEQ ID NO: 79517 - DNA, 444 bp, Artificial Sequence
  derived and/or modified sequence
atgggcccagaagctcttagctctctcctacttcttctgctggtcgcgtctggtgatgccgacatgaaagggcattttgaccccgctaaatgtcgctatgccttaggtatgcaggaccggactatcccggattcagatatctccgcctctagtagctggagcgacagcaccgcagctcggcatagcaggctggaatctagcgatggtgacggagcctggtgtccagctggctctgtgttccccaaggaagaagagtacttgcaggtcgatctgcagcgcctgcatctagtggcgttggtggggacacagggacgacacgctggaggtctcggcaaagaattttctagatcttacaggctgcgctattcacgcgatggccgtagatggatgggctggaaggaccggtggggccaagaggtgatcagcgggaatgaagacccatag

SEQ ID NO: 79518 - DNA, 861 bp, Artificial Sequence
  derived and/or modified sequence
atgggtccagaagccctcagctctctgcttctgttactcctagtggcctctggggacgccgacatgaaaggccattttgatccagcaaaatgtcgctacgctttaggaatgcaagatagaaccattcctgacagtgacatcagcgcgtcttcgtcttggtcagactcgactgccgcacgtcacagtcgcctcgaatcaagcgatggagacggggcatggtgcccggctggctccgtgtttcctaaggaagaagaatacctccaggtggatctgcagcgactacacttggttgcactggtgggaacccaaggacgtcacgctgggggtctggggaaagaattctccagaagttaccgccttcgctactcccgggatggacgcaggtggatgggctggaaagaccggtggggccaggaggtcatatcgggtaacgaggacccagagggcgtggtgcttaaggacctcggtcccccaatggttgcccgattggtaaggttctatccacgggcagacagagtgatgagtgtgtgcctccgcgttgagctgtatggatgcctgtggcgggatggcctcctgtcttataccgcgccagtaggacagacaatgtacctctccgaagccgtgtatctcaatgactccacttacgacggccacacagtgggaggattacagtatggcggactgggccaactggccgatggagtagttggtctggatgatttccggaagagccaagagctgcgtgtttggcctggctacgattatgtgggctggtccaatcactcgttcagcagcgggtatgtggagatggaattcgagttcgatcggctaagggcctttcaggccatgcaggttcactag

SEQ ID NO: 79519 - DNA, 732 bp, Artificial Sequence
  derived and/or modified sequence
atgggcccagaggccctttccagtttgctgctgctgctcctggtagcttctggagatgctgatatgaaaggacatttcgaccctgcaaaatgcaggtacgcccttggtatgcaagatcgcacaatacccgacagcgacatttccgctagtagctcatggtctgactctaccgccgctcgccactctcgcttagaatcatcagacggggatggagcgtggtgtcccgcaggctctgttttccctaaggaagaggagtacctgcaggtggatctgcagaggctgcacttggtggctttggtgggcacccagggcagacacgccggaggcttaggtaaagagttctcacgaagctaccgccttcggtactctcgggacggccgtcgctggatgggatggaaagacaggtggggacaagaagttatttctggaaacgaggatccagaaggagtggtcctaaaagaccttgggcctccaatggttgctcgcttggtgcggttttatccccgtgctgaccgcgtgatgagcgtgtgccttagggtcgaattgtacggctgtctgtggcgggattgtagcatgggtgtgtgggcgtcctggcagatggtttggtggggatggatgaccctgggtcgagtacgcagctgcgggagtgggcaggcaatgacaatgtgggatggcgcaactaccgcctcccctgtggccatgtggcggtggtctttgtccctgactggctag

SEQ ID NO: 79520 - DNA, 168 bp, Artificial Sequence
  derived and/or modified sequence
atgggaccagaggctctgtcgagtctcttgttacttttgttggtggcttcaggtgatgctgacatgaaagggcattttgatccggctaagtgcagatacgcactgggcatgcaggaccgcacaattcctgacagtgatataagcgccagctccagttggagcgactag

SEQ ID NO: 79521 - DNA, 156 bp, Artificial Sequence
  derived and/or modified sequence
atgggtccagaggcactgtcctcactgctcctgttgctactggttgcatccggggatgccgatatgaaaggccactttgacccggctaagtgtcgctacgccctggggatgcaggatagaaccattcctgacagcgacatatcggcaagcagctag

SEQ ID NO: 79522 - DNA, 222 bp, Artificial Sequence
  derived and/or modified sequence
atggggccagaggcgctctcctccctgctgttattgctacttgtagcctccggtgacgcggacatgaaaggacatttcgatcctgccaagtgccgctatgcccttggaatgcaggataggaccattcctgacagcgacatctcggcctccagttcatggtccgattctaccgccgctcggcactctcgcctggagtccagcgatggcgatggagcatggtag

SEQ ID NO: 79523 - DNA, 369 bp, Artificial Sequence
  derived and/or modified sequence
atgggtccagaggccctgagtagtctgttgttattactgttggttgcctccggggatgctgatatgaaggggcacttcgaccctgccaagtgccggtacgccctcggcatgcaggatagaactatccctgatagcgacatttcagccagcagctcctggagcgactctacagcagctcgccattcccggcttgaatcttctgacggtgacggcgcttggtgccctgccggatctgttttccccaaagaagaagagtacctccaggtggatctgcagcgactgcacctggtggccctcgtcggaactcaaggacgtcacgccggtggcctgggcaaggagttcagccgctcgtataggctgcgctattag

SEQ ID NO: 79524 - DNA, 483 bp, Artificial Sequence
  derived and/or modified sequence
atgggcccagaggccctgagctcactgctgttgttgttactggtcgcctcgggagacgcagacatgaagggccactttgatccagccaagtgtagatacgctctgggaatgcaggacaggaccattcccgattctgacataagcgcttcaagcagctggtctgactcaacagcagcacgccacagtaggctggaatcttcagatggagacggcgcttggtgcccagccggaagtgtgtttcctaaggaggaagagtacctccaagtcgacctgcagagacttcacctcgttgccctagtggggacgcaggggcgtcacgccggaggattggggaaggaattctcgcggtcatacagactgaggtattcccgggatgggaggaggtggatggggtggaaggatcggtggggacaggaagtaatcagcgggaacgaggaccctgaaggggtggttctgaaggacttaggcccaccaatggtgtag

SEQ ID NO: 79525 - DNA, 399 bp, Artificial Sequence
  derived and/or modified sequence
atgggcccagaggcactgagctctcttctgctactcctgctggtcgcctcaggagacgccgacatgaagggccattttgacccagccaagtgcagatacgccctgggcatgcaggataggaccatacctgactctgacattagtgcgtcaagcagctggtcggacagcacagccgctcggcatagtaggttggaatccagtgatggggatggcgcttggtgccctgccggatctgtgtttcctaaagaagaagaatatctgcaagtcgacctccaacgccttcaccttgtagccttagtggggactcaaggtcgacatgctggtggactgggaaaagagttcagtagatcttatagattgagatattccagggacggacggaggtggatgggatggtag

SEQ ID NO: 79526 - DNA, 306 bp, Artificial Sequence
  derived and/or modified sequence
atgggccctgaggccctgtctagcctactgttgctgctcttggtcgcctctggcgacgccgacatgaagggccactttgatccggctaaatgtagatatgctctggggatgcaagaccgtaccattcccgattccgatatttccgctagtagctcgtggagcgatagcacagcagcaaggcactcacgcctcgaatcaagcgacggggacggggcttggtgtcctgctgggagcgttttcccaaaagaggaagagtacctccaggtggacctgcagagattacacctggtggccctggtaggctag

SEQ ID NO: 79527 - DNA, 213 bp, Artificial Sequence
  derived and/or modified sequence
atggggcctgaggccttgtcctcgctgctgcttctccttttagtggcaagcggagacgcagacatgaaaggacacttcgacccagctaagtgccgttatgctctgggcatgcaagatcgcacaatccccgatagcgacatcagcgcaagctccagttggagcgacagcactgcagctagacatagcagattggagtcatccgacggtgattag

SEQ ID NO: 79528 - DNA, 237 bp, Artificial Sequence
  derived and/or modified sequence
atgggcccagaggccctgtcaagccttctgctgctgcttctagtcgcatccggcgacgcagatatgaagggccactttgacccagccaaatgtcgttacgctttgggcatgcaagaccggacaatacccgattctgacatatctgccagctcttcctggtctgacagcaccgctgccaggcactctaggctggagtcctccgatggagacggtgcatggtgccccgcaggaagctag

SEQ ID NO: 79529 - DNA, 384 bp, Artificial Sequence
  derived and/or modified sequence
atgggcccagaggcactcagttcgttgctcctgctgctgctggttgcatctggagacgccgatatgaagggccatttcgatccggcaaaatgtaggtacgctctgggcatgcaggaccgaactatcccagattctgacatcagcgcatcaagcagctggtctgacagtacggcagcgcgtcacagccggttggaaagtagtgatggagacggagcctggtgtcctgccggtagtgtcttccccaaagaggaggagtacctgcaggtggaccttcagagactgcacctcgttgccttagtgggaacgcaggggaggcatgctggtggtctggggaaggaatttagccgcagttataggctgcgttacagcagggacggcagatag

SEQ ID NO: 79530 - DNA, 348 bp, Artificial Sequence
  derived and/or modified sequence
atgggccctgaggctctgtccagcctgttgttactcctcctggttgcctcgggagatgcagacatgaaagggcacttcgaccccgctaagtgccggtatgcccttggcatgcaggacaggacaatccctgattccgatatttctgctagctcatcttggtcagattctacagctgcgagacactctagactagagtcaagcgacggggacggcgcttggtgtccagcaggctccgttttccctaaggaagaagagtacctccaggttgacctccagagactccatctcgtggctctagtcggcacccaaggtcgtcacgccggaggcctcgggaaggagtttagttag

SEQ ID NO: 79531 - DNA, 432 bp, Artificial Sequence
  derived and/or modified sequence
atggggcctgaggctctctcatctctgctcctgctgcttttggtcgccagcggggacgctgacatgaaggggcatttcgatcccgctaagtgcagatacgctctgggaatgcaggatcgcaccatccctgattctgatataagtgcctcatctagttggtccgacagcaccgcagcccgacattctcggctagagtcctcagacggggacggagcttggtgcccagctggatcagtatttcccaaggaagaagagtatctgcaagtggacttgcagcgattgcacctagttgctctggtgggaactcaaggccgtcatgccggaggactgggaaaggagtttagtcgctcctatagattgcgatatagtcgggatggccgtcgatggatgggatggaaggatcgatggggccaggaggtgatcagtggctag

SEQ ID NO: 79532 - DNA, 339 bp, Artificial Sequence
  derived and/or modified sequence
atgggaccagaggcgctctcttccctgctcctgcttctgctcgtggcttctggagacgcagacatgaaaggacatttcgatcctgcgaaatgccgctacgctctggggatgcaggacaggaccattccggacagtgacatctcagcatccagttcctggagcgatagcaccgccgcaagacactccaggctggagtccagtgacggagatggcgcttggtgtcccgctggctcggtctttcctaaagaagaggagtaccttcaggtggacttgcagcggctacatcttgtggctttggtgggcacccagggacgccacgccggtggactgggaaagtag

SEQ ID NO: 79533 - DNA, 513 bp, Artificial Sequence
  derived and/or modified sequence
atgggaccggaggcactatcctctctgctgctgttgctgctagtcgccagcggagacgcagacatgaaaggtcactttgaccccgctaaatgtcggtatgcccttggcatgcaggacaggactattcctgacagtgacatctcagccagttccagctggtccgatagtaccgcagcacgtcacagtcgcttagaatcgtccgacggcgatggagcatggtgccccgcaggtagcgtcttccctaaagaagaggaatacttacaggttgacctgcagcggcttcatcttgtggctcttgtgggcacacaaggtaggcacgccggaggcctgggcaaagagttcagccggtcatacaggctccgctattccagagatggccgtcgttggatgggctggaaggacagatggggtcaggaggttattagcggcaatgaggaccccgagggcgtcgtcctaaaagatctcgggccacccatggtggctaggctggttcgcttctaccctcgagcttag

SEQ ID NO: 79534 - DNA, 417 bp, Artificial Sequence
  derived and/or modified sequence
atggggcctgaagccctaagttctctgctgctcctgctattggtcgccagcggtgatgcagacatgaaaggccacttcgatccagccaagtgcagatacgcactgggaatgcaagatcgaaccatccctgatagcgacatcagtgcctcaagcagttggagtgactctaccgctgctcggcattctagacttgagtcttccgatggagacggggcatggtgccccgctggctcagtttttcctaaagaggaggagtacctccaggtcgatttgcagaggctccacttggtagcactcgtgggtacccaggggaggcatgcaggagggctgggtaaggagttcagccgaagttatagacttcggtactcccgagacgggcgaagatggatgggctggaaagaccggtgggggcagtag

SEQ ID NO: 79535 - DNA, 156 bp, Artificial Sequence
  derived and/or modified sequence
atgggcccagaggctctgagttcattactactgcttcttctggtagcgagtggggatgctgacatgaagggtcatttcgaccccgctaaatgccgatatgccctggggatgcaggatcgcaccatcccagactctgacatcagcgcaagttcttag

SEQ ID NO: 79536 - DNA, 417 bp, Artificial Sequence
  derived and/or modified sequence
atggggcctgaagccctgtcttcccttctattgttgctgcttgtcgcaagcggggatgcggatatgaagggacatttcgaccccgctaaatgtcgctacgccctgggtatgcaggacaggaccattccggactctgatataagcgctagtagtagttggtccgactcaaccgctgcacgccatagccggctggaatcatcagacggcgacggcgcttggtgcccggcagggagcgttttccccaaggaggaagagtacctccaggtggatcttcagaggctgcacctagtggccttggtcgggactcaggggaggcacgccggaggactcgggaaagagttctctagaagttacagacttcggtattcccgcgatggcagacgctggatgggctggaaggaccggtgggggcagtag

SEQ ID NO: 79537 - DNA, 258 bp, Artificial Sequence
  derived and/or modified sequence
atgggacccgaagcattgtcttccctgctgttgctcctgttggtggcttcaggggacgctgatatgaagggccactttgaccccgctaaatgtagatatgcattgggcatgcaggaccggacgatccccgacagtgacatttccgcgagtagtagctggagcgatagtacagccgcacggcacagtcgcctggagtcatcagatggtgacggggcttggtgtccggcaggttcagtgtttcctaaggaagaggagtag

SEQ ID NO: 79538 - DNA, 732 bp, Artificial Sequence
  derived and/or modified sequence
atggggccagaggctcttagcagtctgttactcttattactggtggccagtggcgatgccgatatgaagggccactttgacccagccaaatgtaggtacgcgctgggcatgcaagatcgtaccatcccagattcagatataagcgcgtcttcttcatggagcgattccacagccgcacgccattccaggctggaaagttctgacggagatggggcatggtgccccgcaggtagcgttttcccgaaagaagaggagtacctacaggtggaccttcaacgcctacaccttgtagccttggtgggaacacagggcaggcatgcgggaggcctggggaaggagttctcgagaagttataggcttaggtactcccgcgatggaaggcgttggatgggatggaaggacagatgggggcaagaggtgattagcggcaatgaagacccagagggggtcgtgctgaaggatctgggaccccctatggtagctagactggtcaggttctatccacgcgcagacagggtaatgtccgtttgtctgcgggttgaattatacggctgcctatggcgggactgctccatgggtgtgtgggcaagctggcaaatggtgtggtggggttggatgacgttaggacgggttcgaagttgcgggagtggacaagccatgacaatgtgggatggcgctactactgcctctcccgttgcaatgtggcgttggagcttgtctttgaccggatag

SEQ ID NO: 79539 - DNA, 732 bp, Artificial Sequence
  derived and/or modified sequence
atgggaccagaggccttgtcaagcctgctccttcttcttcttgtagcctcaggcgatgccgacatgaagggccacttcgatcctgccaagtgccgctacgccctggggatgcaagacagaacgatcccagattcagatatctccgcatcatcctcctggagtgactcaaccgcagccaggcattcccggttggaatctagcgacggggacggcgcttggtgccctgcaggctcagtgttccccaaggaagaggaatatctgcaggttgacctgcagcgactgcacctggtggcactggtaggaacacaaggccgacatgcgggtggactcggcaaggaattttcacgaagctataggctgcgttactcccgtgatggaaggcggtggatgggctggaaggatcgctgggggcaagaggtcatcagtggcaatgaggaccccgagggcgtcgtgctcaaagatctcggccctcccatggtggcccgattggtaagattctatccaagggcggaccgggtgatgtcagtctgcctgcgtgttgaactctacggatgtctctggagggattgtagtatgggcgtgtgggcaagctggcagatggtgtggtgggggtggatgactctggggagagtcagatcttgcggaagtggccaggctatgaccatgtgggatggggctacaacggcaagtccggtggccatgtggaggtggagcttgagtctcaccggctag

SEQ ID NO: 79540 - DNA, 732 bp, Artificial Sequence
  derived and/or modified sequence
atgggaccagaggccctgagctcactcttacttcttctccttgtcgcctccggagacgctgacatgaaggggcactttgaccctgcaaagtgcagatacgcattggggatgcaggaccggacaatccccgactctgatatctcagcatcttccagctggtcagattctactgccgcaagacattcacgactggaatcatcagatggcgatggagcctggtgtcccgctggttccgtgtttcctaaggaggaagaatacctgcaggtcgatcttcaaagactccatctcgtggcccttgtgggcacccagggcagacacgcgggaggcctcggaaaggagttcagccgcagttacaggttgcgctactccagggacgggcgtagatggatgggatggaaagatcggtggggccaagaggtcatctccggtaatgaggaccccgagggggttgtacttaaggacctcggaccacctatggtggcgaggctggtgcggttctatccgagagctgatcgtgtgatgtctgtctgccttcgtgttgagctgtatgggtgcttgtggcgcgactgcagtatgggggtctgggcttcctggcaaatggtctggtggggctggatgaccctgggcagggtgcggagctgcggatcaggacaggctatgaccatgtgggacggggcaacaacagcctcccccgtggcaatgtggaggtggagcctaagcttgactggatag

SEQ ID NO: 79541 - DNA, 732 bp, Artificial Sequence
  derived and/or modified sequence
atgggtcctgaagctctctcatcactgctgctgttgctcctagttgcttccggggatgctgatatgaagggtcactttgaccccgctaaatgtagatacgcacttggcatgcaagatcgcacaatcccagactcagacatttccgcaagttcaagctggtccgattccaccgcggctagacactcaagactggagtcctcggatggggatggggcttggtgtcctgcgggaagtgtgttccccaaagaagaggaatatctacaggttgatctgcagcggcttcacctggtcgctctggttggaacacaggggcgtcacgctgggggacttgggaaggaattcagccggagttatcgtctgcggtattcacgagatggacgtcggtggatgggatggaaggacagatggggccaggaggtcatctcgggaaacgaagaccctgagggagtcgttctaaaggatctgggcccacccatggtggcacgtcttgttcgcttctatccccgagctgacagggtgatgtccgtatgtctgcgcgttgaactgtatggatgcttatggagggattgttccatgggtgtgtgggcatcttggcaaatggtctggtgggggtggatgacgctgggtagggtccgctcctgtgggtccggacaggctatgaccatgtgggacggagccactaccgcttctcccgtggccatgtggcgctggagtctctccctaactggctag

SEQ ID NO: 79542 - DNA, 444 bp, Artificial Sequence
  derived and/or modified sequence
atgggccctgaagcactctcgtctctgctcttattattactggtggcttctggcgatgctgatatgaagggccacttcgatcccgccaaatgtaggtatgcactgggaatgcaggaccgtaccatcccagactccgatatttcggcctctagtagttggtcagattcgactgccgctagacattctaggctagagtcttcagatggggacggggcatggtgtcccgccggcagtgtgtttcccaaggaagaagagtatttacaggtggatttacagagactgcacttagtagcattggtcggtacacagggaaggcatgcaggtgggctaggcaaggaatttagtcgctcataccgcctacggtacagccgagacggccgcagatggatggggtggaaagaccggtggggccaggaggttatctccgggaacgaggacccctag

SEQ ID NO: 79543 - DNA, 444 bp, Artificial Sequence
  derived and/or modified sequence
atgggccctgaggctcttagctcacttctgctgctgctcctggtggcaagtggagacgcggacatgaagggacactttgatccagcgaagtgccgttacgcgctaggtatgcaagaccgtaccattcctgattccgatatatccgcttccagcagctggtccgattccaccgccgcacgacactctaggttggagagctctgacggggacggagcctggtgtccagcaggatccgtttttcccaaggaggaggaatacttacaggttgacctgcagagattgcacttggtggcactcgtcggcacacagggaagacacgccggtggtctgggcaaggaattttcacgaagttatcgccttaggtattctagagacggacgaagatggatgggctggaaggatcggtggggacaagaggttatatcaggcaacgaagacccctag

SEQ ID NO: 79544 - DNA, 444 bp, Artificial Sequence
  derived and/or modified sequence
atgggccctgaagcactgagttcgctgcttctactcctacttgtcgcttctggagacgcggatatgaagggccactttgatccagccaaatgtcgttacgctctaggcatgcaagatagaaccattcctgactcagacatttccgcctcctcgtcttggtctgattccacggcagctcggcactcccgcttagagtccagcgatggggatggagcttggtgtccggccggctctgtgttccctaaagaagaagagtacttgcaagtggacctacagcggcttcacctggtggcactcgttggtacgcaagggcgccacgcaggaggtttggggaaggagttttctcgaagctatcgacttcgatatagtcgtgatggtcggcgatggatgggttggaaagaccgatggggacaggaggtgattagtggaaacgaagacccgtag

SEQ ID NO: 79545 - DNA, 177 bp, Artificial Sequence
  derived and/or modified sequence
atgggacccgaagcgctctcttccctcttacttcttctcctggttgcctctggtgacgccgatatgaaaggacactttgacccagcgaaatgtaggtacgcattaggcatgcaggataggaccatccccgattcagatattagtgcctcaagctcctggtcagatagcacggcgtag

SEQ ID NO: 79546 - DNA, 420 bp, Artificial Sequence
  derived and/or modified sequence
atgggaccagaagcattatcctcactactgcttcttttgctcgtagcctctggggacgctgacatgaaagggcactttgaccctgccaaatgtcgctacgcacttggaatgcaagatcggacaattcctgattccgacataagcgcaagttccagctggagtgacagtactgccgccagacacagccgtctcgagagctctgacggggatggcgcgtggtgtcctgcaggatccgtctttccgaaggaggaagaatatctgcaggtcgatctccaaagactccatctggtcgccctcgtgggcacccaggggaggcatgccggaggactgggcaaagaattctccaggtcataccgactgcggtacagcagagatggacgaagatggatgggatggaaagacaggtggggccaggaatag

SEQ ID NO: 79547 - DNA, 420 bp, Artificial Sequence
  derived and/or modified sequence
atggggcctgaggcgctgtcgagcctcctactactgctgcttgtggcttccggtgacgcagatatgaaaggacacttcgatcccgccaaatgtcgctacgcccttggaatgcaagatcgtaccattcctgattccgacatctctgcctcctcttcttggtccgactccaccgccgcgcgccatagtcggctcgaaagctctgacggcgacggcgcttggtgccctgcaggctcagtgtttccaaaggaagaagaatatttacaggtcgacctacagcgactgcatctggtcgccctggtaggtacacagggaaggcatgccggaggattgggaaaggaattctctcgaagttatcgtctaagatatagccgagatgggcgcagatggatgggttggaaggatcgttggggccaggagtag

SEQ ID NO: 79548 - DNA, 420 bp, Artificial Sequence
  derived and/or modified sequence
atgggacccgaagccctgagctccttactgctgctcctgttggtagccagtggagatgcagatatgaagggacatttcgatcccgccaagtgtagatacgccctaggaatgcaggaccgaaccattcccgatagtgatatttcggcatcctccagttggagcgactccacagccgcgagacattccaggttggaaagcagtgacggggacggggcttggtgccctgcaggcagtgtctttcccaaggaggaggaatatctccaggttgatcttcagcgattacacctcgtcgctttggtcgggacacagggaagacatgctggcggcctcggcaaggaattttcccgctcctacaggcttagatatagcagggacgggcgacgatggatgggctggaaggaccgatgggggcaagaatag

SEQ ID NO: 79549 - DNA, 630 bp, Artificial Sequence
  derived and/or modified sequence
atgggacctgaagctctgagttcacttctactgttgttgctcgtcgcaagtggagacgcggatatgaaaggccatttcgaccccgcaaaatgtaggtatgccttgggaatgcaggaccggaccatacccgattctgacataagcgcaagttctagctggtccgactctactgctgcacggcacagcagattggaatccagtgacggcgacggagcctggtgtcccgcgggatctgtgttcccaaaagaggaggaatacttgcaggtggaccttcagaggctccacctcgtggccctggtaggcacccaggggcgacatgccggtgggttaggtaaggaattcagcagaagctatagactgcgatactcacgagatggccgcaggtggatgggatggaaggatcgctggggacaggaagtgatttctgggaatgaagatccagaaggcgttgttctgaaggacttgggtcctccaatggtggcccggcttgttagattctaccctcgcgctgaccgggtaatgagcgtgtgcttaagggtggagttgtatggctgcctgtggagagatgggctgttgagttatactgcacccgtagggcagacaatgtacctgagtgaggctgtctattag

SEQ ID NO: 79550 - DNA, 630 bp, Artificial Sequence
  derived and/or modified sequence
atgggacctgaagccttgtccagtcttttattgctattattagtggcatcgggagacgctgatatgaagggtcattttgatccagctaagtgtcggtatgctctcggaatgcaagatcgaacgatacccgactcggacattagcgcgtcctcaagctggagcgattccacagcagcacggcacagcaggctagaatcatcagacggggacggagcttggtgtccggctgggtccgtgttcccaaaggaggaggagtacctgcaagtggacctgcagaggcttcacctggtcgccctggtcgggacacaggggagacacgccggaggacttggcaaggagttttcacgtagctataggcttagatattctagagatggcaggagatggatgggatggaaggaccggtgggggcaggaggtgatctcaggtaatgaagatcctgaaggggtggtgctcaaggatcttgggccccctatggtggcaagattggtaagattttacccccgcgcagaccgtgtgatgtcagtgtgtctacgggttgagttgtacggatgcctttggagagacggtttactgtcatacaccgcaccggttggccagactatgtacttgagtgaagcagtgtactag

SEQ ID NO: 79551 - DNA, 630 bp, Artificial Sequence
  derived and/or modified sequence
atggggccagaagcactctcctccttactcctccttctgctggtcgctagcggagatgcagacatgaaagggcactttgatccagcaaaatgccggtacgccctggggatgcaagatagaacaattccagacagcgacatatcagcctcgtccagctggtccgactctactgcagctcgacactcccgactcgaaagctcagacggcgacggtgcatggtgccccgcgggatctgtttttcctaaggaggaggagtacctgcaggtcgacctgcagcgtctccaccttgtggcactcgtaggaacacagggcagacatgccggaggattaggaaaggagttctccagatcttatagactgagatactcaagggacggtaggaggtggatgggttggaaggataggtgggggcaggaggtgatcagtggaaatgaggacccggagggtgtagtcctgaaggacttggggccccctatggtggcccgccttgtccgattttaccctcgagctgaccgtgtgatgtccgtatgtctccgggttgaactctacggatgcctgtggcgggatgggctgctcagttacactgcaccagtaggacaaacaatgtacctctcagaggccgtttactag

SEQ ID NO: 79552 - DNA, 804 bp, Artificial Sequence
  derived and/or modified sequence
atgggaccagaagcactatcgagcctgctgctgttgttactagtcgccagtggtgatgccgatatgaagggccatttcgatccagcaaagtgcaggtatgcactgggtatgcaggacagaacaatcccagactcagatattagcgcctcttcctcttggtcagatagcacggcggccaggcactcccggcttgagtctagtgacggcgatggggcttggtgtccagccggctcagtgtttccgaaagaggaggaatacctgcaagtggaccttcagagacttcatttggtcgcgctggtaggaacccaaggcagacacgcagggggtttggggaaagagttctcaagaagctacagattaagatattcccgcgatggaaggcgatggatgggttggaaggacaggtggggccaggaggttatctctgggaacgaagatccagaaggggtcgtcctgaaggacctgggcccacctatggtagcaagactggtgcgcttctatccccgcgccgatagagtaatgagtgtgtgcctaagagttgaactttatggatgtctgtggcgggatgggctactatcttacacagcaccggtcggccagaccatgtacctaagcgaggccgtgtatttgaatgactctacctatgacggccacactgttgggggcctgcaatatgggggcttggggcagctggcagacggagtcgttggcttggacgacttccgcaagagtcaggaactgcgtgtgtggcccgggtatgactacgtggggtggtctaaccattccttcagctccggctactag

SEQ ID NO: 79553 - DNA, 192 bp, Artificial Sequence
  derived and/or modified sequence
atggggcccgaagccctgtcctctttgttgctgctgttattagttgcttccggcgatgcggatatgaagggccactttgatccagccaagtgccgatacgcccttggtatgcaagacagaacaattccggacagtgatatttccgcctcttcttcatggtctgatagtactgcagccaggcattccagatag

SEQ ID NO: 79554 - DNA, 630 bp, Artificial Sequence
  derived and/or modified sequence
atggggcctgaagccctctcttccctcctactgttgcttcttgtggcttccggagatgccgatatgaaagggcactttgacccagccaaatgtagatacgccctgggaatgcaggaccgcaccattcctgattcagacatttccgctagtagctcctggtccgactctacagctgctaggcactccagactagagagcagtgacggcgacggcgcatggtgcccagccggaagcgttttccccaaggaggaggaatacttgcaagtagacctacagcgactccatttagttgcgctggtgggaactcagggacgacacgccggcggcttaggaaaagagttctccaggtcctataggctgaggtactctagggatgggaggcgttggatgggctggaaggataggtggggacaagaagtgatctcagggaatgaagatcctgaaggggttgtgcttaaggacctcgggccgcccatggttgcaagattggtgaggttctatccacgagctgacagagttatgtcagtatgtttgcgcgtggagttgtatggctgcctgtggcgggatggtctcctctcctatactgcacctgtgggacaaacaatgtatctgagtgaagccgtttattag

SEQ ID NO: 79555 - DNA, 192 bp, Artificial Sequence
  derived and/or modified sequence
atgggccctgaggctctcagcagtcttctcttgctccttctggttgcctccggggatgctgacatgaaaggacattttgaccccgccaaatgccgctacgcccttggaatgcaggacagaaccattcctgactcagatatcagtgcgtcttcatcgtggtctgacagtactgcggctcgccacagcaggtag

SEQ ID NO: 79556 - DNA, 501 bp, Artificial Sequence
  derived and/or modified sequence
atgggccctgaggcactcagctctcttctgcttctgctactagtggcatcaggagacgcagacatgaaagggcattttgaccccgccaaatgccgatacgccctgggcatgcaagaccgcacaattcccgacagcgatatttcagctagctcaagctggtccgattctaccgctgcccgacattcgcgtctggagtcttccgacggcgatggcgcttggtgccccgccggtagcgttttcccgaaggaggaggaatacctccaggtcgatctccaaaggctccacctggtagctttggtgggtacacaaggccggcacgcaggaggcctgggtaaagagttctctcggtcttatcgtctcagatattcacgcgacggaaggcggtggatggggtggaaagacaggtgggggcaagaagtaatttccgggaatgaagatccagaaggcgtggtattaaaagacctcggcccgccaatggtcgcaaggctcgttcgattttag

SEQ ID NO: 79557 - DNA, 462 bp, Artificial Sequence
  derived and/or modified sequence
atgggacccgaggcactctcaagcttattgctgctgttacttgtcgcatccggggatgcagatatgaagggccactttgatccggccaaatgtagatacgccctgggcatgcaggaccgaacaatacctgacagcgacatctctgcgtcaagctcctggtcggactcaaccgctgcaaggcattcaaggctggagtccagcgatggagacggggcctggtgcccagctgggagcgtttttccgaaggaagaagaatacttgcaggttgatctgcagcgcctccaccttgttgccctggttggtactcaaggtcgccatgccggaggattgggcaaggaattttcccgttcctatagattgcggtattctagagatggtaggagatggatgggatggaaggatcgctggggtcaagaggtcatctccggcaacgaagatcccgagggagtcgtgcttaaatag

SEQ ID NO: 79558 - DNA, 630 bp, Artificial Sequence
  derived and/or modified sequence
atgggcccggaggcgttatcatctctccttctgctgctcttggtagcttccggtgatgccgacatgaaaggacactttgaccccgcgaagtgtagatacgctctgggaatgcaggacaggaccattcccgacagtgacattagtgcatcctcctcttggtcggattccaccgcggcaagacactcaaggctcgaatcttcagatggtgacggcgcgtggtgtccagccggcagtgtttttcccaaggaagaggaatacctgcaagtcgaccttcagagactgcacctggttgctctagtcggcacccaaggaaggcatgccgggggcctcggaaaggaattttccagatcctaccggttgcgttactcccgggacggacgaaggtggatgggctggaaggacaggtggggccaggaagtgatctcaggcaacgaggaccccgagggtgtagtcctgaaagatctgggacctcccatggtggccagactggtaagattttatcccagagcggacagggtgatgagcgtttgtctgcgagtcgagctgtacgggtgcctctggagggacggactgttaagctacacagctcctgtaggccagacaatgtacctgagtgaagccgtctactag

SEQ ID NO: 79559 - DNA, 501 bp, Artificial Sequence
  derived and/or modified sequence
atggggcccgaagcgcttagttcattgctgctgctgctgcttgtcgcgtccggggacgccgatatgaagggccattttgatccagccaagtgccgatatgctttaggtatgcaggatagaaccatacccgacagcgacatctccgccagttcctcttggtcagacagtactgcagcgagacactccagattggaaagcagtgatggcgacggggcgtggtgtccagctggaagtgtgttccccaaggaagaagagtacctacaagtggacctgcagaggctgcatctcgtcgccctggtcggaacacagggacgtcacgcaggcggcctcgggaaagagttctccagaagttaccggttacgctacagccgcgacggacgcagatggatgggctggaaagatcggtggggccaagaagttatatccggaaatgaggacccggaaggtgtggttttgaaagacctgggacccccgatggtagcccgattagtgagattttag

SEQ ID NO: 79560 - DNA, 444 bp, Artificial Sequence
  derived and/or modified sequence
atggggcccgaagccttatcaagtctcttgctgttgctgttagtggcgtctggggatgccgacatgaaaggccacttcgatcccgccaagtgtcggtatgcactggggatgcaggacagaaccatccccgattccgacatctcagcgtcgagcagttggtcagacagtaccgcagcccgccacagtagattggaatccagcgacggagatggtgcttggtgccccgccggtagcgtctttcccaaggaagaggagtacctgcaggtagatttgcaaagacttcacctggtggcccttgtcggcacacaaggacggcatgcaggaggactgggcaaagagttttctaggagttacagactgcgatattcccgcgatggtagacgctggatggggtggaaggaccgatggggtcaggaagtgatcagtggaaatgaggacccctag

SEQ ID NO: 79561 - DNA, 732 bp, Artificial Sequence
  derived and/or modified sequence
atgggacctgaagccctgtctagcctgctgctcttattgctcgtcgctagcggcgacgctgatatgaaggggcactttgaccccgccaaatgcagatatgctctcggaatgcaagacaggactatccccgactctgatattagcgcctcctcaagctggagcgacagtaccgcggccagacactcaagactggagtcctccgatggagatggagcatggtgtccagcaggtagtgtgtttcctaaggaagaagaatatcttcaagtggatttgcagcgactccatctggtggccttggtggggactcaaggtcggcacgcaggcggactcggcaaggaattcagtcgttcataccgtttaaggtattccagagatgggcgaaggtggatgggctggaaagacagatggggccaggaggttatttctggcaatgaggaccctgagggagtggttctgaaggacttgggaccacccatggtggcaagactggtgagattttatccacgggccgatcgcgtcatgtcagtgtgtcttcgcgtagagttgtacgggtgtctctggcgagactgcagtatgggtgtttgggcaagttggcagatggtttggtggggctggatgaccctgggcagggtgcggagttgcggatccggccaggctatgactatgtgggacggtgccactactgcatcccctgtcgcaatgtggaggtggtccctcagcctcactggatag

SEQ ID NO: 79562 - DNA, 192 bp, Artificial Sequence
  derived and/or modified sequence
atggggccggaagcgctcagtagtctactcctactgcttttggtagcgagcggcgacgcagatatgaaagggcactttgatccagccaaatgccgctacgcgctagggatgcaagacagaacaattccagacagtgacatctcagcctcctcctcatggtccgactccaccgctgctcggcattcaagatag

SEQ ID NO: 79563 - DNA, 501 bp, Artificial Sequence
  derived and/or modified sequence
atgggcccagaggcactcagctccctactgttactgttgcttgtggcctccggagacgctgatatgaaaggccattttgatcccgccaagtgtcgctatgcactgggcatgcaagatagaacaatccccgacagtgatatttcagcgtccagcagctggagtgattctaccgcagcgagacattctagactggagtccagtgatggtgacggtgcctggtgtcccgctggatccgtatttcccaaagaagaagagtacctgcaggtggatttgcaaagactgcatctcgtggccctggtagggactcaagggagacacgctggcgggctcggcaaagaattctcacgttcttacaggttgcgatacagccgtgatggccgaagatggatggggtggaaggaccgatggggtcaggaagtgatatcaggcaatgaggatcccgaaggtgtggtcctgaaagatttgggccctcccatggtcgcacgtctggtgaggttttag

SEQ ID NO: 79564 - DNA, 420 bp, Artificial Sequence
  derived and/or modified sequence
atgggacctgaggctctcagctctcttttgctgctgcttctggtagcttcaggtgatgcagatatgaaaggccactttgatccagccaagtgcagatacgccctggggatgcaagacaggactatcccggactctgacatatccgcatctagttcatggtcggattcaaccgccgccaggcattctcgcttggagagctctgatggagatggcgcatggtgccctgccggttcagttttccccaaggaagaggaatacttgcaagtggatctccagagactgcaccttgtagctcttgtgggcacccagggcaggcacgccggtggccttgggaaagagttttcacggtcatatagactgagatatagccgggacggccgccgctggatgggttggaaggacaggtggggacaagaatag

SEQ ID NO: 79565 - DNA, 192 bp, Artificial Sequence
  derived and/or modified sequence
atgggcccagaagcgctttcttccctgttactgctgctactcgtcgctagtggcgatgctgatatgaaaggccatttcgaccctgctaagtgccggtacgctctcgggatgcaggacaggacaattccagactccgacataagcgcctcaagctcctggagcgactctaccgccgcacgccactcaagatag

SEQ ID NO: 79566 - DNA, 444 bp, Artificial Sequence
  derived and/or modified sequence
atgggacccgaagcactatcctctctgctcctgcttctgttagtggcctctggcgacgcagatatgaaaggacactttgaccctgccaagtgccgatacgcattagggatgcaggacaggaccatacccgactcggacattagtgcgagcagctcatggtctgattcgaccgcagcgcgtcattctcggttggaatcctcagacggcgatggggcctggtgccctgccggcagcgtttttcctaaggaggaggagtacctgcaggtggatcttcagcgcttacacctggtggcgctcgtcgggacgcaagggaggcatgcaggcggacttggcaaagaattttctagaagttatcgattacgctactcccgggatggccggcgttggatgggctggaaagaccggtggggacaggaagtgatatcagggaacgaggacccgtag

SEQ ID NO: 79567 - DNA, 861 bp, Artificial Sequence
  derived and/or modified sequence
atggggcccgaagcactgtcttcgctactgctgctgttgctggtggcatccggcgatgcagatatgaaggggcactttgaccctgctaagtgtcgttacgccttgggaatgcaggataggacaatcccagatagtgacatctccgcttccagcagttggtcagattccactgcagcacgacatagccgcttagagagcagtgacggggatggggcatggtgtcctgcaggatcggtgttccccaaggaggaggagtacctgcaggtggacctgcagcggcttcacctcgtagccctggtggggacacaggggagacacgctggaggactaggaaaggagttttcgcggtcttatcgcttgcgatattctcgggatgggcggcgctggatgggatggaaagatcgatgggggcaagaggtgatcagcggaaatgaggatccagaaggcgttgtactcaaggacctgggaccccctatggtggcaagactggtcagattctatcctcgcgctgaccgcgttatgagcgtttgcctcagagtggagttgtacgggtgcctttggagggatggactattaagttatactgcccctgtgggacaaaccatgtatctttctgaggccgtttatcttaacgactcaacatatgatgggcacacggtaggtgggctgcagtatggcgggctcggacagttggcagacggggtggtgggcttagatgattttcgtaaaagtcaggaactgagggtttggcctggctacgactatgtgggttggtctaaccacagcttttcctccggctatgttgagatggagtttgaatttgatagactgcgggcattccaagcaatgcaggtgcactag

SEQ ID NO: 79568 - DNA, 732 bp, Artificial Sequence
  derived and/or modified sequence
atgggacccgaagctctttcctctctgctgctgctcctgctcgtggcctctggggacgccgatatgaaaggccatttcgatcccgctaagtgtaggtatgccttgggaatgcaagaccgaactattcccgacagcgacatttcagctagttcaagctggtccgatagcaccgccgcaaggcattctaggctcgagagctcagacggagatggagcatggtgtcctgccgggtcagtcttccccaaagaagaagagtacctccaggttgatcttcaaaggctgcacctggtcgcccttgttgggactcagggccgtcatgctggagggctgggcaaggagtttagccgatcgtataggctcagatactcacgagatggtaggagatggatgggatggaaggatcgatggggtcaggaggtgatttccggtaatgaggacccagagggggtggtgttgaaagatttgggcccacccatggttgccagactggtcagattttatcctagagccgatcgggtgatgtcagtgtgtctcagggtggaactttatgggtgcttgtggcgcgattgctcaatgggagtgtgggcttcatggcagatggtttggtggggttggatgacccttggacgtgtgagatcttgtggctctgggcaggccatgacaatgtgggatggggccacgactgcctctccggtagcaatgtggcgctggagtctgtctctgacgggatag

SEQ ID NO: 79569 - DNA, 168 bp, Artificial Sequence
  derived and/or modified sequence
atggggccagaagccctatcatcccttctcctactcctattagtcgcctccggtgacgcagatatgaaaggccattttgatcccgcaaagtgtaggtacgctctgggcatgcaggaccgcacaatacctgattccgacatcagcgctagttcctcctggtctgattag

SEQ ID NO: 79570 - DNA, 156 bp, Artificial Sequence
  derived and/or modified sequence
atgggaccagaagcactgtcatctctcttgttgttgttgctcgtggcctctggagatgcggatatgaaaggccacttcgaccctgctaagtgccggtacgccctgggcatgcaagatcgaaccattcccgacagcgatatctcagcctcttcatag

SEQ ID NO: 79571 - DNA, 222 bp, Artificial Sequence
  derived and/or modified sequence
atgggccctgaagcattgagttctttactattgctgctcctagttgcaagtggcgacgccgatatgaagggacattttgaccccgctaaatgccggtacgcccttggcatgcaagatcgaacgattcccgatagcgatatctctgccagctctagttggtccgactccaccgccgcaagacatagtcggctcgaatctagcgacggcgatggtgcgtggtag

SEQ ID NO: 79572 - DNA, 369 bp, Artificial Sequence
  derived and/or modified sequence
atgggtcccgaagctctgagctcattgctactgctgctactcgttgcgtcaggtgatgccgatatgaaggggcactttgaccccgctaagtgccgttacgcactgggcatgcaggaccgcacaattccggatagcgatatttccgcctcctcatcctggagcgacagcaccgccgctagacactcgaggttggaatctagtgatggggatggggcgtggtgtccggccggcagtgttttccctaaagaagaagagtacctccaagtcgacctgcagagactccaccttgtggctttagtcggaacacaaggtcggcatgcaggaggcctgggaaaagagtttagtcgcagctatcgtctgcgttattag

SEQ ID NO: 79573 - DNA, 483 bp, Artificial Sequence
  derived and/or modified sequence
atgggacccgaagctctctcttcattgctgttgctgctgctcgtcgctagtggagatgctgacatgaaaggacactttgaccccgcaaaatgtaggtacgccctgggaatgcaggaccgcacgatcccggatagcgatattagcgcatcttcaagctggtccgactccacggcagcccgacattctcgtcttgagagcagcgatggcgacggcgcttggtgtcctgccgggagtgtattccctaaggaagaggaatacctccaggtggatctgcagcgtctgcatctggtagctttagtcggtactcaaggacgccatgccgggggtctgggaaaggaattcagccggagttataggctgcgttattcgagagacggccgtagatggatggggtggaaagatcgttggggtcaggaagtcatttccggcaacgaagatcccgaaggcgtagtgttgaaagatcttggtcctcctatggtctag

SEQ ID NO: 79574 - DNA, 399 bp, Artificial Sequence
  derived and/or modified sequence
atggggcctgaggctcttagtagtctcctactgctgctactagtcgctagcggagacgcggacatgaagggacatttcgaccccgcaaagtgtaggtacgcccttggaatgcaagaccgaactattccagattctgatatctctgcatcttcctcgtggtcagatagcactgccgccaggcatagcagactggagtcctcagacggcgacggagcctggtgcccagccggtagcgtgtttccgaaggaggaggaatatctgcaagtcgatctgcaacgcctgcatctagtggcattagtaggtactcagggcagacacgcagggggactcggaaaagaattctcccggtcctataggctccgctatagcagggacggccgaaggtggatgggatggtag

SEQ ID NO: 79575 - DNA, 306 bp, Artificial Sequence
  derived and/or modified sequence
atggggcccgaggccttatcatcacttcttttactcctcttagttgcctctggtgacgcagacatgaaaggtcattttgacccagctaaatgccgatacgcacttggaatgcaggacagaaccataccagacagcgacatcagcgcatcatcctcttggtctgactcaaccgcagcaaggcactctcgtctggaaagtagcgacggcgatggagcctggtgtcccgccggaagcgtgttcccaaaggaggaggagtacctgcaagtcgaccttcagcgccttcatctcgtggcactcgtgggttag

SEQ ID NO: 79576 - DNA, 213 bp, Artificial Sequence
  derived and/or modified sequence
atgggtccagaagccttatcctccctccttttgctgcttttagttgcatccggtgacgctgacatgaaggggcacttcgatccagccaaatgccgctacgccctgggtatgcaggatcgcacgatacccgatagtgacatttcagcaagttcctcttggagtgatagcacggcagcaagacattccagattggagagttctgacggcgattag

SEQ ID NO: 79577 - DNA, 237 bp, Artificial Sequence
  derived and/or modified sequence
atgggtcccgaagcattgtcttccctactgctgctgctgctggttgcctccggagatgctgatatgaagggccattttgaccccgccaagtgtaggtacgctttggggatgcaagaccgcactattccagactccgacatctctgcttcttcctcatggtctgactctaccgccgcccgacattcaagacttgagagcagcgatggcgacggcgcatggtgtcctgccggttcttag

SEQ ID NO: 79578 - DNA, 384 bp, Artificial Sequence
  derived and/or modified sequence
atgggcccagaagcactgtcctctcttctgttgctgttgctggttgcctccggggatgccgacatgaaaggacatttcgatccagctaaatgccgttatgcactgggcatgcaagaccggaccatccccgattcggacatcagcgcctccagttcctggtccgattcaacagccgcccgccattcccgcctagaaagctctgatggggacggggcctggtgccctgcgggttccgtgtttccgaaggaagaggaatatttgcaggtagatttacagagactgcatttggtggcactggtaggaacccaaggtcggcacgctggaggactgggaaaggaattctctagaagctatcgcctgcgctactctcgcgacggcagatag

SEQ ID NO: 79579 - DNA, 348 bp, Artificial Sequence
  derived and/or modified sequence
atgggtcccgaagccctttctagtctgctgttactgctgttagtggcctccggagatgccgatatgaaaggacattttgatccagctaaatgtcgctatgcccttggaatgcaggaccgaacaattcccgattcagacatctctgccagctcctcttggagcgattcaaccgcggctaggcactctcgtctggagtcctcagacggtgatggtgcatggtgccccgcaggatctgtttttcccaaggaagaggagtacctccaggtggatttgcagaggctgcacctggttgccctggtcggaactcagggtcgtcacgcagggggacttggaaaggaattctcctag

SEQ ID NO: 79580 - DNA, 432 bp, Artificial Sequence
  derived and/or modified sequence
atggggcctgaagcactctcctccttacttctgctgctcctggtcgcatccggcgatgcagatatgaaaggccattttgatccagccaagtgtaggtacgcactgggcatgcaggatagaactatcccagattctgatattagcgccagctcatcctggtcggactccactgcagcaaggcactcacggctagaatcttcagacggcgacggagcatggtgtcctgctgggagtgtttttccaaaagaagaagaatatttacaagtcgaccttcaaagactgcatctcgtggcactggtgggaacccagggtcgccacgccggtggattaggcaaagaattctctaggagctacaggctgaggtattcacgagacggaaggaggtggatggggtggaaagacagatggggacaggaggttatcagcggttag

SEQ ID NO: 79581 - DNA, 339 bp, Artificial Sequence
  derived and/or modified sequence
atgggtcccgaagccctgtcaagcctgttacttctcctgctcgttgccagtggcgacgctgatatgaaaggacattttgaccctgcaaaatgccgctatgcacttggtatgcaggacagaacgattccagatagcgacatctctgcctcctcctcatggtcggattctactgcagcgaggcattcccgactggaaagcagtgatggcgacggggcttggtgtcccgccggatccgtattcccaaaggaagaagaatacctgcaagttgatctgcagagattgcatctggtggctctcgtggggactcaaggaaggcatgctgggggacttgggaaatag

SEQ ID NO: 79582 - DNA, 513 bp, Artificial Sequence
  derived and/or modified sequence
atgggcccagaggcactcagcagtttactgctcctgctgctggttgcatctggggacgcggatatgaaagggcactttgaccccgcgaaatgccgttacgcactaggcatgcaagatcgtactatacctgatagcgacataagcgcaagctctagttggtctgactcaactgctgctcgccactctagactggagtcatccgatggtgacggtgcctggtgtcctgctggctctgtattcccaaaggaagaagagtacctccaggttgatctccaacggttgcacctcgtggcactggtcggcacccagggtcgccatgccggcggactaggtaaggagtttagcagatcttatagattgcggtacagccgggacgggcggaggtggatgggctggaaagaccgttggggccaggaggttatcagtggaaatgaggacccagagggagttgtgctaaaggacttaggcccacccatggtggctcgactggtccgcttttatccaagagcatag

SEQ ID NO: 79583 - DNA, 417 bp, Artificial Sequence
  derived and/or modified sequence
atgggtcctgaggcactttccagcttactactgctcttgctcgtggcctccggagacgcagacatgaaaggccatttcgaccccgctaaatgtcgttacgccctcgggatgcaagacaggacaattcccgattcggacatcagtgctagttctagttggtcggattcaacggccgcacggcattctagattggaatctagcgacggagacggtgcctggtgccctgcgggctctgtttttccgaaggaagaggaatatctccaagttgacctccagaggctgcatctcgtggctctggtgggtactcagggcagacatgcaggtggattagggaaagagttctcccgctcatacaggctgagatactctcgggatggacgaaggtggatgggatggaaagataggtgggggcagtag

SEQ ID NO: 79584 - DNA, 156 bp, Artificial Sequence
  derived and/or modified sequence
atgggcccagaggccttgtccagcttactgctccttctgctcgtggcctcaggcgatgcagatatgaaaggacactttgaccccgccaaatgccgttacgctttagggatgcaggaccgcaccattccagattccgacatcagtgcctcgtcgtag

SEQ ID NO: 79585 - DNA, 417 bp, Artificial Sequence
  derived and/or modified sequence
atgggtccagaagctctgagcagcttgttgttattgctactcgtcgcctccggggacgcagatatgaagggacatttcgacccagccaagtgtcgatacgcccttgggatgcaggacaggactatcccagacagcgacattagtgcgtcctcaagttggtctgatagtaccgctgcccgccacagtcgtctcgagagctcagacggggatggagcttggtgtccggccggaagcgtcttcccgaaagaggaggagtatttacaggttgatttgcagcgattacacctggttgccctggttggaactcagggtcgtcatgccggcgggttgggcaaagagtttagtcgcagctaccgcttgagatattcaagggacggtcgtagatggatgggatggaaggatcggtggggtcagtag

SEQ ID NO: 79586 - DNA, 258 bp, Artificial Sequence
  derived and/or modified sequence
atgggcccagaggccttgtctagcctgcttctcctactactagtggctagcggtgacgccgatatgaagggccactttgatccagctaaatgccgatacgcattgggaatgcaggaccgtacaatcccggacagcgatatctcagcctcatcatcctggagcgattcaacagctgcacgtcactctcgtctcgagtcatcggatggcgatggtgcttggtgtcctgcaggaagcgtctttcccaaagaagaggaatag

SEQ ID NO: 79587 - DNA, 732 bp, Artificial Sequence
  derived and/or modified sequence
atgggccccgaagccctcagttccttgttgctgcttttattagttgcctcaggtgacgccgatatgaaaggacacttcgatcccgcaaaatgccggtacgccctgggcatgcaagaccgtacgattccagacagtgacatcagtgcttctagttcatggagcgattccacagctgcccggcactcgcgtcttgaaagctccgatggcgacggcgcttggtgtcccgccggaagcgtttttcccaaagaggaggagtacctccaagttgatctgcagaggctccacctcgtggcgctcgtcggcacgcaggggagacatgcaggtggcctgggtaaggaattctcgagatcatatagactcagatactcacgagacggtagaagatggatgggctggaaagacaggtggggccaggaggtgatcagcggtaatgaagacccggaaggggtcgtcctgaaagacctggggccccctatggtggctcgactggtgcgcttctatccgcgagccgacagagtgatgtcagtctgtctcagggtagagctgtacggctgcttatggagggactgcagtatgggtgtctgggcctcctggcagatggtgtggtggggatggatgacgctgggacgagtccggagttgcgggagcggacaggctatgactatgtgggatggagccacaacagcatcaccagttgctatgtggaggtggagcttaagcctcacagggtag

SEQ ID NO: 79588 - DNA, 732 bp, Artificial Sequence
  derived and/or modified sequence
atgggtccagaggctttaagcagtttgctactattgctgctcgtcgcctccggggacgcagatatgaaagggcactttgaccccgccaaatgtaggtacgctctaggaatgcaggataggacaataccagactctgatatttctgcgtcaagctcctggagtgattccacagcagcgcggcactcaagactcgagagttccgacggggacggcgcctggtgtccagcaggcagcgttttccctaaagaagaggaatatctccaggtggatctgcagcggctgcatctggtcgccttagtgggaactcagggacggcatgccggggggctaggaaaggagtttagtcgcagttatagactcagatactcacgggacggacggcgttggatgggttggaaagatcggtggggtcaggaggttatatctggcaacgaggacccagagggcgtggtcctgaaggacttgggtccacccatggttgctagattggtgaggttctatccgagagccgatagagtcatgtcagtgtgtttaagagtggaactgtacggctgtttgtggagagattgctccatgggcgtgtgggccagttggcagatggtatggtggggctggatgaccctgggcagagtgaggtcctgcgggtccgggcaggctatgacaatgtgggacggagcaaccacagcgtcgcccgtcgcaatgtggagatggtctttgagcttgactggctag

SEQ ID NO: 79589 - DNA, 732 bp, Artificial Sequence
  derived and/or modified sequence
atgggacctgaggccttaagttcattgctgctgcttctgctcgtcgcttcaggagatgcggacatgaagggacactttgaccctgccaagtgtcggtacgctctgggaatgcaagatcggaccattccagactccgacatttccgctagcagttcctggtcggacagcacggccgctcggcatagcaggctcgagagctctgatggggatggagcctggtgcccagccggttcagtctttccaaaggaggaggaatacctgcaggtggatctgcaacggctgcatctcgtcgctctggtaggaacccaaggaagacacgctgggggacttggtaaggaattcagtcgatcttatagactgagatactcaagagacggccgcaggtggatgggttggaaggatagatgggggcaggaagttatctccggcaacgaagatcccgagggcgttgtactgaaagatctgggcccccccatggttgcacgactggtaagattttacccccgggcagacagggtcatgagtgtgtgtctgcgtgtggagctatacgggtgcctgtggagagactgttccatgggtgtgtgggcttcttggcagatggtgtggtggggctggatgacactcggaagggtgcgcagctgcggatccgggcaagctatgacgatgtgggacggagccactaccgcctctcccgtcgccatgtggagatggtcgctgagcctcacaggctag

SEQ ID NO: 79590 - DNA, 732 bp, Artificial Sequence
  derived and/or modified sequence
atgggacctgaggctttgagttcactgctgttactactccttgttgcctctggcgatgctgacatgaagggacactttgatccagcaaagtgtaggtacgccctcggaatgcaggaccgcacaataccggatagcgacatttctgcaagctcctcctggagtgatagcacagctgctaggcatagccgactggagagcagtgatggcgatggtgcgtggtgccccgcaggctccgtctttcctaaggaggaagagtatctccaggtcgatctccagaggctgcatctcgttgcactcgtaggcactcaaggaagacatgcggggggactggggaaagagtttagccggtcctaccggttgcgttacagtagggacggacggagatggatgggatggaaagatcgctggggacaggaagtgataagcggcaatgaggatccagaaggcgtggtgctgaaggacctcggaccccctatggtggctcggctcgttcgattttacccacgagctgatcgtgtaatgtctgtttgcttgcgtgtggagctgtatggatgtctgtggcgtgattgttcgatgggcgtgtgggcatcttggcagatggtctggtggggctggatgactctaggtcgtgtacggtcgtgtgggtctggccaggccatgaccatgtgggatggcgccaccactgcatcccccgtggcaatgtggcgctggagtctctccctgaccggttag

SEQ ID NO: 79591 - DNA, 444 bp, Artificial Sequence
  derived and/or modified sequence
atgggccctgaagcactctcgtctctgctcttattattactggtggcttctggcgatgctgatatgaagggccacttcgatcccgccaaatgtaggtatgcactgggaatgcaggaccgtaccatcccagactccgatatttcggcctctagtagttggtcagattcgactgccgctagacattctaggctagagtcttcagatggggacggggcatggtgtcccgccggcagtgtgtttcccaaggaagaagagtatttacaggtggatttacagagactgcacttagtagcattggtcggcacacaaggcagacacgcaggagggctgggaaaggaattttctcgatcgtacaggctccgatactctagggacggcaggcggtggatgggatggaaggaccggtgggggcaggaagtgatctcaggcaatgaggatccatag

SEQ ID NO: 79592 - DNA, 444 bp, Artificial Sequence
  derived and/or modified sequence
atggggcccgaagcactaagtagcttgctgctcctcctcctcgtagcttcaggcgatgccgatatgaaaggccacttcgatccggctaaatgtagatatgcactagggatgcaggatcgcacgattccagacagtgacatttcggcgtcttcgtcttggtccgactccaccgcggccaggcattctcggctagaatcttcggacggcgacggcgcctggtgccctgccggcagcgtgtttccaaaagaagaggaatatttgcaagtagacttgcagcggcttcatcttgtggcgctcgtcggcacacagggaagacacgccggtggtctgggcaaggaattttcacgaagttatcgccttaggtattctagagacggacgaagatggatgggctggaaggatcggtggggacaagaggttatatcaggcaacgaagacccctag

SEQ ID NO: 79593 - DNA, 444 bp, Artificial Sequence
  derived and/or modified sequence
atgggtccagaagcactgtcaagtcttctcttacttctcctggtggccagcggcgatgccgatatgaagggacatttcgatccagccaaatgtagatatgctctcgggatgcaggacaggacgatcccagactctgatatcagcgcaagcagtagctggtcagactctaccgctgccagacatagtcgcctcgaaagttcagatggggacggggcttggtgccccgccggaagcgtgttccccaaagaagaagaatatctgcaagtagacctccagcgactccacctcgtagccctcgtgggaacacagggaagacacgctggcggcctgggaaaggagtttagcagaagctataggctaaggtatagtagagatggaaggagatggatgggctggaaggaccggtggggacaggaagtcataagtggcaatgaggatccctag

SEQ ID NO: 79594 - DNA, 420 bp, Artificial Sequence
  derived and/or modified sequence
atgggcccagaggctttaagttcactactattactgctcctggtagccagcggtgatgctgacatgaaagggcattttgaccctgccaagtgtaggtatgctctcgggatgcaagaccggactatccccgattcagatatatccgccagttcttcctggagtgactccacagccgcgcgccactcacgccttgaatcaagtgatggtgatggcgcatggtgcccagccggctccgtgttccccaaagaagaagagtacctgcaggtcgacctccagaggctgcacctggtcgcccttgtcgggactcagggacgacatgcaggtggcctgggtaaggaattcagtagatcttatagactgcggtacagtcgggacggaagaagatggatgggatggaaagatagatgggggcaggaatag

SEQ ID NO: 79595 - DNA, 420 bp, Artificial Sequence
  derived and/or modified sequence
atgggacctgaggctctttcttctcttctcctcctgctactggtggcctcaggcgatgctgatatgaaaggccacttcgaccccgctaagtgcaggtacgccctgggtatgcaggacagaacaattcccgactccgacattagcgcaagctcttcctggtctgattccacagcagcccgccactcacgtcttgagagcagtgatggcgatggggcttggtgccctgccggatccgtgttccctaaagaggaagaatatctccaagtggatcttcagagactgcatctggtcgctcttgtgggaacccagggtagacacgcaggcgggttaggaaaggaattcagtcgcagctacagactaagatattctcgggacgggagaagatggatgggctggaaggaccggtggggccaggaatag

SEQ ID NO: 79596 - DNA, 420 bp, Artificial Sequence
  derived and/or modified sequence
atgggtcccgaggcactaagctcactcttactcctattactagttgcttctggcgacgctgatatgaaaggccactttgaccccgcgaaatgcagatatgcgcttggcatgcaagataggacaattcctgattccgatatctccgccagctctagttggagtgactccactgctgccaggcattcaaggctggagagtagcgatggcgacggcgcctggtgccctgcgggaagcgtgttccctaaggaggaagagtacttgcaagttgatctgcagaggctgcaccttgtggctcttgtgggcacacagggtagacatgcgggagggctgggcaaagagttttctaggtcctataggcttcggtatagcagagatggccggcggtggatgggctggaaggatagatgggggcaggagtag

SEQ ID NO: 79597 - DNA, 630 bp, Artificial Sequence
  derived and/or modified sequence
atgggacctgaagccctgtctagcctgttgcttttactgctcgtggccagtggagacgccgacatgaaggggcactttgatcctgccaaatgcagatatgcactcgggatgcaggacaggaccattcctgacagcgacatctccgcctcctcttcctggagcgattcaacagcagctaggcactcaaggctcgaaagttctgatggggacggtgcctggtgccccgccggatcagtctttccaaaggaagaagagtatctgcaagttgatcttcagaggctccacctcgtagccctcgtgggtacacagggtagacatgccggaggcctcggcaaagaattttcccgaagctacaggcttcggtactcaagggatggacgccgatggatgggttggaaagatagatggggtcaggaagtgatttccgggaatgaagatccagaaggtgttgtgttgaaggacttaggaccacccatggtcgcccgactcgtgcgcttttacccaagagctgatagggtcatgagtgtttgcctgcgtgtggagctctatgggtgcttatggcgagatggtttattgagttacaccgccccagtaggacagacaatgtacttatccgaagctgtttactag

SEQ ID NO: 79598 - DNA, 630 bp, Artificial Sequence
  derived and/or modified sequence
atgggacctgaagcgctttcctcactgctgctgctgttattagttgcatccggcgatgcagacatgaagggacactttgacccagccaagtgccggtatgctctgggcatgcaggacagaacgatccctgacagcgatatttcagccagtagttcttggagtgattctacagctgcccgtcattcacggcttgaatctagcgatggtgatggtgcttggtgtccggcaggctccgtgttccctaaagaggaagaatacctgcaggtggaccttcagcgccttcacctggttgctctagtcgggacacaggggagacacgccggaggacttggcaaggagttttcacgtagctataggcttagatattctagagatggcaggagatggatgggatggaaggaccggtgggggcaggaggtgatctcaggtaatgaagatcctgaaggggtggtgctcaaggatcttgggccccctatggtggcaagattggtaagattttacccccgcgcagaccgtgtgatgtcagtgtgtctacgggttgagttgtacggatgcctttggagagacggtttactgtcatacaccgcaccggttggccagactatgtacctctcagaagccgtttattag

SEQ ID NO: 79599 - DNA, 630 bp, Artificial Sequence
  derived and/or modified sequence
atgggacccgaagctcttagcagccttctgttacttctgttagttgcctcaggggacgctgacatgaaaggacactttgatccagcaaagtgcaggtatgctttgggtatgcaagaccggactatccccgatagtgacatttcagcctcttcttcatggagtgatagtacagcagcgagacattcaaggctagagagctcagacggagacggtgcgtggtgtcccgccggcagcgtatttccgaaggaggaagaatacctccaagtcgacttacagagactacatcttgtggctttagtcgggactcagggaagacacgcaggagggcttgggaaggagtttagccggtcatataggcttcgttattctcgcgatggtcgtaggtggatgggttggaaggatagatggggtcaggaggtgatcagtggcaacgaagaccccgagggcgtcgttttgaaggacctgggacctcctatggtcgccagattagtccgattctaccctagggctgatagagtgatgagtgtttgtttgcgtgtggaactgtatggttgtctgtggcgggatggcctgctgtcatacacagcaccagtcggccagaccatgtacttgtccgaagctgtttattag

SEQ ID NO: 79600 - DNA, 804 bp, Artificial Sequence
  derived and/or modified sequence
atggggcctgaagctctgagttcactgctactgcttcttcttgttgcctccggcgacgccgacatgaagggccattttgacccggccaagtgtagatatgctttgggaatgcaagatagaaccatccccgactccgacatctcagcctcttccagttggtctgatagcacagctgcccgacattcccgcctcgaatcatccgacggagacggagcttggtgtcccgcaggctcagtgttccccaaggaggaagagtacctgcaggtggatctccagaggctgcacctcgtagcgctggtcggcactcagggaagacatgccggagggttggggaaggaatttagcagatcctatagattgaggtatagtcgagacggaagaaggtggatgggatggaaagaccgctggggccaggaggtgattagcggaaacgaggatccagaaggtgtggtattgaaggatctgggccccccaatggttgctcgtctggtccggttctacccacgcgctgatcgcgtaatgtcagtatgcctgagagtggagctttatggttgtctctggcgggacgggctgttgtcatacactgctcctgtcggtcagaccatgtatctctcagaagcagtatacttaaacgatagtacatacgacggtcacacagtgggcggcctccaatatggagggttaggacagctggcagatggagtggtaggcttggacgactttcgcaaatctcaggagctaagggtgtggcccggttatgactatgtcggctggtcaaatcattctttcagctcgggatactag

SEQ ID NO: 79601 - DNA, 630 bp, Artificial Sequence
  derived and/or modified sequence
atgggccccgaggcactgtcatctttgctgttgttgttgttagtggcctctggtgacgccgacatgaaaggacacttcgaccctgcaaagtgccgatatgctctgggaatgcaggataggaccattccagactcagatattagtgcctcctctagttggtccgatagcactgcagcacgccactctagattggagtcaagcgatggggatggggcatggtgtcccgcaggatccgtttttccgaaagaagaagagtacctccaggtggacttacagcgcctacacctggttgcccttgtggggactcaaggaaggcacgcaggtggcctggggaaggaattcagtcgttcctataggcttagatatagcagagatggcagaaggtggatggggtggaaagataggtgggggcaggaagtgatctccgggaatgaagatcccgaaggagtggtactgaaagatttgggacccccaatggttgctcggctggtaaggttctatcccagggccgatagagtgatgtcagtgtgcctgcgggtggaactctatggctgcttatggcgcgacgggctactgtcctatactgcccctgtaggacagaccatgtacctctcagaagcagtctactag

SEQ ID NO: 79602 - DNA, 501 bp, Artificial Sequence
  derived and/or modified sequence
atgggccctgaggctctgtccagcctgctgttactcctcctcgtggcatcaggtgacgccgacatgaaaggccatttcgaccctgccaagtgccgctacgccctgggaatgcaggataggaccatcccagattctgacatttcagctagctcttcgtggtctgattctactgctgcacggcactctaggttggaaagttctgacggagatggagcgtggtgccctgccggaagcgtgttccctaaagaggaagaatatctccaagttgatctccagcgactgcatcttgtggccctagttggtactcagggacgacatgcaggagggctgggtaaagaattctctcgtagctatcggctacggtattctcgcgatggtagacggtggatgggttggaaagaccggtggggccaagaggtcataagcggcaatgaggatcctgaaggcgtggtgctgaaagatctgggacctcctatggtggctcgccttgtgcgtttttag

SEQ ID NO: 79603 - DNA, 462 bp, Artificial Sequence
  derived and/or modified sequence
atgggacccgaagcactaagttccctgctcctcttgctgttggtggcctctggtgatgcagatatgaagggacatttcgaccctgccaaatgcagatatgccttggggatgcaggacaggacaatccctgatagtgatatatcagcaagttcgagctggagtgactcaaccgccgcccgccattcacgcctggaaagctccgacggtgacggcgcttggtgcccagctggatctgtgttcccaaaagaggaagagtacctacaggttgacctccagagactccatctcgtcgctcttgtgggcacccaaggccggcacgccggggggttaggtaaggagtttagtcgatcttacagactacggtacagcagggacggtcggcgatggatgggatggaaggacaggtgggggcaagaagtaatctcagggaatgaagatcctgaaggggtggttttgaaatag

SEQ ID NO: 79604 - DNA, 630 bp, Artificial Sequence
  derived and/or modified sequence
atgggacccgaagccttgagctctctgctactgttgctcctagtcgcgtctggagacgcagacatgaagggccattttgaccccgccaagtgtcgatatgcccttggaatgcaagataggacaattccagattccgacatttcagcgtctagctcttggtctgactcgactgccgcacggcacagccggcttgaaagtagcgacggggacggtgcctggtgtccggcaggatctgtgtttcccaaagaagaagaatatctgcaggtcgaccttcagcgcctgcatctggtggccctagtggggacgcaaggccgacacgccggaggactcggaaaagaattctctcgatcttataggcttcgatattcacgggatggcagaagatggatgggatggaaagataggtgggggcaggaagtaatctctggtaatgaggacccagagggtgttgtcctgaaagatcttgggcctcccatggttgcacggctggtgcgcttctatcctcgcgccgatagagttatgagcgtgtgtctgagagtggaattgtacggctgcctttggcgcgacggtctgttgagttacacagctcctgtcggacagacaatgtacctatccgaagctgtctattag

SEQ ID NO: 79605 - DNA, 501 bp, Artificial Sequence
  derived and/or modified sequence
atgggcccagaagcactctcatccctgctgctgttattattggtcgcaagcggcgacgccgatatgaagggacactttgaccctgccaaatgtaggtacgctttagggatgcaagaccgtacgattccagactcagacattagtgcctctagttcttggagtgatagtacagcggctcgccactcacggctggagtcatccgacggagatggtgcatggtgtcccgccggcagcgtgtttcctaaagaggaagaataccttcaggtcgatttgcagagactccatttagtggctctggtcggcacacaaggcagacacgccggaggtttaggaaaagaattttctcgcagctaccgactgcgttatagtcgtgacggacggcgatggatgggatggaaggatcgttggggccaggaagtcatttcagggaacgaagacccagaaggagttgtgttgaaggatctagggcctcccatggtggctagattggtacgcttctag

SEQ ID NO: 79606 - DNA, 444 bp, Artificial Sequence
  derived and/or modified sequence
atgggaccagaagccctctcttcacttctgttgcttctgctggtcgcgagcggggacgcagacatgaaaggccacttcgaccccgcaaagtgtagatatgctctaggaatgcaagataggacgattcccgactctgatatttctgccagtagctcctggagcgacagtaccgctgcgcgtcactctagactagagtccagcgatggcgacggcgcgtggtgtcctgccggaagcgtattcccaaaggaagaagagtacctccaagtcgatctccagcgccttcatctagtcgctctggtgggtactcaggggcgccacgcaggcggcttaggtaaggaatttagtcggtcttacaggctcagatattctagggacggcaggcggtggatgggatggaaggatcggtgggggcaagaagtaatcagtggtaatgaggatccatag

SEQ ID NO: 79607 - DNA, 732 bp, Artificial Sequence
  derived and/or modified sequence
atgggacctgaagccctgtctagcctgctgctcttattgctcgtcgctagcggcgacgctgatatgaaggggcactttgaccccgccaaatgcagatatgctctcggaatgcaagacaggactatccccgactctgatattagcgcctcctcaagctggagcgacagtaccgcggccagacactcaagactggagtcctccgatggagatggagcatggtgtccagcaggtagtgtgtttcctaaggaagaagaatatcttcaagtggatttgcagcgactccatctggtggccttggtgggcacccagggacggcacgccggaggtctcgggaaggaatttagcaggagttataggctgcgctattccagagacggaagacgttggatgggctggaaagacaggtggggacaagaggtgatctccgggaatgaggatcctgaaggtgtggtattaaaagatttggggccccctatggtcgcgcgcttagtaaggttctatccgagggccgatcgggtcatgagcgtgtgcctgcgggtcgaactgtatggatgcttgtggagggactgtagtatgggcgtatgggcttcctggcagatggtatggtgggggtggatgactttgggtagggtgaggtcctgtggcagcggccaggctatgactatgtgggacggggcgacgaccgcatccccagtcgcaatgtggaggtggagccttagtctgaccgggtag

SEQ ID NO: 79608 - DNA, 501 bp, Artificial Sequence
  derived and/or modified sequence
atgggccctgaggcactttctagccttctgttgttgctcctcgtcgccagcggcgatgctgacatgaaaggacatttcgaccctgctaaatgtcgatatgcgctcggaatgcaggacaggactattcccgacagcgacatcagtgcctcgtccagttggagtgattccaccgctgccagacactccagactcgagagtagcgacggcgatggggcctggtgtcctgctggctccgtgtttcctaaagaagaagagtatctgcaagtagacctgcaacggctgcacctggtggctcttgttgggactcaagggagacacgctggtgggttaggcaaggaatttagcaggtcctacaggctaaggtatagcagggacggtcggagatggatgggatggaaggacaggtggggccaagaagtcatcagtggtaatgaagatcccgaaggcgttgtgttgaaggatctgggaccccctatggtggctagattggtgaggttctag

SEQ ID NO: 79609 - DNA, 420 bp, Artificial Sequence
  derived and/or modified sequence
atgggcccagaagctctatcatcactgctgctgttactgcttgttgcaagtggcgacgcggacatgaaaggacacttcgaccctgccaaatgtaggtacgccttgggaatgcaagatagaaccatcccagatagtgacatatctgcttcatctagttggtcagatagtactgccgctcggcattcccggctagagtcatcagatggggatggcgcttggtgtcccgcaggaagtgtgttccctaaggaagaggagtaccttcaagttgatttgcaacgcctgcatctggtcgcgctggtcggaacgcaggggcgacacgctggggggctagggaaagagtttagccgctcatatcggctcaggtacagtagagacggacgaagatggatgggatggaaggatcggtggggacaggagtag

SEQ ID NO: 79610 - DNA, 444 bp, Artificial Sequence
  derived and/or modified sequence
atgggccctgaagcgctgagcagcctgttattgctactactcgtcgcctctggcgacgcagatatgaagggccattttgaccccgctaaatgtagatatgctctgggaatgcaggacagaacaattcctgactcagatatcagcgcttcctccagctggagtgatagtactgccgcacgacactccagactcgaaagtagcgacggcgatggtgcctggtgcccagccggctcagtgttcccaaaagaggaagagtacctacaggtggacttacaaagactgcatctggttgccctagtgggaacgcaaggaagacacgccgggggcttaggaaaagaattcagcagaagttatagattgaggtatagcagggatgggagaagatggatgggttggaaggaccgctggggacaggaggtgattagtggaaacgaagacccgtag

SEQ ID NO: 79611 - DNA, 861 bp, Artificial Sequence
  derived and/or modified sequence
atggggcccgaagcactgagctcattactccttttactgctcgtagcctccggtgatgcagacatgaagggccacttcgatccagccaaatgtagatacgccctgggaatgcaggatagaacaatccctgacagcgacattagcgcctcaagttcttggtccgattcgactgcagctcggcattctcgcctggaatccagtgacggggacggagcgtggtgcccagctggttcagtctttcctaaggaagaggagtatctccaagttgacctgcagagactgcacctcgtggcactggtggggacacaggggagacacgctggaggactaggaaaggagttttcgcggtcttatcgcttgcgatattctcgggatgggcggcgctggatgggatggaaagatcgatgggggcaagaggtgatcagcggaaatgaggatccagaaggcgttgtactcaaggacctgggaccccctatggtggcaagactggtcagattctatcctcgcgctgaccgcgttatgagcgtttgcctcagagtggagttgtacgggtgcctttggagggatggactattaagttatactgcccctgtgggacaaacaatgtatctgagtgaggcagtatatctcaatgactctacctacgacggtcatactgtgggtggcctgcaatatggtggtttaggtcagctcgccgatggtgtggtaggcctggatgactttcgcaaatcccaggagttaagggtgtggccaggctatgattacgtcggatggtcaaaccactctttcagcagcggatatgtggaaatggaatttgaatttgacagacttagggctttccaggcgatgcaggtgcactag

SEQ ID NO: 79612 - DNA, 732 bp, Artificial Sequence
  derived and/or modified sequence
atgggcccagaagctttgtcttctctactgctccttctgcttgtggcaagtggggacgcagacatgaagggacattttgatcccgccaaatgccgttatgccctcggaatgcaagatcgcaccattcccgactcagatatttccgcctcttcctcatggagcgattccaccgcggctcgtcacagtcggcttgagagtagcgacggggacggagcttggtgtcctgccgggagtgtcttccctaaagaagaagagtacttgcaggtagatttgcagcggttacatctagtggctctggtcgggactcagggccgtcatgctggagggctgggcaaggagtttagccgatcgtataggctcagatactcacgagatggtaggagatggatgggatggaaggatcgatggggtcaggaggtgatttccggtaatgaggacccagagggggtggtgttgaaagatttgggcccacccatggttgccagactggtcagattttatcctagagccgatcgggtgatgtcagtgtgtctcagggtggaactttatgggtgcttgtggcgcgattgctcaatgggagtgtgggcttcatggcagatggtgtggtggggctggatgactctgggaagagtgcgcagctgtgggtcaggacaggcaatgactatgtgggatggagccactacggcaagtcctgtggccatgtggcggtggtctctttctcttacaggctag

SEQ ID NO: 79613 - DNA, 369 bp, Artificial Sequence
  derived and/or modified sequence
atgggtcccgaagctctgagctcattgctactgctgctactcgttgcgtcaggtgatgccgatatgaaggggcactttgaccccgctaagtgccgttacgcactgggcatgcaggaccgcacaattccggatagcgatatttccgcctcctcatcctggagcgacagcaccgccgctagacactcgaggttggaatctagtgatggggatggggcgtggtgtccggccggcagtgttttccctaaagaagaagagtacctccaagtcgacctgcagagactccaccttgtggctttagtcggaacacaggggcgtcacgctggggggttgggaaaagagtttagtaggtcttacagattaaggtattag

SEQ ID NO: 79614 - DNA, 483 bp, Artificial Sequence
  derived and/or modified sequence
atgggacctgaagccctgtcaagtttgctgctactcctactggtcgcatccggagatgctgatatgaaaggccattttgacccggcaaagtgtcgctatgcactgggaatgcaggacagaacaatacccgacagcgacatttctgcatcatcttcctggagcgattcgaccgcggctcgtcactcaaggctggagtcctcagacggagacggggcctggtgtcctgcaggatccgtgttccccaaagaggaggagtaccttcaggtggacctacaacggctccatctcgtagcactggtcggtacccagggacgccacgctggaggccttggtaaggagttctccaggtcctacaggctgagatattctagagacggtcgcagatggatgggatggaaagatcgttggggccaagaagtgatatccggaaatgaagaccccgagggagtagtactaaaggatctgggtccccccatggtgtag

SEQ ID NO: 79615 - DNA, 399 bp, Artificial Sequence
  derived and/or modified sequence
atgggacctgaggcactgtcaagtctgttgctactgctactcgtcgcctccggggacgccgacatgaagggccattttgaccccgccaaatgccggtatgccctaggtatgcaggataggaccatccccgattccgatatatcagcttcctcatcatggtccgactcaaccgcagcccgccattcaaggctggagagctccgatggggacggtgcatggtgccccgccggctcagtctttcccaaggaagaggaatatttgcaagtggacctgcagagactgcatcttgtggcgctcgtggggacacagggtcgacacgctggcggacttgggaaggaatttagtaggtcataccgcctgagatacagcagggacggccgcagatggatgggatggtag

SEQ ID NO: 79616 - DNA, 306 bp, Artificial Sequence
  derived and/or modified sequence
atggggcccgaggccttatcatcacttcttttactcctcttagttgcctctggtgacgcagacatgaaaggtcattttgacccagctaaatgccgatacgcacttggaatgcaggacagaaccataccagacagcgacatcagcgcatcatcctcttggtctgactcaaccgcagcaaggcactctcgtctggaaagtagcgacggcgatggagcctggtgtcccgccggaagcgtgttcccaaaggaggaggagtacctgcaagtcgaccttcagcgccttcatctcgtggcactcgtggggtag

SEQ ID NO: 79617 - DNA, 384 bp, Artificial Sequence
  derived and/or modified sequence
atgggacccgaggccttgagttccctgctgttactcttactcgttgcctccggtgatgccgatatgaagggccatttcgatcccgcaaagtgcagatacgcactggggatgcaagatagaacgatacctgatagtgacatatctgcctcatccagttggtcagacagtacagcggcaaggcatagccgcctggagagctccgacggcgatggagcatggtgcccggccggatctgtgtttcctaaggaagaggagtacctgcaagtagatctgcagagattacaccttgtagcacttgtcggaacgcaaggcaggcacgcgggcggactgggcaaagaattctcgaggtcgtacaggctgagatactcaagggatggaagatag

SEQ ID NO: 79618 - DNA, 348 bp, Artificial Sequence
  derived and/or modified sequence
atgggtcccgaagccctttctagtctgctgttactgctgttagtggcctccggagatgccgatatgaaaggacattttgatccagctaaatgtcgctatgcccttggaatgcaggaccgaacaattcccgattcagacatctctgccagctcctcttggagcgattcaaccgcggctaggcactctcgtctggagtcctcagacggtgatggtgcatggtgccccgcaggatctgtttttcccaaggaagaggagtacctccaggtggatttgcagaggctgcacctggttgccctggtcgggacacaaggacgacatgctggaggtctaggaaaagaatttagttag

SEQ ID NO: 79619 - DNA, 432 bp, Artificial Sequence
  derived and/or modified sequence
atggggcctgaagcactctcctccttacttctgctgctcctggtcgcatccggcgatgcagatatgaaaggccattttgatccagccaagtgtaggtacgcactgggcatgcaggatagaactatcccagattctgatattagcgccagctcatcctggtcggactccactgcagcaaggcactcacggctagaatcttcagacggcgacggagcatggtgtcctgctgggagtgtttttccaaaagaagaagaatatttacaagtcgaccttcaaagactgcatctcgtggcactggtgggcacccagggtcggcacgccggaggtctcgggaaggaattctctagaagttatagactcagatacagcagggacgggcggagatggatgggctggaaagatcggtgggggcaggaggtaatttcagggtag

SEQ ID NO: 79620 - DNA, 339 bp, Artificial Sequence
  derived and/or modified sequence
atgggacccgaagccctgagttcgctgctcctgctcttacttgtcgccagcggtgatgctgatatgaaaggccacttcgatccagccaagtgccgctatgcactgggcatgcaagaccggaccattccagacagcgatatttcagcatcctcctcgtggtcagattccacggcagcacgtcactcaaggctagaaagttcagatggagacggcgcatggtgcccagcagggagcgtatttcccaaagaagaggagtatctgcaggtagacctccagcggctgcatcttgtcgcgctggtgggcacacaaggcagacacgcaggaggcttagggaagtag

SEQ ID NO: 79621 - DNA, 513 bp, Artificial Sequence
  derived and/or modified sequence
atgggtcccgaggcccttagcagcctgctgcttctactgttagtagccagcggcgacgccgacatgaaagggcatttcgaccccgccaaatgcaggtacgcccttggcatgcaggataggactatccctgatagcgatatttccgccagcagttcctggtctgactcaacggccgcccgccatagccgcttagagtcttccgatggcgatggagcttggtgtccggccggaagtgtttttcctaaagaggaggagtacttacaggttgatctacaaagacttcaccttgtcgccttagtggggactcagggtcgccatgcgggcggtctgggcaaggagttctcacgtagctatagactaaggtactctcgggacgggcggaggtggatgggatggaaggaccgctggggccaggaagtcatatctgggaatgaagaccctgaaggagttgttttgaaggatttaggccccccaatggtggcaagactggttagattctatccaagggcgtag

SEQ ID NO: 79622 - DNA, 417 bp, Artificial Sequence
  derived and/or modified sequence
atgggacctgaggctcttagctccttactgcttcttcttctggtggcaagtggcgatgccgatatgaagggacacttcgacccggcaaagtgtagatacgcccttggtatgcaggacaggacaattccggacagcgatatctcagcatccagtagctggtctgatagcacagccgcgaggcattctcgattggaatcctctgatggcgacggcgcttggtgccctgccggaagtgtgtttcctaaggaggaagaatatctccaagtggatcttcagcgactgcatttagtggcattggtgggcactcagggacggcacgcgggcgggctaggaaaggagttctcaaggagttacagactgaggtacagccgagatggaaggcggtggatggggtggaaagatcgatgggggcaatag

SEQ ID NO: 79623 - DNA, 417 bp, Artificial Sequence
  derived and/or modified sequence
atgggtcctgaggctctgagtagccttttgctcctgctgctggttgcctccggagatgccgacatgaaaggccactttgatccggcgaagtgccgctacgccttggggatgcaagatcgaacgattcccgatagcgatatttctgctagctcaagctggtcagactcaaccgccgcccgacactctagactcgaatcatctgacggcgacggtgcctggtgcccggctggaagcgttttcccgaaagaagaggagtaccttcaggtggacttgcagagactgcaccttgtggccctcgttggaacacaaggaaggcacgcaggcgggctcggaaaggaattcagccgttcgtacaggcttagatatagcagggatggtcgcagatggatggggtggaaagataggtggggccagtag

SEQ ID NO: 79624 - DNA, 732 bp, Artificial Sequence
  derived and/or modified sequence
atgggtcctgaggcgctctcatcactactgctgcttcttttagtcgcctcaggcgatgctgacatgaagggccatttcgaccccgccaagtgtaggtacgctctcggcatgcaagatagaaccatccctgactccgacattagcgcatcctcctcctggagcgatagcaccgccgcccgccactctcgactggagtcttccgacggcgatggcgcctggtgcccagcaggttccgtctttcccaaagaagaggaatacctccaagtcgaccttcagagattgcacttagtcgcactcgtgggaacacagggcaggcatgcaggagggctgggcaaagagttttcccggagttataggctacgatacagccgcgacggccggagatggatggggtggaaggatcggtggggtcaagaggttatctctggaaatgaagatcccgagggcgtcgttttaaaggacctcggccctcctatggtagctagactcgtaagattctacccgagggctgatcgggtcatgtcagtttgtctaagagtagagttatacgggtgcctgtggcgggattgtagtatgggagtctgggcaagttggcagatggtgtggtgggggtggatgactctgggacgggtacgatcatgtgggtccgggcaagcaatgacaatgtgggatggcgctaccaccgcaagccccgtcgcaatgtggcgctggtccctttctctgactggttag

SEQ ID NO: 79625 - DNA, 732 bp, Artificial Sequence
  derived and/or modified sequence
atgggacccgaagctctgtcaagtttgctgttgcttctcttagtcgcttccggcgatgctgatatgaaagggcacttcgacccggccaaatgtagatatgccctgggcatgcaggatcgaaccattcccgacagcgacatctccgcttcctcttcttggagtgactccacagctgcacgacactcccgactggagtcatccgacggtgacggtgcctggtgtcccgccggttcggtctttccaaaagaagaagaatacctgcaagtggaccttcagcgcctgcacctcgttgccttggtcggcacccagggtcggcacgccggagggctaggaaaagaattttcgcgcagttaccgtctgcgttattcacgtgatggcaggagatggatggggtggaaagatcggtggggtcaagaagtgattagtgggaatgaggatcccgaaggggtggtactgaaggatctaggccccccaatggtggctcgtttggttagattttatccaagagctgatcgcgtcatgtccgtttgccttagggtcgaactgtatggatgtctgtggagggattgtagcatgggagtgtgggcctcttggcaaatggtgtggtggggatggatgactttgggccgagttagaagctgtggctctggacaggccatgaccatgtgggacggtgcgactaccgcttcaccagttgcaatgtggcgctggtccttgtctttaacgggatag

SEQ ID NO: 79626 - DNA, 732 bp, Artificial Sequence
  derived and/or modified sequence
atgggtcccgaagcactctcttctctgctgctgttgctgctggttgcttctggggatgccgacatgaaaggacatttcgatccggctaagtgccgctacgccctaggcatgcaggataggacaatccctgactcagatatttccgcctccagttcttggtcagacagcacagcggcccggcattccagactcgagtcatcagacggcgatggtgcttggtgccccgccggttcagtgttccccaaagaagaggaatacctacaagtagatcttcagaggctgcatttggttgctcttgtgggcacacagggtcggcacgccggggggttgggtaaagagttttcgcgttcatatcgcctaagatatagcagagacggacggagatggatgggctggaaggacagatggggacaagaggtcattagcggcaatgaagaccccgagggtgtggtattgaaggacttaggacccccgatggtagcacgcctagtacgattttatccacgggctgaccgggtcatgtctgtctgcctgcgcgtggagttgtatggatgcttgtggagggattgtagtatgggtgtttgggcctcctggcaaatggtatggtggggatggatgacactggggagagtgcgcagttgcggtagcgggcaggcaatgaccatgtgggatggcgcaacaacagcttctcccgtcgcaatgtggcggtggagcttaagtctgacaggctag

SEQ ID NO: 79627 - DNA, 732 bp, Artificial Sequence
  derived and/or modified sequence
atgggacccgaagctctttcttctctcctactcctattgcttgttgcctccggcgatgctgatatgaagggccactttgaccctgccaagtgtcgctacgctttgggcatgcaggacaggactattccggattctgacatttcagcatcctcctcctggagcgactctactgccgcgagacacagccggctggaaagttccgacggagatggtgcatggtgccctgcaggatctgtctttccaaaagaagaggagtacctccaagtcgatctgcaacgacttcacttagtggcgctggtagggacgcagggaaggcatgccggaggactgggcaaagaattcagtcgttcttatcgcctgcggtatagtcgtgatggacggcgatggatgggttggaaggacagatggggccaagaggtgatttcaggcaatgaagatccagagggcgtcgtcttaaaagatctgggacctcctatggtggcgcggttggtccgcttttacccccgagccgacagggtgatgtctgtctgtttgagggtggagttatacggatgtctctggagagattgttctatgggagtctgggctagttggcagatggtgtggtggggatggatgactttaggtagagtgcggagctgcggctcagggcaagccatgacaatgtgggacggggcgacaacagcttcacccgtggcaatgtggaggtggagcctctccctgactggatag

SEQ ID NO: 79628 - DNA, 177 bp, Artificial Sequence
  derived and/or modified sequence
atgggccccgaggccctgagcagcctgctgctgctgctgctggtggccagcggcgacgccgacatgaagggccacttcgaccccgccaagtgcagatacgccctgggcatgcaggacagaaccatccccgacagcgacatcagcgccagcagcagctggagcgacagcaccgcctag

SEQ ID NO: 79629 - DNA, 804 bp, Artificial Sequence
  derived and/or modified sequence
atgggccccgaggccctgagcagcctgctgctgctgctgctggtggccagcggcgacgccgacatgaagggccacttcgaccccgccaagtgcagatacgccctgggcatgcaggacagaaccatccccgacagcgacatcagcgccagcagcagctggagcgacagcaccgccgccagacacagcagactggagagcagcgacggcgacggcgcctggtgccccgccggcagcgtgttccccaaggaggaggagtacctgcaggtggacctgcagagactgcacctggtggccctggtgggcacccagggcagacacgccggcggcctgggcaaggagttcagcagaagctacagactgagatacagcagagacggcagaagatggatgggctggaaggacagatggggccaggaggtgatcagcggcaacgaggaccccgagggcgtggtgctgaaggacctgggcccccccatggtggccagactggtgagattctaccccagagccgacagagtgatgagcgtgtgcctgagagtggagctgtacggctgcctgtggagagacggcctgctgagctacaccgcccccgtgggccagaccatgtacctgagcgaggccgtgtacctgaacgacagcacctacgacggccacaccgtgggcggcctgcagtacggcggcctgggccagctggccgacggcgtggtgggcctggacgacttcagaaagagccaggagctgagagtgtggcccggctacgactacgtgggctggagcaaccacagcttcagcagcggctactag

SEQ ID NO: 79630 - DNA, 462 bp, Artificial Sequence
  derived and/or modified sequence
atgggccccgaggccctgagcagcctgctgctgctgctgctggtggccagcggcgacgccgacatgaagggccacttcgaccccgccaagtgcagatacgccctgggcatgcaggacagaaccatccccgacagcgacatcagcgccagcagcagctggagcgacagcaccgccgccagacacagcagactggagagcagcgacggcgacggcgcctggtgccccgccggcagcgtgttccccaaggaggaggagtacctgcaggtggacctgcagagactgcacctggtggccctggtgggcacccagggcagacacgccggcggcctgggcaaggagttcagcagaagctacagactgagatacagcagagacggcagaagatggatgggctggaaggacagatggggccaggaggtgatcagcggcaacgaggaccccgagggcgtggtgctgaagtag

SEQ ID NO: 79631 - DNA, 732 bp, Artificial Sequence
  derived and/or modified sequence
atgggccccgaggccctgagcagcctgctgctgctgctgctggtggccagcggcgacgccgacatgaagggccacttcgaccccgccaagtgcagatacgccctgggcatgcaggacagaaccatccccgacagcgacatcagcgccagcagcagctggagcgacagcaccgccgccagacacagcagactggagagcagcgacggcgacggcgcctggtgccccgccggcagcgtgttccccaaggaggaggagtacctgcaggtggacctgcagagactgcacctggtggccctggtgggcacccagggcagacacgccggcggcctgggcaaggagttcagcagaagctacagactgagatacagcagagacggcagaagatggatgggctggaaggacagatggggccaggaggtgatcagcggcaacgaggaccccgagggcgtggtgctgaaggacctgggcccccccatggtggccagactggtgagattctaccccagagccgacagagtgatgagcgtgtgcctgagagtggagctgtacggctgcctgtggagagactgcagcatgggcgtgtgggccagctggcagatggtgtggtggggctggatgaccctgggcagagtgagaagctgcggcagcggccaggccatgaccatgtgggacggcgccaccaccgccagccccgtggccatgtggagatggagcctgagcctgaccggctag

SEQ ID NO: 79632 - DNA, 861 bp, Artificial Sequence
  derived and/or modified sequence
atgggccccgaggccctgagcagcctgctgctgctgctgctggtggccagcggcgacgccgacatgaagggccacttcgaccccgccaagtgcagatacgccctgggcatgcaggacagaaccatccccgacagcgacatcagcgccagcagcagctggagcgacagcaccgccgccagacacagcagactggagagcagcgacggcgacggcgcctggtgccccgccggcagcgtgttccccaaggaggaggagtacctgcaggtggacctgcagagactgcacctggtggccctggtgggcacccagggcagacacgccggcggcctgggcaaggagttcagcagaagctacagactgagatacagcagagacggcagaagatggatgggctggaaggacagatggggccaggaggtgatcagcggcaacgaggaccccgagggcgtggtgctgaaggacctgggcccccccatggtggccagactggtgagattctaccccagagccgacagagtgatgagcgtgtgcctgagagtggagctgtacggctgcctgtggagagacggcctgctgagctacaccgcccccgtgggccagaccatgtacctgagcgaggccgtgtacctgaacgacagcacctacgacggccacaccgtgggcggcctgcagtacggcggcctgggccagctggccgacggcgtggtgggcctggacgacttcagaaagagccaggagctgagagtgtggcccggctacgactacgtgggctggagcaaccacagcttcagcagcggctacgtggagatggagttcgagttcgacagactgagagccttccaggccatgcaggtgcactag

SEQ ID NO: 79633 - DNA, 168 bp, Artificial Sequence
  derived and/or modified sequence
atgggccccgaggccctgagcagcctgctgctgctgctgctggtggccagcggcgacgccgacatgaagggccacttcgaccccgccaagtgcagatacgccctgggcatgcaggacagaaccatccccgacagcgacatcagcgccagcagcagctggagcgactag

SEQ ID NO: 79634 - DNA, 156 bp, Artificial Sequence
  derived and/or modified sequence
atgggccccgaggccctgagcagcctgctgctgctgctgctggtggccagcggcgacgccgacatgaagggccacttcgaccccgccaagtgcagatacgccctgggcatgcaggacagaaccatccccgacagcgacatcagcgccagcagctag

SEQ ID NO: 79635 - DNA, 222 bp, Artificial Sequence
  derived and/or modified sequence
atgggccccgaggccctgagcagcctgctgctgctgctgctggtggccagcggcgacgccgacatgaagggccacttcgaccccgccaagtgcagatacgccctgggcatgcaggacagaaccatccccgacagcgacatcagcgccagcagcagctggagcgacagcaccgccgccagacacagcagactggagagcagcgacggcgacggcgcctggtag

SEQ ID NO: 79636 - DNA, 369 bp, Artificial Sequence
  derived and/or modified sequence
atgggccccgaggccctgagcagcctgctgctgctgctgctggtggccagcggcgacgccgacatgaagggccacttcgaccccgccaagtgcagatacgccctgggcatgcaggacagaaccatccccgacagcgacatcagcgccagcagcagctggagcgacagcaccgccgccagacacagcagactggagagcagcgacggcgacggcgcctggtgccccgccggcagcgtgttccccaaggaggaggagtacctgcaggtggacctgcagagactgcacctggtggccctggtgggcacccagggcagacacgccggcggcctgggcaaggagttcagcagaagctacagactgagatactag

SEQ ID NO: 79637 - DNA, 483 bp, Artificial Sequence
  derived and/or modified sequence
atgggccccgaggccctgagcagcctgctgctgctgctgctggtggccagcggcgacgccgacatgaagggccacttcgaccccgccaagtgcagatacgccctgggcatgcaggacagaaccatccccgacagcgacatcagcgccagcagcagctggagcgacagcaccgccgccagacacagcagactggagagcagcgacggcgacggcgcctggtgccccgccggcagcgtgttccccaaggaggaggagtacctgcaggtggacctgcagagactgcacctggtggccctggtgggcacccagggcagacacgccggcggcctgggcaaggagttcagcagaagctacagactgagatacagcagagacggcagaagatggatgggctggaaggacagatggggccaggaggtgatcagcggcaacgaggaccccgagggcgtggtgctgaaggacctgggcccccccatggtgtag

SEQ ID NO: 79638 - DNA, 399 bp, Artificial Sequence
  derived and/or modified sequence
atgggccccgaggccctgagcagcctgctgctgctgctgctggtggccagcggcgacgccgacatgaagggccacttcgaccccgccaagtgcagatacgccctgggcatgcaggacagaaccatccccgacagcgacatcagcgccagcagcagctggagcgacagcaccgccgccagacacagcagactggagagcagcgacggcgacggcgcctggtgccccgccggcagcgtgttccccaaggaggaggagtacctgcaggtggacctgcagagactgcacctggtggccctggtgggcacccagggcagacacgccggcggcctgggcaaggagttcagcagaagctacagactgagatacagcagagacggcagaagatggatgggctggtag

SEQ ID NO: 79639 - DNA, 306 bp, Artificial Sequence
  derived and/or modified sequence
atgggccccgaggccctgagcagcctgctgctgctgctgctggtggccagcggcgacgccgacatgaagggccacttcgaccccgccaagtgcagatacgccctgggcatgcaggacagaaccatccccgacagcgacatcagcgccagcagcagctggagcgacagcaccgccgccagacacagcagactggagagcagcgacggcgacggcgcctggtgccccgccggcagcgtgttccccaaggaggaggagtacctgcaggtggacctgcagagactgcacctggtggccctggtgggctag

SEQ ID NO: 79640 - DNA, 213 bp, Artificial Sequence
  derived and/or modified sequence
atgggccccgaggccctgagcagcctgctgctgctgctgctggtggccagcggcgacgccgacatgaagggccacttcgaccccgccaagtgcagatacgccctgggcatgcaggacagaaccatccccgacagcgacatcagcgccagcagcagctggagcgacagcaccgccgccagacacagcagactggagagcagcgacggcgactag

SEQ ID NO: 79641 - DNA, 237 bp, Artificial Sequence
  derived and/or modified sequence
atgggccccgaggccctgagcagcctgctgctgctgctgctggtggccagcggcgacgccgacatgaagggccacttcgaccccgccaagtgcagatacgccctgggcatgcaggacagaaccatccccgacagcgacatcagcgccagcagcagctggagcgacagcaccgccgccagacacagcagactggagagcagcgacggcgacggcgcctggtgccccgccggcagctag

SEQ ID NO: 79642 - DNA, 384 bp, Artificial Sequence
  derived and/or modified sequence
atgggccccgaggccctgagcagcctgctgctgctgctgctggtggccagcggcgacgccgacatgaagggccacttcgaccccgccaagtgcagatacgccctgggcatgcaggacagaaccatccccgacagcgacatcagcgccagcagcagctggagcgacagcaccgccgccagacacagcagactggagagcagcgacggcgacggcgcctggtgccccgccggcagcgtgttccccaaggaggaggagtacctgcaggtggacctgcagagactgcacctggtggccctggtgggcacccagggcagacacgccggcggcctgggcaaggagttcagcagaagctacagactgagatacagcagagacggcagatag

SEQ ID NO: 79643 - DNA, 348 bp, Artificial Sequence
  derived and/or modified sequence
atgggccccgaggccctgagcagcctgctgctgctgctgctggtggccagcggcgacgccgacatgaagggccacttcgaccccgccaagtgcagatacgccctgggcatgcaggacagaaccatccccgacagcgacatcagcgccagcagcagctggagcgacagcaccgccgccagacacagcagactggagagcagcgacggcgacggcgcctggtgccccgccggcagcgtgttccccaaggaggaggagtacctgcaggtggacctgcagagactgcacctggtggccctggtgggcacccagggcagacacgccggcggcctgggcaaggagttcagctag

SEQ ID NO: 79644 - DNA, 432 bp, Artificial Sequence
  derived and/or modified sequence
atgggccccgaggccctgagcagcctgctgctgctgctgctggtggccagcggcgacgccgacatgaagggccacttcgaccccgccaagtgcagatacgccctgggcatgcaggacagaaccatccccgacagcgacatcagcgccagcagcagctggagcgacagcaccgccgccagacacagcagactggagagcagcgacggcgacggcgcctggtgccccgccggcagcgtgttccccaaggaggaggagtacctgcaggtggacctgcagagactgcacctggtggccctggtgggcacccagggcagacacgccggcggcctgggcaaggagttcagcagaagctacagactgagatacagcagagacggcagaagatggatgggctggaaggacagatggggccaggaggtgatcagcggctag

SEQ ID NO: 79645 - DNA, 339 bp, Artificial Sequence
  derived and/or modified sequence
atgggccccgaggccctgagcagcctgctgctgctgctgctggtggccagcggcgacgccgacatgaagggccacttcgaccccgccaagtgcagatacgccctgggcatgcaggacagaaccatccccgacagcgacatcagcgccagcagcagctggagcgacagcaccgccgccagacacagcagactggagagcagcgacggcgacggcgcctggtgccccgccggcagcgtgttccccaaggaggaggagtacctgcaggtggacctgcagagactgcacctggtggccctggtgggcacccagggcagacacgccggcggcctgggcaagtag

SEQ ID NO: 79646 - DNA, 513 bp, Artificial Sequence
  derived and/or modified sequence
atgggccccgaggccctgagcagcctgctgctgctgctgctggtggccagcggcgacgccgacatgaagggccacttcgaccccgccaagtgcagatacgccctgggcatgcaggacagaaccatccccgacagcgacatcagcgccagcagcagctggagcgacagcaccgccgccagacacagcagactggagagcagcgacggcgacggcgcctggtgccccgccggcagcgtgttccccaaggaggaggagtacctgcaggtggacctgcagagactgcacctggtggccctggtgggcacccagggcagacacgccggcggcctgggcaaggagttcagcagaagctacagactgagatacagcagagacggcagaagatggatgggctggaaggacagatggggccaggaggtgatcagcggcaacgaggaccccgagggcgtggtgctgaaggacctgggcccccccatggtggccagactggtgagattctaccccagagcctag

SEQ ID NO: 79647 - DNA, 417 bp, Artificial Sequence
  derived and/or modified sequence
atgggccccgaggccctgagcagcctgctgctgctgctgctggtggccagcggcgacgccgacatgaagggccacttcgaccccgccaagtgcagatacgccctgggcatgcaggacagaaccatccccgacagcgacatcagcgccagcagcagctggagcgacagcaccgccgccagacacagcagactggagagcagcgacggcgacggcgcctggtgccccgccggcagcgtgttccccaaggaggaggagtacctgcaggtggacctgcagagactgcacctggtggccctggtgggcacccagggcagacacgccggcggcctgggcaaggagttcagcagaagctacagactgagatacagcagagacggcagaagatggatgggctggaaggacagatggggccagtag

SEQ ID NO: 79648 - DNA, 258 bp, Artificial Sequence
  derived and/or modified sequence
atgggccccgaggccctgagcagcctgctgctgctgctgctggtggccagcggcgacgccgacatgaagggccacttcgaccccgccaagtgcagatacgccctgggcatgcaggacagaaccatccccgacagcgacatcagcgccagcagcagctggagcgacagcaccgccgccagacacagcagactggagagcagcgacggcgacggcgcctggtgccccgccggcagcgtgttccccaaggaggaggagtag

SEQ ID NO: 79649 - DNA, 444 bp, Artificial Sequence
  derived and/or modified sequence
atgggcccagaggcactctcctcgctcctccttctactgctggtcgctagtggggacgcggatatgaaggggcattttgatcctgctaagtgtcgttatgctttgggcatgcaggaccggactattcccgacagcgacattagcgcctcttcctcctggagcgactctactgccgctcggcactcgaggcttgagtcgtctgatggagacggcgcttggtgtcccgccgggagcgtcttccccaaagaagaggaatacctgcaagtggacttacagaggctgcacctggtagcattggtaggcactcagggacggcacgctggaggccttggaaaggaattcagtcggagctatcgactgcgctacagtcgcgacggaagaagatggatggggtggaaggatcgctggggtcaagaagtgatctccggaaatgaggacccctag

SEQ ID NO: 79650 - DNA, 444 bp, Artificial Sequence
  derived and/or modified sequence
atggggcccgaggccctttctagtttgctgctacttctgttggtggctagcggcgacgcagatatgaagggacacttcgatcctgccaagtgtcgctatgcacttggtatgcaagatcggacaatcccagactcggacatctcagccagctcctcttggagcgacagcactgccgccaggcatagtcggttggagtcaagcgacggtgacggggcctggtgccccgccggtagcgtgttccccaaagaggaagaatacctgcaggtggacttacagagactgcacctggtcgcactggttgggactcaggggcggcacgcaggtggcctgggcaaggagttcagtcgctcctacaggctgcgatattctcgggacggccgtcggtggatgggctggaaagaccgctggggccaggaggtcattagtgggaacgaagacccatag

SEQ ID NO: 79651 - DNA, 444 bp, Artificial Sequence
  derived and/or modified sequence
atgggacctgaagccctgtcaagtctgcttctgctactcctggtagcctcgggagatgcagatatgaagggccatttcgatccagcaaagtgccggtacgccctcggtatgcaggacagaacaattcccgactctgatatcagtgcctcaagcagctggtccgattccacagcggctcgtcactcaaggctggaatcttccgatggcgatggcgcttggtgtcccgccgggagcgtcttccccaaagaggaagagtacctccaggtggacctacagcgtctccacctcgtcgcactcgttggaacacaaggcaggcatgctggcggcttgggtaaggaattctctcggagttatcggctccgatactcacgggatggaagacgatggatgggctggaaggacagatggggtcaagaagtgatatctggcaacgaagacccatag

SEQ ID NO: 79652 - DNA, 177 bp, Artificial Sequence
  derived and/or modified sequence
atgggccccgaggccctgagcagcctactgctgttattgctcgtcgcctctggcgacgctgacatgaaaggccactttgatccagcaaaatgccgttatgctttgggcatgcaggatcgcacaatacccgatagcgatattagcgcctcatcctcatggtcagattcaacagcttag

SEQ ID NO: 79653 - DNA, 420 bp, Artificial Sequence
  derived and/or modified sequence
atgggacctgaagctctgtcaagcttattactccttcttctagtggcgtcaggggacgcagatatgaaagggcattttgatccggccaagtgccgttatgccctgggaatgcaggatagaaccatcccggattcagacatctccgcctcttcaagttggtctgatagcacagccgcaagacactctcgcttagaaagctctgatggtgacggtgcttggtgtcctgctgggtcggtattccccaaggaggaggagtacctgcaggttgacctgcagaggttgcacctcgtcgcactcgttggtacacagggcagacatgctggcggactgggcaaggaatttagccgctcgtatcgcctgcgatatagccgggacggcaggaggtggatggggtggaaggatcgctgggggcaagaatag

SEQ ID NO: 79654 - DNA, 420 bp, Artificial Sequence
  derived and/or modified sequence
atgggccctgaagcactctctagtctactgctcctgcttctggttgcgtcgggtgatgccgacatgaaggggcactttgatccagcaaagtgtcggtacgccttggggatgcaggaccggaccatccctgactctgatatatcggccagtagttcttggtcagattcgactgcagctaggcatagccggctggagtccagcgatggggatggtgcatggtgcccagccggctctgtgttccccaaggaggaggaataccttcaggtggatttacagagattacacctcgtagctctcgtgggaacacagggcaggcatgccggcgggttgggaaaggaattttcccgcagctatcgactgcgctacagtcgagatggtcgaagatggatggggtggaaggaccgatggggccaggagtag

SEQ ID NO: 79655 - DNA, 420 bp, Artificial Sequence
  derived and/or modified sequence
atggggcctgaggcactgagctccctgctcctgcttctgctcgtggcatcgggcgatgccgacatgaaggggcactttgaccctgccaagtgcaggtatgcactgggcatgcaggatcggactatccctgatagcgacataagcgcaagtagttcttggagcgactctaccgccgctcgacactcgagactggagtcatctgatggggacggagcttggtgtccggccggctctgtgtttcccaaggaagaggaatatctgcaggttgacctgcaaagactgcacctggtggcactggtcggaacccaggggagacacgctggcggcctggggaaggaattttctagaagctaccgactgagatactcacgtgatggccgtcggtggatgggatggaaagatcgatggggacaggaatag

SEQ ID NO: 79656 - DNA, 630 bp, Artificial Sequence
  derived and/or modified sequence
atggggcccgaggctctgtcgtctctattgctcttattgctggtggcttccggcgacgccgatatgaaaggccatttcgatcccgccaaatgcagatacgccctcggaatgcaagataggacaattcctgactcagatatttcagcgtccagttcatggtccgactccactgcagcccgccactccagactagaaagctccgacggagacggagcctggtgcccggctgggtcagttttccccaaagaagaagagtatctccaggtggatctgcagaggcttcaccttgttgccctggtgggcacgcaagggcgccacgctggcggcctgggaaaggagttctccagatcctaccgcttgcgatactcccgcgacggccggaggtggatgggctggaaggatagatggggccaggaagtcatctccggaaacgaggatccagagggggtcgtactcaaagacctgggccctcctatggttgcgcggctggtgcggttctatccccgcgcagacagggtgatgagcgtctgtctgcgggttgagctttacggatgtctgtggagggatggactgctgagctatacagcgcccgtggggcagacgatgtacttgtctgaagcagtctactag

SEQ ID NO: 79657 - DNA, 630 bp, Artificial Sequence
  derived and/or modified sequence
atgggccccgaagccctgtcttcactgctcctcctgctcctcgtggcttccggtgatgcagatatgaagggtcatttcgatcctgcaaagtgtagatatgctcttggcatgcaggatcgcaccattccagacagtgacatcagcgcttcctcctcatggtccgattcgaccgcggctcgccacagtcgactcgaaagcagcgacggtgatggggcttggtgtcctgcgggctccgtgtttccgaaagaagaagagtatctgcaggtggacctccaacgtttgcacctggtggccctagtgggaacacaggggcggcatgctgggggactgggcaaggagttttctcggtcgtatagactgcgatacagcagagacgggcgccggtggatgggatggaaagaccgatggggccaggaggtaatcagtggcaacgaggaccccgagggagtggttttgaaggacttagggcctcctatggttgcacgccttgttcggttctaccccagagctgaccgagtaatgtctgtgtgtctccgagtggagttgtacgggtgtttatggagggacggattgctttcatacactgctcccgtcgggcagaccatgtatttgtctgaggccgtatattag

SEQ ID NO: 79658 - DNA, 630 bp, Artificial Sequence
  derived and/or modified sequence
atgggcccagaggccctgtcctctcttctgctccttctgctggtggcaagtggagacgcagatatgaagggccattttgaccccgctaaatgtcgttacgcactcgggatgcaagacaggaccattcccgacagtgatatttcagcctcatcttcctggagcgatagtactgccgcacgtcacagccgcttggaaagctccgacggagacggcgcctggtgtcccgcgggcagcgttttccccaaagaagaggagtatctgcaggttgatcttcaacgtctccacctggtggctctggtgggcactcagggccggcacgcaggcggtctgggtaaggagttttccagatcttatcggctccggtactcacgcgacgggaggagatggatggggtggaaggatagatgggggcaggaggtgatatctgggaacgaagaccccgaaggcgtggtactgaaggaccttgggcccccaatggttgcacgcttagttaggttctacccgagagccgaccgcgtgatgagcgtttgccttagggtggagctgtatggttgcctctggagggacggccttctgtcttacactgccccggtggggcagaccatgtacctgagcgaggccgtatactag

SEQ ID NO: 79659 - DNA, 804 bp, Artificial Sequence
  derived and/or modified sequence
atgggccctgaggccctctccagcctcctgctgttgctgctcgtggccagtggcgacgcggatatgaaggggcatttcgaccccgccaagtgcagatatgcactgggaatgcaggataggaccatacctgatagcgacatttctgcctcctcttcttggtccgactccactgctgcccgacactctcgattagaatctagcgatggcgatggcgcctggtgcccggcgggctcagtgtttccaaaggaggaggaatatctgcaggtagatctgcaaaggctgcatctggtcgcattagttggcacacagggcaggcacgctggagggctgggaaaagagttctcccgatcctataggctgagatatagcagagacgggcgtcgttggatggggtggaaggatagatgggggcaggaggtcatatcaggcaatgaggaccctgaaggtgtggtgctgaaagacctgggcccccccatggtcgcccgacttgtaaggttttatcctcgcgccgacagagtgatgtctgtatgcctgagagtagaactgtatggctgtctctggagggacggactgctaagctataccgctcccgtcggccagacaatgtacctcagcgaggctgtttacctcaatgattctacatacgatggccacacggttggagggctgcagtatgggggtctggggcagttggcggacggcgtagttgggcttgatgactttagaaagtcgcaagaacttagagtatggcctggttacgactacgtgggctggtcgaatcactcctttagttctggttactag

SEQ ID NO: 79660 - DNA, 192 bp, Artificial Sequence
  derived and/or modified sequence
atgggacccgaggccctaagttccctgctcctgctactattagtagcttccggggacgctgacatgaagggacatttcgatcctgccaagtgtagatacgctttgggcatgcaggacagaaccattcccgactccgacatcagcgccagcagctcatggtccgactctaccgccgcaagacactcacggtag

SEQ ID NO: 79661 - DNA, 630 bp, Artificial Sequence
  derived and/or modified sequence
atgggtcctgaggcactgagcagccttctgctactgctgctggtggccagcggcgatgcagatatgaaaggccactttgatcctgccaagtgccggtatgctctggggatgcaggaccgcacaatcccggattctgatatttcagcgtcatcctcgtggtcagacagtactgcagcccgacactcccgcttggagagcagcgacggcgacggagcatggtgtccagccgggtccgtctttcctaaagaagaggagtatctgcaagtcgatctgcagaggcttcacctcgttgccctggtcgggacacagggacggcacgccggcggactcggaaaggagtttagtcgatcctaccggttacggtattctagggacggtcgacgctggatggggtggaaggataggtggggccaggaggtgatcagtggaaacgaagatcctgagggcgttgtgctgaaagatctgggccctcctatggtagcacgccttgtccggttctatccacgcgctgacagagttatgagcgtgtgtttacgagttgagctgtacggatgcctttggagagacggtttgctgagctacacagcccctgtgggccagacaatgtacttatctgaggccgtatactag

SEQ ID NO: 79662 - DNA, 192 bp, Artificial Sequence
  derived and/or modified sequence
atggggcctgaggctttgagttccttgttgctcctccttctggtcgcttccggtgatgccgatatgaagggtcactttgacccagccaagtgtaggtatgccttaggaatgcaagatcgaaccattcctgactctgacatctcggctagttcttcttggtcagactccaccgcagcccgacacagccgctag

SEQ ID NO: 79663 - DNA, 501 bp, Artificial Sequence
  derived and/or modified sequence
atgggcccagaagctctgtcttcccttttattgttgcttctggtggctagcggcgatgcagacatgaaggggcacttcgaccccgcaaagtgtaggtatgctctgggtatgcaggataggactatccctgacagtgacatctctgcttcatcatcctggtcggactccacagctgcccgccacagccgccttgaatccagcgacggggatggcgcgtggtgtcctgcaggcagcgtattccccaaggaggaagaatatctccaggtggatctgcagcggttgcacctagtggcccttgttgggactcaaggtcgtcacgccgggggtttgggcaaggaattctcacgctcatatagattgaggtatagccgcgacggccggcgatggatgggttggaaagacagatggggacaagaggtgatcagcggtaacgaggatccagagggcgtggtgctgaaagacctcgggcctccaatggtggctcggctggttcgcttctag

SEQ ID NO: 79664 - DNA, 462 bp, Artificial Sequence
  derived and/or modified sequence
atgggtccggaagctctgtcatccctccttttgcttttactggtcgccagcggagatgctgatatgaagggtcatttcgatcccgcaaaatgccgctatgctctcgggatgcaggatcggacgatccctgattcggacatcagcgcctctagtagctggtccgactcaactgccgcccgacatagtcgccttgaaagctcggatggcgacggggcgtggtgtcccgcggggtccgttttcccgaaggaggaggaatatctgcaagtagacctgcaacgtttacatcttgtagctctggtaggtacccaaggaagacacgccggaggcctgggtaaagagtttagccgatcgtaccggctcagatacagcagggatgggagaaggtggatggggtggaaggaccggtgggggcaggaggtgattagcggaaacgaagatcccgaaggtgtggtactgaagtag

SEQ ID NO: 79665 - DNA, 630 bp, Artificial Sequence
  derived and/or modified sequence
atgggcccggaggcattgtcctccctgctgctactcttgttagtggcctccggtgacgccgatatgaagggacacttcgaccctgccaaatgtaggtacgcccttggaatgcaggaccgaactatacctgattctgatatcagcgcttcctcctcatggtccgactccactgccgctcgacatagtagattggagtcgtctgatggcgacggagcctggtgcccagctggttccgtgtttcctaaagaggaggagtatctgcaagtcgacctgcagcgcctgcatctcgtagcactggtgggaacccaaggcaggcacgctggaggactaggaaaggaattcagccgcagttacagactccgatattcccgcgacgggagaagatggatgggctggaaggaccgatggggccaggaggtgatctctggtaacgaggacccggagggcgtggttctcaaagatctgggaccgccgatggtggcacgcctggtacggttttatccccgcgcagaccgggtcatgtccgtgtgtctgagggtcgagctctacgggtgcctttggcgcgacggtctgctctcttacactgcgccagtgggccagaccatgtatttgagcgaagccgtgtactag

SEQ ID NO: 79666 - DNA, 501 bp, Artificial Sequence
  derived and/or modified sequence
atggggccggaggcactcagctcactcctcttgctgcttctggtggcctccggcgatgctgatatgaagggtcacttcgaccctgctaaatgcagatatgctctggggatgcaggataggacaatccccgattctgacatcagcgccagcagctcttggagtgacagcacggccgcccggcacagccgccttgaaagtagtgatggcgatggtgcttggtgcccagccggtagcgtgttccccaaagaggaagagtatttgcaggttgaccttcaaagactgcaccttgtggctctggtgggtacccaaggccgtcacgccgggggcctcgggaaggagttcagcagaagttatcgactgaggtactcccgggatggccgtcgctggatgggctggaaggatagatggggtcaggaagtcatcagtggtaatgaagacccggagggggtggtcttgaaagacttagggccaccgatggttgcgcgattagtacgtttctag

SEQ ID NO: 79667 - DNA, 444 bp, Artificial Sequence
  derived and/or modified sequence
atgggccctgaggccttatcttccctgctgctcctgctactggtggcttcaggtgacgccgatatgaaaggccacttcgatccagccaagtgtcgctacgcgctcggaatgcaagatagaacaattcccgacagcgatatctcagcttcctcaagctggtctgatagcactgccgcccgccactcgagattggaaagctctgatggagatggcgcatggtgccccgcaggcagtgttttccctaaggaagaggaatatttgcaagtcgaccttcagagattacacctggttgctctggtgggcacccaaggtcgacacgccggcggacttgggaaagaattcagcaggtcttaccggcttcggtatagcagagacgggcgcagatggatgggatggaaggataggtggggtcaggaggtgatctcagggaacgaggatccttag

SEQ ID NO: 79668 - DNA, 732 bp, Artificial Sequence
  derived and/or modified sequence
atgggtccagaggctttgtcatcactgcttctgctgctcttggtcgcatcaggtgatgctgacatgaaaggtcattttgacccagcaaagtgtcggtatgcgctcggtatgcaggatcgcacaattcccgattcagatatcagtgcctccagctcctggtctgacagtactgccgcacgccactcccgactggaatcctcggatggcgatggcgcctggtgtccggcaggctccgtgtttcctaaggaggaagagtacctgcaagtggatttacagcgtctacatctggtcgcactggtcgggacccagggcagacacgcagggggactcggcaaggaattctcccggtcctatcgtttgcgctactccagggatggcaggagatggatgggttggaaggaccgatggggccaagaggtaattagtggtaacgaggatcccgagggtgtcgttctgaaggacttggggccccctatggtggcaaggctcgtacggttttaccctagggccgaccgggtgatgtctgtgtgcctgcgggttgagctgtatggatgtctttggcgggactgttccatgggggtatgggcttcgtggcagatggtgtggtggggctggatgactctgggtagagtcaggtcttgtggctctggccaagctatgacaatgtgggatggcgctacgactgcatcacccgtcgcaatgtggcgatggtccctcagcctgaccggctag

SEQ ID NO: 79669 - DNA, 192 bp, Artificial Sequence
  derived and/or modified sequence
atgggtcccgaggcgttatctagccttttgctcctgctgctggtcgcgtcaggggacgccgatatgaagggtcacttcgaccccgccaagtgtcgttacgcactaggcatgcaggataggacgattcccgatagtgatatttctgcgagttccagctggtctgattcaacagcagcacgtcattcacgatag

SEQ ID NO: 79670 - DNA, 501 bp, Artificial Sequence
  derived and/or modified sequence
atggggcctgaggccttgagcagcctcctgctccttcttctcgtggccagtggggacgcagacatgaagggacatttcgacccagccaagtgtcggtacgccctaggtatgcaagatcgcactatcccggattctgacatctcagctagttcatcatggagcgattccacagcagctcgacattcacgcctggagtccagcgacggggatggagcttggtgtccggccggaagtgtttttccaaaggaagaagagtacctccaggtcgatctgcagcgactgcatctggtggccctcgtgggcacccaggggcggcacgcaggcgggctgggaaaggaattttcccgaagttacaggctgaggtactcaagggacggacggcgctggatgggctggaaagaccgctgggggcaggaagtcatttcaggcaacgaagaccccgagggggttgtcctgaaggatttagggcctcccatggtggcgcgcctggtccgcttttag

SEQ ID NO: 79671 - DNA, 420 bp, Artificial Sequence
  derived and/or modified sequence
atgggcccagaagccttaagcagcctcctgctgctgctgctggtagccagtggcgatgccgatatgaagggccatttcgaccccgctaagtgtcgctatgccctagggatgcaggacaggacaattccagatagcgatatctccgcttcgtcttcttggagcgatagtaccgctgctaggcactcaagactagaaagcagcgacggggacggtgcctggtgccctgccgggtcagtttttcccaaggaggaggagtaccttcaggtcgacttacagcgcctccatctggtggccttagttggcacccaagggcggcacgctggtggactgggcaaggagttctctcgatcatataggttaaggtacagcagagacgggaggcggtggatgggttggaaggaccggtggggtcaggaatag

SEQ ID NO: 79672 - DNA, 192 bp, Artificial Sequence
  derived and/or modified sequence
atgggacctgaggcactgtctagcctccttttgctgctgctggtggctagtggcgacgccgacatgaaaggtcacttcgatcccgcgaagtgtaggtacgcattgggcatgcaggaccggacgattcctgattcagacatctctgcctcatccagttggtctgattctacagctgcccgacattcccggtag

SEQ ID NO: 79673 - DNA, 444 bp, Artificial Sequence
  derived and/or modified sequence
atgggcccagaagctctctcaagtctgctccttttactcttggttgcaagcggtgatgccgacatgaagggccacttcgatcccgctaaatgccgctacgcactgggcatgcaggataggaccatacccgattcagacatttctgcaagtagctcctggtctgacagcactgcagcccgtcattcccgcctggagagctccgacggcgatggtgcttggtgccctgcaggctcagtctttccgaaagaagaggaatacctgcaggtggacctccagagactccatctggtggcactggtcggtacccagggacgacacgctggcggtctgggtaaggagttctcgaggtcgtacaggctgaggtattctagagacggcaggagatggatgggttggaaggaccgatggggccaggaggttatttctggtaatgaggatccgtag

SEQ ID NO: 79674 - DNA, 861 bp, Artificial Sequence
  derived and/or modified sequence
atggggcccgaagctctgagtagcctcctgcttttgctgctggtcgccagtggcgacgcagacatgaaggggcactttgacccagcgaagtgccgatacgcactgggcatgcaagaccgtaccatcccagattctgacattagcgcttccagctcttggtcagattcgacggcagcacgacacagccgtttagaaagctccgatggcgatggcgcgtggtgccccgccggaagcgtgttcccaaaggaagaagagtacctccaggttgatctccagcggctccatcttgtcgctctggttggaacacaaggtcggcatgcaggcgggctgggcaaggaattctccagatcctatagattgcggtatagcagggatgggcggcgttggatgggttggaaagacagatgggggcaggaagttatctcaggtaatgaggaccccgagggggtagtcctaaaagacctcggccccccgatggttgccagactcgtcagattttatcctagggcggatagggtcatgagcgtgtgtctgcgggtcgaactctacggctgtctgtggcgcgacggccttctcagctacaccgcaccggttggccagacaatgtacctcagtgaagcagtgtacctgaatgatagcacatacgacggccacacagtgggcggactgcagtatggcggcttgggtcagctggctgatggcgtagtcggccttgacgacttccgcaaatcccaagagttgagggtatggcccggatacgattatgtaggctggagcaaccactctttttcctcagggtacgtcgagatggaatttgaatttgatcgattgcgcgcgtttcaggcgatgcaagtccattag

SEQ ID NO: 79675 - DNA, 732 bp, Artificial Sequence
  derived and/or modified sequence
atgggcccggaggcactgtcgagtttgttgctgttgcttctcgtggcctcgggggatgcagatatgaaaggacacttcgaccctgcaaaatgccgctacgccctggggatgcaggacaggaccatacctgactctgacataagtgcctctagttcctggtctgacagcactgcagcacgtcactccagactcgagtcgagtgatggagacggggcatggtgtccagccggttctgtgtttcctaaggaagaggagtatctgcaggtggacctgcaaaggctgcacctggtggcccttgttggcacacaaggccgccatgccggcggtcttggaaaagagttcagccggagttatagactgagatacagcagagacggcaggcggtggatgggatggaaggacaggtggggtcaggaggttattagcggcaacgaagaccctgagggtgtggtacttaaggacctggggccacctatggtggcccgccttgttcgattttaccctcgcgccgaccgcgtgatgtctgtgtgcctgagagtggaattgtatggctgtctttggagagactgttcgatgggcgtatgggccagctggcagatggtgtggtggggatggatgacgctcggccgggtgcgctcctgtgggagtgggcaggcaatgacgatgtgggatggtgcaacaacggcctcacccgtcgcgatgtggcgctggagtctctccttgactggatag

SEQ ID NO: 79676 - DNA, 168 bp, Artificial Sequence
  derived and/or modified sequence
atggggccagaggctctgagctctctgttgctgctgctgctcgtggcaagtggagatgcggacatgaaaggccacttcgatccagctaagtgtagatacgctttgggcatgcaggacaggaccatccctgattcagacataagcgctagtagcagctggtccgattag

SEQ ID NO: 79677 - DNA, 156 bp, Artificial Sequence
  derived and/or modified sequence
atgggacctgaagcactctcttcgcttctgcttctcctcctggtggcatctggcgacgccgacatgaagggtcatttcgatcctgcaaagtgcagatatgcactaggaatgcaagaccggactattcctgatagtgatatttccgcgtctagctag

SEQ ID NO: 79678 - DNA, 222 bp, Artificial Sequence
  derived and/or modified sequence
atgggacccgaggctcttagctccctgctgctcctgctcctggtcgcatctggtgacgctgatatgaagggtcacttcgatcctgccaagtgtaggtacgccttgggtatgcaggacaggacaatacctgatagtgatatctctgccagctccagttggtctgattctaccgccgctcgacactcacgtctggaatcctctgacggagacggcgcttggtag

SEQ ID NO: 79679 - DNA, 369 bp, Artificial Sequence
  derived and/or modified sequence
atgggacccgaggccttgtcaagcctgctgctcctgttactggtggcttctggagacgcagatatgaaaggacattttgaccctgccaaatgccggtatgctctgggaatgcaggacaggaccatacctgatagtgacatctcggctagctctagctggtcagattcaacggccgcacggcattccaggctagagtcatcggatggggacggagcttggtgtccggcgggatctgtgttccccaaagaggaggagtacctgcaggtggatctgcagagactacacctcgtggcattagttggcactcaaggaagacatgcgggcggcctggggaaggaattctcaagatcgtatcgcctgagatactag

SEQ ID NO: 79680 - DNA, 483 bp, Artificial Sequence
  derived and/or modified sequence
atgggccccgaagctcttagttccttattattgctgctgttggtcgcctctggggatgccgatatgaaagggcacttcgatcccgctaaatgtcggtacgccctgggaatgcaagatcggactattccagatagcgatatctccgcatcttcaagctggtccgactccacagccgcccgacactctcgtctagagtcctcggatggagatggagcctggtgtcccgccggatcagtatttccaaaagaggaagagtacctacaggtcgacctgcaacggctgcatctcgtcgcattggttgggacacaagggagacacgcggggggcctgggcaaggagttttcgaggtcttataggttgcgctactctagggacgggcggagatggatgggctggaaggatcggtggggtcaggaggttatctcaggcaacgaagatcccgaaggcgttgtcctgaaagacttgggcccccctatggtgtag

SEQ ID NO: 79681 - DNA, 399 bp, Artificial Sequence
  derived and/or modified sequence
atgggacctgaggccctgtcctccttactgctgttgctgctggtagccagcggtgacgccgatatgaaaggccatttcgacccggccaaatgtcgctacgctctgggcatgcaggaccgaaccatccccgacagcgatatcagtgcttcaagttcttggtccgattccaccgctgcccgccactctagattggaatcttcagatggtgatggtgcatggtgtcccgcgggctcagtgtttccaaaggaggaagagtacctgcaagtggatctgcaaaggctgcacttggtggccctggtggggacacaggggaggcacgcaggtgggcttgggaaggagttctcccgctcttacaggctaaggtactccagggatggccgcagatggatggggtggtag

SEQ ID NO: 79682 - DNA, 306 bp, Artificial Sequence
  derived and/or modified sequence
atgggcccagaagctctaagtagcttattgctgttgcttttagtggccagcggtgacgcggacatgaaggggcacttcgatcccgcaaaatgccgttatgctctgggaatgcaggacaggacaatcccagacagcgacatctcagcttcctcctcttggagtgatagtacagcggcccggcactcacgactcgaatcaagtgatggagatggggcctggtgtccagccggatcagtgttccccaaggaggaagagtacctacaagtggaccttcaaaggctacacttggttgccctggtagggtag

SEQ ID NO: 79683 - DNA, 213 bp, Artificial Sequence
  derived and/or modified sequence
atgggtccagaagccctcagcagcttgttacttctgctcctcgtcgcatccggagacgcagacatgaaggggcacttcgacccggctaaatgccgctatgctctggggatgcaagacaggacgatcccagactcagacattagtgcttccagttcatggagcgatagtactgccgctaggcactctcgactggaatcgtccgatggcgactag

SEQ ID NO: 79684 - DNA, 237 bp, Artificial Sequence
  derived and/or modified sequence
atgggtcctgaggctttgtcctccctgttactgctgctgctggttgcgtctggcgacgctgacatgaagggccattttgaccctgctaaatgtcggtatgctcttggcatgcaggaccgtaccattcccgattccgatatatcagcaagcagtagctggtctgactctaccgccgcccggcactccaggctcgaaagtagcgatggagatggtgcctggtgccccgcaggatcctag

SEQ ID NO: 79685 - DNA, 384 bp, Artificial Sequence
  derived and/or modified sequence
atgggacctgaggctctgtctagtctactgctgttactgctggtcgcgagtggagacgcagacatgaagggacacttcgatcctgcgaagtgcagatatgctctggggatgcaggaccggacaatacctgactccgacatctccgctagttccagttggtcggacagcaccgctgcacgccattcacgtttggaaagcagcgacggggatggagcctggtgccccgctggatccgtgtttccaaaagaagaggagtacctccaggtggacctccaacggttgcatctcgtggctttggtcgggactcagggccgtcatgccggaggcctgggaaaggagtttagccgctcctaccggcttaggtatagcagggacggacggtag

SEQ ID NO: 79686 - DNA, 348 bp, Artificial Sequence
  derived and/or modified sequence
atggggcctgaagcactgagcagcttgctcttgctattattggtagctagcggggacgccgatatgaaggggcatttcgacccagccaaatgccgttatgccttgggtatgcaagatcgcacaatccccgatagtgacatctccgcctcctctagctggtccgactcaaccgcggctagacacagccggttggaatcctctgacggcgatggcgcctggtgtcctgcaggaagtgtgtttcccaaggaagaagagtacctccaggtggacctgcagcggctgcacctggttgccttggtgggaacccagggccggcacgcagggggtttggggaaggaattcagctag

SEQ ID NO: 79687 - DNA, 432 bp, Artificial Sequence
  derived and/or modified sequence
atgggccccgaagctctttcgtccctgctgttgctactcctcgtggcctctggggatgctgacatgaaggggcactttgatcctgccaagtgtcgttacgcccttggaatgcaggacaggactatccccgactctgacatttctgcatcatcatcctggagtgatagcaccgctgctcgccactctaggttagagagctcagacggcgacggggcatggtgtcctgccggctctgtctttccgaaggaggaggagtacctgcaggtagatttgcagaggctacacctggttgccctggtgggcacacaagggaggcatgccggggggctcggcaaagagtttagccggtcttataggctacggtactctcgcgatggcaggcgttggatggggtggaaagacaggtggggccaagaggtcatatccggatag

SEQ ID NO: 79688 - DNA, 339 bp, Artificial Sequence
  derived and/or modified sequence
atgggaccagaggctctttcttcgctcctgctcctgctgttggtcgcttctggcgacgcagatatgaaaggacactttgaccccgcgaagtgcagatacgccctgggcatgcaagatcgtacaatcccagactccgacatcagcgcaagctcatcatggtccgattccacagcggctcggcattcacgcctggaatctagcgacggtgacggcgcttggtgcccggccgggagtgtgtttcctaaagaggaagagtatctgcaagtcgacctgcagcgattgcacctggtggccctggtgggaacccagggcaggcacgcaggaggactgggcaagtag

SEQ ID NO: 79689 - DNA, 513 bp, Artificial Sequence
  derived and/or modified sequence
atgggtcccgaagccctgtccagccttctcctgctgctgttagtggcttccggggacgctgacatgaaggggcatttcgaccctgctaaatgtaggtacgccttaggcatgcaggataggaccattccggactccgatatttcggcatcttcatcttggtccgattcgaccgcagctagacattcacgcctggagtctagcgatggagacggcgcctggtgccccgctggcagcgtgtttcccaaagaagaggaataccttcaggtcgacctgcagagactccatctcgttgcactggtaggcacccagggaaggcacgctggcggcctcggcaaagaattctcacggtcttatcgcctgcgctactctcgggatggacggcgatggatggggtggaaggaccgatgggggcaggaagttatttctgggaacgaggacccagagggggtggtgctgaaggatctcgggcccccaatggttgccagattggttcgcttttatccccgagcttag

SEQ ID NO: 79690 - DNA, 417 bp, Artificial Sequence
  derived and/or modified sequence
atgggtcctgaagccctgagttcactactgcttttgcttcttgtcgcctccggggacgcagatatgaagggtcatttcgatcctgctaagtgcaggtacgcactgggcatgcaagaccgcaccatcccagatagtgatattagcgcgagcagcagttggtcggattctactgctgcccgccactccagactggaaagctccgacggcgacggtgcctggtgcccagcgggatccgtgttcccaaaagaagaggagtatttgcaggtggatctgcagaggctgcatctggtggccctggtgggtacccagggtaggcacgcaggcggcctggggaaagagttttccaggagttacaggctgaggtattctcgggatgggcggaggtggatgggttggaaggaccgctggggccaatag

SEQ ID NO: 79691 - DNA, 156 bp, Artificial Sequence
  derived and/or modified sequence
atgggacccgaggctctctcctcactgcttctcttactacttgtcgcatcgggggatgctgatatgaaggggcactttgatcctgcaaaatgccgttacgctttagggatgcaggatagaacaatcccagattccgacatttctgcaagctcctag

SEQ ID NO: 79692 - DNA, 417 bp, Artificial Sequence
  derived and/or modified sequence
atgggacccgaagcgttaagcagcttgctgctgttactgcttgtcgcatctggcgatgcagacatgaaaggtcacttcgatcccgctaagtgccgctatgctctaggcatgcaagataggaccatacctgactctgacatcagcgcttcatcttcctggtctgatagcaccgctgctcgccatagcaggctggagagcagcgatggcgatggagcctggtgtcctgctggttccgtgttcccaaaggaggaagagtatcttcaggtagatctgcagcgtctccacctggtggcgctggtaggcactcagggcagacatgcaggaggcctgggcaaggaattctcacgttcataccggctgcgatattcaagggacggacggcgctggatgggctggaaggacagatggggccagtag

SEQ ID NO: 79693 - DNA, 258 bp, Artificial Sequence
  derived and/or modified sequence
atgggacccgaagcactttcaagcctattgcttttgctactggtggcctccggggacgctgacatgaagggccatttcgaccctgccaaatgccgctatgcactggggatgcaggatagaacgatcccagactctgacatatcagcctcaagcagctggtctgattcgactgccgccagacatagtagactcgaaagctctgatggagacggcgcttggtgccccgccggcagcgtgtttcccaaggaggaagagtag

SEQ ID NO: 79694 - DNA, 732 bp, Artificial Sequence
  derived and/or modified sequence
atgggccccgaggcgctgtcctccctgctgttactgcttctggtcgcgagcggcgacgccgatatgaagggacactttgatcctgcgaagtgccgctacgccctgggcatgcaggatcggacaattcccgatagcgacatcagcgcctctagtagctggagtgatagcaccgcggcccgacattcacgccttgagagctctgacggggacggagcctggtgccccgccggaagtgtatttccaaaggaagaagagtatctccaggtggaccttcagcggctccatctcgtcgcacttgtggggacccaaggccggcatgcggggggtctgggcaaggagttcagtcgctcctatcggctccgatacagcagagacggccggcgctggatgggctggaaagatcgctggggccaagaggtgatctcgggtaacgaggatcccgagggcgtggtgctcaaggacctgggaccacccatggtagcaagactggttaggttttatccccgagccgacagagtgatgtccgtgtgcctgagagtggaactgtacggatgtctatggagagactgtagcatgggggtctgggcttcgtggcagatggtctggtgggggtggatgacgcttggtagggtcaggagttgcggcagcgggcaagcaatgaccatgtgggacggagccacaacagcctcacccgtggccatgtggagatggagtctgtcactgacggggtag

SEQ ID NO: 79695 - DNA, 732 bp, Artificial Sequence
  derived and/or modified sequence
atggggccagaggctttgtcttctctgcttctgctactgcttgtcgcctccggtgacgcagatatgaagggacattttgatcctgctaagtgtcgctatgccctgggcatgcaggacaggacgatccctgacagcgatatcagtgcctcatcttcgtggagtgactctacagccgcccggcactcaaggctggaaagttcagacggcgacggggcatggtgtcctgccggatctgtgttccccaaggaagaggagtacctccaagtggaccttcagcggctccatctggtagctctggttgggacccaggggcgccacgcaggaggcttggggaaggaatttagccgcagttaccgcttgcgttacagtagagatggaagaaggtggatggggtggaaggaccgatgggggcaggaggtcatttcaggcaatgaagatccagagggcgtggtccttaaagaccttgggcctcccatggtggcgcgactcgtgcggttctaccctcgcgccgaccgtgttatgagcgtttgtttgcgcgtggagctatacgggtgcctgtggcgcgactgttctatgggtgtttgggcctcatggcagatggtgtggtggggatggatgacgctggggagggtgcggtcatgcggaagcggacaggcgatgactatgtgggacggcgccaccaccgcaagccccgtggccatgtggagatggagcctgtccttaaccggctag

SEQ ID NO: 79696 - DNA, 732 bp, Artificial Sequence
  derived and/or modified sequence
atgggccccgaggctctgtcatccctcttgctactactgttagtcgcctcaggtgacgcagatatgaagggtcacttcgatcccgctaaatgccgttacgccttagggatgcaagaccgaacaatacctgatagcgacattagcgcctcttctagctggtccgattccacagcagcccgccatagccgtctcgagagctcagacggtgacggggcgtggtgccccgccggcagcgtgtttcctaaggaggaggagtatctccaagtcgacctacagagattacacttagttgccctggtgggcacccagggacgccatgcaggtggactaggaaaggagttcagccgaagttaccggctgaggtacagccgcgacgggcgcagatggatggggtggaaggaccgatggggacaggaagtcataagcggcaatgaggacccagaaggcgttgtgttaaaggacctgggcccgccaatggtggctcgtcttgtgcggttttaccctcgggcggatcgggtgatgtctgtctgcctcagggttgaactttacgggtgcctgtggagggactgtagcatgggcgtgtgggcctcctggcaaatggtctggtggggctggatgaccttggggcgggtgcggtcttgcgggtcaggccaggccatgacgatgtgggatggggcaacgactgcatcacctgttgccatgtggcgctggtcactgtctctcactgggtag

SEQ ID NO: 79697 - DNA, 732 bp, Artificial Sequence
  derived and/or modified sequence
atgggaccggaagccctgagtagcctcctattactcctactggtcgcttccggcgatgcagatatgaaaggacatttcgatcccgccaaatgcaggtacgccctgggaatgcaggatcgaactatcccagacagcgacatttccgcatcgtcctcctggtcggattccacagccgctagacacagccgacttgagagtagcgacggcgatggggcctggtgtccagcgggatccgtcttccctaaggaggaggagtatttacaagtggatctgcagaggttgcacttggtggccttggttgggactcaaggccgccacgcaggaggcctgggcaaggagttttcccggtcctaccggcttcgctacagcagagacggacgaagatggatgggttggaaagaccggtgggggcaggaggttattagtggtaacgaggatcccgaaggagttgtgcttaaggatctcgggccacccatggtcgctaggctggtgcgattctatccccgggctgatagagtgatgagtgtttgcctgagagttgagctatatgggtgcttgtggcgggactgcagcatgggagtctgggcctcgtggcagatggtgtggtggggctggatgactctgggcagagtacggagttgtggctcaggtcaggctatgacgatgtgggatggagccaccactgcttctcctgtagctatgtggaggtggtctctctccctgactggctag

SEQ ID NO: 79698 - DNA, 177 bp, Artificial Sequence
  derived and/or modified sequence
atgggccctgaggccctgagcagcctgctgctgctgctgctggtggccagcggagatgctgacatgaagggccactttgatcctgccaagtgccgctatgccctgggcatgcaggacaggaccatcccagacagcgacatcagcgccagcagctcctggagcgacagcacagcctag

SEQ ID NO: 79699 - DNA, 804 bp, Artificial Sequence
  derived and/or modified sequence
atgggccctgaggccctgagcagcctgctgctgctgctgctggtggccagcggagatgctgacatgaagggccactttgatcctgccaagtgccgctatgccctgggcatgcaggacaggaccatcccagacagcgacatcagcgccagcagctcctggagcgacagcacagctgcccggcacagccggctggagagcagtgatggagatggagcctggtgcccagctggcagcgtcttccccaaggaggaggagtacctgcaggtggacctgcagaggctgcacctggtggccctggtgggcacccagggcagacatgctgggggcctgggcaaggagttcagccgcagctaccgcctgcgctacagcagagatggaagacgctggatgggctggaaggaccgctggggccaggaggtgatctctggaaatgaagatcctgagggcgtggtgctgaaggacctgggcccccccatggtggcccggctggtgcgcttctaccccagggctgacagagtgatgtctgtgtgcctgcgggtggagctgtatggctgcctgtggagagatggcctgctgagctacacagcccctgtgggccagaccatgtacctgtctgaggccgtgtacctgaatgacagcacctatgatggccacacagtgggcggcctgcagtatggaggcctgggccagctggctgatggagtggtgggcctggatgacttcaggaagagccaggagctgcgggtgtggccaggctatgactatgtgggctggagcaaccacagcttcagcagcggctactag

SEQ ID NO: 79700 - DNA, 462 bp, Artificial Sequence
  derived and/or modified sequence
atgggccctgaggccctgagcagcctgctgctgctgctgctggtggccagcggagatgctgacatgaagggccactttgatcctgccaagtgccgctatgccctgggcatgcaggacaggaccatcccagacagcgacatcagcgccagcagctcctggagcgacagcacagctgcccggcacagccggctggagagcagtgatggagatggagcctggtgcccagctggcagcgtcttccccaaggaggaggagtacctgcaggtggacctgcagaggctgcacctggtggccctggtgggcacccagggcagacatgctgggggcctgggcaaggagttcagccgcagctaccgcctgcgctacagcagagatggaagacgctggatgggctggaaggaccgctggggccaggaggtgatctctggaaatgaagatcctgagggcgtggtgctgaagtag

SEQ ID NO: 79701 - DNA, 732 bp, Artificial Sequence
  derived and/or modified sequence
atgggccctgaggccctgagcagcctgctgctgctgctgctggtggccagcggagatgctgacatgaagggccactttgatcctgccaagtgccgctatgccctgggcatgcaggacaggaccatcccagacagcgacatcagcgccagcagctcctggagcgacagcacagctgcccggcacagccggctggagagcagtgatggagatggagcctggtgcccagctggcagcgtcttccccaaggaggaggagtacctgcaggtggacctgcagaggctgcacctggtggccctggtgggcacccagggcagacatgctgggggcctgggcaaggagttcagccgcagctaccgcctgcgctacagcagagatggaagacgctggatgggctggaaggaccgctggggccaggaggtgatctctggaaatgaagatcctgagggcgtggtgctgaaggacctgggcccccccatggtggcccggctggtgcgcttctaccccagggctgacagagtgatgtctgtgtgcctgcgggtggagctgtatggctgcctgtggagggactgcagcatgggcgtgtgggcctcctggcagatggtgtggtggggctggatgaccctgggccgggtgcgcagctgtggcagcggccaggccatgaccatgtgggatggagccaccacagccagccctgtggccatgtggcgctggagcctgagcctgaccggctag

SEQ ID NO: 79702 - DNA, 861 bp, Artificial Sequence
  derived and/or modified sequence
atgggccctgaggccctgagcagcctgctgctgctgctgctggtggccagcggagatgctgacatgaagggccactttgatcctgccaagtgccgctatgccctgggcatgcaggacaggaccatcccagacagcgacatcagcgccagcagctcctggagcgacagcacagctgcccggcacagccggctggagagcagtgatggagatggagcctggtgcccagctggcagcgtcttccccaaggaggaggagtacctgcaggtggacctgcagaggctgcacctggtggccctggtgggcacccagggcagacatgctgggggcctgggcaaggagttcagccgcagctaccgcctgcgctacagcagagatggaagacgctggatgggctggaaggaccgctggggccaggaggtgatctctggaaatgaagatcctgagggcgtggtgctgaaggacctgggcccccccatggtggcccggctggtgcgcttctaccccagggctgacagagtgatgtctgtgtgcctgcgggtggagctgtatggctgcctgtggagagatggcctgctgagctacacagcccctgtgggccagaccatgtacctgtctgaggccgtgtacctgaatgacagcacctatgatggccacacagtgggcggcctgcagtatggaggcctgggccagctggctgatggagtggtgggcctggatgacttcaggaagagccaggagctgcgggtgtggccaggctatgactatgtgggctggagcaaccacagcttcagcagcggctacgtggagatggagtttgaatttgaccggctgcgggccttccaggccatgcaggtgcactag

SEQ ID NO: 79703 - DNA, 168 bp, Artificial Sequence
  derived and/or modified sequence
atgggccctgaggccctgagcagcctgctgctgctgctgctggtggccagcggagatgctgacatgaagggccactttgatcctgccaagtgccgctatgccctgggcatgcaggacaggaccatcccagacagcgacatcagcgccagcagctcctggagcgactag

SEQ ID NO: 79704 - DNA, 156 bp, Artificial Sequence
  derived and/or modified sequence
atgggccctgaggccctgagcagcctgctgctgctgctgctggtggccagcggagatgctgacatgaagggccactttgatcctgccaagtgccgctatgccctgggcatgcaggacaggaccatcccagacagcgacatcagcgccagcagctag

SEQ ID NO: 79705 - DNA, 222 bp, Artificial Sequence
  derived and/or modified sequence
atgggccctgaggccctgagcagcctgctgctgctgctgctggtggccagcggagatgctgacatgaagggccactttgatcctgccaagtgccgctatgccctgggcatgcaggacaggaccatcccagacagcgacatcagcgccagcagctcctggagcgacagcacagctgcccggcacagccggctggagagcagtgatggagatggagcctggtag

SEQ ID NO: 79706 - DNA, 369 bp, Artificial Sequence
  derived and/or modified sequence
atgggccctgaggccctgagcagcctgctgctgctgctgctggtggccagcggagatgctgacatgaagggccactttgatcctgccaagtgccgctatgccctgggcatgcaggacaggaccatcccagacagcgacatcagcgccagcagctcctggagcgacagcacagctgcccggcacagccggctggagagcagtgatggagatggagcctggtgcccagctggcagcgtcttccccaaggaggaggagtacctgcaggtggacctgcagaggctgcacctggtggccctggtgggcacccagggcagacatgctgggggcctgggcaaggagttcagccgcagctaccgcctgcgctactag

SEQ ID NO: 79707 - DNA, 483 bp, Artificial Sequence
  derived and/or modified sequence
atgggccctgaggccctgagcagcctgctgctgctgctgctggtggccagcggagatgctgacatgaagggccactttgatcctgccaagtgccgctatgccctgggcatgcaggacaggaccatcccagacagcgacatcagcgccagcagctcctggagcgacagcacagctgcccggcacagccggctggagagcagtgatggagatggagcctggtgcccagctggcagcgtcttccccaaggaggaggagtacctgcaggtggacctgcagaggctgcacctggtggccctggtgggcacccagggcagacatgctgggggcctgggcaaggagttcagccgcagctaccgcctgcgctacagcagagatggaagacgctggatgggctggaaggaccgctggggccaggaggtgatctctggaaatgaagatcctgagggcgtggtgctgaaggacctgggcccccccatggtgtag

SEQ ID NO: 79708 - DNA, 399 bp, Artificial Sequence
  derived and/or modified sequence
atgggccctgaggccctgagcagcctgctgctgctgctgctggtggccagcggagatgctgacatgaagggccactttgatcctgccaagtgccgctatgccctgggcatgcaggacaggaccatcccagacagcgacatcagcgccagcagctcctggagcgacagcacagctgcccggcacagccggctggagagcagtgatggagatggagcctggtgcccagctggcagcgtcttccccaaggaggaggagtacctgcaggtggacctgcagaggctgcacctggtggccctggtgggcacccagggcagacatgctgggggcctgggcaaggagttcagccgcagctaccgcctgcgctacagcagagatggaagacgctggatgggctggtag

SEQ ID NO: 79709 - DNA, 306 bp, Artificial Sequence
  derived and/or modified sequence
atgggccctgaggccctgagcagcctgctgctgctgctgctggtggccagcggagatgctgacatgaagggccactttgatcctgccaagtgccgctatgccctgggcatgcaggacaggaccatcccagacagcgacatcagcgccagcagctcctggagcgacagcacagctgcccggcacagccggctggagagcagtgatggagatggagcctggtgcccagctggcagcgtcttccccaaggaggaggagtacctgcaggtggacctgcagaggctgcacctggtggccctggtgggctag

SEQ ID NO: 79710 - DNA, 213 bp, Artificial Sequence
  derived and/or modified sequence
atgggccctgaggccctgagcagcctgctgctgctgctgctggtggccagcggagatgctgacatgaagggccactttgatcctgccaagtgccgctatgccctgggcatgcaggacaggaccatcccagacagcgacatcagcgccagcagctcctggagcgacagcacagctgcccggcacagccggctggagagcagtgatggagactag

SEQ ID NO: 79711 - DNA, 237 bp, Artificial Sequence
  derived and/or modified sequence
atgggccctgaggccctgagcagcctgctgctgctgctgctggtggccagcggagatgctgacatgaagggccactttgatcctgccaagtgccgctatgccctgggcatgcaggacaggaccatcccagacagcgacatcagcgccagcagctcctggagcgacagcacagctgcccggcacagccggctggagagcagtgatggagatggagcctggtgcccagctggcagctag

SEQ ID NO: 79712 - DNA, 384 bp, Artificial Sequence
  derived and/or modified sequence
atgggccctgaggccctgagcagcctgctgctgctgctgctggtggccagcggagatgctgacatgaagggccactttgatcctgccaagtgccgctatgccctgggcatgcaggacaggaccatcccagacagcgacatcagcgccagcagctcctggagcgacagcacagctgcccggcacagccggctggagagcagtgatggagatggagcctggtgcccagctggcagcgtcttccccaaggaggaggagtacctgcaggtggacctgcagaggctgcacctggtggccctggtgggcacccagggcagacatgctgggggcctgggcaaggagttcagccgcagctaccgcctgcgctacagcagagatggaagatag

SEQ ID NO: 79713 - DNA, 348 bp, Artificial Sequence
  derived and/or modified sequence
atgggccctgaggccctgagcagcctgctgctgctgctgctggtggccagcggagatgctgacatgaagggccactttgatcctgccaagtgccgctatgccctgggcatgcaggacaggaccatcccagacagcgacatcagcgccagcagctcctggagcgacagcacagctgcccggcacagccggctggagagcagtgatggagatggagcctggtgcccagctggcagcgtcttccccaaggaggaggagtacctgcaggtggacctgcagaggctgcacctggtggccctggtgggcacccagggcagacatgctgggggcctgggcaaggagttctcctag

SEQ ID NO: 79714 - DNA, 432 bp, Artificial Sequence
  derived and/or modified sequence
atgggccctgaggccctgagcagcctgctgctgctgctgctggtggccagcggagatgctgacatgaagggccactttgatcctgccaagtgccgctatgccctgggcatgcaggacaggaccatcccagacagcgacatcagcgccagcagctcctggagcgacagcacagctgcccggcacagccggctggagagcagtgatggagatggagcctggtgcccagctggcagcgtcttccccaaggaggaggagtacctgcaggtggacctgcagaggctgcacctggtggccctggtgggcacccagggcagacatgctgggggcctgggcaaggagttcagccgcagctaccgcctgcgctacagcagagatggaagacgctggatgggctggaaggaccgctggggccaggaggtgatcagcggctag

SEQ ID NO: 79715 - DNA, 339 bp, Artificial Sequence
  derived and/or modified sequence
atgggccctgaggccctgagcagcctgctgctgctgctgctggtggccagcggagatgctgacatgaagggccactttgatcctgccaagtgccgctatgccctgggcatgcaggacaggaccatcccagacagcgacatcagcgccagcagctcctggagcgacagcacagctgcccggcacagccggctggagagcagtgatggagatggagcctggtgcccagctggcagcgtcttccccaaggaggaggagtacctgcaggtggacctgcagaggctgcacctggtggccctggtgggcacccagggcagacatgctgggggcctgggcaagtag

SEQ ID NO: 79716 - DNA, 513 bp, Artificial Sequence
  derived and/or modified sequence
atgggccctgaggccctgagcagcctgctgctgctgctgctggtggccagcggagatgctgacatgaagggccactttgatcctgccaagtgccgctatgccctgggcatgcaggacaggaccatcccagacagcgacatcagcgccagcagctcctggagcgacagcacagctgcccggcacagccggctggagagcagtgatggagatggagcctggtgcccagctggcagcgtcttccccaaggaggaggagtacctgcaggtggacctgcagaggctgcacctggtggccctggtgggcacccagggcagacatgctgggggcctgggcaaggagttcagccgcagctaccgcctgcgctacagcagagatggaagacgctggatgggctggaaggaccgctggggccaggaggtgatctctggaaatgaagatcctgagggcgtggtgctgaaggacctgggcccccccatggtggcccggctggtgcgcttctacccccgggcctag

SEQ ID NO: 79717 - DNA, 417 bp, Artificial Sequence
  derived and/or modified sequence
atgggccctgaggccctgagcagcctgctgctgctgctgctggtggccagcggagatgctgacatgaagggccactttgatcctgccaagtgccgctatgccctgggcatgcaggacaggaccatcccagacagcgacatcagcgccagcagctcctggagcgacagcacagctgcccggcacagccggctggagagcagtgatggagatggagcctggtgcccagctggcagcgtcttccccaaggaggaggagtacctgcaggtggacctgcagaggctgcacctggtggccctggtgggcacccagggcagacatgctgggggcctgggcaaggagttcagccgcagctaccgcctgcgctacagcagagatggaagacgctggatgggctggaaggaccgctggggccagtag

SEQ ID NO: 79718 - DNA, 258 bp, Artificial Sequence
  derived and/or modified sequence
atgggccctgaggccctgagcagcctgctgctgctgctgctggtggccagcggagatgctgacatgaagggccactttgatcctgccaagtgccgctatgccctgggcatgcaggacaggaccatcccagacagcgacatcagcgccagcagctcctggagcgacagcacagctgcccggcacagccggctggagagcagtgatggagatggagcctggtgcccagctggcagcgtcttccccaaggaggaggagtag

SEQ ID NO: 79719 - DNA, 444 bp, Artificial Sequence
  derived and/or modified sequence
atgggccccgaggccctgagcagcctgctgctgctgctgctggtggcctctggcgatgccgacatgaagggccacttcgaccccgccaaatgcaggtatgccctgggcatgcaggatagaacaatccctgactccgacatttccgcttcgtcatcctggagcgattctactgctgcgaggcatagccggctggagagctccgatggggatggcgcttggtgccccgccgggtctgtgtttccaaaagaggaagagtacctccaggtggatctgcaaagacttcaccttgttgcgcttgtaggaacgcaggggcgacatgcgggggggctagggaaggagttctctcgctcctaccgtctacggtatagtcgcgatggcagaaggtggatgggatggaaagataggtggggccaagaagtaatcagtggaaacgaggatccatag

SEQ ID NO: 79720 - DNA, 444 bp, Artificial Sequence
  derived and/or modified sequence
atgggccccgaggccctgagcagcctgctgctgctgctgctggtggctagcggcgatgcggacatgaaagggcactttgaccccgccaaatgtaggtatgccctgggaatgcaggaccgtaccattccagattctgacatcagcgccagctcatcctggtccgattcaactgccgctcggcacagtcggctggagagttcggatggcgatggcgcctggtgtcctgcgggttcagtgtttcctaaggaggaggaatacttgcaggtcgacctacagcggctgcaccttgttgccctcgtcggaacccagggcagacacgctgggggcctaggtaaagaattttcccggagctatagactgaggtatagcagagacggacgccgctggatgggatggaaggatagatgggggcaggaggttatcagcggaaacgaggatccctag

SEQ ID NO: 79721 - DNA, 444 bp, Artificial Sequence
  derived and/or modified sequence
atgggccccgaggccctgagcagcctgctgctgctgctgctggtggcaagcggagacgccgatatgaaaggtcattttgatcccgcgaagtgccggtatgccttgggtatgcaggatcgcacgataccagactcagacatttcagcttcttcttcctggtccgattccacagccgcacgacatagccgactggaatctagcgacggggacggggcctggtgtccggcaggaagcgtctttcccaaggaggaagagtacttgcaggtagacctgcagcgcttacacctcgtagctctggtggggactcaaggcaggcacgctggtggcctgggaaaagaattctcgcggtcatataggcttagatacagtagagacgggcgccgctggatgggttggaaggaccgatggggtcaggaggtgattagtggtaatgaggatccatag

SEQ ID NO: 79722 - DNA, 177 bp, Artificial Sequence
  derived and/or modified sequence
atgggccccgaggccctgagcagcctgctgctgctgctgctggtggcctctggagacgccgacatgaaaggtcatttcgaccctgccaaatgtagatacgccttagggatgcaggataggaccattccagactcagacatctctgccagcagctcctggtctgatagtaccgcctag

SEQ ID NO: 79723 - DNA, 420 bp, Artificial Sequence
  derived and/or modified sequence
atgggccccgaggccctgagcagcctgctgctgctgctgctggtggctagtggggatgccgatatgaagggccacttcgacccagcaaagtgcaggtacgccctgggtatgcaagatagaaccatccccgattcagacatctcagcttcatcgtcctggtcagacagtactgctgctcgccattcacgcttggagtcttcggatggggacggggcatggtgccccgccggttctgtgtttcccaaggaggaagaatatctgcaggtggatttgcagagactgcatctggtagccttggtcggaacacagggtagacatgccggtggcctcgggaaggagttctcacgatcatatcgcctgagatattctcgggacgggcgaaggtggatggggtggaaggaccggtggggccaagaatag

SEQ ID NO: 79724 - DNA, 420 bp, Artificial Sequence
  derived and/or modified sequence
atgggccccgaggccctgagcagcctgctgctgctgctgctggtggcatctggagacgcagacatgaagggacattttgaccctgcgaagtgtcggtacgcactgggaatgcaagatagaactatcccggactccgacatttccgcatctagttcatggtccgattcaacagctgccagacactctcggctcgagagcagtgatggcgatggggcatggtgtcccgcaggcagtgtttttccaaaggaggaggagtacttacaggtggatttacagaggctacacttagtcgccttggtgggaacacagggaagacatgcaggcggtttgggaaaagaatttagccggtcttatcgattgcgatacagtcgcgatggacgtcgctggatgggctggaaagatagatgggggcaggaatag

SEQ ID NO: 79725 - DNA, 420 bp, Artificial Sequence
  derived and/or modified sequence
atgggccccgaggccctgagcagcctgctgctgctgctgctggtggcgagtggcgatgcagacatgaagggccactttgaccctgcgaaatgcaggtatgcgttaggcatgcaagaccgcaccatccccgactctgacatctctgcttcctcaagctggtccgacagcactgccgctcgtcattcccgtttggagagtagcgatggggacggcgcgtggtgccccgctggaagcgtgtttcctaaggaggaagaatacctccaggtggacctacagcgcttacacctggtagcactggtggggacacaggggcgccacgccgggggccttgggaaggagttctcccggtcttacaggctgcgctactcccgggacgggaggcggtggatggggtggaaggacagatgggggcaggagtag

SEQ ID NO: 79726 - DNA, 630 bp, Artificial Sequence
  derived and/or modified sequence
atgggccccgaggccctgagcagcctgctgctgctgctgctggtggccagtggcgacgctgatatgaaaggccacttcgatccggcaaagtgcagatatgctctgggtatgcaggacaggaccatcccagattctgatatctcggcctcatcatcctggagcgacagcacggccgcccgtcactcacgcctggaatcatctgatggggatggagcctggtgtccagccggaagcgtattccccaaagaggaggagtacttacaggtggatctgcaacgccttcatctcgtcgccctcgtcggcacgcagggtcgtcatgcaggagggctgggaaaagagttttctcggtcgtacaggctgagatattcccgagatggaaggaggtggatgggctggaaggaccgatggggccaggaggtcattagtggtaatgaagaccctgagggggtcgtgctgaaagacctgggtccacctatggtagcgaggttagtgagattctatcctagggcagaccgagtaatgtcagtttgtttacgagtggaactctatggctgtctgtggcgagacggactattaagctacaccgccccagtgggtcaaacaatgtacctgagcgaagcagtgtattag

SEQ ID NO: 79727 - DNA, 630 bp, Artificial Sequence
  derived and/or modified sequence
atgggccccgaggccctgagcagcctgctgctgctgctgctggtggcctcaggtgatgcagacatgaagggtcattttgatcctgctaagtgtagatatgccctgggtatgcaggatagaacaataccagattctgacatttctgctagctcttcttggtctgattctaccgccgcaagacacagcagattggagtcctcagacggcgacggagcgtggtgccccgcaggttcggtcttccctaaggaggaggagtatctgcaagtcgacttgcagaggcttcacctggtcgcactcgtcgggacccagggacggcacgccgggggattagggaaggagttcagccggtcatatcgcctccgctactctagggatggaaggcggtggatgggctggaaagaccggtggggccaggaagtgatttcgggcaatgaagaccctgaaggggtcgtcttaaaggacttggggccccccatggtcgctcgactggttcgattttatccccgagcggaccgggttatgagtgtgtgccttcgtgtcgagttatacggatgtctgtggagggacggtctgctgagctacaccgccccagttgggcagaccatgtatctttctgaggcggtgtattag

SEQ ID NO: 79728 - DNA, 630 bp, Artificial Sequence
  derived and/or modified sequence
atgggccccgaggccctgagcagcctgctgctgctgctgctggtggccagcggagacgcagacatgaaaggacatttcgaccctgctaagtgccgatatgccctggggatgcaggacaggaccattcctgactcagacatcagcgcatcctcaagttggtcggacagtaccgcagctcgtcactcaaggcttgagtctagtgatggagatggggcatggtgcccggcagggtccgtgtttcccaaggaggaggagtacctgcaggtcgatcttcagaggctgcacctggttgctctggtcgggactcagggcaggcacgccggcggcctcgggaaagaatttagcagatcttaccgactgaggtattctagggatggccgacgctggatggggtggaaggatcggtggggacaggaggtcattagtggcaacgaagatccagaaggggtcgttctgaaagatttaggaccgcccatggttgctagactagtgcgcttctacccgcgggctgaccgtgtgatgtctgtttgcctgcgtgttgaactctacggctgtttatggagggacggtctgctttcttacacggctccggtcggccaaacaatgtatctttcggaagccgtgtactag

SEQ ID NO: 79729 - DNA, 804 bp, Artificial Sequence
  derived and/or modified sequence
atgggccccgaggccctgagcagcctgctgctgctgctgctggtggcctcaggcgatgctgatatgaagggccactttgaccccgccaaatgtaggtacgctttggggatgcaggataggaccattccagactcagacatctcagcatcatcctcatggagcgactccaccgccgcaagacattctcggctcgaaagtagcgatggcgacggcgcctggtgtcctgctgggtcagtgtttccaaaggaggaagagtatctgcaggttgacttgcagagactgcatctggttgctctggtgggaactcagggacgccacgcaggggggctgggcaaagaattttcaagatcttaccgactgaggtactctcgtgatgggcgaagatggatgggatggaaggacaggtgggggcaagaagtaatctcaggcaatgaagaccccgagggagtggtgctgaaggacctggggcctcctatggttgcccgacttgtgagattttatccgcgggccgaccgagttatgtctgtgtgcctgcgcgtcgagctgtacgggtgcctttggcgggacggccttcttagctacacagccccagtggggcagaccatgtacctgagcgaagctgtgtacttaaatgacagcacttacgatggtcacactgttggcggcctgcaatatggagggctagggcaactggccgatggcgttgtggggctcgacgatttccgaaagtctcaggagttgcgggtttggcccggttatgactatgtcgggtggtccaatcactccttttcatctgggtattag

SEQ ID NO: 79730 - DNA, 192 bp, Artificial Sequence
  derived and/or modified sequence
atgggccccgaggccctgagcagcctgctgctgctgctgctggtggcttctggagacgctgatatgaagggccattttgatccagctaagtgtcggtatgccctggggatgcaggatcgcactatacctgacagtgacatctccgcctcttcctcgtggtcggattctacagccgccagacattcacggtag

SEQ ID NO: 79731 - DNA, 630 bp, Artificial Sequence
  derived and/or modified sequence
atgggccccgaggccctgagcagcctgctgctgctgctgctggtggcttccggggacgcggacatgaaagggcactttgatcctgctaagtgtaggtatgcgctgggcatgcaagaccgaacgatacctgattctgatatctccgcctcatcttcatggtccgattccacagcagcacgccacagcaggctggaatctagcgacggtgacggcgcctggtgtcccgccgggagcgtctttcctaaggaagaggagtatctgcaagtagacctccagaggctgcatcttgtggccctcgtgggaacgcaaggcagacatgcgggcgggctgggcaaggagttttcgcgctcttaccgccttagatattcccgagatggtaggcgatggatgggctggaaagataggtgggggcaggaagttattagcggtaatgaggatcctgaaggtgtagtgctgaaagacctgggtccaccaatggtggcaaggctggtgcgattttaccctagagccgaccgcgtgatgtccgtctgtcttcgcgtagaattgtacggttgcctatggcgcgacggcctgctgagttacaccgcacccgtgggccagactatgtacctatccgaggccgtgtactag

SEQ ID NO: 79732 - DNA, 192 bp, Artificial Sequence
  derived and/or modified sequence
atgggccccgaggccctgagcagcctgctgctgctgctgctggtggcatccggcgatgccgacatgaaaggccatttcgaccccgctaaatgtcgatatgcgctggggatgcaagatcggacgattcctgattcggacatcagcgcctcatcttcatggtctgactcaacagccgctcggcatagcaggtag

SEQ ID NO: 79733 - DNA, 501 bp, Artificial Sequence
  derived and/or modified sequence
atgggccccgaggccctgagcagcctgctgctgctgctgctggtggctagtggcgacgccgatatgaaaggccacttcgacccggccaaatgtcggtatgccttgggtatgcaagatcggaccattcccgacagcgacatcagcgcttcaagtagctggtccgactctaccgctgctcgacactctcgcctggagtcttctgacggagacggtgcctggtgccctgcaggatccgtctttccaaaagaggaagagtacctccaagtggacctgcagcgcttgcacctcgttgccctggtagggacacaagggcggcatgctggggggctaggcaaagagttttcgaggtcatataggctccgctactcacgggacggccggcgctggatggggtggaaggatagatggggacaggaagtgatttcaggcaatgaagacccagagggtgtggtccttaaggatctaggcccaccaatggtcgcacgtcttgttcggttctag

SEQ ID NO: 79734 - DNA, 462 bp, Artificial Sequence
  derived and/or modified sequence
atgggccccgaggccctgagcagcctgctgctgctgctgctggtggccagtggcgacgctgatatgaaaggacattttgacccagccaagtgtagatacgctctgggcatgcaggaccgcactattcctgatagcgatatttccgccagttcctcatggagcgacagcacagccgcccgacatagccggctcgaaagcagcgacggggacggcgcgtggtgccctgcgggctctgtgttccccaaggaagaggaatacctgcaagtggacctgcagcgactccaccttgttgctttggtagggacacaaggccggcacgccggtggcttggggaaggagttttctcgatcctatcggctgcgatatagccgtgacggccggcggtggatgggatggaaagacaggtgggggcaggaagtaatctctgggaatgaggatccagaaggcgtggttcttaagtag

SEQ ID NO: 79735 - DNA, 630 bp, Artificial Sequence
  derived and/or modified sequence
atgggccccgaggccctgagcagcctgctgctgctgctgctggtggcctctggtgatgcagatatgaaggggcactttgatccggctaagtgccggtatgcactcggcatgcaggatcggacaatacccgactctgacatctcagcatcttcaagttggtctgattctaccgccgcaaggcacagcaggctggagtccagcgacggagacggcgcctggtgtcctgctggatccgtgttccccaaagaagaggaatatctccaggtggatctccagagactccacttggtggccctggtcgggacacagggacggcacgctggaggactgggaaaggagttcagccgaagctatcgacttagatactctagggacggcaggcggtggatgggctggaaggacaggtggggccaggaagtgatctctggcaatgaggaccccgaaggagtggtcttgaaagaccttggacccccaatggtagcccgactcgtacgcttttatccacgggcagatagagtcatgtctgtatgcctgagggttgaattatatggttgcctgtggcgggatggattgctgtcatatactgcccctgtggggcaaacaatgtatctgtctgaggctgtatactag

SEQ ID NO: 79736 - DNA, 501 bp, Artificial Sequence
  derived and/or modified sequence
atgggccccgaggccctgagcagcctgctgctgctgctgctggtggcatcaggagacgccgacatgaagggacactttgatccagctaagtgtcgttacgcgctgggcatgcaggacaggaccatcccggattccgacataagtgcttcctcctcttggagtgattcgacagctgccaggcactcaagacttgagagcagcgacggggacggcgcatggtgccccgcgggatctgtatttcccaaggaggaggagtatctccaggtggatctgcagcggctgcatctcgtggcactggtgggcactcaaggacgccatgccggtggactgggcaaggagttttcgcggagttaccgactgcggtactctagggatggccgccgctggatggggtggaaagatcggtgggggcaggaggtaatcagcggtaacgaggatccagaaggcgtcgtgcttaaggacctgggccccccaatggttgccagactggtccgcttttag

SEQ ID NO: 79737 - DNA, 444 bp, Artificial Sequence
  derived and/or modified sequence
atgggccccgaggccctgagcagcctgctgctgctgctgctggtggcgagtggtgacgcagacatgaagggccattttgatccagcgaagtgccgatacgccctggggatgcaagaccggacaattcccgactcagacatatccgcctcctcttcttggtcggattcaacagctgctaggcacagccgactcgaatccagcgacggtgacggggcttggtgtcccgccggatctgtttttcctaaggaggaggagtaccttcaagttgaccttcagcggttgcatttggtggctcttgttgggacccagggacggcatgccgggggcctgggtaaagagtttagccggagctacagattgcggtattcacgggatggacggaggtggatgggctggaaagatcgatgggggcaggaggtcatttccgggaacgaggatccctag

SEQ ID NO: 79738 - DNA, 732 bp, Artificial Sequence
  derived and/or modified sequence
atgggccccgaggccctgagcagcctgctgctgctgctgctggtggcctccggcgacgccgacatgaagggccactttgacccggccaagtgtagatacgctctcggcatgcaggaccgtacaattcccgattctgatatatccgcttccagctcttggagtgactctacagcagctcggcactctcggttggagagcagcgatggggatggggcctggtgccccgcaggctctgtgtttcctaaggaagaggagtatctgcaagtagacttgcaaagactccatctagtcgcattagtgggaacacaaggcaggcacgccggcggcctcggaaaggaattctcacgctcttacagactgagatactctagagacgggcgaaggtggatgggttggaaagacaggtgggggcaggaagtaattagtggaaacgaagacccggagggcgtagtgctgaaagacttgggcccacctatggtcgcacgcttagtgagattctatccccgcgcagacagggttatgtctgtttgcctgcgtgtggaattgtatgggtgtctgtggagggactgctcaatgggagtttgggcatcgtggcagatggtgtggtggggatggatgacgttgggacgcgtgcgatcttgcggttccggccaggctatgactatgtgggatggcgcgaccaccgcctctcccgtcgcgatgtggcgatggtcactgtccctcacggggtag

SEQ ID NO: 79739 - DNA, 192 bp, Artificial Sequence
  derived and/or modified sequence
atgggccccgaggccctgagcagcctgctgctgctgctgctggtggcttcaggggatgctgatatgaagggccactttgaccctgccaagtgcagatatgccctcggcatgcaagaccgaacaatcccagacagcgacatcagcgcttcgagttcttggagtgattccactgctgcccgccatagccgctag

SEQ ID NO: 79740 - DNA, 501 bp, Artificial Sequence
  derived and/or modified sequence
atgggccccgaggccctgagcagcctgctgctgctgctgctggtggccagtggagacgccgatatgaaagggcattttgacccggctaaatgtcgatatgccctggggatgcaagacagaactattccagactccgatatcagtgcctcgtcttcctggagcgattcaacggctgcaagacattcacgcctagagagttcagacggggatggcgcttggtgccccgctggcagcgtgtttcctaaagaggaagagtacctccaggtggatctccagcgtctgcacctcgtggcactggttgggacgcaggggagacatgctggagggctcggcaaggagtttagcaggagctatcggctacgatactcgagggatggtcgacgctggatggggtggaaggatcgatggggacaggaagttatttcgggcaatgaggaccccgagggagtggtcttgaaggatctcggccctcccatggtggcccgcctggtgcgtttctag

SEQ ID NO: 79741 - DNA, 420 bp, Artificial Sequence
  derived and/or modified sequence
atgggccccgaggccctgagcagcctgctgctgctgctgctggtggcatcaggagatgcggacatgaaaggacactttgacccagccaagtgcagatacgctctgggcatgcaggatagaactatccctgattcagacattagcgcttcaagtagctggtccgactctaccgccgcgcggcactcacggcttgaatcttcagacggcgatggggcgtggtgtccagccggtagcgtatttcctaaagaggaggagtatctccaagtggatctacagcgactgcacctggtggccctggtggggacccagggccggcacgccggaggcctcggaaaggaatttagccgtagttataggctgcgctacagtcgggatggtaggaggtggatgggttggaaggatcgatggggacaggagtag

SEQ ID NO: 79742 - DNA, 192 bp, Artificial Sequence
  derived and/or modified sequence
atgggccccgaggccctgagcagcctgctgctgctgctgctggtggcctcaggtgatgccgacatgaagggccactttgacccagcaaaatgtcgatacgcactggggatgcaggacagaaccattccagattctgatattagtgcttcaagttcctggtcagatagcacagctgcccggcacagccgctag

SEQ ID NO: 79743 - DNA, 444 bp, Artificial Sequence
  derived and/or modified sequence
atgggccccgaggccctgagcagcctgctgctgctgctgctggtggcatccggagacgccgatatgaaaggacattttgacccagcgaagtgccgatacgctctggggatgcaagaccgtactatccccgacagtgatatttctgcatcttcttcttggtcagacagcacagcagcgcgccattctcgcctggagtcttcagacggggacggcgcctggtgccccgccggatcagtgttccccaaggaggaagaatacctgcaggtagacctgcagagactccatcttgtagctttggtcggtacccaggggcgccacgccggtggactgggtaaagagttctccaggagctataggttgcgttacagccgggacggtcgccggtggatgggatggaaggatcgttggggtcaggaggtgattagcggtaatgaggacccctag

SEQ ID NO: 79744 - DNA, 861 bp, Artificial Sequence
  derived and/or modified sequence
atgggccccgaggccctgagcagcctgctgctgctgctgctggtggcctcaggcgatgctgacatgaagggacactttgacccagctaaatgtcggtacgcactgggtatgcaagatcgaacaattccagatagcgatatttctgcatcaagtagctggtctgactccactgcagccagacacagccgtctagaatcgtcagacggcgacggtgcatggtgccccgctggaagtgtttttccaaaggaagaagagtacttgcaagttgatctacaacgacttcatctggtggccctggtgggtactcagggcagacacgccggtgggctcggaaaggagttcagccgcagctatagactcagatatagtcgcgacgggcggcggtggatgggctggaaagacaggtggggacaggaggtaatatctgggaacgaagatcctgaaggcgtcgtgctgaaggatctggggcctccaatggtagctcgtctcgtgcgcttctaccccagagcggaccgcgtgatgtcggtgtgtctgcgagttgaactgtacggatgcttatggcgtgacggcctcttgagctatacagcccccgtgggacaaaccatgtacctgagtgaggctgtttatcttaacgatagcacttacgatggacacacggtgggcggactgcagtatggcgggctcggacaactggccgatggcgttgtgggcctggatgacttccgcaagagccaggagctacgcgtctggcccggctatgattacgtggggtggagtaaccacagtttttcgtcgggctatgtcgaaatggagtttgagttcgatcgtttgcgtgccttccaagccatgcaagtgcactag

SEQ ID NO: 79745 - DNA, 732 bp, Artificial Sequence
  derived and/or modified sequence
atgggccccgaggccctgagcagcctgctgctgctgctgctggtggcaagcggagacgccgacatgaaaggtcacttcgaccccgccaagtgtcgttacgcattgggcatgcaggaccgtactatcccggattccgatatcagtgccagctcttcctggtcggactccaccgcagctcgtcattcccggcttgagtcctccgatggtgacggcgcatggtgtcccgctggctccgtgttccctaaggaggaggagtatctgcaggtcgacttacagcgcctgcacctggtggctttggttggtacacagggacgacacgccgggggactgggcaaagagttttctcggagctaccggttaagatactctcgggacggcagaagatggatgggatggaaggaccggtggggacaggaagtgatctcgggtaacgaagatcccgaaggtgttgtcctcaaggatctggggcccccaatggtggctagactcgtgaggttttaccccagggctgatcgggtgatgtcagtatgcttgagggtagagttatacggctgcctgtggagagactgctccatgggagtctgggcaagttggcagatggtgtggtggggttggatgacactgggtcgtgtaagatcttgtggctctggacaggcaatgaccatgtgggatggggctacaacagcttcacccgtcgcaatgtggcgatggtcactaagtctgacagggtag

SEQ ID NO: 79746 - DNA, 168 bp, Artificial Sequence
  derived and/or modified sequence
atgggccccgaggccctgagcagcctgctgctgctgctgctggtggcctcaggcgacgctgatatgaagggacatttcgatccggcaaagtgtcgatatgcactgggcatgcaagaccggacgattccagacagtgacatttcggcatcttcttcatggtctgattag

SEQ ID NO: 79747 - DNA, 156 bp, Artificial Sequence
  derived and/or modified sequence
atgggccccgaggccctgagcagcctgctgctgctgctgctggtggcaagcggtgacgcagatatgaaagggcattttgaccctgccaaatgtcggtatgcgctgggcatgcaggaccgcacaatccctgactccgacatctccgccagctcttag

SEQ ID NO: 79748 - DNA, 222 bp, Artificial Sequence
  derived and/or modified sequence
atgggccccgaggccctgagcagcctgctgctgctgctgctggtggcctctggcgatgccgatatgaagggacattttgatcctgccaaatgccggtacgctttgggcatgcaagaccgcactattccagacagtgacatctccgcttcctcatcatggtccgatagtaccgctgcgcggcattcgcggcttgagtcctcagatggggatggcgcctggtag

SEQ ID NO: 79749 - DNA, 369 bp, Artificial Sequence
  derived and/or modified sequence
atgggccccgaggccctgagcagcctgctgctgctgctgctggtggcctccggggatgccgacatgaaggggcactttgatccagctaaatgtcgctatgcgctgggcatgcaagaccgcactatacctgacagcgatatcagtgcctcatcctcttggtcagattccacagcagcacggcactcacggctcgagtccagtgatggggacggcgcctggtgtcctgccgggtctgtgttcccaaaggaggaggaatatctgcaagtcgacctccagaggctccacttggtggccctggtaggaactcagggtaggcacgcaggaggcctggggaaggagttctcgaggagttaccgactgaggtactag

SEQ ID NO: 79750 - DNA, 483 bp, Artificial Sequence
  derived and/or modified sequence
atgggccccgaggccctgagcagcctgctgctgctgctgctggtggccagcggggacgctgatatgaagggtcatttcgaccctgccaagtgtcgctacgccttaggcatgcaagatcggacaattcccgattccgacatttccgcttcaagctcctggtccgatagcactgcagcacggcactctcgcctagaatcatcggatggcgatggggcgtggtgcccggctggctccgtcttccctaaagaggaagagtaccttcaagtggacttacaaaggctgcacctggtggccctagtgggaacacagggacggcacgccggtgggcttgggaaagagttttctcgtagttatagactgcggtattcacgggacggccgccgatggatggggtggaaggatagatggggacaagaggtgatatctggcaatgaagatcccgagggtgtggtcttgaaggacctgggacccccaatggtctag

SEQ ID NO: 79751 - DNA, 399 bp, Artificial Sequence
  derived and/or modified sequence
atgggccccgaggccctgagcagcctgctgctgctgctgctggtggcttcaggtgatgccgacatgaaggggcatttcgaccctgccaaatgtagatatgccctaggcatgcaagatcggactataccagactcagacatcagtgcgtcttcatcttggtcagattctaccgcagcccggcactctcgcttagaatcctcagacggtgatggggcttggtgtccagccggctccgtcttccccaaggaagaagaatatctgcaagtggacctgcagcggcttcatctggtcgccctggtcggaacccagggccgccacgctggggggctcgggaaggagttcagccgtagctacaggctgcgctattcgagggatggtcgtcgctggatgggttggtag

SEQ ID NO: 79752 - DNA, 306 bp, Artificial Sequence
  derived and/or modified sequence
atgggccccgaggccctgagcagcctgctgctgctgctgctggtggctagcggcgatgctgatatgaagggccactttgatcccgccaagtgccgatacgcactaggaatgcaagaccggactattcccgactctgatatctccgcttcctcttcttggtccgatagcaccgccgcacgtcacagccggctcgaatcttccgacggcgatggcgcgtggtgccctgctggatccgtctttcctaaagaagaggagtatctgcaggttgacctccagcgactgcacttagtggcgttggtggggtag

SEQ ID NO: 79753 - DNA, 213 bp, Artificial Sequence
  derived and/or modified sequence
atgggccccgaggccctgagcagcctgctgctgctgctgctggtggcatccggggacgccgatatgaagggtcactttgaccctgcgaaatgtagatatgccctcggcatgcaggaccggactatccctgattccgacataagtgcctcctcaagctggtctgactccaccgccgcccgccacagccgtctggagtcctctgatggcgactag

SEQ ID NO: 79754 - DNA, 237 bp, Artificial Sequence
  derived and/or modified sequence
atgggccccgaggccctgagcagcctgctgctgctgctgctggtggcatctggtgatgctgatatgaaaggccactttgaccccgcaaaatgccggtatgccttaggcatgcaggacagaacaatcccggatagtgatataagcgcttctagttcttggagcgacagtacagccgcccgacattcgagactcgaatcaagcgacggcgacggtgcatggtgtcccgctgggtcctag

SEQ ID NO: 79755 - DNA, 384 bp, Artificial Sequence
  derived and/or modified sequence
atgggccccgaggccctgagcagcctgctgctgctgctgctggtggccagcggggacgccgacatgaagggccatttcgacccggcaaagtgtcgttatgccctcggcatgcaagatcgtaccataccggattctgacatcagcgcttcttcaagctggtcggactccacagcagcaaggcatagcaggcttgaatccagcgatggcgacggcgcctggtgccccgcaggaagcgtgttccctaaggaggaagagtacttacaggtcgacctgcagagactgcatcttgtagccttggtcggaacccaggggagacacgccggggggctggggaaggagttcagcaggagctatcggctccgatatagcagggatggaaggtag

SEQ ID NO: 79756 - DNA, 348 bp, Artificial Sequence
  derived and/or modified sequence
atgggccccgaggccctgagcagcctgctgctgctgctgctggtggctagtggtgacgccgatatgaagggccactttgatccagctaaatgtcgatacgcgcttggaatgcaggaccgcaccatcccagattccgatatctcagcctcatcctcttggtctgactcaacagctgctaggcactcaaggctggagagttcagacggtgatggcgcatggtgcccagccgggagtgtatttcctaaagaagaggaatacctgcaggtggatctgcagcgactacatctagtggccctcgtcggcacccaaggccgccatgcaggaggcttgggtaaggagttcagctag

SEQ ID NO: 79757 - DNA, 432 bp, Artificial Sequence
  derived and/or modified sequence
atgggccccgaggccctgagcagcctgctgctgctgctgctggtggcttccggtgatgctgacatgaagggtcactttgaccctgccaagtgtcggtacgctctgggtatgcaggataggaccatccccgacagcgatataagtgcttcaagcagttggtcggacagtaccgccgctaggcactctagactggagtcttccgacggcgacggcgcctggtgtccggccggatcggtattccctaaggaggaagagtaccttcaggtagacctgcagagacttcaccttgtggccctagttgggacccagggacggcacgccggtggtctcggcaaggaattctcccggagctacaggttgcgatatagccgagatggccggcgctggatgggttggaaggaccgctggggtcaggaggtgataagcggttag

SEQ ID NO: 79758 - DNA, 339 bp, Artificial Sequence
  derived and/or modified sequence
atgggccccgaggccctgagcagcctgctgctgctgctgctggtggcctcgggagatgctgacatgaaaggacatttcgatcccgccaagtgtagatatgcattaggaatgcaggacagaacgatccccgactctgatatctccgcctcatcaagctggagcgattctacggccgcccgccactcacggttggagagcagcgatggtgacggcgcatggtgccccgccggcagtgtcttcccgaaagaggaagaatatctgcaagtggatttgcaacgcctgcatctcgtcgcccttgtgggtacccagggccgccacgccggaggcctggggaaatag

SEQ ID NO: 79759 - DNA, 513 bp, Artificial Sequence
  derived and/or modified sequence
atgggccccgaggccctgagcagcctgctgctgctgctgctggtggctagcggtgatgcagatatgaagggacacttcgaccccgccaaatgtcggtacgcactcgggatgcaggatcgcaccataccagattcagacattagcgcctcctcgtcttggtctgactctacagcagccaggcacagccgcctggagtccagtgacggtgacggcgcatggtgccctgccggtagtgtatttccaaaggaggaagagtatctccaagtggatctgcaacgattgcacttagtcgctctggtgggcacccaggggagacacgcaggcggactggggaaggaatttagcagatcatatcgtttacggtactcacgggacggcaggcgatggatgggctggaaggataggtggggccaggaggtcatcagcggaaacgaagaccccgagggggtggtgctgaaggatctgggaccccctatggtagcgaggttagttcggttctatccccgcgcttag

SEQ ID NO: 79760 - DNA, 417 bp, Artificial Sequence
  derived and/or modified sequence
atgggccccgaggccctgagcagcctgctgctgctgctgctggtggcctcaggcgacgcggacatgaaaggccacttcgatcccgcgaaatgtagatatgctctcggcatgcaagacagaaccattcccgactctgatatatccgcctcatccagttggagcgactccactgcggcgaggcacagccgtcttgagagcagcgatggggacggagcctggtgtcctgccggatccgtattcccaaaggaggaggagtacttgcaggtggatctgcaaaggctccatctggtcgccctggttggtacccaaggtcggcacgccggcggcttaggaaaggaattttcgagaagctaccgactccggtactccagggacgggcgtcgctggatgggttggaaggacaggtggggccaatag

SEQ ID NO: 79761 - DNA, 156 bp, Artificial Sequence
  derived and/or modified sequence
atgggccccgaggccctgagcagcctgctgctgctgctgctggtggcttctggagatgccgatatgaagggtcatttcgatcctgctaagtgcagatatgcattgggaatgcaggaccgtacgataccagactctgatatcagcgcttctagttag

SEQ ID NO: 79762 - DNA, 417 bp, Artificial Sequence
  derived and/or modified sequence
atgggccccgaggccctgagcagcctgctgctgctgctgctggtggcctcaggcgatgccgatatgaaagggcacttcgaccctgccaagtgcagatatgctcttggtatgcaggatcggaccatccctgactcagacatctccgcctcgtcaagttggagcgattctaccgctgccagacatagtaggttagagagcagcgatggggacggggcatggtgtccagccggttcagtctttcctaaagaagaagagtacttgcaagtggacctgcaaagactccatttagtggccctggtgggtacacagggcagacacgcaggaggcctgggcaaggagttctcacgctcctatcggctgaggtacagcagggatggcagacgctggatggggtggaaagaccgttggggtcagtag

SEQ ID NO: 79763 - DNA, 258 bp, Artificial Sequence
  derived and/or modified sequence
atgggccccgaggccctgagcagcctgctgctgctgctgctggtggcaagcggagatgccgatatgaagggccatttcgaccctgcaaagtgcaggtatgcattaggcatgcaggaccggacaatacctgatagtgatatttctgcttcaagctcttggtcagattccaccgctgcacggcacagtcgcctagaatcatccgacggcgacggcgcatggtgtcctgctggctcggtgtttcccaaagaagaagagtag

SEQ ID NO: 79764 - RNA, 444 nt, Artificial Sequence
  derived and/or modified sequence
augggcccugaagcacucucgucucugcucuuauuauuacugguggcuucuggcgaugcugauaugaagggccacuucgaucccgccaaauguagguaugcacugggaaugcaggaccguaccaucccagacuccgauauuucggccucuaguaguuggucagauucgacugccgcuagacauucuaggcuagagucuucagauggggacggggcauggugucccgccggcaguguguuucccaaggaagaagaguauuuacagguggauuuacagagacugcacuuaguagcauuggucgguacacagggaaggcaugcaggugggcuaggcaaggaauuuagucgcucauaccgccuacgguacagccgagacggccgcagauggaugggguggaaagaccgguggggccaggagguuaucuccgggaacgaggaccccuag

SEQ ID NO: 79765 - RNA, 444 nt, Artificial Sequence
  derived and/or modified sequence
augggcccugaggcucuuagcucacuucugcugcugcuccugguggcaaguggagacgcggacaugaagggacacuuugauccagcgaagugccguuacgcgcuagguaugcaagaccguaccauuccugauuccgauauauccgcuuccagcagcugguccgauuccaccgccgcacgacacucuagguuggagagcucugacggggacggagccugguguccagcaggauccguuuuucccaaggaggaggaauacuuacagguugaccugcagagauugcacuugguggcacucgucggcacacagggaagacacgccgguggucugggcaaggaauuuucacgaaguuaucgccuuagguauucuagagacggacgaagauggaugggcuggaaggaucgguggggacaagagguuauaucaggcaacgaagaccccuag

SEQ ID NO: 79766 - RNA, 444 nt, Artificial Sequence
  derived and/or modified sequence
augggcccugaagcacugaguucgcugcuucuacuccuacuugucgcuucuggagacgcggauaugaagggccacuuugauccagccaaaugucguuacgcucuaggcaugcaagauagaaccauuccugacucagacauuuccgccuccucgucuuggucugauuccacggcagcucggcacucccgcuuagaguccagcgauggggauggagcuugguguccggccggcucuguguucccuaaagaagaagaguacuugcaaguggaccuacagcggcuucaccugguggcacucguugguacgcaagggcgccacgcaggagguuuggggaaggaguuuucucgaagcuaucgacuucgauauagucgugauggucggcgauggauggguuggaaagaccgauggggacaggaggugauuaguggaaacgaagacccguag

SEQ ID NO: 79767 - RNA, 177 nt, Artificial Sequence
  derived and/or modified sequence
augggacccgaagcgcucucuucccucuuacuucuucuccugguugccucuggugacgccgauaugaaaggacacuuugacccagcgaaauguagguacgcauuaggcaugcaggauaggaccauccccgauucagauauuagugccucaagcuccuggucagauagcacggcguag

SEQ ID NO: 79768 - RNA, 420 nt, Artificial Sequence
  derived and/or modified sequence
augggaccagaagcauuauccucacuacugcuucuuuugcucguagccucuggggacgcugacaugaaagggcacuuugacccugccaaaugucgcuacgcacuuggaaugcaagaucggacaauuccugauuccgacauaagcgcaaguuccagcuggagugacaguacugccgccagacacagccgucucgagagcucugacggggauggcgcgugguguccugcaggauccgucuuuccgaaggaggaagaauaucugcaggucgaucuccaaagacuccaucuggucgcccucgugggcacccaggggaggcaugccggaggacugggcaaagaauucuccaggucauaccgacugcgguacagcagagauggacgaagauggaugggauggaaagacagguggggccaggaauag

SEQ ID NO: 79769 - RNA, 420 nt, Artificial Sequence
  derived and/or modified sequence
auggggccugaggcgcugucgagccuccuacuacugcugcuuguggcuuccggugacgcagauaugaaaggacacuucgaucccgccaaaugucgcuacgcccuuggaaugcaagaucguaccauuccugauuccgacaucucugccuccucuucuugguccgacuccaccgccgcgcgccauagucggcucgaaagcucugacggcgacggcgcuuggugcccugcaggcucaguguuuccaaaggaagaagaauauuuacaggucgaccuacagcgacugcaucuggucgcccugguagguacacagggaaggcaugccggaggauugggaaaggaauucucucgaaguuaucgucuaagauauagccgagaugggcgcagauggauggguuggaaggaucguuggggccaggaguag

SEQ ID NO: 79770 - RNA, 420 nt, Artificial Sequence
  derived and/or modified sequence
augggacccgaagcccugagcuccuuacugcugcuccuguugguagccaguggagaugcagauaugaagggacauuucgaucccgccaaguguagauacgcccuaggaaugcaggaccgaaccauucccgauagugauauuucggcauccuccaguuggagcgacuccacagccgcgagacauuccagguuggaaagcagugacggggacggggcuuggugcccugcaggcagugucuuucccaaggaggaggaauaucuccagguugaucuucagcgauuacaccucgucgcuuuggucgggacacagggaagacaugcuggcggccucggcaaggaauuuucccgcuccuacaggcuuagauauagcagggacgggcgacgauggaugggcuggaaggaccgaugggggcaagaauag

SEQ ID NO: 79771 - RNA, 630 nt, Artificial Sequence
  derived and/or modified sequence
augggaccugaagcucugaguucacuucuacuguuguugcucgucgcaaguggagacgcggauaugaaaggccauuucgaccccgcaaaauguagguaugccuugggaaugcaggaccggaccauacccgauucugacauaagcgcaaguucuagcugguccgacucuacugcugcacggcacagcagauuggaauccagugacggcgacggagccuggugucccgcgggaucuguguucccaaaagaggaggaauacuugcagguggaccuucagaggcuccaccucguggcccugguaggcacccaggggcgacaugccgguggguuagguaaggaauucagcagaagcuauagacugcgauacucacgagauggccgcagguggaugggauggaaggaucgcuggggacaggaagugauuucugggaaugaagauccagaaggcguuguucugaaggacuuggguccuccaaugguggcccggcuuguuagauucuacccucgcgcugaccggguaaugagcgugugcuuaaggguggaguuguauggcugccuguggagagaugggcuguugaguuauacugcacccguagggcagacaauguaccugagugaggcugucuauuag

SEQ ID NO: 79772 - RNA, 630 nt, Artificial Sequence
  derived and/or modified sequence
augggaccugaagccuuguccagucuuuuauugcuauuauuaguggcaucgggagacgcugauaugaagggucauuuugauccagcuaagugucgguaugcucucggaaugcaagaucgaacgauacccgacucggacauuagcgcguccucaagcuggagcgauuccacagcagcacggcacagcaggcuagaaucaucagacggggacggagcuugguguccggcuggguccguguucccaaaggaggaggaguaccugcaaguggaccugcagaggcuucaccuggucgcccuggucgggacacaggggagacacgccggaggacuuggcaaggaguuuucacguagcuauaggcuuagauauucuagagauggcaggagauggaugggauggaaggaccggugggggcaggaggugaucucagguaaugaagauccugaagggguggugcucaaggaucuugggcccccuaugguggcaagauugguaagauuuuacccccgcgcagaccgugugaugucagugugucuacggguugaguuguacggaugccuuuggagagacgguuuacugucauacaccgcaccgguuggccagacuauguacuugagugaagcaguguacuag

SEQ ID NO: 79773 - RNA, 630 nt, Artificial Sequence
  derived and/or modified sequence
auggggccagaagcacucuccuccuuacuccuccuucugcuggucgcuagcggagaugcagacaugaaagggcacuuugauccagcaaaaugccgguacgcccuggggaugcaagauagaacaauuccagacagcgacauaucagccucguccagcugguccgacucuacugcagcucgacacucccgacucgaaagcucagacggcgacggugcauggugccccgcgggaucuguuuuuccuaaggaggaggaguaccugcaggucgaccugcagcgucuccaccuuguggcacucguaggaacacagggcagacaugccggaggauuaggaaaggaguucuccagaucuuauagacugagauacucaagggacgguaggagguggauggguuggaaggauaggugggggcaggaggugaucaguggaaaugaggacccggaggguguaguccugaaggacuuggggcccccuaugguggcccgccuuguccgauuuuacccucgagcugaccgugugauguccguaugucuccggguugaacucuacggaugccuguggcgggaugggcugcucaguuacacugcaccaguaggacaaacaauguaccucucagaggccguuuacuag

SEQ ID NO: 79774 - RNA, 804 nt, Artificial Sequence
  derived and/or modified sequence
augggaccagaagcacuaucgagccugcugcuguuguuacuagucgccaguggugaugccgauaugaagggccauuucgauccagcaaagugcagguaugcacuggguaugcaggacagaacaaucccagacucagauauuagcgccucuuccucuuggucagauagcacggcggccaggcacucccggcuugagucuagugacggcgauggggcuugguguccagccggcucaguguuuccgaaagaggaggaauaccugcaaguggaccuucagagacuucauuuggucgcgcugguaggaacccaaggcagacacgcaggggguuuggggaaagaguucucaagaagcuacagauuaagauauucccgcgauggaaggcgauggauggguuggaaggacagguggggccaggagguuaucucugggaacgaagauccagaaggggucguccugaaggaccugggcccaccuaugguagcaagacuggugcgcuucuauccccgcgccgauagaguaaugagugugugccuaagaguugaacuuuauggaugucuguggcgggaugggcuacuaucuuacacagcaccggucggccagaccauguaccuaagcgaggccguguauuugaaugacucuaccuaugacggccacacuguugggggccugcaauaugggggcuuggggcagcuggcagacggagucguuggcuuggacgacuuccgcaagagucaggaacugcguguguggcccggguaugacuacgugggguggucuaaccauuccuucagcuccggcuacuag

SEQ ID NO: 79775 - RNA, 192 nt, Artificial Sequence
  derived and/or modified sequence
auggggcccgaagcccuguccucuuuguugcugcuguuauuaguugcuuccggcgaugcggauaugaagggccacuuugauccagccaagugccgauacgcccuugguaugcaagacagaacaauuccggacagugauauuuccgccucuucuucauggucugauaguacugcagccaggcauuccagauag

SEQ ID NO: 79776 - RNA, 630 nt, Artificial Sequence
  derived and/or modified sequence
auggggccugaagcccucucuucccuccuacuguugcuucuuguggcuuccggagaugccgauaugaaagggcacuuugacccagccaaauguagauacgcccugggaaugcaggaccgcaccauuccugauucagacauuuccgcuaguagcuccugguccgacucuacagcugcuaggcacuccagacuagagagcagugacggcgacggcgcauggugcccagccggaagcguuuuccccaaggaggaggaauacuugcaaguagaccuacagcgacuccauuuaguugcgcuggugggaacucagggacgacacgccggcggcuuaggaaaagaguucuccagguccuauaggcugagguacucuagggaugggaggcguuggaugggcuggaaggauagguggggacaagaagugaucucagggaaugaagauccugaagggguugugcuuaaggaccucgggccgcccaugguugcaagauuggugagguucuauccacgagcugacagaguuaugucaguauguuugcgcguggaguuguauggcugccuguggcgggauggucuccucuccuauacugcaccugugggacaaacaauguaucugagugaagccguuuauuag

SEQ ID NO: 79777 - RNA, 192 nt, Artificial Sequence
  derived and/or modified sequence
augggcccugaggcucucagcagucuucucuugcuccuucugguugccuccggggaugcugacaugaaaggacauuuugaccccgccaaaugccgcuacgcccuuggaaugcaggacagaaccauuccugacucagauaucagugcgucuucaucguggucugacaguacugcggcucgccacagcagguag

SEQ ID NO: 79778 - RNA, 501 nt, Artificial Sequence
  derived and/or modified sequence
augggcccugaggcacucagcucucuucugcuucugcuacuaguggcaucaggagacgcagacaugaaagggcauuuugaccccgccaaaugccgauacgcccugggcaugcaagaccgcacaauucccgacagcgauauuucagcuagcucaagcugguccgauucuaccgcugcccgacauucgcgucuggagucuuccgacggcgauggcgcuuggugccccgccgguagcguuuucccgaaggaggaggaauaccuccaggucgaucuccaaaggcuccaccugguagcuuugguggguacacaaggccggcacgcaggaggccuggguaaagaguucucucggucuuaucgucucagauauucacgcgacggaaggcgguggaugggguggaaagacaggugggggcaagaaguaauuuccgggaaugaagauccagaaggcgugguauuaaaagaccucggcccgccaauggucgcaaggcucguucgauuuuag

SEQ ID NO: 79779 - RNA, 462 nt, Artificial Sequence
  derived and/or modified sequence
augggacccgaggcacucucaagcuuauugcugcuguuacuugucgcauccggggaugcagauaugaagggccacuuugauccggccaaauguagauacgcccugggcaugcaggaccgaacaauaccugacagcgacaucucugcgucaagcuccuggucggacucaaccgcugcaaggcauucaaggcuggaguccagcgauggagacggggccuggugcccagcugggagcguuuuuccgaaggaagaagaauacuugcagguugaucugcagcgccuccaccuuguugcccugguugguacucaaggucgccaugccggaggauugggcaaggaauuuucccguuccuauagauugcgguauucuagagaugguaggagauggaugggauggaaggaucgcuggggucaagaggucaucuccggcaacgaagaucccgagggagucgugcuuaaauag

SEQ ID NO: 79780 - RNA, 630 nt, Artificial Sequence
  derived and/or modified sequence
augggcccggaggcguuaucaucucuccuucugcugcucuugguagcuuccggugaugccgacaugaaaggacacuuugaccccgcgaaguguagauacgcucugggaaugcaggacaggaccauucccgacagugacauuagugcauccuccucuuggucggauuccaccgcggcaagacacucaaggcucgaaucuucagauggugacggcgcgugguguccagccggcaguguuuuucccaaggaagaggaauaccugcaagucgaccuucagagacugcaccugguugcucuagucggcacccaaggaaggcaugccgggggccucggaaaggaauuuuccagauccuaccgguugcguuacucccgggacggacgaagguggaugggcuggaaggacagguggggccaggaagugaucucaggcaacgaggaccccgaggguguaguccugaaagaucugggaccucccaugguggccagacugguaagauuuuaucccagagcggacagggugaugagcguuugucugcgagucgagcuguacgggugccucuggagggacggacuguuaagcuacacagcuccuguaggccagacaauguaccugagugaagccgucuacuag

SEQ ID NO: 79781 - RNA, 501 nt, Artificial Sequence
  derived and/or modified sequence
auggggcccgaagcgcuuaguucauugcugcugcugcugcuugucgcguccggggacgccgauaugaagggccauuuugauccagccaagugccgauaugcuuuagguaugcaggauagaaccauacccgacagcgacaucuccgccaguuccucuuggucagacaguacugcagcgagacacuccagauuggaaagcagugauggcgacggggcgugguguccagcuggaaguguguuccccaaggaagaagaguaccuacaaguggaccugcagaggcugcaucucgucgcccuggucggaacacagggacgucacgcaggcggccucgggaaagaguucuccagaaguuaccgguuacgcuacagccgcgacggacgcagauggaugggcuggaaagaucgguggggccaagaaguuauauccggaaaugaggacccggaaggugugguuuugaaagaccugggacccccgaugguagcccgauuagugagauuuuag

SEQ ID NO: 79782 - RNA, 444 nt, Artificial Sequence
  derived and/or modified sequence
auggggcccgaagccuuaucaagucucuugcuguugcuguuaguggcgucuggggaugccgacaugaaaggccacuucgaucccgccaagugucgguaugcacuggggaugcaggacagaaccauccccgauuccgacaucucagcgucgagcaguuggucagacaguaccgcagcccgccacaguagauuggaauccagcgacggagauggugcuuggugccccgccgguagcgucuuucccaaggaagaggaguaccugcagguagauuugcaaagacuucaccugguggcccuugucggcacacaaggacggcaugcaggaggacugggcaaagaguuuucuaggaguuacagacugcgauauucccgcgaugguagacgcuggaugggguggaaggaccgauggggucaggaagugaucaguggaaaugaggaccccuag

SEQ ID NO: 79783 - RNA, 732 nt, Artificial Sequence
  derived and/or modified sequence
augggaccugaagcccugucuagccugcugcucuuauugcucgucgcuagcggcgacgcugauaugaaggggcacuuugaccccgccaaaugcagauaugcucucggaaugcaagacaggacuauccccgacucugauauuagcgccuccucaagcuggagcgacaguaccgcggccagacacucaagacuggaguccuccgauggagauggagcaugguguccagcagguaguguguuuccuaaggaagaagaauaucuucaaguggauuugcagcgacuccaucugguggccuugguggggacucaaggucggcacgcaggcggacucggcaaggaauucagucguucauaccguuuaagguauuccagagaugggcgaagguggaugggcuggaaagacagauggggccaggagguuauuucuggcaaugaggacccugagggagugguucugaaggacuugggaccacccaugguggcaagacuggugagauuuuauccacgggccgaucgcgucaugucagugugucuucgcguagaguuguacgggugucucuggcgagacugcaguauggguguuugggcaaguuggcagaugguuugguggggcuggaugacccugggcagggugcggaguugcggauccggccaggcuaugacuaugugggacggugccacuacugcauccccugucgcaauguggagguggucccucagccucacuggauag

SEQ ID NO: 79784 - RNA, 192 nt, Artificial Sequence
  derived and/or modified sequence
auggggccggaagcgcucaguagucuacuccuacugcuuuugguagcgagcggcgacgcagauaugaaagggcacuuugauccagccaaaugccgcuacgcgcuagggaugcaagacagaacaauuccagacagugacaucucagccuccuccucaugguccgacuccaccgcugcucggcauucaagauag

SEQ ID NO: 79785 - RNA, 501 nt, Artificial Sequence
  derived and/or modified sequence
augggcccagaggcacucagcucccuacuguuacuguugcuuguggccuccggagacgcugauaugaaaggccauuuugaucccgccaagugucgcuaugcacugggcaugcaagauagaacaauccccgacagugauauuucagcguccagcagcuggagugauucuaccgcagcgagacauucuagacuggaguccagugauggugacggugccuggugucccgcuggauccguauuucccaaagaagaagaguaccugcagguggauuugcaaagacugcaucucguggcccugguagggacucaagggagacacgcuggcgggcucggcaaagaauucucacguucuuacagguugcgauacagccgugauggccgaagauggaugggguggaaggaccgauggggucaggaagugauaucaggcaaugaggaucccgaaggugugguccugaaagauuugggcccucccauggucgcacgucuggugagguuuuag

SEQ ID NO: 79786 - RNA, 420 nt, Artificial Sequence
  derived and/or modified sequence
augggaccugaggcucucagcucucuuuugcugcugcuucugguagcuucaggugaugcagauaugaaaggccacuuugauccagccaagugcagauacgcccuggggaugcaagacaggacuaucccggacucugacauauccgcaucuaguucauggucggauucaaccgccgccaggcauucucgcuuggagagcucugauggagauggcgcauggugcccugccgguucaguuuuccccaaggaagaggaauacuugcaaguggaucuccagagacugcaccuuguagcucuugugggcacccagggcaggcacgccgguggccuugggaaagaguuuucacggucauauagacugagauauagccgggacggccgccgcuggauggguuggaaggacagguggggacaagaauag

SEQ ID NO: 79787 - RNA, 192 nt, Artificial Sequence
  derived and/or modified sequence
augggcccagaagcgcuuucuucccuguuacugcugcuacucgucgcuaguggcgaugcugauaugaaaggccauuucgacccugcuaagugccgguacgcucucgggaugcaggacaggacaauuccagacuccgacauaagcgccucaagcuccuggagcgacucuaccgccgcacgccacucaagauag

SEQ ID NO: 79788 - RNA, 444 nt, Artificial Sequence
  derived and/or modified sequence
augggacccgaagcacuauccucucugcuccugcuucuguuaguggccucuggcgacgcagauaugaaaggacacuuugacccugccaagugccgauacgcauuagggaugcaggacaggaccauacccgacucggacauuagugcgagcagcucauggucugauucgaccgcagcgcgucauucucgguuggaauccucagacggcgauggggccuggugcccugccggcagcguuuuuccuaaggaggaggaguaccugcagguggaucuucagcgcuuacaccugguggcgcucgucgggacgcaagggaggcaugcaggcggacuuggcaaagaauuuucuagaaguuaucgauuacgcuacucccgggauggccggcguuggaugggcuggaaagaccgguggggacaggaagugauaucagggaacgaggacccguag

SEQ ID NO: 79789 - RNA, 861 nt, Artificial Sequence
  derived and/or modified sequence
auggggcccgaagcacugucuucgcuacugcugcuguugcugguggcauccggcgaugcagauaugaaggggcacuuugacccugcuaagugucguuacgccuugggaaugcaggauaggacaaucccagauagugacaucuccgcuuccagcaguuggucagauuccacugcagcacgacauagccgcuuagagagcagugacggggauggggcaugguguccugcaggaucgguguuccccaaggaggaggaguaccugcagguggaccugcagcggcuucaccucguagcccugguggggacacaggggagacacgcuggaggacuaggaaaggaguuuucgcggucuuaucgcuugcgauauucucgggaugggcggcgcuggaugggauggaaagaucgaugggggcaagaggugaucagcggaaaugaggauccagaaggcguuguacucaaggaccugggacccccuaugguggcaagacuggucagauucuauccucgcgcugaccgcguuaugagcguuugccucagaguggaguuguacgggugccuuuggagggauggacuauuaaguuauacugccccugugggacaaaccauguaucuuucugaggccguuuaucuuaacgacucaacauaugaugggcacacgguaggugggcugcaguauggcgggcucggacaguuggcagacgggguggugggcuuagaugauuuucguaaaagucaggaacugaggguuuggccuggcuacgacuauguggguuggucuaaccacagcuuuuccuccggcuauguugagauggaguuugaauuugauagacugcgggcauuccaagcaaugcaggugcacuag

SEQ ID NO: 79790 - RNA, 732 nt, Artificial Sequence
  derived and/or modified sequence
augggacccgaagcucuuuccucucugcugcugcuccugcucguggccucuggggacgccgauaugaaaggccauuucgaucccgcuaaguguagguaugccuugggaaugcaagaccgaacuauucccgacagcgacauuucagcuaguucaagcugguccgauagcaccgccgcaaggcauucuaggcucgagagcucagacggagauggagcaugguguccugccgggucagucuuccccaaagaagaagaguaccuccagguugaucuucaaaggcugcaccuggucgcccuuguugggacucagggccgucaugcuggagggcugggcaaggaguuuagccgaucguauaggcucagauacucacgagaugguaggagauggaugggauggaaggaucgauggggucaggaggugauuuccgguaaugaggacccagagggggugguguugaaagauuugggcccacccaugguugccagacuggucagauuuuauccuagagccgaucgggugaugucagugugucucaggguggaacuuuaugggugcuuguggcgcgauugcucaaugggagugugggcuucauggcagaugguuuggugggguuggaugacccuuggacgugugagaucuuguggcucugggcaggccaugacaaugugggauggggccacgacugccucuccgguagcaauguggcgcuggagucugucucugacgggauag

SEQ ID NO: 79791 - RNA, 168 nt, Artificial Sequence
  derived and/or modified sequence
auggggccagaagcccuaucaucccuucuccuacuccuauuagucgccuccggugacgcagauaugaaaggccauuuugaucccgcaaaguguagguacgcucugggcaugcaggaccgcacaauaccugauuccgacaucagcgcuaguuccuccuggucugauuag

SEQ ID NO: 79792 - RNA, 156 nt, Artificial Sequence
  derived and/or modified sequence
augggaccagaagcacugucaucucucuuguuguuguugcucguggccucuggagaugcggauaugaaaggccacuucgacccugcuaagugccgguacgcccugggcaugcaagaucgaaccauucccgacagcgauaucucagccucuucauag

SEQ ID NO: 79793 - RNA, 222 nt, Artificial Sequence
  derived and/or modified sequence
augggcccugaagcauugaguucuuuacuauugcugcuccuaguugcaaguggcgacgccgauaugaagggacauuuugaccccgcuaaaugccgguacgcccuuggcaugcaagaucgaacgauucccgauagcgauaucucugccagcucuaguugguccgacuccaccgccgcaagacauagucggcucgaaucuagcgacggcgauggugcgugguag

SEQ ID NO: 79794 - RNA, 369 nt, Artificial Sequence
  derived and/or modified sequence
augggucccgaagcucugagcucauugcuacugcugcuacucguugcgucaggugaugccgauaugaaggggcacuuugaccccgcuaagugccguuacgcacugggcaugcaggaccgcacaauuccggauagcgauauuuccgccuccucauccuggagcgacagcaccgccgcuagacacucgagguuggaaucuagugauggggauggggcgugguguccggccggcaguguuuucccuaaagaagaagaguaccuccaagucgaccugcagagacuccaccuuguggcuuuagucggaacacaaggucggcaugcaggaggccugggaaaagaguuuagucgcagcuaucgucugcguuauuag

SEQ ID NO: 79795 - RNA, 483 nt, Artificial Sequence
  derived and/or modified sequence
augggacccgaagcucucucuucauugcuguugcugcugcucgucgcuaguggagaugcugacaugaaaggacacuuugaccccgcaaaauguagguacgcccugggaaugcaggaccgcacgaucccggauagcgauauuagcgcaucuucaagcugguccgacuccacggcagcccgacauucucgucuugagagcagcgauggcgacggcgcuugguguccugccgggaguguauucccuaaggaagaggaauaccuccagguggaucugcagcgucugcaucugguagcuuuagucgguacucaaggacgccaugccgggggucugggaaaggaauucagccggaguuauaggcugcguuauucgagagacggccguagauggaugggguggaaagaucguuggggucaggaagucauuuccggcaacgaagaucccgaaggcguaguguugaaagaucuugguccuccuauggucuag

SEQ ID NO: 79796 - RNA, 399 nt, Artificial Sequence
  derived and/or modified sequence
auggggccugaggcucuuaguagucuccuacugcugcuacuagucgcuagcggagacgcggacaugaagggacauuucgaccccgcaaaguguagguacgcccuuggaaugcaagaccgaacuauuccagauucugauaucucugcaucuuccucguggucagauagcacugccgccaggcauagcagacuggaguccucagacggcgacggagccuggugcccagccgguagcguguuuccgaaggaggaggaauaucugcaagucgaucugcaacgccugcaucuaguggcauuaguagguacucagggcagacacgcagggggacucggaaaagaauucucccgguccuauaggcuccgcuauagcagggacggccgaagguggaugggaugguag

SEQ ID NO: 79797 - RNA, 306 nt, Artificial Sequence
  derived and/or modified sequence
auggggcccgaggccuuaucaucacuucuuuuacuccucuuaguugccucuggugacgcagacaugaaaggucauuuugacccagcuaaaugccgauacgcacuuggaaugcaggacagaaccauaccagacagcgacaucagcgcaucauccucuuggucugacucaaccgcagcaaggcacucucgucuggaaaguagcgacggcgauggagccuggugucccgccggaagcguguucccaaaggaggaggaguaccugcaagucgaccuucagcgccuucaucucguggcacucguggguuag

SEQ ID NO: 79798 - RNA, 213 nt, Artificial Sequence
  derived and/or modified sequence
auggguccagaagccuuauccucccuccuuuugcugcuuuuaguugcauccggugacgcugacaugaaggggcacuucgauccagccaaaugccgcuacgcccuggguaugcaggaucgcacgauacccgauagugacauuucagcaaguuccucuuggagugauagcacggcagcaagacauuccagauuggagaguucugacggcgauuag

SEQ ID NO: 79799 - RNA, 237 nt, Artificial Sequence
  derived and/or modified sequence
augggucccgaagcauugucuucccuacugcugcugcugcugguugccuccggagaugcugauaugaagggccauuuugaccccgccaaguguagguacgcuuuggggaugcaagaccgcacuauuccagacuccgacaucucugcuucuuccucauggucugacucuaccgccgcccgacauucaagacuugagagcagcgauggcgacggcgcaugguguccugccgguucuuag

SEQ ID NO: 79800 - RNA, 384 nt, Artificial Sequence
  derived and/or modified sequence
augggcccagaagcacuguccucucuucuguugcuguugcugguugccuccggggaugccgacaugaaaggacauuucgauccagcuaaaugccguuaugcacugggcaugcaagaccggaccauccccgauucggacaucagcgccuccaguuccugguccgauucaacagccgcccgccauucccgccuagaaagcucugauggggacggggccuggugcccugcggguuccguguuuccgaaggaagaggaauauuugcagguagauuuacagagacugcauuugguggcacugguaggaacccaaggucggcacgcuggaggacugggaaaggaauucucuagaagcuaucgccugcgcuacucucgcgacggcagauag

SEQ ID NO: 79801 - RNA, 348 nt, Artificial Sequence
  derived and/or modified sequence
augggucccgaagcccuuucuagucugcuguuacugcuguuaguggccuccggagaugccgauaugaaaggacauuuugauccagcuaaaugucgcuaugcccuuggaaugcaggaccgaacaauucccgauucagacaucucugccagcuccucuuggagcgauucaaccgcggcuaggcacucucgucuggaguccucagacggugauggugcauggugccccgcaggaucuguuuuucccaaggaagaggaguaccuccagguggauuugcagaggcugcaccugguugcccuggucggaacucagggucgucacgcagggggacuuggaaaggaauucuccuag

SEQ ID NO: 79802 - RNA, 432 nt, Artificial Sequence
  derived and/or modified sequence
auggggccugaagcacucuccuccuuacuucugcugcuccuggucgcauccggcgaugcagauaugaaaggccauuuugauccagccaaguguagguacgcacugggcaugcaggauagaacuaucccagauucugauauuagcgccagcucauccuggucggacuccacugcagcaaggcacucacggcuagaaucuucagacggcgacggagcaugguguccugcugggaguguuuuuccaaaagaagaagaauauuuacaagucgaccuucaaagacugcaucucguggcacuggugggaacccagggucgccacgccgguggauuaggcaaagaauucucuaggagcuacaggcugagguauucacgagacggaaggagguggaugggguggaaagacagauggggacaggagguuaucagcgguuag

SEQ ID NO: 79803 - RNA, 339 nt, Artificial Sequence
  derived and/or modified sequence
augggucccgaagcccugucaagccuguuacuucuccugcucguugccaguggcgacgcugauaugaaaggacauuuugacccugcaaaaugccgcuaugcacuugguaugcaggacagaacgauuccagauagcgacaucucugccuccuccucauggucggauucuacugcagcgaggcauucccgacuggaaagcagugauggcgacggggcuuggugucccgccggauccguauucccaaaggaagaagaauaccugcaaguugaucugcagagauugcaucugguggcucucguggggacucaaggaaggcaugcugggggacuugggaaauag

SEQ ID NO: 79804 - RNA, 513 nt, Artificial Sequence
  derived and/or modified sequence
augggcccagaggcacucagcaguuuacugcuccugcugcugguugcaucuggggacgcggauaugaaagggcacuuugaccccgcgaaaugccguuacgcacuaggcaugcaagaucguacuauaccugauagcgacauaagcgcaagcucuaguuggucugacucaacugcugcucgccacucuagacuggagucauccgauggugacggugccugguguccugcuggcucuguauucccaaaggaagaagaguaccuccagguugaucuccaacgguugcaccucguggcacuggucggcacccagggucgccaugccggcggacuagguaaggaguuuagcagaucuuauagauugcgguacagccgggacgggcggagguggaugggcuggaaagaccguuggggccaggagguuaucaguggaaaugaggacccagagggaguugugcuaaaggacuuaggcccacccaugguggcucgacugguccgcuuuuauccaagagcauag

SEQ ID NO: 79805 - RNA, 417 nt, Artificial Sequence
  derived and/or modified sequence
auggguccugaggcacuuuccagcuuacuacugcucuugcucguggccuccggagacgcagacaugaaaggccauuucgaccccgcuaaaugucguuacgcccucgggaugcaagacaggacaauucccgauucggacaucagugcuaguucuaguuggucggauucaacggccgcacggcauucuagauuggaaucuagcgacggagacggugccuggugcccugcgggcucuguuuuuccgaaggaagaggaauaucuccaaguugaccuccagaggcugcaucucguggcucugguggguacucagggcagacaugcagguggauuagggaaagaguucucccgcucauacaggcugagauacucucgggauggacgaagguggaugggauggaaagauaggugggggcaguag

SEQ ID NO: 79806 - RNA, 156 nt, Artificial Sequence
  derived and/or modified sequence
augggcccagaggccuuguccagcuuacugcuccuucugcucguggccucaggcgaugcagauaugaaaggacacuuugaccccgccaaaugccguuacgcuuuagggaugcaggaccgcaccauuccagauuccgacaucagugccucgucguag

SEQ ID NO: 79807 - RNA, 417 nt, Artificial Sequence
  derived and/or modified sequence
auggguccagaagcucugagcagcuuguuguuauugcuacucgucgccuccggggacgcagauaugaagggacauuucgacccagccaagugucgauacgcccuugggaugcaggacaggacuaucccagacagcgacauuagugcguccucaaguuggucugauaguaccgcugcccgccacagucgucucgagagcucagacggggauggagcuugguguccggccggaagcgucuucccgaaagaggaggaguauuuacagguugauuugcagcgauuacaccugguugcccugguuggaacucagggucgucaugccggcggguugggcaaagaguuuagucgcagcuaccgcuugagauauucaagggacggucguagauggaugggauggaaggaucgguggggucaguag

SEQ ID NO: 79808 - RNA, 258 nt, Artificial Sequence
  derived and/or modified sequence
augggcccagaggccuugucuagccugcuucuccuacuacuaguggcuagcggugacgccgauaugaagggccacuuugauccagcuaaaugccgauacgcauugggaaugcaggaccguacaaucccggacagcgauaucucagccucaucauccuggagcgauucaacagcugcacgucacucucgucucgagucaucggauggcgauggugcuugguguccugcaggaagcgucuuucccaaagaagaggaauag

SEQ ID NO: 79809 - RNA, 732 nt, Artificial Sequence
  derived and/or modified sequence
augggccccgaagcccucaguuccuuguugcugcuuuuauuaguugccucaggugacgccgauaugaaaggacacuucgaucccgcaaaaugccgguacgcccugggcaugcaagaccguacgauuccagacagugacaucagugcuucuaguucauggagcgauuccacagcugcccggcacucgcgucuugaaagcuccgauggcgacggcgcuuggugucccgccggaagcguuuuucccaaagaggaggaguaccuccaaguugaucugcagaggcuccaccucguggcgcucgucggcacgcaggggagacaugcagguggccuggguaaggaauucucgagaucauauagacucagauacucacgagacgguagaagauggaugggcuggaaagacagguggggccaggaggugaucagcgguaaugaagacccggaaggggucguccugaaagaccuggggcccccuaugguggcucgacuggugcgcuucuauccgcgagccgacagagugaugucagucugucucaggguagagcuguacggcugcuuauggagggacugcaguaugggugucugggccuccuggcagauggugugguggggauggaugacgcugggacgaguccggaguugcgggagcggacaggcuaugacuaugugggauggagccacaacagcaucaccaguugcuauguggagguggagcuuaagccucacaggguag

SEQ ID NO: 79810 - RNA, 732 nt, Artificial Sequence
  derived and/or modified sequence
auggguccagaggcuuuaagcaguuugcuacuauugcugcucgucgccuccggggacgcagauaugaaagggcacuuugaccccgccaaauguagguacgcucuaggaaugcaggauaggacaauaccagacucugauauuucugcgucaagcuccuggagugauuccacagcagcgcggcacucaagacucgagaguuccgacggggacggcgccugguguccagcaggcagcguuuucccuaaagaagaggaauaucuccagguggaucugcagcggcugcaucuggucgccuuagugggaacucagggacggcaugccggggggcuaggaaaggaguuuagucgcaguuauagacucagauacucacgggacggacggcguuggauggguuggaaagaucgguggggucaggagguuauaucuggcaacgaggacccagagggcgugguccugaaggacuuggguccacccaugguugcuagauuggugagguucuauccgagagccgauagagucaugucaguguguuuaagaguggaacuguacggcuguuuguggagagauugcuccaugggcgugugggccaguuggcagaugguaugguggggcuggaugacccugggcagagugagguccugcggguccgggcaggcuaugacaaugugggacggagcaaccacagcgucgcccgucgcaauguggagauggucuuugagcuugacuggcuag

SEQ ID NO: 79811 - RNA, 732 nt, Artificial Sequence
  derived and/or modified sequence
augggaccugaggccuuaaguucauugcugcugcuucugcucgucgcuucaggagaugcggacaugaagggacacuuugacccugccaagugucgguacgcucugggaaugcaagaucggaccauuccagacuccgacauuuccgcuagcaguuccuggucggacagcacggccgcucggcauagcaggcucgagagcucugauggggauggagccuggugcccagccgguucagucuuuccaaaggaggaggaauaccugcagguggaucugcaacggcugcaucucgucgcucugguaggaacccaaggaagacacgcugggggacuugguaaggaauucagucgaucuuauagacugagauacucaagagacggccgcagguggauggguuggaaggauagaugggggcaggaaguuaucuccggcaacgaagaucccgagggcguuguacugaaagaucugggcccccccaugguugcacgacugguaagauuuuacccccgggcagacagggucaugagugugugucugcguguggagcuauacgggugccuguggagagacuguuccaugggugugugggcuucuuggcagauggugugguggggcuggaugacacucggaagggugcgcagcugcggauccgggcaagcuaugacgaugugggacggagccacuaccgccucucccgucgccauguggagauggucgcugagccucacaggcuag

SEQ ID NO: 79812 - RNA, 732 nt, Artificial Sequence
  derived and/or modified sequence
augggaccugaggcuuugaguucacugcuguuacuacuccuuguugccucuggcgaugcugacaugaagggacacuuugauccagcaaaguguagguacgcccucggaaugcaggaccgcacaauaccggauagcgacauuucugcaagcuccuccuggagugauagcacagcugcuaggcauagccgacuggagagcagugauggcgauggugcguggugccccgcaggcuccgucuuuccuaaggaggaagaguaucuccaggucgaucuccagaggcugcaucucguugcacucguaggcacucaaggaagacaugcggggggacuggggaaagaguuuagccgguccuaccgguugcguuacaguagggacggacggagauggaugggauggaaagaucgcuggggacaggaagugauaagcggcaaugaggauccagaaggcguggugcugaaggaccucggacccccuaugguggcucggcucguucgauuuuacccacgagcugaucguguaaugucuguuugcuugcguguggagcuguauggaugucuguggcgugauuguucgaugggcgugugggcaucuuggcagauggucugguggggcuggaugacucuaggucguguacggucgugugggucuggccaggccaugaccaugugggauggcgccaccacugcaucccccguggcaauguggcgcuggagucucucccugaccgguuag

SEQ ID NO: 79813 - RNA, 444 nt, Artificial Sequence
  derived and/or modified sequence
augggcccugaagcacucucgucucugcucuuauuauuacugguggcuucuggcgaugcugauaugaagggccacuucgaucccgccaaauguagguaugcacugggaaugcaggaccguaccaucccagacuccgauauuucggccucuaguaguuggucagauucgacugccgcuagacauucuaggcuagagucuucagauggggacggggcauggugucccgccggcaguguguuucccaaggaagaagaguauuuacagguggauuuacagagacugcacuuaguagcauuggucggcacacaaggcagacacgcaggagggcugggaaaggaauuuucucgaucguacaggcuccgauacucuagggacggcaggcgguggaugggauggaaggaccggugggggcaggaagugaucucaggcaaugaggauccauag

SEQ ID NO: 79814 - RNA, 444 nt, Artificial Sequence
  derived and/or modified sequence
auggggcccgaagcacuaaguagcuugcugcuccuccuccucguagcuucaggcgaugccgauaugaaaggccacuucgauccggcuaaauguagauaugcacuagggaugcaggaucgcacgauuccagacagugacauuucggcgucuucgucuugguccgacuccaccgcggccaggcauucucggcuagaaucuucggacggcgacggcgccuggugcccugccggcagcguguuuccaaaagaagaggaauauuugcaaguagacuugcagcggcuucaucuuguggcgcucgucggcacacagggaagacacgccgguggucugggcaaggaauuuucacgaaguuaucgccuuagguauucuagagacggacgaagauggaugggcuggaaggaucgguggggacaagagguuauaucaggcaacgaagaccccuag

SEQ ID NO: 79815 - RNA, 444 nt, Artificial Sequence
  derived and/or modified sequence
auggguccagaagcacugucaagucuucucuuacuucuccugguggccagcggcgaugccgauaugaagggacauuucgauccagccaaauguagauaugcucucgggaugcaggacaggacgaucccagacucugauaucagcgcaagcaguagcuggucagacucuaccgcugccagacauagucgccucgaaaguucagauggggacggggcuuggugccccgccggaagcguguuccccaaagaagaagaauaucugcaaguagaccuccagcgacuccaccucguagcccucgugggaacacagggaagacacgcuggcggccugggaaaggaguuuagcagaagcuauaggcuaagguauaguagagauggaaggagauggaugggcuggaaggaccgguggggacaggaagucauaaguggcaaugaggaucccuag

SEQ ID NO: 79816 - RNA, 420 nt, Artificial Sequence
  derived and/or modified sequence
augggcccagaggcuuuaaguucacuacuauuacugcuccugguagccagcggugaugcugacaugaaagggcauuuugacccugccaaguguagguaugcucucgggaugcaagaccggacuauccccgauucagauauauccgccaguucuuccuggagugacuccacagccgcgcgccacucacgccuugaaucaagugauggugauggcgcauggugcccagccggcuccguguuccccaaagaagaagaguaccugcaggucgaccuccagaggcugcaccuggucgcccuugucgggacucagggacgacaugcagguggccuggguaaggaauucaguagaucuuauagacugcgguacagucgggacggaagaagauggaugggauggaaagauagaugggggcaggaauag

SEQ ID NO: 79817 - RNA, 420 nt, Artificial Sequence
  derived and/or modified sequence
augggaccugaggcucuuucuucucuucuccuccugcuacugguggccucaggcgaugcugauaugaaaggccacuucgaccccgcuaagugcagguacgcccuggguaugcaggacagaacaauucccgacuccgacauuagcgcaagcucuuccuggucugauuccacagcagcccgccacucacgucuugagagcagugauggcgauggggcuuggugcccugccggauccguguucccuaaagaggaagaauaucuccaaguggaucuucagagacugcaucuggucgcucuugugggaacccaggguagacacgcaggcggguuaggaaaggaauucagucgcagcuacagacuaagauauucucgggacgggagaagauggaugggcuggaaggaccgguggggccaggaauag

SEQ ID NO: 79818 - RNA, 420 nt, Artificial Sequence
  derived and/or modified sequence
augggucccgaggcacuaagcucacucuuacuccuauuacuaguugcuucuggcgacgcugauaugaaaggccacuuugaccccgcgaaaugcagauaugcgcuuggcaugcaagauaggacaauuccugauuccgauaucuccgccagcucuaguuggagugacuccacugcugccaggcauucaaggcuggagaguagcgauggcgacggcgccuggugcccugcgggaagcguguucccuaaggaggaagaguacuugcaaguugaucugcagaggcugcaccuuguggcucuugugggcacacaggguagacaugcgggagggcugggcaaagaguuuucuagguccuauaggcuucgguauagcagagauggccggcgguggaugggcuggaaggauagaugggggcaggaguag

SEQ ID NO: 79819 - RNA, 630 nt, Artificial Sequence
  derived and/or modified sequence
augggaccugaagcccugucuagccuguugcuuuuacugcucguggccaguggagacgccgacaugaaggggcacuuugauccugccaaaugcagauaugcacucgggaugcaggacaggaccauuccugacagcgacaucuccgccuccucuuccuggagcgauucaacagcagcuaggcacucaaggcucgaaaguucugauggggacggugccuggugccccgccggaucagucuuuccaaaggaagaagaguaucugcaaguugaucuucagaggcuccaccucguagcccucguggguacacaggguagacaugccggaggccucggcaaagaauuuucccgaagcuacaggcuucgguacucaagggauggacgccgauggauggguuggaaagauagauggggucaggaagugauuuccgggaaugaagauccagaagguguuguguugaaggacuuaggaccacccauggucgcccgacucgugcgcuuuuacccaagagcugauagggucaugaguguuugccugcguguggagcucuaugggugcuuauggcgagaugguuuauugaguuacaccgccccaguaggacagacaauguacuuauccgaagcuguuuacuag

SEQ ID NO: 79820 - RNA, 630 nt, Artificial Sequence
  derived and/or modified sequence
augggaccugaagcgcuuuccucacugcugcugcuguuauuaguugcauccggcgaugcagacaugaagggacacuuugacccagccaagugccgguaugcucugggcaugcaggacagaacgaucccugacagcgauauuucagccaguaguucuuggagugauucuacagcugcccgucauucacggcuugaaucuagcgauggugauggugcuugguguccggcaggcuccguguucccuaaagaggaagaauaccugcagguggaccuucagcgccuucaccugguugcucuagucgggacacaggggagacacgccggaggacuuggcaaggaguuuucacguagcuauaggcuuagauauucuagagauggcaggagauggaugggauggaaggaccggugggggcaggaggugaucucagguaaugaagauccugaagggguggugcucaaggaucuugggcccccuaugguggcaagauugguaagauuuuacccccgcgcagaccgugugaugucagugugucuacggguugaguuguacggaugccuuuggagagacgguuuacugucauacaccgcaccgguuggccagacuauguaccucucagaagccguuuauuag

SEQ ID NO: 79821 - RNA, 630 nt, Artificial Sequence
  derived and/or modified sequence
augggacccgaagcucuuagcagccuucuguuacuucuguuaguugccucaggggacgcugacaugaaaggacacuuugauccagcaaagugcagguaugcuuuggguaugcaagaccggacuauccccgauagugacauuucagccucuucuucauggagugauaguacagcagcgagacauucaaggcuagagagcucagacggagacggugcguggugucccgccggcagcguauuuccgaaggaggaagaauaccuccaagucgacuuacagagacuacaucuuguggcuuuagucgggacucagggaagacacgcaggagggcuugggaaggaguuuagccggucauauaggcuucguuauucucgcgauggucguagguggauggguuggaaggauagauggggucaggaggugaucaguggcaacgaagaccccgagggcgucguuuugaaggaccugggaccuccuauggucgccagauuaguccgauucuacccuagggcugauagagugaugaguguuuguuugcguguggaacuguaugguugucuguggcgggauggccugcugucauacacagcaccagucggccagaccauguacuuguccgaagcuguuuauuag

SEQ ID NO: 79822 - RNA, 804 nt, Artificial Sequence
  derived and/or modified sequence
auggggccugaagcucugaguucacugcuacugcuucuucuuguugccuccggcgacgccgacaugaagggccauuuugacccggccaaguguagauaugcuuugggaaugcaagauagaaccauccccgacuccgacaucucagccucuuccaguuggucugauagcacagcugcccgacauucccgccucgaaucauccgacggagacggagcuuggugucccgcaggcucaguguuccccaaggaggaagaguaccugcagguggaucuccagaggcugcaccucguagcgcuggucggcacucagggaagacaugccggaggguuggggaaggaauuuagcagauccuauagauugagguauagucgagacggaagaagguggaugggauggaaagaccgcuggggccaggaggugauuagcggaaacgaggauccagaaggugugguauugaaggaucugggccccccaaugguugcucgucugguccgguucuacccacgcgcugaucgcguaaugucaguaugccugagaguggagcuuuaugguugucucuggcgggacgggcuguugucauacacugcuccugucggucagaccauguaucucucagaagcaguauacuuaaacgauaguacauacgacggucacacagugggcggccuccaauauggaggguuaggacagcuggcagauggagugguaggcuuggacgacuuucgcaaaucucaggagcuaaggguguggcccgguuaugacuaugucggcuggucaaaucauucuuucagcucgggauacuag

SEQ ID NO: 79823 - RNA, 630 nt, Artificial Sequence
  derived and/or modified sequence
augggccccgaggcacugucaucuuugcuguuguuguuguuaguggccucuggugacgccgacaugaaaggacacuucgacccugcaaagugccgauaugcucugggaaugcaggauaggaccauuccagacucagauauuagugccuccucuaguugguccgauagcacugcagcacgccacucuagauuggagucaagcgauggggauggggcauggugucccgcaggauccguuuuuccgaaagaagaagaguaccuccagguggacuuacagcgccuacaccugguugcccuuguggggacucaaggaaggcacgcagguggccuggggaaggaauucagucguuccuauaggcuuagauauagcagagauggcagaagguggaugggguggaaagauaggugggggcaggaagugaucuccgggaaugaagaucccgaaggagugguacugaaagauuugggacccccaaugguugcucggcugguaagguucuaucccagggccgauagagugaugucagugugccugcggguggaacucuauggcugcuuauggcgcgacgggcuacuguccuauacugccccuguaggacagaccauguaccucucagaagcagucuacuag

SEQ ID NO: 79824 - RNA, 501 nt, Artificial Sequence
  derived and/or modified sequence
augggcccugaggcucuguccagccugcuguuacuccuccucguggcaucaggugacgccgacaugaaaggccauuucgacccugccaagugccgcuacgcccugggaaugcaggauaggaccaucccagauucugacauuucagcuagcucuucguggucugauucuacugcugcacggcacucuagguuggaaaguucugacggagauggagcguggugcccugccggaagcguguucccuaaagaggaagaauaucuccaaguugaucuccagcgacugcaucuuguggcccuaguugguacucagggacgacaugcaggagggcuggguaaagaauucucucguagcuaucggcuacgguauucucgcgaugguagacgguggauggguuggaaagaccgguggggccaagaggucauaagcggcaaugaggauccugaaggcguggugcugaaagaucugggaccuccuaugguggcucgccuugugcguuuuuag

SEQ ID NO: 79825 - RNA, 462 nt, Artificial Sequence
  derived and/or modified sequence
augggacccgaagcacuaaguucccugcuccucuugcuguugguggccucuggugaugcagauaugaagggacauuucgacccugccaaaugcagauaugccuuggggaugcaggacaggacaaucccugauagugauauaucagcaaguucgagcuggagugacucaaccgccgcccgccauucacgccuggaaagcuccgacggugacggcgcuuggugcccagcuggaucuguguucccaaaagaggaagaguaccuacagguugaccuccagagacuccaucucgucgcucuugugggcacccaaggccggcacgccgggggguuagguaaggaguuuagucgaucuuacagacuacgguacagcagggacggucggcgauggaugggauggaaggacaggugggggcaagaaguaaucucagggaaugaagauccugaaggggugguuuugaaauag

SEQ ID NO: 79826 - RNA, 630 nt, Artificial Sequence
  derived and/or modified sequence
augggacccgaagccuugagcucucugcuacuguugcuccuagucgcgucuggagacgcagacaugaagggccauuuugaccccgccaagugucgauaugcccuuggaaugcaagauaggacaauuccagauuccgacauuucagcgucuagcucuuggucugacucgacugccgcacggcacagccggcuugaaaguagcgacggggacggugccugguguccggcaggaucuguguuucccaaagaagaagaauaucugcaggucgaccuucagcgccugcaucugguggcccuaguggggacgcaaggccgacacgccggaggacucggaaaagaauucucucgaucuuauaggcuucgauauucacgggauggcagaagauggaugggauggaaagauaggugggggcaggaaguaaucucugguaaugaggacccagaggguguuguccugaaagaucuugggccucccaugguugcacggcuggugcgcuucuauccucgcgccgauagaguuaugagcgugugucugagaguggaauuguacggcugccuuuggcgcgacggucuguugaguuacacagcuccugucggacagacaauguaccuauccgaagcugucuauuag

SEQ ID NO: 79827 - RNA, 501 nt, Artificial Sequence
  derived and/or modified sequence
augggcccagaagcacucucaucccugcugcuguuauuauuggucgcaagcggcgacgccgauaugaagggacacuuugacccugccaaauguagguacgcuuuagggaugcaagaccguacgauuccagacucagacauuagugccucuaguucuuggagugauaguacagcggcucgccacucacggcuggagucauccgacggagauggugcauggugucccgccggcagcguguuuccuaaagaggaagaauaccuucaggucgauuugcagagacuccauuuaguggcucuggucggcacacaaggcagacacgccggagguuuaggaaaagaauuuucucgcagcuaccgacugcguuauagucgugacggacggcgauggaugggauggaaggaucguuggggccaggaagucauuucagggaacgaagacccagaaggaguuguguugaaggaucuagggccucccaugguggcuagauugguacgcuucuag

SEQ ID NO: 79828 - RNA, 444 nt, Artificial Sequence
  derived and/or modified sequence
augggaccagaagcccucucuucacuucuguugcuucugcuggucgcgagcggggacgcagacaugaaaggccacuucgaccccgcaaaguguagauaugcucuaggaaugcaagauaggacgauucccgacucugauauuucugccaguagcuccuggagcgacaguaccgcugcgcgucacucuagacuagaguccagcgauggcgacggcgcgugguguccugccggaagcguauucccaaaggaagaagaguaccuccaagucgaucuccagcgccuucaucuagucgcucugguggguacucaggggcgccacgcaggcggcuuagguaaggaauuuagucggucuuacaggcucagauauucuagggacggcaggcgguggaugggauggaaggaucggugggggcaagaaguaaucagugguaaugaggauccauag

SEQ ID NO: 79829 - RNA, 732 nt, Artificial Sequence
  derived and/or modified sequence
augggaccugaagcccugucuagccugcugcucuuauugcucgucgcuagcggcgacgcugauaugaaggggcacuuugaccccgccaaaugcagauaugcucucggaaugcaagacaggacuauccccgacucugauauuagcgccuccucaagcuggagcgacaguaccgcggccagacacucaagacuggaguccuccgauggagauggagcaugguguccagcagguaguguguuuccuaaggaagaagaauaucuucaaguggauuugcagcgacuccaucugguggccuuggugggcacccagggacggcacgccggaggucucgggaaggaauuuagcaggaguuauaggcugcgcuauuccagagacggaagacguuggaugggcuggaaagacagguggggacaagaggugaucuccgggaaugaggauccugaaggugugguauuaaaagauuuggggcccccuauggucgcgcgcuuaguaagguucuauccgagggccgaucgggucaugagcgugugccugcgggucgaacuguauggaugcuuguggagggacuguaguaugggcguaugggcuuccuggcagaugguaugguggggguggaugacuuuggguagggugagguccuguggcagcggccaggcuaugacuaugugggacggggcgacgaccgcauccccagucgcaauguggagguggagccuuagucugaccggguag

SEQ ID NO: 79830 - RNA, 501 nt, Artificial Sequence
  derived and/or modified sequence
augggcccugaggcacuuucuagccuucuguuguugcuccucgucgccagcggcgaugcugacaugaaaggacauuucgacccugcuaaaugucgauaugcgcucggaaugcaggacaggacuauucccgacagcgacaucagugccucguccaguuggagugauuccaccgcugccagacacuccagacucgagaguagcgacggcgauggggccugguguccugcuggcuccguguuuccuaaagaagaagaguaucugcaaguagaccugcaacggcugcaccugguggcucuuguugggacucaagggagacacgcugguggguuaggcaaggaauuuagcagguccuacaggcuaagguauagcagggacggucggagauggaugggauggaaggacagguggggccaagaagucaucagugguaaugaagaucccgaaggcguuguguugaaggaucugggacccccuaugguggcuagauuggugagguucuag

SEQ ID NO: 79831 - RNA, 420 nt, Artificial Sequence
  derived and/or modified sequence
augggcccagaagcucuaucaucacugcugcuguuacugcuuguugcaaguggcgacgcggacaugaaaggacacuucgacccugccaaauguagguacgccuugggaaugcaagauagaaccaucccagauagugacauaucugcuucaucuaguuggucagauaguacugccgcucggcauucccggcuagagucaucagauggggauggcgcuuggugucccgcaggaaguguguucccuaaggaagaggaguaccuucaaguugauuugcaacgccugcaucuggucgcgcuggucggaacgcaggggcgacacgcuggggggcuagggaaagaguuuagccgcucauaucggcucagguacaguagagacggacgaagauggaugggauggaaggaucgguggggacaggaguag

SEQ ID NO: 79832 - RNA, 444 nt, Artificial Sequence
  derived and/or modified sequence
augggcccugaagcgcugagcagccuguuauugcuacuacucgucgccucuggcgacgcagauaugaagggccauuuugaccccgcuaaauguagauaugcucugggaaugcaggacagaacaauuccugacucagauaucagcgcuuccuccagcuggagugauaguacugccgcacgacacuccagacucgaaaguagcgacggcgauggugccuggugcccagccggcucaguguucccaaaagaggaagaguaccuacagguggacuuacaaagacugcaucugguugcccuagugggaacgcaaggaagacacgccgggggcuuaggaaaagaauucagcagaaguuauagauugagguauagcagggaugggagaagauggauggguuggaaggaccgcuggggacaggaggugauuaguggaaacgaagacccguag

SEQ ID NO: 79833 - RNA, 861 nt, Artificial Sequence
  derived and/or modified sequence
auggggcccgaagcacugagcucauuacuccuuuuacugcucguagccuccggugaugcagacaugaagggccacuucgauccagccaaauguagauacgcccugggaaugcaggauagaacaaucccugacagcgacauuagcgccucaaguucuugguccgauucgacugcagcucggcauucucgccuggaauccagugacggggacggagcguggugcccagcugguucagucuuuccuaaggaagaggaguaucuccaaguugaccugcagagacugcaccucguggcacugguggggacacaggggagacacgcuggaggacuaggaaaggaguuuucgcggucuuaucgcuugcgauauucucgggaugggcggcgcuggaugggauggaaagaucgaugggggcaagaggugaucagcggaaaugaggauccagaaggcguuguacucaaggaccugggacccccuaugguggcaagacuggucagauucuauccucgcgcugaccgcguuaugagcguuugccucagaguggaguuguacgggugccuuuggagggauggacuauuaaguuauacugccccugugggacaaacaauguaucugagugaggcaguauaucucaaugacucuaccuacgacggucauacuguggguggccugcaauauggugguuuaggucagcucgccgauggugugguaggccuggaugacuuucgcaaaucccaggaguuaaggguguggccaggcuaugauuacgucggauggucaaaccacucuuucagcagcggauauguggaaauggaauuugaauuugacagacuuagggcuuuccaggcgaugcaggugcacuag

SEQ ID NO: 79834 - RNA, 732 nt, Artificial Sequence
  derived and/or modified sequence
augggcccagaagcuuugucuucucuacugcuccuucugcuuguggcaaguggggacgcagacaugaagggacauuuugaucccgccaaaugccguuaugcccucggaaugcaagaucgcaccauucccgacucagauauuuccgccucuuccucauggagcgauuccaccgcggcucgucacagucggcuugagaguagcgacggggacggagcuugguguccugccgggagugucuucccuaaagaagaagaguacuugcagguagauuugcagcgguuacaucuaguggcucuggucgggacucagggccgucaugcuggagggcugggcaaggaguuuagccgaucguauaggcucagauacucacgagaugguaggagauggaugggauggaaggaucgauggggucaggaggugauuuccgguaaugaggacccagagggggugguguugaaagauuugggcccacccaugguugccagacuggucagauuuuauccuagagccgaucgggugaugucagugugucucaggguggaacuuuaugggugcuuguggcgcgauugcucaaugggagugugggcuucauggcagauggugugguggggcuggaugacucugggaagagugcgcagcugugggucaggacaggcaaugacuaugugggauggagccacuacggcaaguccuguggccauguggcgguggucucuuucucuuacaggcuag

SEQ ID NO: 79835 - RNA, 369 nt, Artificial Sequence
  derived and/or modified sequence
augggucccgaagcucugagcucauugcuacugcugcuacucguugcgucaggugaugccgauaugaaggggcacuuugaccccgcuaagugccguuacgcacugggcaugcaggaccgcacaauuccggauagcgauauuuccgccuccucauccuggagcgacagcaccgccgcuagacacucgagguuggaaucuagugauggggauggggcgugguguccggccggcaguguuuucccuaaagaagaagaguaccuccaagucgaccugcagagacuccaccuuguggcuuuagucggaacacaggggcgucacgcugggggguugggaaaagaguuuaguaggucuuacagauuaagguauuag

SEQ ID NO: 79836 - RNA, 483 nt, Artificial Sequence
  derived and/or modified sequence
augggaccugaagcccugucaaguuugcugcuacuccuacuggucgcauccggagaugcugauaugaaaggccauuuugacccggcaaagugucgcuaugcacugggaaugcaggacagaacaauacccgacagcgacauuucugcaucaucuuccuggagcgauucgaccgcggcucgucacucaaggcuggaguccucagacggagacggggccugguguccugcaggauccguguuccccaaagaggaggaguaccuucagguggaccuacaacggcuccaucucguagcacuggucgguacccagggacgccacgcuggaggccuugguaaggaguucuccagguccuacaggcugagauauucuagagacggucgcagauggaugggauggaaagaucguuggggccaagaagugauauccggaaaugaagaccccgagggaguaguacuaaaggaucuggguccccccaugguguag

SEQ ID NO: 79837 - RNA, 399 nt, Artificial Sequence
  derived and/or modified sequence
augggaccugaggcacugucaagucuguugcuacugcuacucgucgccuccggggacgccgacaugaagggccauuuugaccccgccaaaugccgguaugcccuagguaugcaggauaggaccauccccgauuccgauauaucagcuuccucaucaugguccgacucaaccgcagcccgccauucaaggcuggagagcuccgauggggacggugcauggugccccgccggcucagucuuucccaaggaagaggaauauuugcaaguggaccugcagagacugcaucuuguggcgcucguggggacacagggucgacacgcuggcggacuugggaaggaauuuaguaggucauaccgccugagauacagcagggacggccgcagauggaugggaugguag

SEQ ID NO: 79838 - RNA, 306 nt, Artificial Sequence
  derived and/or modified sequence
auggggcccgaggccuuaucaucacuucuuuuacuccucuuaguugccucuggugacgcagacaugaaaggucauuuugacccagcuaaaugccgauacgcacuuggaaugcaggacagaaccauaccagacagcgacaucagcgcaucauccucuuggucugacucaaccgcagcaaggcacucucgucuggaaaguagcgacggcgauggagccuggugucccgccggaagcguguucccaaaggaggaggaguaccugcaagucgaccuucagcgccuucaucucguggcacucgugggguag

SEQ ID NO: 79839 - RNA, 384 nt, Artificial Sequence
  derived and/or modified sequence
augggacccgaggccuugaguucccugcuguuacucuuacucguugccuccggugaugccgauaugaagggccauuucgaucccgcaaagugcagauacgcacuggggaugcaagauagaacgauaccugauagugacauaucugccucauccaguuggucagacaguacagcggcaaggcauagccgccuggagagcuccgacggcgauggagcauggugcccggccggaucuguguuuccuaaggaagaggaguaccugcaaguagaucugcagagauuacaccuuguagcacuugucggaacgcaaggcaggcacgcgggcggacugggcaaagaauucucgaggucguacaggcugagauacucaagggauggaagauag

SEQ ID NO: 79840 - RNA, 348 nt, Artificial Sequence
  derived and/or modified sequence
augggucccgaagcccuuucuagucugcuguuacugcuguuaguggccuccggagaugccgauaugaaaggacauuuugauccagcuaaaugucgcuaugcccuuggaaugcaggaccgaacaauucccgauucagacaucucugccagcuccucuuggagcgauucaaccgcggcuaggcacucucgucuggaguccucagacggugauggugcauggugccccgcaggaucuguuuuucccaaggaagaggaguaccuccagguggauuugcagaggcugcaccugguugcccuggucgggacacaaggacgacaugcuggaggucuaggaaaagaauuuaguuag

SEQ ID NO: 79841 - RNA, 432 nt, Artificial Sequence
  derived and/or modified sequence
auggggccugaagcacucuccuccuuacuucugcugcuccuggucgcauccggcgaugcagauaugaaaggccauuuugauccagccaaguguagguacgcacugggcaugcaggauagaacuaucccagauucugauauuagcgccagcucauccuggucggacuccacugcagcaaggcacucacggcuagaaucuucagacggcgacggagcaugguguccugcugggaguguuuuuccaaaagaagaagaauauuuacaagucgaccuucaaagacugcaucucguggcacuggugggcacccagggucggcacgccggaggucucgggaaggaauucucuagaaguuauagacucagauacagcagggacgggcggagauggaugggcuggaaagaucggugggggcaggagguaauuucaggguag

SEQ ID NO: 79842 - RNA, 339 nt, Artificial Sequence
  derived and/or modified sequence
augggacccgaagcccugaguucgcugcuccugcucuuacuugucgccagcggugaugcugauaugaaaggccacuucgauccagccaagugccgcuaugcacugggcaugcaagaccggaccauuccagacagcgauauuucagcauccuccucguggucagauuccacggcagcacgucacucaaggcuagaaaguucagauggagacggcgcauggugcccagcagggagcguauuucccaaagaagaggaguaucugcagguagaccuccagcggcugcaucuugucgcgcuggugggcacacaaggcagacacgcaggaggcuuagggaaguag

SEQ ID NO: 79843 - RNA, 513 nt, Artificial Sequence
  derived and/or modified sequence
augggucccgaggcccuuagcagccugcugcuucuacuguuaguagccagcggcgacgccgacaugaaagggcauuucgaccccgccaaaugcagguacgcccuuggcaugcaggauaggacuaucccugauagcgauauuuccgccagcaguuccuggucugacucaacggccgcccgccauagccgcuuagagucuuccgauggcgauggagcuugguguccggccggaaguguuuuuccuaaagaggaggaguacuuacagguugaucuacaaagacuucaccuugucgccuuaguggggacucagggucgccaugcgggcggucugggcaaggaguucucacguagcuauagacuaagguacucucgggacgggcggagguggaugggauggaaggaccgcuggggccaggaagucauaucugggaaugaagacccugaaggaguuguuuugaaggauuuaggccccccaaugguggcaagacugguuagauucuauccaagggcguag

SEQ ID NO: 79844 - RNA, 417 nt, Artificial Sequence
  derived and/or modified sequence
augggaccugaggcucuuagcuccuuacugcuucuucuucugguggcaaguggcgaugccgauaugaagggacacuucgacccggcaaaguguagauacgcccuugguaugcaggacaggacaauuccggacagcgauaucucagcauccaguagcuggucugauagcacagccgcgaggcauucucgauuggaauccucugauggcgacggcgcuuggugcccugccggaaguguguuuccuaaggaggaagaauaucuccaaguggaucuucagcgacugcauuuaguggcauuggugggcacucagggacggcacgcgggcgggcuaggaaaggaguucucaaggaguuacagacugagguacagccgagauggaaggcgguggaugggguggaaagaucgaugggggcaauag

SEQ ID NO: 79845 - RNA, 417 nt, Artificial Sequence
  derived and/or modified sequence
auggguccugaggcucugaguagccuuuugcuccugcugcugguugccuccggagaugccgacaugaaaggccacuuugauccggcgaagugccgcuacgccuuggggaugcaagaucgaacgauucccgauagcgauauuucugcuagcucaagcuggucagacucaaccgccgcccgacacucuagacucgaaucaucugacggcgacggugccuggugcccggcuggaagcguuuucccgaaagaagaggaguaccuucagguggacuugcagagacugcaccuuguggcccucguuggaacacaaggaaggcacgcaggcgggcucggaaaggaauucagccguucguacaggcuuagauauagcagggauggucgcagauggaugggguggaaagauagguggggccaguag

SEQ ID NO: 79846 - RNA, 732 nt, Artificial Sequence
  derived and/or modified sequence
auggguccugaggcgcucucaucacuacugcugcuucuuuuagucgccucaggcgaugcugacaugaagggccauuucgaccccgccaaguguagguacgcucucggcaugcaagauagaaccaucccugacuccgacauuagcgcauccuccuccuggagcgauagcaccgccgcccgccacucucgacuggagucuuccgacggcgauggcgccuggugcccagcagguuccgucuuucccaaagaagaggaauaccuccaagucgaccuucagagauugcacuuagucgcacucgugggaacacagggcaggcaugcaggagggcugggcaaagaguuuucccggaguuauaggcuacgauacagccgcgacggccggagauggaugggguggaaggaucgguggggucaagagguuaucucuggaaaugaagaucccgagggcgucguuuuaaaggaccucggcccuccuaugguagcuagacucguaagauucuacccgagggcugaucgggucaugucaguuugucuaagaguagaguuauacgggugccuguggcgggauuguaguaugggagucugggcaaguuggcagauggugugguggggguggaugacucugggacggguacgaucauguggguccgggcaagcaaugacaaugugggauggcgcuaccaccgcaagccccgucgcaauguggcgcuggucccuuucucugacugguuag

SEQ ID NO: 79847 - RNA, 732 nt, Artificial Sequence
  derived and/or modified sequence
augggacccgaagcucugucaaguuugcuguugcuucucuuagucgcuuccggcgaugcugauaugaaagggcacuucgacccggccaaauguagauaugcccugggcaugcaggaucgaaccauucccgacagcgacaucuccgcuuccucuucuuggagugacuccacagcugcacgacacucccgacuggagucauccgacggugacggugccuggugucccgccgguucggucuuuccaaaagaagaagaauaccugcaaguggaccuucagcgccugcaccucguugccuuggucggcacccagggucggcacgccggagggcuaggaaaagaauuuucgcgcaguuaccgucugcguuauucacgugauggcaggagauggaugggguggaaagaucgguggggucaagaagugauuagugggaaugaggaucccgaaggggugguacugaaggaucuaggccccccaaugguggcucguuugguuagauuuuauccaagagcugaucgcgucauguccguuugccuuagggucgaacuguauggaugucuguggagggauuguagcaugggagugugggccucuuggcaaauggugugguggggauggaugacuuugggccgaguuagaagcuguggcucuggacaggccaugaccaugugggacggugcgacuaccgcuucaccaguugcaauguggcgcugguccuugucuuuaacgggauag

SEQ ID NO: 79848 - RNA, 732 nt, Artificial Sequence
  derived and/or modified sequence
augggucccgaagcacucucuucucugcugcuguugcugcugguugcuucuggggaugccgacaugaaaggacauuucgauccggcuaagugccgcuacgcccuaggcaugcaggauaggacaaucccugacucagauauuuccgccuccaguucuuggucagacagcacagcggcccggcauuccagacucgagucaucagacggcgauggugcuuggugccccgccgguucaguguuccccaaagaagaggaauaccuacaaguagaucuucagaggcugcauuugguugcucuugugggcacacagggucggcacgccgggggguuggguaaagaguuuucgcguucauaucgccuaagauauagcagagacggacggagauggaugggcuggaaggacagauggggacaagaggucauuagcggcaaugaagaccccgagggugugguauugaaggacuuaggacccccgaugguagcacgccuaguacgauuuuauccacgggcugaccgggucaugucugucugccugcgcguggaguuguauggaugcuuguggagggauuguaguauggguguuugggccuccuggcaaaugguaugguggggauggaugacacuggggagagugcgcaguugcgguagcgggcaggcaaugaccaugugggauggcgcaacaacagcuucucccgucgcaauguggcgguggagcuuaagucugacaggcuag

SEQ ID NO: 79849 - RNA, 732 nt, Artificial Sequence
  derived and/or modified sequence
augggacccgaagcucuuucuucucuccuacuccuauugcuuguugccuccggcgaugcugauaugaagggccacuuugacccugccaagugucgcuacgcuuugggcaugcaggacaggacuauuccggauucugacauuucagcauccuccuccuggagcgacucuacugccgcgagacacagccggcuggaaaguuccgacggagauggugcauggugcccugcaggaucugucuuuccaaaagaagaggaguaccuccaagucgaucugcaacgacuucacuuaguggcgcugguagggacgcagggaaggcaugccggaggacugggcaaagaauucagucguucuuaucgccugcgguauagucgugauggacggcgauggauggguuggaaggacagauggggccaagaggugauuucaggcaaugaagauccagagggcgucgucuuaaaagaucugggaccuccuaugguggcgcgguugguccgcuuuuacccccgagccgacagggugaugucugucuguuugaggguggaguuauacggaugucucuggagagauuguucuaugggagucugggcuaguuggcagauggugugguggggauggaugacuuuagguagagugcggagcugcggcucagggcaagccaugacaaugugggacggggcgacaacagcuucacccguggcaauguggagguggagccucucccugacuggauag

SEQ ID NO: 79850 - protein, 171 aa, Artificial Sequence
  derived and/or modified sequence
MRHNLGGNLGDPRARAVSVPLGGRVARFLQCRFLFAGPWLLFSEISFISDVVNNSSPALGGTFPPAPWWPPGPPPTNFSSLELEPRGQQPVAKAEGSPTAILIGCLVAIILLLLLIIALMLWRLHWRRLLSKVLESHPRTRSPGLVGIRPTPLPVSPMALVHLCEVDSPQD

SEQ ID NO: 79851 - DNA, 516 bp, Artificial Sequence
  derived and/or modified sequence
atgcggcacaacctgggcggcaacctgggcgacccccgggcccgggctgtctccgtgccattagggggtcgagtggcccgctttttgcagtgtcggtttctcttcgctggcccctggcttctgttctcggaaatctcttttatctctgatgtggtgaacaattcatccccggcgttaggcggcacctttcctccggccccatggtggccaccgggccccccgcctacaaatttttcaagtctggagctagagccccgcggccagcagcccgtagccaaggcagaggggagcccgacagcaatcctgattggctgtttggttgcaattatcctgttattgctgctgattatcgccctgatgctgtggagactgcattggcggcgactcctgagtaaggtgttagagagtcacccccgaacccgctcaccagggcttgtgggcatacgacctacaccgctgcccgtctcccccatggctctcgtgcacctttgcgaagtggactccccccaggattag

SEQ ID NO: 79852 - DNA, 516 bp, Artificial Sequence
  derived and/or modified sequence
atgcggcacaacctgggcggcaacctgggcgacccccgggcccgggccgtatccgtcccactcggcggccgcgtcgctcgcttcctccaatgtcgatttcttttcgctgggccttggttgctattctcagagattagctttatcagtgatgtggtgaataatagttcccctgcacttggtgggacctttccccccgccccctggtggcctcctggcccgcctccaacaaacttctcgagccttgaactggagccccgcggacagcaacccgtagcaaaggccgagggaagccccacagccatcttgatcgggtgcctcgtcgccatcatcctcctactacttctgataattgcgttgatgctctggcgactgcactggcgcagactgctctcgaaggtgctggagtcccatcctcggaccaggtctcccggtctggtgggaatccgacccaccccgctgcctgtctctccaatggcgctggtccacctgtgtgaggtggatagtccccaggattag

SEQ ID NO: 79853 - DNA, 516 bp, Artificial Sequence
  derived and/or modified sequence
atgcggcacaacctgggcggcaacctgggcgacccccgggcccgggctgtcagtgtgcccctgggtggtagagttgccagattcctgcaatgtaggttcctcttcgctggtccttggttactgttctcagaaatttcattcattagtgatgttgtgaacaatagttctcccgcgttaggcgggacctttccacccgctccgtggtggcctcctggcccacctccaactaattttagcagcctggaactggagcctcgtggccagcaaccagtagccaaagccgaaggttcacctactgccattctgatcggctgtctagtcgctattatcctgcttttattgctgataatcgctctgatgctgtggagactccactggagaaggcttctctctaaggttcttgagtctcatccccgaactcggtcccctggcctcgttgggatccgacccacacctctgcccgtttctcctatggcacttgtgcacctgtgtgaggtggattcaccccaggattag

SEQ ID NO: 79854 - DNA, 1482 bp, Artificial Sequence
  derived and/or modified sequence
tctgaggccgtctacttaaatgactctacttatgatggccacacagtgggagggttgcagtatgggggtctgggtcaactcgccgatggggttgtgggactggacgactttcgcaagagccaggagttgagagtctggcctggttatgattacgtcgggtggtccaatcactcattctcctccggctacgtggagatggagtttgagttcgataggcttcgagctttccaggcaatgcaagttcattgtaacaacatgcacactttaggcgctcggttacctggcggagtcgaatgcaggttccgacgcggtccagccatggcatgggaaggtgagcccatgagacacaatcttggtggtaatctgggcgatccgagggcgagagctgtgtctgtcccactgggcggtagggttgcccgttttctacagtgtcgttttctatttgcgggaccctggctcctgttcagcgaaatctcttttattagcgacgtggtcaataacagctccccggcacttggaggtacttttcccccagcaccgtggtggccaccagggccacctccgaccaactttagttccctagaattggaacctcgaggacaacagcctgtcgctaaggccgaggggtcaccgactgccatcctgatagggtgtctggtggcaatcatcctcttgctactcttgattattgccttgatgttgtggcggctgcactggaggcggctgctgtccaaggtgttggaatcccaccctagaaccaggtcacccggattggttggcattaggcccactcctctgcctgtgtctcctatggccttacgctgctgctctccaatacagccaactgcttcgttttggccactaacacccgtaccactggaggcccgagctccacctcatcctcctggtcctaaccctcctaccccacgtggagtgaccggcggtaacacttatgctgtccctgccctgccccctggagccgtgggggacggcccacctagggtggattttccgcgttcaaggttgcgcttcaaggaaaaattaggtgagggccagtttggcgaagtccatctgtgtgaggtggactcacctcaggatctggtaagtctggattttccccttaacgttcggaaaggccaccctctgcttgtagccgtgaagatactcagacctgacgccactaagaacgctaggaacgactttctgaaggaagtgaagatcatgagccggctgaaagaccctaatatcatcagactgcttggggtctgcgtacaagatgacccattatgtatgatcacggactacatggagaacggcgacctgaatcagttcctaagcgctcatcagctcgaggataaagccgcagagggggcacccggagatggacaagccgcacaaggtcccaccatctcttatccaatgttgctgcatgtggctgcacaaattgcctctggaatgcgttatctggctacacttaactag

SEQ ID NO: 79855 - DNA, 1482 bp, Artificial Sequence
  derived and/or modified sequence
agcgaggcagtgtacctgaatgacagtacatatgatggccatacagtgggtggtttacagtatggcggtctgggacagctggccgacggcgttgtgggcctcgacgactttcgtaagagtcaggaacttcgcgtgtggccgggatatgactatgtagggtggtcaaatcattctttctcttcaggctatgtcgagatggagtttgaatttgacagattgcgcgcttttcaggctatgcaggtgcattgcaacaatatgcataccctgggtgcccgtttgcccggaggcgttgagtgtcgctttcggagaggaccggcaatggcctgggaaggtgagcccatgaggcacaatttaggcggaaatttgggcgatcccagggcgcgtgctgtcagtgtgccgttaggaggccgagtggcccgatttctccaatgtaggttccttttcgccggtccgtggctcctgttctctgagatctctttcataagtgatgtggtcaacaattcgtcgcccgctctcggaggtactttcccccctgcaccgtggtggcctccagggcctcctcccaccaatttcagctctctggaattagaaccccgaggacagcagcctgtggccaaagccgagggatcccccacagcaatcttgattggatgcctggtggctatcatcttattgctcctgctcataatcgccctgatgctgtggcggctgcattggcgacggctcctgtctaaggtgctggaatcacaccccagaacgagaagtccagggctggtgggcattcggcctacccccctcccagtttcccctatggctctacggtgctgtagccccattcaacctacagccagcttctggccgctgaccccagtgcccctggaagcaagagcacctcctcacccacctggacctaacccccctacgcctcgcggtgtgactgggggtaatacgtacgctgtgcccgctcttccacccggtgcggtgggggacggacctccgcgagtggacttcccacgatcccggctcaggttcaaggagaagctaggggagggccaatttggagaagtgcacctgtgtgaggttgactctccgcaagacctggtatcactggactttcccttaaatgtgaggaagggacacccactgctcgtggccgtgaagattttgcggcctgatgcaactaagaacgccaggaacgacttcttaaaggaggtaaaaattatgagccggctgaaagacccaaacattatcagactgttaggcgtatgcgtccaggacgatccactctgcatgattaccgactatatggagaacggtgacctgaaccaatttctctctgctcatcagctcgaggacaaagccgcagagggggcaccaggagatggacaggccgctcaaggccctacgatctcataccctatgctcctgcacgtggccgctcagatcgcgtcaggaatgcggtacttagctactctgaactag

SEQ ID NO: 79856 - DNA, 1482 bp, Artificial Sequence
  derived and/or modified sequence
tcagaggccgtgtacctgaatgacagtacatatgacggacatacagtggggggtctccagtacggaggcttaggccagctggccgacggtgttgtcggcctggatgatttccgaaagtctcaggagttgagggtctggccgggttacgactatgtgggctggtccaatcacagcttctctagtggatacgtggagatggagtttgagtttgaccggctgcgggcattccaagcaatgcaggtccattgcaacaacatgcacaccctgggcgcacgactacccggtggggtggagtgccggtttcgacgcggtcccgctatggcttgggaaggcgaaccaatgaggcacaacctaggcggaaaccttggcgacccccgagctcgggcagtctcagtgccccttggcggaagggtggcccgtttccttcagtgtcggttcctgtttgctgggccatggctgctgttctccgaaatcagcttcatctcagacgtggtgaataattccagcccggcattaggtggtacttttccccctgccccttggtggcctccgggaccgcctccaacaaactttagctctttggagctcgagcccagaggacaacaacctgtcgccaaagctgagggaagtcctaccgctatcctgatcgggtgcctcgttgccattatcctcctcctgctgttaataattgcacttatgctctggagacttcactggcgacgactgctgagcaaggtgctcgaaagccacccaagaacacgctctcccggtctcgtgggcataaggcccactccccttccagtctctcctatggcccttcgctgttgctctccgatccagcctactgccagcttttggccactgactcccgtacctttggaggcccgagccccaccacaccctccagggccaaatcccccaacccccagaggtgtgaccggtgggaatacatacgctgtccctgctctgccacccggagctgtcggcgatggtccaccccgagtggatttccctcgttcaagactccgctttaaagaaaagctgggcgaaggtcagtttggcgaagtccatctctgcgaggtggactctccccaggacctcgtgagtttagactttccccttaacgtgcggaagggacacccattactggtggccgtaaagattctgagacccgacgctacgaaaaacgccaggaatgacttcttgaaagaggtcaaaattatgagtaggctaaaggaccccaacatcattcgcctgctgggcgtgtgcgtccaggatgacccactctgtatgattacggattacatggaaaacggggaccttaaccagttcttaagcgcccatcaactggaggacaaggcggctgaaggcgctccgggagacgggcaggcggctcagggacccaccatttcctaccccatgctccttcatgtcgccgcacaaatcgcgagcggcatgcgctatctggcaaccctgaattag

SEQ ID NO: 79857 - DNA, 1482 bp, Artificial Sequence
  derived and/or modified sequence
tctgaggccgtctacttaaatgattctacatatgacggtcatacggttggagggctccagtacggtggcttaggccagctggctgacggagttgtgggcctggacgactttcggaagagccaggaactgagagtgtggcctggctatgactatgtgggctggtccaaccactctttttctagcgggtacgtagagatggagttcgagtttgaccgactgagagcctttcaggccatgcaagtccactgtaataacatgcatacactgggagcgcgactgccagggggtgttgaatgcagatttcgccgagggccagctatggcatgggaaggggagcccatgaggcataatctgggcggaaatctgggagatcctagagccagggccgtctccgtgccccttggcggtcgggtggctcggttcctacaatgtagatttcttttcgctggtccgtggctgttgttctccgaaatttcctttatctccgacgtggttaataattcttctccagcgttggggggtaccttccctccggcaccctggtggcctcctggtcccccaccaaccaacttttcctctttagaacttgagccccgtggacagcagcctgtggctaaggccgaaggctcccctacggctatactcatcggctgccttgtcgccattattttgctgttgcttttgatcatagcccttatgctctggcggctgcattggcgccgtctgctaagtaaagtgctggaaagccacccccgaaccagaagccctgggctcgtcggcatcaggccaaccttgcttcccgtgagcccaatggcactcagatgctgctctcccatccagcccactgcgtcattctggcccttgacgcccgtgcccctggaagcgcgagcccctcctcacccacccggtccaaatcctcccacccccagaggagttactggcggaaatacgtacgcggtccccgctctaccgcctggggctgtgggagacggcccacctcgggtggatttccctcgctctaggctcaggtttaaggagaagctgggcgaaggacagtttggcgaagttcatttatgcgaggttgactctcctcaggacctagtctctttagattttccactgaatgtgagaaaagggcatcccctcctggttgccgtgaagatcctccgacccgatgccactaaaaatgcaagaaacgacttcctgaaagaggtcaagatcatgtccagattgaaggacccaaacatcatccggctgctgggagtgtgcgtgcaggatgacccgctttgcatgattacggattatatggaaaatggagatctcaaccagttcctttctgcacatcaactggaggataaggctgcagagggagccccaggcgacgggcaggcagctcaaggcccaaccatcagttacccaatgttgttgcacgtagccgcacagatagcatctgggatgcgataccttgcaaccctgaactag

SEQ ID NO: 79858 - DNA, 1479 bp, Artificial Sequence
  derived and/or modified sequence
tctgaggccgtgtacctcaacgactccacctatgacggacataccgtgggcggactgcagtatgggggtctgggccagctggcagatggtgtggtggggctggatgactttaggaagagtcaggagctgcgggtctggccaggctatgactatgtgggatggagcaaccacagcttctccagtggctatgtggagatggagtttgagtttgaccggctgagggccttccaggctatgcaggtccactgtaacaacatgcacacgctgggagcccgtctgcctggcggggtggaatgtcgcttccggcgtggccctgccatggcctgggagggggagcccatgcgccacaacctagggggcaacctgggggaccccagagcccgggctgtctcagtgccccttggcggccgtgtggctcgctttctgcagtgccgcttcctctttgcggggccctggttactcttcagcgaaatctccttcatctctgatgtggtgaacaattcctctccggcactgggaggcaccttcccgccagccccctggtggccgcctggcccacctcccaccaacttcagcagcttggagctggagcccagaggccagcagcccgtggccaaggccgaggggagcccgaccgccatcctcatcggctgcctggtggccatcatcctgctcctgctgctcatcattgccctcatgctctggcggctgcactggcgcaggctcctcagcaaggtcctagagagccacccccgtaccaggagccccggcctcgtgggaatccgccccactccgctccctgtgtccccaatggctctgcgttgctgctctccaatccagcctaccgcctccttctggccacttacgcccgtccccctcgaggcccgggcccccccacacccgcctgggccaaacccaccaacacccaggggcgtcaccgggggcaacacctatgctgtgcctgcactgcccccaggggcagtcggggatgggccccccagagtggatttccctcgatctcgactccgcttcaaggagaagcttggcgagggccagtttggggaggtgcacctgtgtgaggtcgacagccctcaagatctggttagtcttgatttcccccttaatgtgcgtaagggacaccctttgctggtagctgtcaagatcttacggccagatgccaccaagaatgccaggaatgatttcctgaaagaggtgaagatcatgtcgaggctcaaggacccaaacatcattcggctgctgggcgtgtgtgtgcaggacgaccccctctgcatgattactgactacatggagaacggcgacctcaaccagttcctcagtgcccaccagctggaggacaaggcagccgagggggcccctggggacgggcaggctgcgcaggggcccaccatcagctacccaatgctgctgcatgtggcagcccagatcgcctccggcatgcgctatctggccacactcaac

SEQ ID NO: 79859 - DNA, 516 bp, Artificial Sequence
  derived and/or modified sequence
atgcgccataacctgggcggaaatctcggggatccgagagctcgggctgttagcgtcccattaggaggcagggtggcccgttttcttcagtgtcggtttctgtttgccggaccttggctgctattctctgagattagcttcattagcgatgtagtgaataacagcagtcctgcgctggggggtaccttcccaccagctccttggtggccacccggtccaccccctacaaacttctcaagtctggaattagagcctcgaggtcagcagccggtggctaaggccgaaggatcccctacagctattctcattggctgcctcgtagcgattatcctcctactgctcctgatcatcgctttgatgctgtggagactgcactggcggagactcctcagtaaggtgcttgaaagccaccctcgtacgcgctctccaggactggtggggatccgaccaacaccactgcccgtgtcaccgatggccctggtgcacctgtgtgaggtagacagtccccaagactag

SEQ ID NO: 79860 - DNA, 516 bp, Artificial Sequence
  derived and/or modified sequence
atgcgccacaacctgggaggcaatctcggggatcctcgcgcaagggctgtttctgtgcccctgggaggtagagttgccagattcttacagtgtagatttctgttcgcaggcccttggcttctgttcagtgaaatctcctttataagcgacgtcgtgaataactcctcaccagccttaggtggtactttcccacctgcgccttggtggccgccaggccctccccctaccaatttctcctcgctggagttggagccacgcggacaacagccagttgccaaagcagaagggagcccaacagcgattcttattggctgtctggtcgccattattctgctgcttctgcttattatcgctcttatgctgtggagactccactggcgccgactgctttcaaaggtcctcgaatctcaccctcggactcgaagcccaggactcgttggaatcaggcccacccccctccctgtctccccgatggctctggtgcacctatgcgaagtggattcaccccaagactag

SEQ ID NO: 79861 - DNA, 516 bp, Artificial Sequence
  derived and/or modified sequence
atgcggcacaatctcgggggaaacctgggtgacccacgcgctcgcgcagtgtctgtccccctgggcggaagagtcgccagatttctgcagtgccggtttttgtttgctggtccttggctactgttcagtgaaattagcttcatcagtgatgtggtgaacaatagtagcccagcgcttggcggaaccttcccacccgctccctggtggccccctggtccgccacccaccaatttcagttcactggagctggaaccgcgtggccaacagccagttgccaaagcggaaggctcacccacagccatacttattgggtgcctggtagcgattatattattgctgcttctcatcatcgcactgatgctgtggaggctgcactggaggaggctactaagcaaggttctggagtctcatccacgcaccagaagtcccggactggttggaattagaccaacgcccctgccagtgagccccatggcccttgtccacctctgtgaagttgattcaccccaggattag

SEQ ID NO: 79862 - DNA, 516 bp, Artificial Sequence
  derived and/or modified sequence
atgcgccacaacctgggtggcaatttaggcgaccccagggctcgcgcagtgagcgtacccctcggtggcagggtggcgagatttctgcaatgcagatttcttttcgccggtccctggctcctattttccgaaatatctttcatcagcgacgtggtgaataactcctcgcccgctctcggcggaacttttccaccggctccatggtggccacccggaccacccccaaccaatttcagttccctggagctcgaacccagaggtcaacagcctgttgcaaaagcagagggatcccctacagccatactgatcggatgtcttgtggccatcatcttgctgttgttgctgattattgccctgatgctgtggagactgcactggagaaggttactgtctaaagtgcttgaatcccatcccaggacgcggtcgccgggacttgtgggcattagacctacacccttaccagtctcaccgatggctctggtgcacctctgtgaggttgattcgcctcaggattag

SEQ ID NO: 79863 - DNA, 1479 bp, Artificial Sequence
  derived and/or modified sequence
tctgaggccgtgtacctcaacgactccacctatgacggacataccgtgggcggactgcagtatgggggtctgggccagctggcagatggtgtggtggggctggatgactttaggaagagtcaggagctgcgggtctggccaggctatgactatgtgggatggagcaaccacagcttctccagtggctatgtggagatggagtttgagtttgaccggctgagggccttccaggctatgcaggtccactgtaacaacatgcacacgctgggagcccgtctgcctggcggggtggaatgtcgcttccggcgtggccctgccatggcctgggagggggagcccatgcgccacaacctagggggcaacctgggggaccccagagcccgggctgtctcagtgccccttggcggccgtgtggctcgctttctgcagtgccgcttcctctttgcggggccctggttactcttcagcgaaatctccttcatctctgatgtggtgaacaattcctctccggcactgggaggcaccttcccgccagccccctggtggccgcctggcccacctcccaccaacttcagcagcttggagctggagcccagaggccagcagcccgtggccaaggccgaggggagcccgaccgccatcctcatcggctgcctggtggccatcatcctgctcctgctgctcatcattgccctcatgctctggcggctgcactggcgcaggctcctcagcaaggtcctagagagccacccccgtaccaggagccccggcctcgtgggaatccgccccactccgctccctgtgtccccaatggctctgcgttgctgctctccaatccagcctaccgcctccttctggccacttacgcccgtccccctcgaggcccgggcccccccacacccgcctgggccaaacccaccaacacccaggggcgtcaccgggggcaacacctatgctgtgcctgcactgcccccaggggcagtcggggatgggccccccagagtggatttccctcgatctcgactccgcttcaaggagaagcttggcgagggccagtttggggaggtgcacctgtgtgaggtcgacagccctcaagatctggtcagtcttgatttcccccttaatgtgcgtaagggacaccctttgctggtagctgtcaagatcttacggccagatgccaccaagaatgccaggaatgatttcctgaaagaggtgaagatcatgtcgaggctcaaggaccccaacatcattcggctgctgggcgtgtgtgtgcaggacgaccccctctgcatgattactgactacatggagaacggcgacctcaaccagttcctcagtgcccaccagctggaggacaaggcagccgagggggcccctggggacgggcaggctgcgcaggggcccaccatcagctacccaatgctgctgcatgtggcagcccagatcgcctccggcatgcgctatctggccacactcaac

SEQ ID NO: 79864 - DNA, 1482 bp, Artificial Sequence
  derived and/or modified sequence
tctgaagccgtgtacctgaatgacagcacctacgacggtcacaccgtcggaggcctgcagtatggcgggctgggccagctggcagatggtgtggtaggactagacgacttcaggaaaagccaagagctaagggtctggcccggctatgactacgtgggttggagcaaccactccttctcgagcggatatgtcgaaatggagtttgagtttgataggctacgagcgttccaggctatgcaggtgcactgtaataacatgcataccttgggagctcggctccccgggggggtggagtgccggttccgcagaggaccggccatggcatgggagggggaaccaatgcggcataacttaggaggaaatctgggagacccccgagctagggcagtgtccgttcccctaggcggacgggtggcacggttcttacaatgtcggttccttttcgccggtccctggctcctattcagcgagattagttttatatcagatgtcgtcaacaatagctctccagccctcggcggaactttcccaccagccccttggtggcctcctggaccacctcccaccaatttctcatcattagaattagaaccgagagggcagcagcctgtggccaaggctgagggttctcctacggcgatattgattggctgtctggtggcgatcatactattgctcctactaattattgctctcatgctgtggaggctccattggcgtagacttctctcgaaagtactggaatcccaccccagaacaagatccccaggcctagttggaataagaccgacccctcttcctgtctctcccatggctctgaggtgttgctcgccaatacaacctacagcatcattctggccactaacacctgtgcccttggaggcgcgcgctccacctcaccctcccgggcctaatccccccacaccaagaggggtgactgggggcaatacgtacgctgttcctgccttacccccaggcgcagtgggagatggccctcctcgcgtcgactttccccgatctagattgcgattcaaagagaaactgggcgaagggcagtttggcgaagtgcatctatgtgaagtggacagcccacaggatctcgtgagtctagattttccgctgaatgtgcggaagggtcacccactgcttgttgctgtcaagattcttcggccggacgccacgaaaaatgcacgaaatgactttctcaaagaagtcaaaataatgtccaggctgaaggaccctaacatcatacggttacttggcgtgtgcgtgcaggatgatcccctgtgtatgatcactgactatatggaaaacggcgacctgaatcaatttctctcggcccaccaacttgaggataaggctgccgaaggggccccaggcgacggacaggccgctcaaggacccacaatcagttaccccatgcttcttcacgtggcagctcagatcgcctcgggcatgcggtatctggccaccttaaactag

SEQ ID NO: 79865 - DNA, 1482 bp, Artificial Sequence
  derived and/or modified sequence
tccgaagcagtgtatctgaacgactcaacttacgacggccatactgtcggtggattgcaatatggcggactgggacagctggcagacggggtggtcggcctggatgattttaggaagtcccaggagcttcgagtttggcccggatacgactatgttggatggtctaaccactctttcagctctggctacgtggaaatggagttcgagtttgacagattgcgagcgttccaagccatgcaagtccactgcaacaacatgcacactctcggtgctcgtctcccaggtggggtggagtgcagatttcgcagaggacctgccatggcttgggagggtgaaccaatgaggcataacctcggcgggaacttaggcgatcctagagcccgcgcggtgtccgtgcctctcggaggcagagtggcaagatttctgcagtgccgatttctgtttgccggaccttggctgctgttctcagagatttcgtttatctcggacgtggttaacaatagcagccctgcattgggtgggaccttcccacccgctccttggtggccacccggcccacctcccaccaacttctcttcccttgaattagaaccaaggggacagcaacctgttgcgaaggctgagggttcgccgactgcaatcctgattgggtgtctggtagctattatactactactgttgttgattatcgctttaatgttatggcgtctccactggcgacgcttactttctaaggtgctcgagtctcatccgcgcaccagatctcccggcctggtcgggattcgcccaactcctcttccggtgtcaccgatggcgctgagatgctgttctcccatccagccaactgcaagcttttggcccttgacccccgtgccgctggaggctcgggcaccaccccacccacctgggcccaatccacctaccccccggggcgtcaccggcggcaacacatatgcagtgccagctttaccacctggtgccgtgggtgatggacctcctcgagttgactttcctaggtctagactcagattcaaagagaaattgggtgagggtcagtttggtgaggtgcacctttgcgaagtggactcaccccaggacttagtttcgctggatttcccactgaatgtgcggaagggacaccccctcctggtggctgtgaagatactgcgccccgatgcaacgaaaaatgccaggaacgattttttaaaggaggtaaaaatcatgtccagattaaaagatccgaacatcatcaggctgctcggggtatgcgtgcaagatgatccactgtgtatgatcacagattatatggaaaacggcgatctcaatcagttcctgtcagcccatcaactcgaagacaaagctgcagaaggcgccccaggagacggacaggccgctcaaggaccaaccatctcctatccaatgctgttgcacgtggctgctcagattgcgtctggcatgcgatatttggcaactctgaattag

SEQ ID NO: 79866 - DNA, 1482 bp, Artificial Sequence
  derived and/or modified sequence
tccgaggctgtgtaccttaatgactccacttacgatggacacaccgttggcggtcttcagtacgggggtctggggcagcttgctgacggcgtggttggcttggacgacttccggaagagtcaggagctccgagtgtggccaggctatgattatgtgggctggagcaaccattccttcagtagcggatacgtcgagatggaatttgagtttgatcgccttcgcgccttccaggccatgcaggtgcattgtaacaacatgcacaccctcggagcccgcctgcccggcggggtggaatgtaggttcagaagaggtccggcaatggcttgggaaggtgagccgatgcgacataacttgggagggaacttgggggatccacgcgcccgagctgtgtctgtaccactgggcggccgcgtggcaagatttttacagtgccgtttcctgtttgccggaccttggctcttattctcagaaatctccttcatctcagatgtggtcaacaattcatcaccagcccttgggggtacctttcccccggcgccttggtggccaccaggccccccacctaccaatttctcttctctcgagctagaacccagaggacagcaacctgtagccaaggccgaaggctcccccacagcaatcctcattggctgtctagtcgccataatcctgctgctcctgctgatcatcgccctaatgctgtggagactgcattggagaagattactctcgaaggtcctggaatcgcatcctcgcactagaagtcccggtctggttgggattcgtccaacccccttacccgtgtcacctatggccttgaggtgctgttcccccatccagcccaccgctagtttttggccacttaccccagtgcctctggaagcacgcgcacctcctcaccctcctggacccaatccccctaccccacggggtgttacaggaggaaatacatatgccgttccggctctgcccccaggggccgttggtgatggcccaccacgggtagactttcctagatcccgcctgagattcaaggagaagctgggcgaaggacagttcggagaagtgcacctctgcgaagtggactcccctcaggacctcgtgtctttggatttcccccttaatgtccgcaaaggacaccctctgttggtggctgtgaaaattctgagacccgatgcaacgaagaacgctcggaatgattttctaaaagaagtgaagatcatgagcaggctgaaggacccaaatattatcaggctcctcggtgtttgtgtccaggacgatcctctttgtatgataacagactatatggaaaatggagacttaaatcagtttctctcggcacaccagctggaagacaaagccgccgagggagcacctggggacggccaggcggcccaaggccccactatcagctaccctatgctcctgcacgtagccgctcaaatagcttccggcatgagatacctggccaccttgaactag

SEQ ID NO: 79867 - DNA, 1482 bp, Artificial Sequence
  derived and/or modified sequence
tccgaagctgtgtatctaaacgattctacatacgacggccatacggttggcggacttcaatatgggggtctgggacaactggccgatggagtggttggactcgatgatttccggaaaagccaagagctgcgggtttggcccgggtacgattacgtcggatggtcgaatcatagctttagcagcggatatgtagagatggagtttgagttcgaccgcctgcgggcattccaggcaatgcaggtgcactgcaacaatatgcacaccctgggcgccagactgcccggtggcgtcgagtgcagatttagacgtggaccggctatggcttgggagggcgaaccaatgagacacaatcttgggggaaatctgggcgacccacgcgctcgggcagtgtcagtcccactggggggtcgggtggcacggtttctccagtgtcgcttcttattcgcaggaccatggttactcttcagtgagataagtttcatcagcgatgtagtcaacaattcctcacctgccctggggggaacatttccaccagcaccttggtggccaccaggaccccccccgactaattttagctctctagagctggaaccaagagggcagcaaccagtggcaaaggcagaaggcagccctacggcgatcttaattgggtgcctggtcgccatcatcctgctcttgctgctcataatagcgctaatgctttggaggttgcattggaggcggctcctctctaaggtacttgaatctcaccctcgtacaagaagtcccggccttgtgggaatacgaccaacccttcttccagtaagccctatggctctacgttgttgctctccaattcaacccactgcttccttttggcctcttactcccgttccactcgaggctcgtgctcctccacatccaccaggacctaaccctccaacgccccgaggagtgaccggaggaaacacttatgctgtgcccgccttgcctcctggcgccgtgggcgatggaccccctcgcgtggatttccctcggtcccgcctgcgctttaaggaaaagctgggcgaaggacaatttggagaagttcatttgtgcgaagtggacagtccccaggacctagtttcactcgacttccctttgaatgtccggaagggtcatcctctcttggttgcggtgaaaatcctccggccagatgccaccaagaacgccaggaacgacttccttaaagaagtaaagattatgagcaggcttaaggaccctaacataatcaggctgcttggggtttgcgtgcaggacgacccgttatgtatgatcaccgattatatggagaatggcgacctgaatcaattcctgagcgcgcaccagttggaggacaaggctgccgagggagctcccggcgacggacaggctgcccaaggccctactatctcttaccctatgctgctccatgtggccgcgcagatcgcctctggcatgcgttatctcgcaactctgaattag

SEQ ID NO: 79868 - DNA, 516 bp, Artificial Sequence
  derived and/or modified sequence
atgcggcacaaccttggaggtaacttgggcgatcccagagcccgcgctgtttctgtgccacttggtggaagagtcgccagattcttacaatgcagatttctgtttgcgggcccttggctcctcttttctgaaattagctttattagtgacgtggtgaataactcaagtccagctctgggcggcacttttcccccagctccttggtggccccccggccctccccccacgaatttttcctccctggaactcgaacctagagggcagcagccagtagccaaagccgaaggcagtcctactgccatcctgatcggatgcctagtggccattatcctgcttttactcctgatcatcgccctaatgctgtggaggctgcattggcgccgtctgttgagtaaagtgttggagagccatccacgtacaagatctcctggcctggtcggcattcggccgactcctctccctgtgtcacctatggcgctcgtgcatctatgcgaagtcgattccccgcaggactag

SEQ ID NO: 79869 - DNA, 516 bp, Artificial Sequence
  derived and/or modified sequence
atgagacataatctggggggaaacctgggcgacccgcgcgcccgcgccgtctccgtgccattaggtggacgcgtagctcggtttctgcagtgtcgctttctctttgctgggccatggctgctttttagtgagataagctttataagtgacgtggttaataatagttctcccgccctcggcggcactttcccacccgccccatggtggccccctggccctcctccaacgaacttcagctctttggagctcgaaccacgcggccagcaacctgttgctaaagccgaaggcagtccaaccgctattctaattggatgccttgtggctattatactcctgctgctgttaataatcgcactgatgctgtggcgattgcactggaggaggctcctctctaaggtcctagagtcacacccccgaacaaggagtcctggactggtcggtattagacccacccctcttcctgtctctccaatggcactcgtccacctctgcgaagtcgactctcctcaggattag

SEQ ID NO: 79870 - DNA, 516 bp, Artificial Sequence
  derived and/or modified sequence
atgagacacaatttaggaggtaacttgggcgacccaagggctagagcagtttccgtgcctctgggcggacgggtagccagatttctccaatgtcgcttccttttcgcaggcccctggctgctcttttctgaaatctcctttatatccgatgtcgtgaataactcctcacccgcactcggaggcacttttccacccgcaccttggtggccgcccgggccaccgccgactaacttttcatctctcgagctggaaccacgaggccaacaacctgtcgccaaggccgaaggcagccctacagcgatcctcattggttgcttagtggcaatcattctgctgcttctcctgattattgctctcatgctttggagactgcactggcggcggctgctatcaaaagtcctggaatcccatccccgaactaggtctcctgggctggttgggattagaccgacccccctgcccgtcagtccaatggcactcgtccatttatgcgaggttgacagtccccaggactag

SEQ ID NO: 79871 - DNA, 516 bp, Artificial Sequence
  derived and/or modified sequence
atgcgacataatctaggtggcaacctcggagatcctcgtgcccgcgcagtatctgtgcccctgggagggcgagtcgctcgcttcctccagtgtcgctttctgtttgccggaccatggcttctgttcagcgagatctcatttatttccgacgtggttaataacagctctcccgctcttggaggtacttttcctcctgctccctggtggcccccaggaccaccccctaccaacttctcatcgctcgagttggaaccccggggccagcagcccgtggcgaaagctgaaggctctccaaccgccatattgattggatgtttagtcgcgataattctccttctgttgctgatcatcgcgctgatgctttggagactgcactggcgacgcctcctctcgaaggtgttagaatcccaccccaggacccgaagtccaggattagtgggcattagaccaacaccactccccgtgagccccatggcactcgttcacctctgtgaagtggactccccccaggactag

SEQ ID NO: 79872 - DNA, 1479 bp, Artificial Sequence
  derived and/or modified sequence
tctgaggccgtgtacctcaacgactccacctatgacggacataccgtgggcggactgcagtatgggggtctgggccagctggcagatggtgtggtggggctggatgactttaggaagagtcaggagctgcgggtctggccaggctatgactatgtgggatggagcaaccacagcttctccagtggctatgtggagatggagtttgagtttgaccggctgagggccttccaggctatgcaggtccactgtaacaacatgcacacgctgggagcccgtctgcctggcggggtggaatgtcgcttccggcgtggccctgccatggcctgggagggggagcccatgcgccacaacctagggggcaacctgggggaccccagagcccgggctgtctcagtgccccttggcggccgtgtggctcgctttctgcagtgccgcttcctctttgcggggccctggttactcttcagcgaaatctccttcatctctgatgtggtgaacaattcctctccggcactgggaggcaccttcccgccagccccctggtggccgcctggcccacctcccaccaacttcagcagcttggagctggagcccagaggccagcagcccgtggccaaggccgaggggagcccgaccgccatcctcatcggctgcctggtggccatcatcctgctcctgctgctcatcattgccctcatgctctggcggctgcactggcgcaggctcctcagcaaggtcctagagagccacccccgtaccaggagccccggcctcgtgggaatccgccccactctgctccctgtgtccccaatggctctgcgttgctgctctccaatccagcctaccgcctccttctggccacttacgcccgtccccctcgaggcccgggcccccccacacccgcctgggccaaacccaccaacacccaggggcgtcaccgggggcaacacctatgctgtgcctgcactgcccccaggggcagtcggggatgggccccccagagtggatttccctcgatctcgactccgcttcaaggagaagcttggcgagggccagtttggggaggtgcacctgtgtgaggtcgacagccctcaagatctggtcagtcttgatttcccccttaatgtgcgtaagggacaccctttgctggtagctgtcaagatcttacggccagatgccaccaagaatgccaggaatgatttcctgaaagaggtgaagatcatgtcgaggctcaaggacccaaacatcattcggctgctgggcgtgtgtgtgcaggacgaccccctctgcatgattactgactacatggagaacggcgacctcaaccagttcctcagtgcccaccagctggaggacaaggcagccgagggggcccctggggacgggcaggctgcgcaggggcccaccatcagctacccaatgctgctgcatgtggcagcccagatcgcctccggcatgcgctatctggccacactcaac

SEQ ID NO: 79873 - DNA, 1347 bp, Artificial Sequence
  derived and/or modified sequence
tctgaggccgtgtacctcaacgactccacctatgacggacataccgtgggcggactgcagtatgggggtctgggccagctggcagatggtgtggtggggctggatgactttaggaagagtcaggagctgcgggtctggccaggctatgactatgtgggatggagcaaccacagcttctccagtggctatgtggagatggagtttgagtttgaccggctgagggccttccaggctatgcaggtccactgtaacaacatgcacacgctgggagcccgtctgcctggcggggtggaatgtcgcttccggcgtggccctgccatggcctgggagggggagcccatgcgccacaacctagggggcaacctgggggaccccagagcccgggctgtctcagtgccccttggcggccgtgtggctcgctttctgcagtgccgcttcctctttgcggggccctggttactcttcagcgaaatctccttcatctctgatgtggtgaacaattcctctccggcactgggaggcaccttcccgccagccccctggtggccgcctggcccacctcccaccaacttcagcagcttggagctggagcccagaggccagcagcccgtggccaaggccgaggggagcccgaccgccatcctcatcggctgcctggtggccatcatcctgctcctgctgctcatcattgccctcatgctctggcggctgcactggcgcaggctcctcagcaaggtcctagagagccacccccgtaccaggagccccggcctcgtgggaatccgccccactccgctccctgtgtccccaatggctctggtgcacctgtgtgaggtcgacagccctcaagatctggttagtcttgatttcccccttaatgtgcgtaagggacaccctttgctggtagctgtcaagatcttacggccagatgccaccaagaatgccaggaatgatttcctgaaagaggtgaagatcatgtcgaggctcaaggacccaaacatcattcggctgctgggcgtgtgtgtgcaggacgaccccctctgcatgattactgactacatggagaacggcgacctcaaccagttcctcagtgcccaccagctggaggacaaggcagccgagggggcccctggggacgggcaggctgcgcaggggcccaccatcagctacccaatgctgctgcatgtggcagcccagatcgcctccggcatgcgctatctggccacactcaactttgtacatttttggggggagagacacagatttttacactaatatatggacctagcttgaggcaattttaatcccctgcactaggcaggtaataataaaggttgagttttccac

SEQ ID NO: 79874 - DNA, 1482 bp, Artificial Sequence
  derived and/or modified sequence
tctgaggcagtttatttaaacgattctacgtacgacggacacacagttgggggtctccagtatggtgggctgggacagctggccgatggtgtcgttggactggatgacttcaggaagagccaggagttgcgcgtctggcctggatatgactacgtgggctggtcaaaccatagtttctcctccgggtatgttgagatggagttcgagttcgacagattaagagcttttcaggccatgcaggttcattgcaataacatgcataccctaggggctagattaccaggaggagttgagtgtagattccgcagaggacccgctatggcctgggaaggcgagccaatgagacataaccttggcggaaatttgggggatccgagagcccgcgcagtgtccgttcctctcgggggtagggtggctcggtttcttcaatgccgtttcctgttcgctggtccttggttattgttctctgaaatcagctttattagtgacgttgtgaataattcatcccctgcattgggtgggaccttcccgcctgccccatggtggccccccggccctccccccactaatttttcaagcctggaattggagcccagaggacaacagcctgttgccaaagccgaagggtcccctaccgccatacttattggatgcctcgttgctatcattcttcttctcctgctgattatcgcccttatgctctggaggctgcactggcgccgcctgctgtcgaaggtgttagagagccacccccgcacgagatccccggggctggttggcatacgcccgacacccctgcccgtttccccaatggccctgagatgctgcagtcctatccagcccaccgcaagtttttggcccctgacccccgtgccacttgaggcccgtgctcccccccatcctccaggaccgaatccccccaccccgcgaggtgtgacaggcggcaatacttacgcagtccccgctctccccccaggtgccgttggcgacggacctccaagggtagactttcctaggtccagattaaggtttaaagaaaagctcggtgaaggccaattcggagaggtgcacctatgcgaagtggacagcccccaggacctggtctcactggacttccccttgaatgtgagaaaggggcacccgctcctggttgctgtcaaaatactgcgacccgatgcaactaagaatgcaagaaatgactttctcaaagaagtcaaaattatgtctcgtctgaaagacccaaatatcattaggctgctcggcgtttgcgttcaggacgatcccctctgtatgattaccgactatatggagaatggggacctcaatcagtttctctcagcccatcagctcgaagacaaagccgccgaaggtgcaccaggggacggacaggcagcccaagggccgacaatctcatatcctatgttgctgcatgtggccgcccagatcgcctcagggatgcggtatctggccactttaaactag

SEQ ID NO: 79875 - DNA, 1482 bp, Artificial Sequence
  derived and/or modified sequence
tccgaggctgtgtatctgaatgattcaacctacgacggacacaccgtgggcggattgcagtacgggggcctgggtcagctggctgacggcgttgtgggtctggacgattttcgcaagtcccaagaattgagggtgtggcccggctatgattatgtgggttggagtaaccatagtttctcgagtggttacgtcgaaatggaatttgagttcgaccgcttgcgagccttccaagccatgcaggtgcactgtaacaacatgcatacattgggtgcaagactccccggaggcgtggagtgtaggttcaggcgtggccccgcaatggcatgggaaggtgaaccaatgcgacataacctcggagggaatctgggtgaccccagagctagagcagtctcagtacccctggggggtagagtggcgcgttttttacagtgtaggtttctttttgcaggcccctggctcctcttttccgagatcagcttcattagcgatgtggtcaacaacagctctccggcgctgggcggaacatttccacctgccccctggtggcctcccggtccacctccgacaaattttagtagtttggaactcgaacccagaggccagcagcctgtggccaaggccgagggttcccccacagccattcttatcggctgtctcgttgctattattctcctcctactgctcatcattgcgttgatgctgtggaggttacactggaggcgcctgttgtcgaaagttctagaatcacatcctcgcactcggtctcctggtcttgttgggattaggcccaccccacttcctgtgtccccgatggccctccgatgctgttctcccatccaacctacagcatccttctggcctctgactcctgtacccctcgaggcacgagcacccccccacccacccggccctaatccacccaccccaagaggcgtgacgggcgggaacacctacgcagtcccagctctgccccctggagccgtcggtgacggccctcctcgcgtagacttccctcgatccaggctgaggttcaaggaaaaactgggagagggccagtttggcgaggtccacttgtgtgaagtcgactccccccaggacctggttagcttagacttccctttgaatgtcaggaaaggccacccattactagtggccgttaagattctaaggcctgatgccactaagaacgccagaaacgatttcttaaaggaggtcaaaatcatgagcagactcaaggacccaaacattatcaggttactgggcgtgtgcgtgcaggacgatcccttgtgtatgatcaccgactacatggagaatggagaccttaatcagtttttatccgcgcaccaattagaagacaaagcagccgagggtgccccgggcgacggccaagcggcgcagggccctactattagttacccaatgcttctacacgtggctgcccagattgcatccggcatgcggtatctggctaccctgaactag

SEQ ID NO: 79876 - DNA, 1482 bp, Artificial Sequence
  derived and/or modified sequence
agcgaagccgtttatctgaacgacagtacatatgacggacatactgtggggggacttcaatacggtggtttgggacagctcgcggacggggtggtaggcttagatgactttcgaaaaagtcaggagctaagggtgtggcccggttacgactacgttggttggtcaaatcattctttcagttctggttatgtcgagatggagtttgagttcgatcggctgagagctttccaagctatgcaggtccactgtaataatatgcataccttaggcgcaaggctcccaggcggcgtggaatgtaggttcagaagaggtccggcaatggcttgggaaggtgagccgatgcgacataacttgggagggaacttgggggatccacgcgcccgagctgtgtctgtaccactgggcggccgcgtggcaagatttttacagtgccgtttcctgtttgccggaccttggctcttattctcagaaatctccttcatctcagatgtggtcaacaattcatcaccagcccttgggggtacctttcccccggcgccttggtggccaccaggccccccacctaccaatttctcttctctcgagctagaacccagaggacagcaacctgttgctaaggcggagggctcacccacagccatactgatagggtgtcttgtcgctataatactcctgcttctcctgattatcgctcttatgctgtggcgcttgcattggcgtagattgctcagcaaagtcttagaatcccatcctcgaacccgctcacccggactggtaggtatccgacccaccccactgcccgtttcaccaatggccctgcgctgttgttctcctatccagccaaccgctagtttctggcctctgacccctgtgccgctagaggctcgggctcccccacacccacctggacccaacccccccactccgagaggcgtgaccggcggcaacacatatgccgtgccagccctcccgccaggggcagtgggcgatggcccaccccgtgtagatttcccgaggagcagactgcggttcaaagaaaagctgggtgaaggtcagtttggggaagtacacttgtgtgaagtcgactctcctcaggatcttgtgagtctagatttcccactgaacgtccgcaaaggacaccctcttctcgtggccgttaagattctgaggccagacgccactaaaaatgctcgtaacgatttcctgaaggaggtaaagattatgtcacgactcaaggatcccaatataatccggctcctgggcgtgtgtgtacaagatgatcccctatgcatgataaccgactatatggaaaacggggacctgaaccagttccttagcgctcaccaactggaagataaagctgcagaaggggcacctggggatggccaggctgcccaaggcccaaccatatcttaccctatgctattacacgtggctgctcaaatcgctagtggcatgcgctatctagctaccctcaattag

SEQ ID NO: 79877 - DNA, 1482 bp, Artificial Sequence
  derived and/or modified sequence
agcgaggctgtgtatctcaacgattcaacctacgacggacatacagttgggggtctgcagtacggagggctgggacagctcgcagatggcgttgtgggactggatgactttagaaaatcacaggaactgcgagtgtggccgggctatgattatgtcgggtggagcaaccacagcttttcttctgggtatgtggagatggaattcgaattcgacaggttgagagcctttcaggctatgcaggtgcactgcaacaacatgcatacattgggcgccagacttccagggggcgtggagtgtcggtttcgcagagggcctgccatggcatgggagggtgaaccaatgaggcataacctgggaggaaatctgggcgatccccgggctcgggctgtttccgtccctttaggtggcagagtcgctagatttctgcagtgtagattccttttcgcgggcccttggctgctattttcagaaatttctttcattagtgacgtggtgaataactccagcccagcactcggtggaaccttcccccctgccccctggtggccacccggcccccctccaactaatttctccagcctggaacttgagccccgaggtcagcaaccagtggcaaaggcagaaggcagccctacggcgatcttaattgggtgcctggtcgccatcatcctgctcttgctgctcataatagcgctaatgctttggaggttgcattggaggcggctcctctctaaggtacttgaatctcaccctcgtacaagaagtcccggccttgtgggaatacgaccaacccttcttccagtaagccctatggctctacgttgttgctctccaattcaacccactgcttccttttggcctcttactcccgttccactcgaggctcgtgctcctccacatcctcccggtccaaatccacctaccccacgcggagttacaggtgggaacacgtatgccgtcccggcgctccccccgggggctgtaggagatggtcctcctcgtgtggatttcccgcggtcaagactccgattcaaggaaaaactgggggaaggtcagtttggcgaggtgcacctatgtgaagtagactccccccaagacctggtgtcgttggatttccccctgaacgtgagaaaaggccacccgctgctcgttgccgttaaaatcctaaggccagatgctaccaagaatgcccgaaatgactttctgaaagaagttaagattatgagcaggctaaaagatccaaatattatccgattactgggagtttgtgtacaggacgatcctctttgcatgattactgattatatggagaatggggacctgaaccagttcctatctgcccatcagttggaggacaaagctgcggaaggggccccaggagacgggcaggcagctcaaggaccaaccatctcgtatcctatgttacttcatgtcgccgcacagattgcctccggcatgagatatctcgccacgctgaattag

SEQ ID NO: 79878 - DNA, 516 bp, Artificial Sequence
  derived and/or modified sequence
atgcggcacaaccttggaggtaacttgggcgatcccagagcccgcgctgtttctgtgccacttggtggaagagtcgccagattcttacaatgcagatttctgtttgcgggcccttggctcctcttttctgaaattagctttattagtgacgtggtgaataactcaagtccagctctgggcggcacttttcccccagctccttggtggccccccggccctccccccacgaatttttcctccctggaactcgaacctagagggcagcagccagtagccaaagccgaaggcagtcctactgccattttaattggctgtcttgttgccataattctacttcttctcctaatcattgccctcatgctgtggagactgcattggcgacggctgctatccaaggtcctcgaatcacacccacgtacccgtagtccgggtctcgttggtattaggcccactccgctcccagtctcgcccatggccctcgtgcatttgtgtgaagtcgattccccccaagattag

SEQ ID NO: 79879 - DNA, 516 bp, Artificial Sequence
  derived and/or modified sequence
atgaggcacaatcttggaggcaacctcggcgacccccgtgcacgggccgttagcgttccacttggaggccgagtggccagatttttgcagtgccgttttctttttgcaggaccatggttgctgttctcagagatctcctttatctccgatgtggtcaataactcctctccagctctgggcggcaccttccctccggccccctggtggcctcccggtcctcctcccaccaacttttccagtctagaactggagccccgcggtcaacaacctgtggccaaggccgagggcagccctacagctattctaattggatgccttgtggctattatactcctgctgctgttaataatcgcactgatgctgtggcgattgcactggaggaggctcctctctaaggtcctagagtcacacccccgaacaaggagtcctggactggtcggtattagacccacccctcttcctgtctctccaatggcactcgtccacctctgcgaagtcgactctcctcaggattag

SEQ ID NO: 79880 - DNA, 516 bp, Artificial Sequence
  derived and/or modified sequence
atgagacacaatttaggaggtaacttgggcgacccaagggctagagcagtttccgtgcctctgggcggacgggtagccagatttctccaatgtcgcttccttttcgcaggcccctggctgctcttttctgaaatctcctttatatccgatgtcgtgaataactcctcacccgcactcggaggcacttttccacccgcaccttggtggccgcccgggccaccgccgactaacttttcatctctcgagctggaaccacgaggccaacaacctgtcgccaaggccgaaggcagccctacagcgattcttattgggtgtctcgtggctatcatcctgctcctgctgctgataatcgccttaatgttgtggcgcctccactggagacgcttgctttccaaagtactcgagtctcaccctcgtacacgaagcccaggactagtgggtattagaccgacccctctgcctgtttctcccatggctctggtccacttatgcgaagtcgacagccctcaggactag

SEQ ID NO: 79881 - DNA, 516 bp, Artificial Sequence
  derived and/or modified sequence
atgagacacaacctcggaggaaacttgggcgaccctcgagcccgcgccgtttccgtgcccctcggtggtagagtcgcgaggtttcttcagtgtcggttcctcttcgcaggcccttggctcctcttctcggaaatttctttcattagcgatgtggttaacaactcgtctcctgccctcggcggcacttttccccctgccccatggtggccccctggccccccaccgactaatttttcaagccttgagctggagccccgcggacagcagcccgtcgcaaaggctgaaggcagtccaactgcaattctaataggctgcctcgtggctatcatcttgctccttctgctgatcatcgctctgatgctgtggcgcttgcattggcgcaggcttctgtcaaaagtattggaatctcacccccggacccgctctccaggattagttggtatcagacccacacctttacccgtctcccctatggcacttgtgcatctgtgtgaagtggattcaccacaggactag

SEQ ID NO: 79882 - DNA, 1593 bp, Artificial Sequence
  derived and/or modified sequence
tctgaggccgtgtacctcaacgactccacctatgacggacataccgtgggcggactgcagtatgggggtctgggccagctggcagatggtgtggtggggctggatgactttaggaagagtcaggagctgcgggtctggccaggctatgactatgtgggatggagcaaccacagcttctccagtggctatgtggagatggagtttgagtttgaccggctgagggccttccaggctatgcaggtccactgtaacaacatgcacacgctgggagcccgtctgcctggcggggtggaatgtcgcttccggcgtggccctgccatggcctgggagggggagcccatgcgccacaacctagggggcaacctgggggaccccagagcccgggctgtctcagtgccccttggcggccgtgtggctcgctttctgcagtgccgcttcctctttgcggggccctggttactcttcagcgaaatctccttcatctctgatgtggtgaacaattcctctccggcactgggaggcaccttcccgccagccccctggtggccgcctggcccacctcccaccaacttcagcagcttggagctggagcccagaggccagcagcccgtggccaaggccgaggggagcccgaccgccatcctcatcggctgcctggtggccatcatcctgctcctgctgctcatcattgccctcatgctctggcggctgcactggcgcaggctcctcagcaaggtcctagagagccacccccgtaccaggagccccggcctcgtgggaatccgccccactccgctccctgtgtccccaatggctctgcgttgctgctctccaatccagcctaccgcctccttctggccacttacgcccgtccccctcgaggcccgggcccccccacacccgcctgggccaaacccaccaacacccaggggcgtcaccgggggcaacacctatgctgtgcctgcactgcccccaggggcagtcggggatgggccccccagagtggatttccctcgatctcgactccgcttcaaggagaagcttggcgagggccagtttggggaggtgcacctgtgtgaggtcgacagccctcaagatctggtcagtcttgatttcccccttaatgtgcgtaagggacaccctttgctggtagctgtcaagatcttacggccagatgccaccaagaatgccaggaatgatttcctgaaagaggtgaagatcatgtcgaggctcaaggaccccaacatcattcggctgctgggcgtgtgtgtgcaggacgaccccctctgcatgattactgactacatggagaacggcgacctcaaccagttcctcagtgcccaccagctggaggacaaggcagccgagggggcccctggggacgggcaggctgcgcaggggcccaccatcagctacccaatgctgctgcatgtggcagcccagatcgcctccggcatgcgctatctggccacactcaactttgtacatttttggggggagagacacagatttttacactaatatatggacctagcttgaggcaattttaatcccctgcactaggcaggtaataataaaggttgagttttccac

SEQ ID NO: 79883 - DNA, 1593 bp, Artificial Sequence
  derived and/or modified sequence
tctgaggccgtgtacctcaacgactccacctatgacggacataccgtgggcggactgcagtatgggggtctgggccagctggcagatggtgtggtggggctggatgactttaggaagagtcaggagctgcgggtctggccaggctatgactatgtgggatggagcaaccacagcttctccagtggctatgtggagatggagtttgagtttgaccggctgagggccttccaggctatgcaggtccactgtaacaacatgcacacgctgggagcccgtctgcctggcggggtggaatgtcgcttccggcgtggccctgccatggcctgggagggggagcccatgcgccacaacctagggggcaacctgggggaccccagagcccgggctgtctcagtgccccttggcggccgtgtggctcgctttctgcagtgccgcttcctctttgcggggccctggttactcttcagcgaaatctccttcatctctgatgtggtgaacaattcctctccggcactgggaggcaccttcccgccagccccctggtggccgcctggcccacctcccaccaacttcagcagcttggagctggagcccagaggccagcagcccgtggccaaggccgaggggagcccgaccgccatcctcatcggctgcctggtggccatcatcctgctcctgctgctcatcattgccctcatgctctggcggctgcactggcgcaggctcctcagcaaggtcctagagagccacccccgtaccaggagccccggcctcgtgggaatccgccccactctgctccctgtgtccccaatggctctgcgttgctgctctccaatccagcctaccgcctccttctggccacttacgcccgtccccctcgaggcccgggcccccccacacccgcctgggccaaacccaccaacacccaggggcgtcaccgggggcaacacctatgctgtgcctgcactgcccccaggggcagtcggggatgggccccccagagtggatttccctcgatctcgactccgcttcaaggagaagcttggcgagggccagtttggggaggtgcacctgtgtgaggtcgacagccctcaagatctggtcagtcttgatttcccccttaatgtgcgtaagggacaccctttgctggtagctgtcaagatcttacggccagatgccaccaagaatgccaggaatgatttcctgaaagaggtgaagatcatgtcgaggctcaaggacccaaacatcattcggctgctgggcgtgtgtgtgcaggacgaccccctctgcatgattactgactacatggagaacggcgacctcaaccagttcctcagtgcccaccagctggaggacaaggcagccgagggggcccctggggacgggcaggctgcgcaggggcccaccatcagctacccaatgctgctgcatgtggcagcccagatcgcctccggcatgcgctatctggccacactcaactttgtacatttttggggggagagacacagatttttacactaatatatggacctagcttgaggcaattttaatcccctgcactaggcaggtaataataaaggttgagttttccac

SEQ ID NO: 79884 - DNA, 1347 bp, Artificial Sequence
  derived and/or modified sequence
tctgaggccgtgtacctcaacgactccacctatgacggacataccgtgggcggactgcagtatgggggtctgggccagctggcagatggtgtggtggggctggatgactttaggaagagtcaggagctgcgggtctggccaggctatgactatgtgggatggagcaaccacagcttctccagtggctatgtggagatggagtttgagtttgaccggctgagggccttccaggctatgcaggtccactgtaacaacatgcacacgctgggagcccgtctgcctggcggggtggaatgtcgcttccggcgtggccctgccatggcctgggagggggagcccatgcgccacaacctagggggcaacctgggggaccccagagcccgggctgtctcagtgccccttggcggccgtgtggctcgctttctgcagtgccgcttcctctttgcggggccctggttactcttcagcgaaatctccttcatctctgatgtggtgaacaattcctctccggcactgggaggcaccttcccgccagccccctggtggccgcctggcccacctcccaccaacttcagcagcttggagctggagcccagaggccagcagcccgtggccaaggccgaggggagcccgaccgccatcctcatcggctgcctggtggccatcatcctgctcctgctgctcatcattgccctcatgctctggcggctgcactggcgcaggctcctcagcaaggtcctagagagccacccccgtaccaggagccccggcctcgtgggaatccgccccactccgctccctgtgtccccaatggctctggtgcacctgtgtgaggtcgacagccctcaagatctggtcagtcttgatttcccccttaatgtgcgtaagggacaccctttgctggtagctgtcaagatcttacggccagatgccaccaagaatgccaggaatgatttcctgaaagaggtgaagatcatgtcgaggctcaaggaccccaacatcattcggctgctgggcgtgtgtgtgcaggacgaccccctctgcatgattactgactacatggagaacggcgacctcaaccagttcctcagtgcccaccagctggaggacaaggcagccgagggggcccctggggacgggcaggctgcgcaggggcccaccatcagctacccaatgctgctgcatgtggcagcccagatcgcctccggcatgcgctatctggccacactcaactttgtacatttttggggggagagacacagatttttacactaatatatggacctagcttgaggcaattttaatcccctgcactaggcaggtaataataaaggttgagttttccac

SEQ ID NO: 79885 - DNA, 1482 bp, Artificial Sequence
  derived and/or modified sequence
agcgaggccgtgtacctgaacgacagcacctacgacggccacaccgtgggcggcctgcagtacggcggcctgggccagctggccgacggcgtggtgggcctggacgacttcagaaagagccaggagctgagagtgtggcccggctacgactacgtgggctggagcaaccacagcttcagcagcggctacgtggagatggagttcgagttcgacagactgagagccttccaggccatgcaggtgcactgcaacaacatgcacaccctgggcgccagactgcccggcggcgtggagtgcagattcagaagaggccccgccatggcctgggagggcgagcccatgagacacaacctgggcggcaacctgggcgaccccagagccagagccgtgagcgtgcccctgggcggcagagtggccagattcctgcagtgcagattcctgttcgccggcccctggctgctgttcagcgagatcagcttcatcagcgacgtggtgaacaacagcagccccgccctgggcggcaccttcccccccgccccctggtggccccccggccccccccccaccaacttcagcagcctggagctggagcccagaggccagcagcccgtggccaaggccgagggcagccccaccgccatcctgatcggctgcctggtggccatcatcctgctgctgctgctgatcatcgccctgatgctgtggagactgcactggagaagactgctgagcaaggtgctggagagccaccccagaaccagaagccccggcctggtgggcatcagacccacccccctgcccgtgagccccatggccctgagatgctgcagccccatccagcccaccgccagcttctggcccctgacccccgtgcccctggaggccagagcccccccccacccccccggccccaacccccccacccccagaggcgtgaccggcggcaacacctacgccgtgcccgccctgccccccggcgccgtgggcgacggcccccccagagtggacttccccagaagcagactgagattcaaggagaagctgggcgagggccagttcggcgaggtgcacctgtgcgaggtggacagcccccaggacctggtgagcctggacttccccctgaacgtgagaaagggccaccccctgctggtggccgtgaagatcctgagacccgacgccaccaagaacgccagaaacgacttcctgaaggaggtgaagatcatgagcagactgaaggaccccaacatcatcagactgctgggcgtgtgcgtgcaggacgaccccctgtgcatgatcaccgactacatggagaacggcgacctgaaccagttcctgagcgcccaccagctggaggacaaggccgccgagggcgcccccggcgacggccaggccgcccagggccccaccatcagctaccccatgctgctgcacgtggccgcccagatcgccagcggcatgagatacctggccaccctgaactag

SEQ ID NO: 79886 - DNA, 1482 bp, Artificial Sequence
  derived and/or modified sequence
agcgaggccgtgtacctgaacgacagcacctacgacggccacaccgtgggcggcctgcagtacggcggcctgggccagctggccgacggcgtggtgggcctggacgacttcagaaagagccaggagctgagagtgtggcccggctacgactacgtgggctggagcaaccacagcttcagcagcggctacgtggagatggagttcgagttcgacagactgagagccttccaggccatgcaggtgcactgcaacaacatgcacaccctgggcgccagactgcccggcggcgtggagtgcagattcagaagaggccccgccatggcctgggagggcgagcccatgagacacaacctgggcggcaacctgggcgaccccagagccagagccgtgagcgtgcccctgggcggcagagtggccagattcctgcagtgcagattcctgttcgccggcccctggctgctgttcagcgagatcagcttcatcagcgacgtggtgaacaacagcagccccgccctgggcggcaccttcccccccgccccctggtggccccccggccccccccccaccaacttcagcagcctggagctggagcccagaggccagcagcccgtggccaaggccgagggcagccccaccgccatcctgatcggctgcctggtggccatcatcctgctgctgctgctgatcatcgccctgatgctgtggagactgcactggagaagactgctgagcaaggtgctggagagccaccccagaaccagaagccccggcctggtgggcatcagacccaccctgctgcccgtgagccccatggccctgagatgctgcagccccatccagcccaccgccagcttctggcccctgacccccgtgcccctggaggccagagcccccccccacccccccggccccaacccccccacccccagaggcgtgaccggcggcaacacctacgccgtgcccgccctgccccccggcgccgtgggcgacggcccccccagagtggacttccccagaagcagactgagattcaaggagaagctgggcgagggccagttcggcgaggtgcacctgtgcgaggtggacagcccccaggacctggtgagcctggacttccccctgaacgtgagaaagggccaccccctgctggtggccgtgaagatcctgagacccgacgccaccaagaacgccagaaacgacttcctgaaggaggtgaagatcatgagcagactgaaggaccccaacatcatcagactgctgggcgtgtgcgtgcaggacgaccccctgtgcatgatcaccgactacatggagaacggcgacctgaaccagttcctgagcgcccaccagctggaggacaaggccgccgagggcgcccccggcgacggccaggccgcccagggccccaccatcagctaccccatgctgctgcacgtggccgcccagatcgccagcggcatgagatacctggccaccctgaactag

SEQ ID NO: 79887 - DNA, 516 bp, Artificial Sequence
  derived and/or modified sequence
atgagacacaacctgggcggcaacctgggcgaccccagagccagagccgtgagcgtgcccctgggcggcagagtggccagattcctgcagtgcagattcctgttcgccggcccctggctgctgttcagcgagatcagcttcatcagcgacgtggtgaacaacagcagccccgccctgggcggcaccttcccccccgccccctggtggccccccggccccccccccaccaacttcagcagcctggagctggagcccagaggccagcagcccgtggccaaggccgagggcagccccaccgccatcctgatcggctgcctggtggccatcatcctgctgctgctgctgatcatcgccctgatgctgtggagactgcactggagaagactgctgagcaaggtgctggagagccaccccagaaccagaagccccggcctggtgggcatcagacccacccccctgcccgtgagccccatggccctggtgcacctgtgcgaggtggacagcccccaggactag

SEQ ID NO: 79888 - DNA, 1482 bp, Artificial Sequence
  derived and/or modified sequence
tccgaagctgtctatctgaatgattcaacatacgacgggcatacggtgggggggttgcagtacgggggcctcggacagctggcagatggtgtcgtggggctggacgatttccgcaagtcacaggagttgcgggtttggccagggtacgactatgttggctggagcaaccatagcttctccagcggttacgtggaaatggaatttgagttcgatcggctccgggcatttcaggccatgcaagtccattgcaacaacatgcacaccctgggggcccgacttccagggggcgtcgagtgcagattccggaggggcccagctatggcgtgggaaggggagccaatgaggcacaatctcgggggcaatctcggcgatccccgagcgcgagcagtaagcgtgcctctgggaggtagggtggctcggtttctacagtgtcggtttctgttcgctggcccctggctccttttcagcgaaatctcatttatcagcgacgttgtgaacaatagctcccccgcgctgggtggtacatttccccctgcaccatggtggcctccagggcctccgccaaccaatttctcttcacttgagctcgaacctcgaggccagcagcccgtagcgaaagcggaagggagtcctaccgccatcctcatcgggtgtttggtagccatcatactattgttattgctgatcatcgccctgatgctgtggcgcctgcattggcgccgactgctgagcaaggtgctcgagagccaccctcgaacccgttccccagggcttgtcgggattagacccacacctctccccgtgtcacccatggccctgcgctgttgcagtcctatacagccaacagcctcgttttggcctctaacccccgtgccactcgaagctcgggctccccctcatccccctggacccaatccgcctacccctaggggcgtgaccggcgggaatacctacgccgtacccgcactgcccccaggagccgtgggcgatggtccaccccgcgtcgacttccccagatcccgcctgcggttcaaagagaagctcggggaggggcaattcggagaagtccacctgtgcgaagtggacagcccacaggatctggtgtctctggacttccccttgaatgtgagaaaaggtcatcccctgctcgtcgccgtgaagatcttgcgccctgatgcaaccaaaaatgcccgcaatgacttcttgaaagaggtgaagattatgtcaagactgaaggacccaaatattatacgactgctcggagtttgtgtacaagacgaccctttgtgcatgatcacggactacatggagaacggagatctaaaccagttcctgtctgcacaccagctagaggataaagcagccgagggcgcccctggggacggtcaggctgcacaaggtcctacaatcagttatccgatgttactgcacgtagctgcccaaatcgcgagcggcatgagatacctagccaccctcaactag

SEQ ID NO: 79889 - DNA, 1482 bp, Artificial Sequence
  derived and/or modified sequence
agcgaggccgtttacctaaacgattccacttatgacggccacactgtgggaggcctgcagtacggcgggctggggcagctggctgacggagtagtggggttggatgatttcaggaaatcacaggaactgagagtgtggcccgggtatgactacgtgggctggtctaaccattccttcagcagcggatacgtggaaatggagtttgaatttgatagactacgtgccttccaggccatgcaggtgcactgcaacaacatgcatacattgggagccaggcttcccgggggcgtggagtgtcggttcaggcgcggcccagcaatggcctgggagggcgagccgatgaggcacaacctggggggaaatttgggcgaccctcgcgcccgggctgtgagtgtcccacttggcggtcgggtggccagatttctgcagtgccgattcttatttgcaggaccctggctgctgttttctgagatttctttcataagcgacgtcgtgaataatagtagccctgctctgggagggaccttccccccagcaccttggtggccacctggccccccccctacaaatttctctagcctggagctggagcccaggggccagcaacctgtggccaaggcggagggctcgcccacagccatcctcatcggctgcctggtcgcaataatcttgctgctgttgttgattattgctttgatgctctggcggctccactggcggagactcttgagcaaagtgttggagtctcatcccagaacccgcagtccgggcctcgtgggcatcagacctacacccttgcccgtctcccctatggctctgagatgttgttcccctatacagcctaccgcctccttctggccgcttaccccagtgcctctcgaggccagagcaccgccacacccaccagggccaaacccccctacaccacgcggtgttacagggggcaacacttatgcagtcccagcactaccacccggtgcagtgggcgacggtcccccaagggtcgactttccacgttctaggctccggttcaaagagaaactcggcgaaggacagtttggtgaggttcatctgtgcgaggtggacagtccgcaggatttggtgtccctcgattttccgctgaatgtgcgcaaaggtcatccgctcctggtcgcggtaaagatccttaggcctgatgcgaccaagaacgcccgcaatgatttcctcaaggaggtgaagatcatgtctcggctcaaggaccccaacataatccgactacttggggtatgcgtgcaggacgacccgctgtgcatgatcaccgattatatggaaaatggagacttgaaccagtttctgagtgcccaccagctggaggacaaagccgctgaaggtgcacccggcgacggacaggcggctcaagggcccaccatatcctaccccatgttgctgcacgtggccgcccaaattgcttctggaatgcggtatctcgcgacccttaactag

SEQ ID NO: 79890 - DNA, 1482 bp, Artificial Sequence
  derived and/or modified sequence
agcgaggcagtgtatctgaacgatagcacctatgacgggcacacagtgggcggcctgcagtacggcggtctgggacagcttgctgacggcgtggtgggcctggacgactttcgaaagagtcaggaattacgcgtgtggcccggttacgactatgttggttggagtaatcacagcttttcttctgggtacgttgagatggaattcgagtttgatcgactgcgggcgtttcaggctatgcaagtgcattgcaacaatatgcacaccctcggcgcgcgcctcccagggggcgtggagtgtcgatttagacggggaccagccatggcatgggagggcgagcctatgaggcataacttgggagggaaccttggagacccacgagctcgtgcagtaagtgtgccattggggggtcgagttgctaggttcctgcagtgcagattcctcttcgcaggtccctggctcttatttagcgaaattagctttatctctgacgtagtgaataactcatctccagccctgggtgggacctttcccccggcaccctggtggccacctggccctcctcctaccaacttcagctcccttgagttagaaccaaggggacagcaacccgtggcgaaggctgaggggtcacctacagctatcttgataggctgtttggttgcgattatactgttgttgctcctaattatcgcccttatgttgtggcgacttcattggagaaggttactttccaaggtactcgaaagccatccacggacccggagccctggcttggtaggaatccgccctacaccattaccggtttcccctatggcactccgctgttgctcaccgatccagccaacagcctccttttggccgcttacccctgtgcctctggaggctagagcaccacctcatcccccaggaccgaaccccccaactccgcgtggcgttaccggcggaaacacatacgcggtgcccgccctgccgcctggggctgtgggagacggacccccgagagttgactttccacgctctcgtctgcggttcaaggaaaaattgggagagggacagttcggcgaagttcatttgtgtgaggtggattcccctcaggacctggtctccttggactttccactgaacgtgcgaaagggacaccctctgttggtagccgtaaaaatcctgcggccagacgcaacgaagaacgctcgcaacgactttcttaaggaggtgaaaatcatgtctcgcctgaaggatccgaacattatccgcctgcttggggtctgtgtgcaggacgatcctctgtgtatgattactgactatatggagaacggagatcttaatcagttcctgtctgctcatcaactggaagataaagccgccgagggagcccccggagatggccaggctgcccaaggtcccacaatctcttaccccatgctcctgcatgttgcagcccagatagctagcggcatgcgctacctggctaccctgaattag

SEQ ID NO: 79891 - DNA, 1482 bp, Artificial Sequence
  derived and/or modified sequence
agcgaagccgtctacctcaacgatagcacttacgacggccataccgtgggaggcctgcagtacggcggccttggacagctggcagacggcgtggtgggcctcgacgacttcaggaagtcccaggaactgagggtttggcccggctatgattacgtcggctggtcgaaccatagcttttcatctggttacgttgagatggagttcgagtttgatcggctgcgggcttttcaggcaatgcaggtgcactgtaataacatgcatactctgggtgctcggttgccaggtggggtggaatgcagatttcgcagaggccccgccatggcctgggagggcgagccaatgagacacaatctgggcggtaatttgggagatcctcgtgcccgcgccgtgtccgtgcccttgggaggacgcgtcgcacgttttcttcagtgccgttttctctttgccgggccctggctgctattttcagagatcagtttcatctcagatgtggtcaacaatagcagtcctgccttgggtggaactttccccccagcaccatggtggcctcccgggccgcctcctaccaatttcagcagcctggagctggagccccgcgggcaacagcccgttgccaaagccgagggttcccctacagccattctcattggttgtctggtggccatcatactgctcctgttgctgattatcgccctgatgctgtggcgcttgcattggcgccgcttgctgtctaaggtgctcgagtcccaccctcgaaccagatccccaggactggtcggaattagacccactctcttgcccgtatccccgatggcattgcgatgctgctcccccatccagccaactgcttctttttggcccctgactcctgtgcccctggaagctcgggccccacctcaccccccggggccaaaccctccgacccctaggggcgtgaccggtggaaacacatatgccgttcccgctttgccccctggggccgtcggagacggaccaccccgagtggacttccctcggtctcggttaagattcaaagagaaactaggggaggggcagtttggcgaagtgcacctttgcgaagtggatagcccacaggacttagtgagtttagactttccccttaatgtacgaaaagggcatccactgctggtggcagtcaaaatcctgcgccccgatgccactaagaatgcacgaaatgattttctgaaggaagttaagattatgtctagattaaaagatccaaacatcattcgtctgctaggggtctgtgtgcaagacgatccactgtgtatgataaccgattacatggagaacggcgatctcaaccaatttctatcggcgcaccagttggaggataaagcagctgagggggcccctggggacgggcaggccgctcagggacctacaattagctaccccatgctgctacatgtggctgcccaaatagcttcgggcatgcggtacctggctactctgaactag

SEQ ID NO: 79892 - DNA, 516 bp, Artificial Sequence
  derived and/or modified sequence
atgagacataatctggggggcaatctaggggatccaagggcgcgggcagtgtcggtccccttagggggaagagtagcccgctttctacagtgcaggtttctgttcgcagggccttggctgctgttctccgagatttcatttatatccgatgtggtaaacaatagtagccccgctcttgggggtacatttcccccagcaccctggtggccccctggccctcctcctacgaattttagttccctggagctcgagccaagggggcagcagcctgttgccaaagcagaaggctcccccacagctatcctgattggttgcttagtggccatcatacttttactacttttgatcatcgccctgatgttgtggaggctgcactggcggcggctgctgtccaaagtcctggaatcgcaccctagaacccggtcccccggcctggtgggaatcaggcctacaccattgcccgtcagccccatggcacttgttcacctctgtgaggtcgactcaccccaagactag

SEQ ID NO: 79893 - DNA, 516 bp, Artificial Sequence
  derived and/or modified sequence
atgaggcataatctgggcggcaatctgggggacccgagggcccgcgctgttagtgtccctctgggcgggcgggttgccagattccttcagtgccgcttcctcttcgccggtccctggctgctgttctccgaaatctccttcatctctgacgtcgtgaataattcaagccccgccttaggaggcacttttcccccggcgccttggtggcctcctggtcctcctcctaccaatttctcatctctggaactagaaccccgggggcagcagcccgttgcgaaagcagaaggaagcccaactgccatacttatcggctgtctggtggccatcatcctgttgctcctgctaattattgcgctgatgctctggagactgcattggagacggttattatccaaggtcttagaatcacatcccagaaccagaagtcccggtctggtgggaatacgccctaccccgctccccgtgtcccctatggctctggtgcatctatgtgaagtggattccccacaagactag

SEQ ID NO: 79894 - DNA, 1593 bp, Artificial Sequence
  derived and/or modified sequence
tctgaggccgtgtacctcaacgactccacctatgacggacataccgtgggcggactgcagtatgggggtctgggccagctggcagatggtgtggtggggctggatgactttaggaagagtcaggagctgcgggtctggccaggctatgactatgtgggatggagcaaccacagcttctccagtggctatgtggagatggagtttgagtttgaccggctgagggccttccaggctatgcaggtccactgtaacaacatgcacacgctgggagcccgtctgcctggcggggtggaatgtcgcttccggcgtggccctgccatggcctgggagggggagcccatgcgccacaacctagggggcaacctgggggaccccagagcccgggctgtctcagtgccccttggcggccgtgtggctcgctttctgcagtgccgcttcctctttgcggggccctggttactcttcagcgaaatctccttcatctctgatgtggtgaacaattcctctccggcactgggaggcaccttcccgccagccccctggtggccgcctggcccacctcccaccaacttcagcagcttggagctggagcccagaggccagcagcccgtggccaaggccgaggggagcccgaccgccatcctcatcggctgcctggtggccatcatcctgctcctgctgctcatcattgccctcatgctctggcggctgcactggcgcaggctcctcagcaaggtcctagagagccacccccgtaccaggagccccggcctcgtgggaatccgccccactccgctccctgtgtccccaatggctctgcgttgctgctctccaatccagcctaccgcctccttctggccacttacgcccgtccccctcgaggcccgggcccccccacacccgcctgggccaaacccaccaacacccaggggcgtcaccgggggcaacacctatgctgtgcctgcactgcccccaggggcagtcggggatgggccccccagagtggatttccctcgatctcgactccgcttcaaggagaagcttggcgagggccagtttggggaggtgcacctgtgtgaggtcgacagccctcaagatctggttagtcttgatttcccccttaatgtgcgtaagggacaccctttgctggtagctgtcaagatcttacggccagatgccaccaagaatgccaggaatgatttcctgaaagaggtgaagatcatgtcgaggctcaaggacccaaacatcattcggctgctgggcgtgtgtgtgcaggacgaccccctctgcatgattactgactacatggagaacggcgacctcaaccagttcctcagtgcccaccagctggaggacaaggcagccgagggggcccctggggacgggcaggctgcgcaggggcccaccatcagctacccaatgctgctgcatgtggcagcccagatcgcctccggcatgcgctatctggccacactcaactttgtacatttttggggggagagacacagatttttacactaatatatggacctagcttgaggcaattttaatcccctgcactaggcaggtaataataaaggttgagttttccac

SEQ ID NO: 79895 - DNA, 516 bp, Artificial Sequence
  derived and/or modified sequence
atgagacacaatttaggaggtaacctcggggatccacgggcacgggctgtcagtgtacctctgggagggcgggttgcccggttcttgcagtgcaggtttctcttcgcaggaccctggttgctcttctccgaaatatcttttatatcagatgttgttaacaattccagccctgctctgggaggcactttcccccccgctccctggtggccccctggtccacctcctacaaacttttcaagcctggaactagaaccaagaggacaacaaccggtcgccaaagcggagggaagcccgactgcaatcctgattggctgccttgttgccattattttactgcttttgctgataattgctctgatgttgtggagattgcactggcgcaggctcctgtccaaggtattagagagccatccaagaacaagatcccccggattggtggggatccgcccaacccccttaccggtgagccctatggctctggtgcatctgtgtgaggtcgatagcccccaagattag

SEQ ID NO: 79896 - DNA, 516 bp, Artificial Sequence
  derived and/or modified sequence
atgcgccataacctcggcggaaatctgggagacccccgggcccgcgctgtgtctgtgcccctggggggtcgggttgccagattcctgcaatgtcggttcctcttcgcgggaccttggttattgttttcagaaattagcttcatcagtgacgtagttaataacagttcgcccgctctaggcggtacctttcctcctgccccctggtggccacccggcccacctccaacaaatttttcttcactggaattagagcctcgggggcagcaaccagtcgcaaaggctgagggaagtcccacggcaatcttgattggatgcctggtggctattattcttcttctccttctgatcatcgccctgatgctgtggaggttacattggcgccgtctcctgagcaaggtgctggaatcacacccacggacccggtcccctgggctggtggggatccggccgacgccactccctgtctctcccatggccctggtgcacctgtgcgaagttgacagcccacaggattag

SEQ ID NO: 79897 - DNA, 1482 bp, Artificial Sequence
  derived and/or modified sequence
tctgaggccgtgtacctgaatgacagcacctatgatggccacacagtgggcggcctgcagtatggaggcctgggccagctggctgatggagtggtgggcctggatgacttcaggaagagccaggagctgcgggtgtggccaggctatgactatgtgggctggagcaaccacagcttcagcagcggctacgtggagatggagtttgaatttgaccggctgcgggccttccaggccatgcaggtgcactgcaacaacatgcacaccctgggcgcccggctgcccggcggcgtggagtgccgcttccggcggggccctgccatggcctgggagggggagcccatgaggcacaacctgggcggcaacctgggggacccccgggcccgggctgtgtctgtgcccctgggcggccgggtggcccgcttcctgcagtgccgcttcctgtttgctggcccctggctgctcttcagcgagatctccttcatcagtgatgtggtgaacaacagcagccctgccctgggcggcaccttccccccagccccctggtggcccccaggccccccacccaccaacttcagcagcctggagctggagccccggggccagcagcctgtggccaaggccgagggcagccccacagccatcctgattggctgcctggtggccatcatcctgctgctgctgctgatcatcgccctgatgctgtggaggctgcactggaggcggctgctgagcaaggtgctggagagccaccccaggaccaggagccctggcctggtgggcatccggcccacccccctgcctgtgagccccatggccctgcgctgctgcagccccatccagcccacagccagcttctggcccctgacccctgtgcccctggaggcccgggccccaccccaccccccaggccccaacccccccaccccccggggcgtgactggaggcaacacctatgctgtgcctgccctgcccccaggagctgtgggagatggccccccccgggtggacttccccaggagccggctgcgcttcaaggagaagctgggggagggccagtttggagaggtgcacctgtgtgaggtggacagcccccaggacctggtgtccctggacttccccctgaatgtgaggaagggccaccccctgctggtggccgtgaagatcctgcggccagatgccaccaagaatgccagaaatgacttcctgaaggaggtgaagatcatgagccggctgaaggaccccaacatcatccggctgctgggcgtgtgtgtgcaggatgaccccctgtgcatgatcacagactacatggagaatggagacctgaaccagttcctgagcgcccaccagctggaggacaaggctgctgagggcgcccctggagatggccaggccgcccagggccccaccatctcctaccccatgctgctgcacgtggccgcccagatcgccagcggcatgagatacctggccaccctgaactag

SEQ ID NO: 79898 - DNA, 1482 bp, Artificial Sequence
  derived and/or modified sequence
tctgaggccgtgtacctgaatgacagcacctatgatggccacacagtgggcggcctgcagtatggaggcctgggccagctggctgatggagtggtgggcctggatgacttcaggaagagccaggagctgcgggtgtggccaggctatgactatgtgggctggagcaaccacagcttcagcagcggctacgtggagatggagtttgaatttgaccggctgcgggccttccaggccatgcaggtgcactgcaacaacatgcacaccctgggcgcccggctgcccggcggcgtggagtgccgcttccggcggggccctgccatggcctgggagggggagcccatgaggcacaacctgggcggcaacctgggggacccccgggcccgggctgtgtctgtgcccctgggcggccgggtggcccgcttcctgcagtgccgcttcctgtttgctggcccctggctgctcttcagcgagatctccttcatcagtgatgtggtgaacaacagcagccctgccctgggcggcaccttccccccagccccctggtggcccccaggccccccacccaccaacttcagcagcctggagctggagccccggggccagcagcctgtggccaaggccgagggcagccccacagccatcctgattggctgcctggtggccatcatcctgctgctgctgctgatcatcgccctgatgctgtggaggctgcactggaggcggctgctgagcaaggtgctggagagccaccccaggaccaggagccctggcctggtgggcatccggcccaccctgctgcctgtgagccccatggccctgcgctgctgcagccccatccagcccacagccagcttctggcccctgacccctgtgcccctggaggcccgggccccaccccaccccccaggccccaacccccccaccccccggggcgtgactggaggcaacacctatgctgtgcctgccctgcccccaggagctgtgggagatggccccccccgggtggacttccccaggagccggctgcgcttcaaggagaagctgggggagggccagtttggagaggtgcacctgtgtgaggtggacagcccccaggacctggtgtccctggacttccccctgaatgtgaggaagggccaccccctgctggtggccgtgaagatcctgcggccagatgccaccaagaatgccagaaatgacttcctgaaggaggtgaagatcatgagccggctgaaggaccccaacatcatccggctgctgggcgtgtgtgtgcaggatgaccccctgtgcatgatcacagactacatggagaatggagacctgaaccagttcctgagcgcccaccagctggaggacaaggctgctgagggcgcccctggagatggccaggccgcccagggccccaccatctcctaccccatgctgctgcacgtggccgcccagatcgccagcggcatgagatacctggccaccctgaactag

SEQ ID NO: 79899 - DNA, 516 bp, Artificial Sequence
  derived and/or modified sequence
atgaggcacaacctgggcggcaacctgggggacccccgggcccgggctgtgtctgtgcccctgggcggccgggtggcccgcttcctgcagtgccgcttcctgtttgctggcccctggctgctcttcagcgagatctccttcatcagtgatgtggtgaacaacagcagccctgccctgggcggcaccttccccccagccccctggtggcccccaggccccccacccaccaacttcagcagcctggagctggagccccggggccagcagcctgtggccaaggccgagggcagccccacagccatcctgattggctgcctggtggccatcatcctgctgctgctgctgatcatcgccctgatgctgtggaggctgcactggaggcggctgctgagcaaggtgctggagagccaccccaggaccaggagccctggcctggtgggcatccggcccacccccctgcctgtgagccccatggccctggtgcacctgtgtgaggtggacagcccccaggactag

SEQ ID NO: 79900 - DNA, 1482 bp, Artificial Sequence
  derived and/or modified sequence
agcgaggccgtgtacctgaacgacagcacctacgacggccacaccgtaggcggcctgcagtacgggggcctgggtcagctcgcggatggggtcgtagggctggacgatttccgcaaaagccaagagctgcgagtttggcccggctacgactatgtggggtggtccaatcattccttttcaagcggttatgtcgaaatggaatttgaatttgaccgactacgagcgtttcaagctatgcaggtgcattgcaacaacatgcacacccttggggctcgccttcctgggggcgtagaatgtcgatttaggaggggccctgcaatggcctgggaaggcgagcctatgaggcacaatttaggaggcaacttgggggatccacgggctagggcagtgtccgtgcccctcgggggccgcgtcgcccgatttctgcaatgtcgttttctttttgcaggaccgtggttattgttcagcgaaatatctttcatcagcgatgtggtgaataatagtagccctgccttgggggggacattccctcccgctccctggtggccgcccggccctcccccaacaaatttctctagcttagaactcgagccaagaggccagcagccagtcgcaaaagcggagggatcccctaccgccatcctcatcgggtgcctcgtggcaataattctcttgttactcctgatcatcgcactcatgctgtggcgactgcattggcgtcggctcctcagcaaggtgctagaaagccatccacgcactcgaagtccgggcctggtcggcattcggccaactcccctgccagttagtcctatggctctccgctgctgttcacccatccaacccactgcttctttctggccattaactccggtaccactggaagcccgggcccccccacacccccctggcccaaaccccccaacacctcgtggcgtaacaggggggaatacttatgctgtgccagcgttgcccccgggggctgttggcgacgggccgccccgcgtcgacttcccgagatcgcgtcttagatttaaggagaaacttggcgaaggtcaattcggggaggtccatctgtgcgaggtggactccccccaggacctggtgtctctggacttccccctcaacgtacggaaaggtcaccccctgctcgtggcagtcaaaattctgaggccagatgccactaagaacgctcgtaacgacttcctgaaggaggttaagataatgtcccgccttaaagaccctaatattatcagattgcttggagtgtgcgtccaggacgacccactttgtatgatcaccgattatatggaaaacggcgatctgaaccagttcttgtccgcccaccagctagaggataaggccgctgaaggcgcgcccggagatggccaggcagcccaaggaccgaccatatcttacccaatgctcctgcatgtagccgcccagattgcctccggcatgcggtacctggccacactgaactag

SEQ ID NO: 79901 - DNA, 1482 bp, Artificial Sequence
  derived and/or modified sequence
agcgaggccgtgtacctgaacgacagcacctacgacggccacaccgtcggtggcctccaatacggaggactcgggcaactggccgatggagttgtcggcctggatgattttagaaagtctcaggagctccgcgtctggcccggctacgactatgtcgggtggtccaaccactcattctccagcggttatgtggaaatggaatttgagttcgacaggcttcgtgcatttcaggccatgcaggtgcattgcaacaacatgcacaccctgggcgctagactcccagggggcgtggagtgcaggtttagaaggggacccgccatggcttgggaaggggaacctatgaggcacaatctggggggcaatctcggagatcccagggcaagagccgtgagcgtgccacttggcggaagggtggcacggtttctccagtgtcgcttcctgttcgctggaccctggctgctcttttctgagatcagctttatcagtgacgtggtgaataactcctcaccggccttgggcggtaccttccctcctgcaccctggtggccgcccggaccgcccccaacaaacttctcctctttagagctggagcccagaggtcagcaacccgttgcgaaggctgaaggaagcccaactgcaatcttgattggctgtctggtggccataattctgttattactgctgattattgccctgatgctctggagattgcattggaggcggctactaagtaaggtcctggaaagccacccgcggacgaggtcccccggtctcgtcggaatccggccaactccactgcccgtgtccccgatggctctgcggtgttgctccccaattcagccaacagcttccttctggcccctgacccctgtgcctctggaagcaagagcacctccacatccccccggacctaaccctccaactccacgtggcgtgactggcggcaatacttacgcagtgcccgccctcccccctggcgccgtgggagacggcccccccagagtggacttccctcgctctaggctacggttcaaggagaagcttggcgagggtcagtttggtgaggtccatctctgcgaggtcgactctccacaagacctagtgagtctggattttcccttaaacgtgaggaaaggtcacccattactggttgctgtgaagatcctgcggcccgacgccacaaaaaatgctagaaacgattttctgaaggaggtgaagatcatgtccaggctcaaggacccgaatatcatacgcctgctgggcgtctgtgtccaggacgacccattatgtatgatcacggactatatggaaaatggcgacttgaaccagttcctctcggctcaccaattggaggacaaggcagccgagggcgcccctggtgatggacaggctgctcaaggacctaccatcagctacccaatgttgctccatgtggccgctcagatcgcttccgggatgaggtacctggctaccctgaattag

SEQ ID NO: 79902 - DNA, 1482 bp, Artificial Sequence
  derived and/or modified sequence
agcgaggccgtgtacctgaacgacagcacctacgacggccacaccgtggggggacttcagtatggaggcttaggacagctggccgacggcgtggttggtctggatgattttagaaagagccaggagctccgggtttggccaggatacgattatgtggggtggtcaaaccacagcttctccagtggctacgttgagatggaatttgaattcgatcggctgcgagcgtttcaggccatgcaggtgcattgcaataacatgcacacattgggtgctaggttacccgggggtgtggagtgccgattcaggcggggccccgccatggcatgggagggcgaacccatgcgccataacctcggcggaaacttaggcgatccacgagccagagcagtatcggtccctctgggtggtcgcgtcgcccgattcttacagtgccggtttcttttcgctggaccatggctgctgttttcagaaatcagctttattagcgatgtcgtgaataactcctcccctgctctgggaggtacgtttccccccgctccttggtggcctcctggccctcctccgacgaacttttcctcccttgaattagaacccagagggcaacagccagtggcaaaagctgaaggctcaccaaccgcaatccttataggttgcttagtcgccatcattctacttttattactgattattgctttgatgttatggcggctgcactggaggaggctgctctcaaaggtcttagaaagtcatcccagaacgcgctcaccaggactggtcggaatccgacctacccccctcccagtctcacccatggcgctgagatgctgttctccaatccagccaaccgctagtttttggccgctcacacctgtgccccttgaggccagagcccctcctcacccgccgggaccaaatcctcctaccccgaggggggtgacaggcggcaatacttatgctgtgcccgccctcccccctggcgctgttggcgacggacccccaagggtcgactttccccgcagtaggcttagattcaaagaaaagcttggagaaggtcagtttggagaagtccatttatgcgaggtggattctccccaggatctggtgtcccttgactttccgctcaacgtacgcaaaggccacccactgcttgtggctgtcaaaattcttcgccccgatgcaactaaaaatgcccggaatgatttcttgaaggaggttaaaattatgtcccgactgaaggacccaaatatcatcaggctcctgggcgtgtgcgtccaagacgaccctttgtgcatgattaccgactacatggaaaacggcgatcttaaccagtttttatcagcccaccagctggaagacaaagccgccgaaggggccccaggggatggccaggccgcccagggccctaccatcagctatccgatgctgctccacgtcgccgcgcagattgccagcggcatgagatacctggcaaccctgaattag

SEQ ID NO: 79903 - DNA, 1482 bp, Artificial Sequence
  derived and/or modified sequence
agcgaggccgtgtacctgaacgacagcacctacgacggccacaccgtcggagggctgcagtacgggggattagggcagttagcggatggggtagtcgggctggatgattttaggaaatctcaggaactgcgcgtatggcctggctatgactatgtggggtggtctaaccacagcttcagtagcggatatgtggagatggaattcgagtttgatagactgcgcgcttttcaggccatgcaagtgcactgtaataatatgcacactctgggggcgcggttgcccggcggggtggaatgccgattccgccgcggtcccgcaatggcttgggagggtgagccaatgagacataacctcggcggtaacttaggtgaccccagagccagagctgtcagtgtccccttgggcggccgcgtggcacggtttttgcagtgccgtttcttgtttgccggcccctggcttctctttagtgaaattagcttcatctctgacgtcgttaacaattcctcccctgccctcggggggacgtttccacccgctccatggtggccaccgggtccccctcctaccaacttttcctcactagagctggagccacgtggccagcaaccggttgccaaagcggaaggaagccctactgcaattttaatcggatgcctcgtggccatcatactcctgctgctgttgattattgcactgatgctctggcgactccattggcgcagactgctgagcaaggtcttggagtcacatcctaggacccgctctccgggcctcgtggggatccggccgaccctacttcccgtgtcaccaatggccctacgctgctgttccccaattcagcccacggcctcattttggccactgaccccggtccctcttgaagctagagcccccccacatcctccaggccccaatcctccgaccccacgcggggtcactggaggcaatacctatgccgtgcctgccctgcccccaggcgccgtcggcgacgggcctcctcgggtggactttcccaggagcaggctgaggtttaaggagaagctcggcgaaggccagtttggagaagtccatctgtgcgaagtagacagccctcaggatctcgttagtctcgactttccgctcaacgttaggaagggccaccccctgttggtagcggttaagatactgcggcccgacgctacgaaaaacgctagaaatgacttcctaaaagaagtgaaaattatgagccgcctgaaggacccgaatattattaggctgcttggggtctgcgtgcaggatgatccattatgcatgataacagactacatggaaaacggggacctaaatcagttcctgagcgcacaccaactcgaggataaggcggctgagggtgcaccaggagacggtcaagctgcccagggcccgacaatttcgtaccctatgttacttcacgtggcagcacaaatagccagtggaatgcggtaccttgccacactaaactag

SEQ ID NO: 79904 - DNA, 516 bp, Artificial Sequence
  derived and/or modified sequence
atgcggcacaacctgggcggcaacctgggcgacccccgggcccgggcagtcagcgtgcccttgggcggccgggtcgcgcggttcctgcagtgcagatttcttttcgcaggtccatggctcctgttttcagagatttcctttatctccgatgttgttaacaactcttctccagccctgggtggaacatttcctcccgccccctggtggccaccaggccctccaccaacaaatttttctagtttggaactagagcccaggggtcaacaaccagtagcaaaggcagagggttcaccaacagccattctcatcgggtgtttggttgctatcatcctgctgctcctgttgatcattgcactcatgctctggcgcctgcactggagaagactattgtctaaagtgctggaatcgcatcctcggactcgctctcccggtctggtggggattcgtcccacacccctcccggtttctcccatggctttggttcacctctgtgaagtggacagtcctcaggattag

SEQ ID NO: 79905 - RNA, 1482 nt, Artificial Sequence
  derived and/or modified sequence
ucugaagccguguaccugaaugacagcaccuacgacggucacaccgucggaggccugcaguauggcgggcugggccagcuggcagauggugugguaggacuagacgacuucaggaaaagccaagagcuaagggucuggcccggcuaugacuacguggguuggagcaaccacuccuucucgagcggauaugucgaaauggaguuugaguuugauaggcuacgagcguuccaggcuaugcaggugcacuguaauaacaugcauaccuugggagcucggcuccccggggggguggagugccgguuccgcagaggaccggccauggcaugggagggggaaccaaugcggcauaacuuaggaggaaaucugggagacccccgagcuagggcaguguccguuccccuaggcggacggguggcacgguucuuacaaugucgguuccuuuucgccggucccuggcuccuauucagcgagauuaguuuuauaucagaugucgucaacaauagcucuccagcccucggcggaacuuucccaccagccccuugguggccuccuggaccaccucccaccaauuucucaucauuagaauuagaaccgagagggcagcagccuguggccaaggcugaggguucuccuacggcgauauugauuggcugucugguggcgaucauacuauugcuccuacuaauuauugcucucaugcuguggaggcuccauuggcguagacuucucucgaaaguacuggaaucccaccccagaacaagauccccaggccuaguuggaauaagaccgaccccucuuccugucucucccauggcucugagguguugcucgccaauacaaccuacagcaucauucuggccacuaacaccugugcccuuggaggcgcgcgcuccaccucacccucccgggccuaauccccccacaccaagaggggugacugggggcaauacguacgcuguuccugccuuacccccaggcgcagugggagauggcccuccucgcgucgacuuuccccgaucuagauugcgauucaaagagaaacugggcgaagggcaguuuggcgaagugcaucuaugugaaguggacagcccacaggaucucgugagucuagauuuuccgcugaaugugcggaagggucacccacugcuuguugcugucaagauucuucggccggacgccacgaaaaaugcacgaaaugacuuucucaaagaagucaaaauaauguccaggcugaaggacccuaacaucauacgguuacuuggcgugugcgugcaggaugauccccuguguaugaucacugacuauauggaaaacggcgaccugaaucaauuucucucggcccaccaacuugaggauaaggcugccgaaggggccccaggcgacggacaggccgcucaaggacccacaaucaguuaccccaugcuucuucacguggcagcucagaucgccucgggcaugcgguaucuggccaccuuaaacuag

SEQ ID NO: 79906 - RNA, 1482 nt, Artificial Sequence
  derived and/or modified sequence
uccgaagcaguguaucugaacgacucaacuuacgacggccauacugucgguggauugcaauauggcggacugggacagcuggcagacgggguggucggccuggaugauuuuaggaagucccaggagcuucgaguuuggcccggauacgacuauguuggauggucuaaccacucuuucagcucuggcuacguggaaauggaguucgaguuugacagauugcgagcguuccaagccaugcaaguccacugcaacaacaugcacacucucggugcucgucucccaggugggguggagugcagauuucgcagaggaccugccauggcuugggagggugaaccaaugaggcauaaccucggcgggaacuuaggcgauccuagagcccgcgcgguguccgugccucucggaggcagaguggcaagauuucugcagugccgauuucuguuugccggaccuuggcugcuguucucagagauuucguuuaucucggacgugguuaacaauagcagcccugcauugggugggaccuucccacccgcuccuugguggccacccggcccaccucccaccaacuucucuucccuugaauuagaaccaaggggacagcaaccuguugcgaaggcugaggguucgccgacugcaauccugauugggugucugguagcuauuauacuacuacuguuguugauuaucgcuuuaauguuauggcgucuccacuggcgacgcuuacuuucuaaggugcucgagucucauccgcgcaccagaucucccggccuggucgggauucgcccaacuccucuuccggugucaccgauggcgcugagaugcuguucucccauccagccaacugcaagcuuuuggcccuugacccccgugccgcuggaggcucgggcaccaccccacccaccugggcccaauccaccuaccccccggggcgucaccggcggcaacacauaugcagugccagcuuuaccaccuggugccgugggugauggaccuccucgaguugacuuuccuaggucuagacucagauucaaagagaaauugggugagggucaguuuggugaggugcaccuuugcgaaguggacucaccccaggacuuaguuucgcuggauuucccacugaaugugcggaagggacacccccuccugguggcugugaagauacugcgccccgaugcaacgaaaaaugccaggaacgauuuuuuaaaggagguaaaaaucauguccagauuaaaagauccgaacaucaucaggcugcucgggguaugcgugcaagaugauccacuguguaugaucacagauuauauggaaaacggcgaucucaaucaguuccugucagcccaucaacucgaagacaaagcugcagaaggcgccccaggagacggacaggccgcucaaggaccaaccaucuccuauccaaugcuguugcacguggcugcucagauugcgucuggcaugcgauauuuggcaacucugaauuag

SEQ ID NO: 79907 - RNA, 1482 nt, Artificial Sequence
  derived and/or modified sequence
uccgaggcuguguaccuuaaugacuccacuuacgauggacacaccguuggcggucuucaguacgggggucuggggcagcuugcugacggcgugguuggcuuggacgacuuccggaagagucaggagcuccgaguguggccaggcuaugauuaugugggcuggagcaaccauuccuucaguagcggauacgucgagauggaauuugaguuugaucgccuucgcgccuuccaggccaugcaggugcauuguaacaacaugcacacccucggagcccgccugcccggcgggguggaauguagguucagaagagguccggcaauggcuugggaaggugagccgaugcgacauaacuugggagggaacuugggggauccacgcgcccgagcugugucuguaccacugggcggccgcguggcaagauuuuuacagugccguuuccuguuugccggaccuuggcucuuauucucagaaaucuccuucaucucagauguggucaacaauucaucaccagcccuuggggguaccuuucccccggcgccuugguggccaccaggccccccaccuaccaauuucucuucucucgagcuagaacccagaggacagcaaccuguagccaaggccgaaggcucccccacagcaauccucauuggcugucuagucgccauaauccugcugcuccugcugaucaucgcccuaaugcuguggagacugcauuggagaagauuacucucgaagguccuggaaucgcauccucgcacuagaagucccggucugguugggauucguccaacccccuuacccgugucaccuauggccuugaggugcuguucccccauccagcccaccgcuaguuuuuggccacuuaccccagugccucuggaagcacgcgcaccuccucacccuccuggacccaaucccccuaccccacgggguguuacaggaggaaauacauaugccguuccggcucugcccccaggggccguuggugauggcccaccacggguagacuuuccuagaucccgccugagauucaaggagaagcugggcgaaggacaguucggagaagugcaccucugcgaaguggacuccccucaggaccucgugucuuuggauuucccccuuaauguccgcaaaggacacccucuguugguggcugugaaaauucugagacccgaugcaacgaagaacgcucggaaugauuuucuaaaagaagugaagaucaugagcaggcugaaggacccaaauauuaucaggcuccucgguguuuguguccaggacgauccucuuuguaugauaacagacuauauggaaaauggagacuuaaaucaguuucucucggcacaccagcuggaagacaaagccgccgagggagcaccuggggacggccaggcggcccaaggccccacuaucagcuacccuaugcuccugcacguagccgcucaaauagcuuccggcaugagauaccuggccaccuugaacuag

SEQ ID NO: 79908 - RNA, 1482 nt, Artificial Sequence
  derived and/or modified sequence
uccgaagcuguguaucuaaacgauucuacauacgacggccauacgguuggcggacuucaauaugggggucugggacaacuggccgauggagugguuggacucgaugauuuccggaaaagccaagagcugcggguuuggcccggguacgauuacgucggauggucgaaucauagcuuuagcagcggauauguagagauggaguuugaguucgaccgccugcgggcauuccaggcaaugcaggugcacugcaacaauaugcacacccugggcgccagacugcccgguggcgucgagugcagauuuagacguggaccggcuauggcuugggagggcgaaccaaugagacacaaucuugggggaaaucugggcgacccacgcgcucgggcagugucagucccacuggggggucggguggcacgguuucuccagugucgcuucuuauucgcaggaccaugguuacucuucagugagauaaguuucaucagcgauguagucaacaauuccucaccugcccuggggggaacauuuccaccagcaccuugguggccaccaggaccccccccgacuaauuuuagcucucuagagcuggaaccaagagggcagcaaccaguggcaaaggcagaaggcagcccuacggcgaucuuaauugggugccuggucgccaucauccugcucuugcugcucauaauagcgcuaaugcuuuggagguugcauuggaggcggcuccucucuaagguacuugaaucucacccucguacaagaagucccggccuugugggaauacgaccaacccuucuuccaguaagcccuauggcucuacguuguugcucuccaauucaacccacugcuuccuuuuggccucuuacucccguuccacucgaggcucgugcuccuccacauccaccaggaccuaacccuccaacgccccgaggagugaccggaggaaacacuuaugcugugcccgccuugccuccuggcgccgugggcgauggacccccucgcguggauuucccucggucccgccugcgcuuuaaggaaaagcugggcgaaggacaauuuggagaaguucauuugugcgaaguggacaguccccaggaccuaguuucacucgacuucccuuugaauguccggaagggucauccucucuugguugcggugaaaauccuccggccagaugccaccaagaacgccaggaacgacuuccuuaaagaaguaaagauuaugagcaggcuuaaggacccuaacauaaucaggcugcuugggguuugcgugcaggacgacccguuauguaugaucaccgauuauauggagaauggcgaccugaaucaauuccugagcgcgcaccaguuggaggacaaggcugccgagggagcucccggcgacggacaggcugcccaaggcccuacuaucucuuacccuaugcugcuccauguggccgcgcagaucgccucuggcaugcguuaucucgcaacucugaauuag

SEQ ID NO: 79909 - RNA, 516 nt, Artificial Sequence
  derived and/or modified sequence
augcggcacaaccuuggagguaacuugggcgaucccagagcccgcgcuguuucugugccacuugguggaagagucgccagauucuuacaaugcagauuucuguuugcgggcccuuggcuccucuuuucugaaauuagcuuuauuagugacguggugaauaacucaaguccagcucugggcggcacuuuucccccagcuccuugguggccccccggcccuccccccacgaauuuuuccucccuggaacucgaaccuagagggcagcagccaguagccaaagccgaaggcaguccuacugccauccugaucggaugccuaguggccauuauccugcuuuuacuccugaucaucgcccuaaugcuguggaggcugcauuggcgccgucuguugaguaaaguguuggagagccauccacguacaagaucuccuggccuggucggcauucggccgacuccucucccugugucaccuauggcgcucgugcaucuaugcgaagucgauuccccgcaggacuag

SEQ ID NO: 79910 - RNA, 516 nt, Artificial Sequence
  derived and/or modified sequence
augagacauaaucuggggggaaaccugggcgacccgcgcgcccgcgccgucuccgugccauuagguggacgcguagcucgguuucugcagugucgcuuucucuuugcugggccauggcugcuuuuuagugagauaagcuuuauaagugacgugguuaauaauaguucucccgcccucggcggcacuuucccacccgccccaugguggcccccuggcccuccuccaacgaacuucagcucuuuggagcucgaaccacgcggccagcaaccuguugcuaaagccgaaggcaguccaaccgcuauucuaauuggaugccuuguggcuauuauacuccugcugcuguuaauaaucgcacugaugcuguggcgauugcacuggaggaggcuccucucuaagguccuagagucacacccccgaacaaggaguccuggacuggucgguauuagacccaccccucuuccugucucuccaauggcacucguccaccucugcgaagucgacucuccucaggauuag

SEQ ID NO: 79911 - RNA, 516 nt, Artificial Sequence
  derived and/or modified sequence
augagacacaauuuaggagguaacuugggcgacccaagggcuagagcaguuuccgugccucugggcggacggguagccagauuucuccaaugucgcuuccuuuucgcaggccccuggcugcucuuuucugaaaucuccuuuauauccgaugucgugaauaacuccucacccgcacucggaggcacuuuuccacccgcaccuugguggccgcccgggccaccgccgacuaacuuuucaucucucgagcuggaaccacgaggccaacaaccugucgccaaggccgaaggcagcccuacagcgauccucauugguugcuuaguggcaaucauucugcugcuucuccugauuauugcucucaugcuuuggagacugcacuggcggcggcugcuaucaaaaguccuggaaucccauccccgaacuaggucuccugggcugguugggauuagaccgaccccccugcccgucaguccaauggcacucguccauuuaugcgagguugacaguccccaggacuag

SEQ ID NO: 79912 - RNA, 516 nt, Artificial Sequence
  derived and/or modified sequence
augcgacauaaucuagguggcaaccucggagauccucgugcccgcgcaguaucugugccccugggagggcgagucgcucgcuuccuccagugucgcuuucuguuugccggaccauggcuucuguucagcgagaucucauuuauuuccgacgugguuaauaacagcucucccgcucuuggagguacuuuuccuccugcucccugguggcccccaggaccacccccuaccaacuucucaucgcucgaguuggaaccccggggccagcagcccguggcgaaagcugaaggcucuccaaccgccauauugauuggauguuuagucgcgauaauucuccuucuguugcugaucaucgcgcugaugcuuuggagacugcacuggcgacgccuccucucgaagguguuagaaucccaccccaggacccgaaguccaggauuagugggcauuagaccaacaccacuccccgugagccccauggcacucguucaccucugugaaguggacuccccccaggacuag

SEQ ID NO: 79913 - RNA, 1482 nt, Artificial Sequence
  derived and/or modified sequence
ucugaggcaguuuauuuaaacgauucuacguacgacggacacacaguugggggucuccaguauggugggcugggacagcuggccgauggugucguuggacuggaugacuucaggaagagccaggaguugcgcgucuggccuggauaugacuacgugggcuggucaaaccauaguuucuccuccggguauguugagauggaguucgaguucgacagauuaagagcuuuucaggccaugcagguucauugcaauaacaugcauacccuaggggcuagauuaccaggaggaguugaguguagauuccgcagaggacccgcuauggccugggaaggcgagccaaugagacauaaccuuggcggaaauuugggggauccgagagcccgcgcaguguccguuccucucggggguaggguggcucgguuucuucaaugccguuuccuguucgcugguccuugguuauuguucucugaaaucagcuuuauuagugacguugugaauaauucauccccugcauugggugggaccuucccgccugccccaugguggccccccggcccuccccccacuaauuuuucaagccuggaauuggagcccagaggacaacagccuguugccaaagccgaaggguccccuaccgccauacuuauuggaugccucguugcuaucauucuucuucuccugcugauuaucgcccuuaugcucuggaggcugcacuggcgccgccugcugucgaagguguuagagagccacccccgcacgagauccccggggcugguuggcauacgcccgacaccccugcccguuuccccaauggcccugagaugcugcaguccuauccagcccaccgcaaguuuuuggccccugacccccgugccacuugaggcccgugcucccccccauccuccaggaccgaauccccccaccccgcgaggugugacaggcggcaauacuuacgcaguccccgcucuccccccaggugccguuggcgacggaccuccaaggguagacuuuccuagguccagauuaagguuuaaagaaaagcucggugaaggccaauucggagaggugcaccuaugcgaaguggacagcccccaggaccuggucucacuggacuuccccuugaaugugagaaaggggcacccgcuccugguugcugucaaaauacugcgacccgaugcaacuaagaaugcaagaaaugacuuucucaaagaagucaaaauuaugucucgucugaaagacccaaauaucauuaggcugcucggcguuugcguucaggacgauccccucuguaugauuaccgacuauauggagaauggggaccucaaucaguuucucucagcccaucagcucgaagacaaagccgccgaaggugcaccaggggacggacaggcagcccaagggccgacaaucucauauccuauguugcugcauguggccgcccagaucgccucagggaugcgguaucuggccacuuuaaacuag

SEQ ID NO: 79914 - RNA, 1482 nt, Artificial Sequence
  derived and/or modified sequence
uccgaggcuguguaucugaaugauucaaccuacgacggacacaccgugggcggauugcaguacgggggccugggucagcuggcugacggcguugugggucuggacgauuuucgcaagucccaagaauugaggguguggcccggcuaugauuauguggguuggaguaaccauaguuucucgagugguuacgucgaaauggaauuugaguucgaccgcuugcgagccuuccaagccaugcaggugcacuguaacaacaugcauacauugggugcaagacuccccggaggcguggaguguagguucaggcguggccccgcaauggcaugggaaggugaaccaaugcgacauaaccucggagggaaucugggugaccccagagcuagagcagucucaguaccccugggggguagaguggcgcguuuuuuacaguguagguuucuuuuugcaggccccuggcuccucuuuuccgagaucagcuucauuagcgauguggucaacaacagcucuccggcgcugggcggaacauuuccaccugcccccugguggccucccgguccaccuccgacaaauuuuaguaguuuggaacucgaacccagaggccagcagccuguggccaaggccgaggguucccccacagccauucuuaucggcugucucguugcuauuauucuccuccuacugcucaucauugcguugaugcuguggagguuacacuggaggcgccuguugucgaaaguucuagaaucacauccucgcacucggucuccuggucuuguugggauuaggcccaccccacuuccuguguccccgauggcccuccgaugcuguucucccauccaaccuacagcauccuucuggccucugacuccuguaccccucgaggcacgagcacccccccacccacccggcccuaauccacccaccccaagaggcgugacgggcgggaacaccuacgcagucccagcucugcccccuggagccgucggugacggcccuccucgcguagacuucccucgauccaggcugagguucaaggaaaaacugggagagggccaguuuggcgagguccacuugugugaagucgacuccccccaggaccugguuagcuuagacuucccuuugaaugucaggaaaggccacccauuacuaguggccguuaagauucuaaggccugaugccacuaagaacgccagaaacgauuucuuaaaggaggucaaaaucaugagcagacucaaggacccaaacauuaucagguuacugggcgugugcgugcaggacgaucccuuguguaugaucaccgacuacauggagaauggagaccuuaaucaguuuuuauccgcgcaccaauuagaagacaaagcagccgagggugccccgggcgacggccaagcggcgcagggcccuacuauuaguuacccaaugcuucuacacguggcugcccagauugcauccggcaugcgguaucuggcuacccugaacuag

SEQ ID NO: 79915 - RNA, 1482 nt, Artificial Sequence
  derived and/or modified sequence
agcgaagccguuuaucugaacgacaguacauaugacggacauacuguggggggacuucaauacggugguuugggacagcucgcggacggggugguaggcuuagaugacuuucgaaaaagucaggagcuaaggguguggcccgguuacgacuacguugguuggucaaaucauucuuucaguucugguuaugucgagauggaguuugaguucgaucggcugagagcuuuccaagcuaugcagguccacuguaauaauaugcauaccuuaggcgcaaggcucccaggcggcguggaauguagguucagaagagguccggcaauggcuugggaaggugagccgaugcgacauaacuugggagggaacuugggggauccacgcgcccgagcugugucuguaccacugggcggccgcguggcaagauuuuuacagugccguuuccuguuugccggaccuuggcucuuauucucagaaaucuccuucaucucagauguggucaacaauucaucaccagcccuuggggguaccuuucccccggcgccuugguggccaccaggccccccaccuaccaauuucucuucucucgagcuagaacccagaggacagcaaccuguugcuaaggcggagggcucacccacagccauacugauagggugucuugucgcuauaauacuccugcuucuccugauuaucgcucuuaugcuguggcgcuugcauuggcguagauugcucagcaaagucuuagaaucccauccucgaacccgcucacccggacugguagguauccgacccaccccacugcccguuucaccaauggcccugcgcuguuguucuccuauccagccaaccgcuaguuucuggccucugaccccugugccgcuagaggcucgggcucccccacacccaccuggacccaacccccccacuccgagaggcgugaccggcggcaacacauaugccgugccagcccucccgccaggggcagugggcgauggcccaccccguguagauuucccgaggagcagacugcgguucaaagaaaagcugggugaaggucaguuuggggaaguacacuugugugaagucgacucuccucaggaucuugugagucuagauuucccacugaacguccgcaaaggacacccucuucucguggccguuaagauucugaggccagacgccacuaaaaaugcucguaacgauuuccugaaggagguaaagauuaugucacgacucaaggaucccaauauaauccggcuccugggcguguguguacaagaugauccccuaugcaugauaaccgacuauauggaaaacggggaccugaaccaguuccuuagcgcucaccaacuggaagauaaagcugcagaaggggcaccuggggauggccaggcugcccaaggcccaaccauaucuuacccuaugcuauuacacguggcugcucaaaucgcuaguggcaugcgcuaucuagcuacccucaauuag

SEQ ID NO: 79916 - RNA, 1482 nt, Artificial Sequence
  derived and/or modified sequence
agcgaggcuguguaucucaacgauucaaccuacgacggacauacaguugggggucugcaguacggagggcugggacagcucgcagauggcguugugggacuggaugacuuuagaaaaucacaggaacugcgaguguggccgggcuaugauuaugucggguggagcaaccacagcuuuucuucuggguauguggagauggaauucgaauucgacagguugagagccuuucaggcuaugcaggugcacugcaacaacaugcauacauugggcgccagacuuccagggggcguggagugucgguuucgcagagggccugccauggcaugggagggugaaccaaugaggcauaaccugggaggaaaucugggcgauccccgggcucgggcuguuuccgucccuuuagguggcagagucgcuagauuucugcaguguagauuccuuuucgcgggcccuuggcugcuauuuucagaaauuucuuucauuagugacguggugaauaacuccagcccagcacucgguggaaccuuccccccugcccccugguggccacccggccccccuccaacuaauuucuccagccuggaacuugagccccgaggucagcaaccaguggcaaaggcagaaggcagcccuacggcgaucuuaauugggugccuggucgccaucauccugcucuugcugcucauaauagcgcuaaugcuuuggagguugcauuggaggcggcuccucucuaagguacuugaaucucacccucguacaagaagucccggccuugugggaauacgaccaacccuucuuccaguaagcccuauggcucuacguuguugcucuccaauucaacccacugcuuccuuuuggccucuuacucccguuccacucgaggcucgugcuccuccacauccucccgguccaaauccaccuaccccacgcggaguuacaggugggaacacguaugccgucccggcgcuccccccgggggcuguaggagaugguccuccucguguggauuucccgcggucaagacuccgauucaaggaaaaacugggggaaggucaguuuggcgaggugcaccuaugugaaguagacuccccccaagaccuggugucguuggauuucccccugaacgugagaaaaggccacccgcugcucguugccguuaaaauccuaaggccagaugcuaccaagaaugcccgaaaugacuuucugaaagaaguuaagauuaugagcaggcuaaaagauccaaauauuauccgauuacugggaguuuguguacaggacgauccucuuugcaugauuacugauuauauggagaauggggaccugaaccaguuccuaucugcccaucaguuggaggacaaagcugcggaaggggccccaggagacgggcaggcagcucaaggaccaaccaucucguauccuauguuacuucaugucgccgcacagauugccuccggcaugagauaucucgccacgcugaauuag

SEQ ID NO: 79917 - RNA, 516 nt, Artificial Sequence
  derived and/or modified sequence
augcggcacaaccuuggagguaacuugggcgaucccagagcccgcgcuguuucugugccacuugguggaagagucgccagauucuuacaaugcagauuucuguuugcgggcccuuggcuccucuuuucugaaauuagcuuuauuagugacguggugaauaacucaaguccagcucugggcggcacuuuucccccagcuccuugguggccccccggcccuccccccacgaauuuuuccucccuggaacucgaaccuagagggcagcagccaguagccaaagccgaaggcaguccuacugccauuuuaauuggcugucuuguugccauaauucuacuucuucuccuaaucauugcccucaugcuguggagacugcauuggcgacggcugcuauccaagguccucgaaucacacccacguacccguaguccgggucucguugguauuaggcccacuccgcucccagucucgcccauggcccucgugcauuugugugaagucgauuccccccaagauuag

SEQ ID NO: 79918 - RNA, 516 nt, Artificial Sequence
  derived and/or modified sequence
augaggcacaaucuuggaggcaaccucggcgacccccgugcacgggccguuagcguuccacuuggaggccgaguggccagauuuuugcagugccguuuucuuuuugcaggaccaugguugcuguucucagagaucuccuuuaucuccgauguggucaauaacuccucuccagcucugggcggcaccuucccuccggcccccugguggccucccgguccuccucccaccaacuuuuccagucuagaacuggagccccgcggucaacaaccuguggccaaggccgagggcagcccuacagcuauucuaauuggaugccuuguggcuauuauacuccugcugcuguuaauaaucgcacugaugcuguggcgauugcacuggaggaggcuccucucuaagguccuagagucacacccccgaacaaggaguccuggacuggucgguauuagacccaccccucuuccugucucuccaauggcacucguccaccucugcgaagucgacucuccucaggauuag

SEQ ID NO: 79919 - RNA, 516 nt, Artificial Sequence
  derived and/or modified sequence
augagacacaauuuaggagguaacuugggcgacccaagggcuagagcaguuuccgugccucugggcggacggguagccagauuucuccaaugucgcuuccuuuucgcaggccccuggcugcucuuuucugaaaucuccuuuauauccgaugucgugaauaacuccucacccgcacucggaggcacuuuuccacccgcaccuugguggccgcccgggccaccgccgacuaacuuuucaucucucgagcuggaaccacgaggccaacaaccugucgccaaggccgaaggcagcccuacagcgauucuuauugggugucucguggcuaucauccugcuccugcugcugauaaucgccuuaauguuguggcgccuccacuggagacgcuugcuuuccaaaguacucgagucucacccucguacacgaagcccaggacuaguggguauuagaccgaccccucugccuguuucucccauggcucugguccacuuaugcgaagucgacagcccucaggacuag

SEQ ID NO: 79920 - RNA, 516 nt, Artificial Sequence
  derived and/or modified sequence
augagacacaaccucggaggaaacuugggcgacccucgagcccgcgccguuuccgugccccucggugguagagucgcgagguuucuucagugucgguuccucuucgcaggcccuuggcuccucuucucggaaauuucuuucauuagcgaugugguuaacaacucgucuccugcccucggcggcacuuuucccccugccccaugguggcccccuggccccccaccgacuaauuuuucaagccuugagcuggagccccgcggacagcagcccgucgcaaaggcugaaggcaguccaacugcaauucuaauaggcugccucguggcuaucaucuugcuccuucugcugaucaucgcucugaugcuguggcgcuugcauuggcgcaggcuucugucaaaaguauuggaaucucacccccggacccgcucuccaggauuaguugguaucagacccacaccuuuacccgucuccccuauggcacuugugcaucugugugaaguggauucaccacaggacuag

SEQ ID NO: 79921 - protein, 894 aa, Artificial Sequence
  derived and/or modified sequence
MSLPRCCPHPLRPEGSGAMGPEALSSLLLLLLVASGDADMKGHFDPAKCRYALGMQDRTIPDSDISASSSWSDSTAARHSRLESSDGDGAWCPAGSVFPKEEEYLQVDLQRLHLVALVGTQGRHAGGLGKEFSRSYRLRYSRDGRRWMGWKDRWGQEVISGNEDPEGVVLKDLGPPMVARLVRFYPRADRVMSVCLRVELYGCLWRDGLLSYTAPVGQTMYLSEAVYLNDSTYDGHTVGGLQYGGLGQLADGVVGLDDFRKSQELRVWPGYDYVGWSNHSFSSGYVEMEFEFDRLRAFQAMQVHCNNMHTLGARLPGGVECRFRRGPAMAWEGEPMRHNLGGNLGDPRARAVSVPLGGRVARFLQCRFLFAGPWLLFSEISFISDVVNNSSPALGGTFPPAPWWPPGPPPTNFSSLELEPRGQQPVAKAEGSPTAILIGCLVAIILLLLLIIALMLWRLHWRRLLSKAERRVLEEELTVHLSVPGDTILINNRPGPREPPPYQEPRPRGNPPHSAPCVPNGSAYSGDYMEPEKPGAPLLPPPPQNSVPHYAEADIVTLQGVTGGNTYAVPALPPGAVGDGPPRVDFPRSRLRFKEKLGEGQFGEVHLCEVDSPQDLVSLDFPLNVRKGHPLLVAVKILRPDATKNARNDFLKEVKIMSRLKDPNIIRLLGVCVQDDPLCMITDYMENGDLNQFLSAHQLEDKAAEGAPGDGQAAQGPTISYPMLLHVAAQIASGMRYLATLNFVHRDLATRNCLVGENFTIKIADFGMSRNLYAGDYYRVQGRAVLPIRWMAWECILMGKFTTASDVWAFGVTLWEVLMLCRAQPFGQLTDEQVIENAGEFFRDQGRQVYLSRPPACPQGLYELMLRCWSRESEQRPPFSQLHRFLAEDALNTV

SEQ ID NO: 79922 - DNA, 756 bp, Artificial Sequence
  derived and/or modified sequence
atgccccacctggccagcctgttcaccgccagcagcagatgctgcccccaccccctgagacccgagggcagcggcgccatgggccccgaggccctgagcagcctgctgctgctgctgctggtggccagcggcgacgccgacatgaagggccacttcgaccccgccaagtgcagatacgccctgggcatgcaggacagaaccatccccgacagcgacatcagcgccagcagcagctggagcgacagcaccgccgccagacacagcagactggagagcagcgacggcgacggcgcctggtgccccgccggcagcgtgttccccaaggaggaggagtacctgcaggtggacctgcagagactgcacctggtggccctggtgggcacccagggcagacacgccggcggcctgggcaaggagttcagcagaagctacagactgagatacagcagagacggcagaagatggatgggctggaaggacagatggggccaggaggtgatcagcggcaacgaggaccccgagggcgtggtgctgaaggacctgggcccccccatggtggccagactggtgagattctaccccagagccgacagagtgatgagcgtgtgcctgagagtggagctgtacggctgcctgtggagaggcgagtggctgagcttcctgggcatctgcttcctgagcagaggcctggagggcggcgagtgcggcgagtgggccagcagaatccccagccccgccggcaagctgagcctgtag

SEQ ID NO: 79923 - DNA, 580 bp, Artificial Sequence
  derived and/or modified sequence
cctgggcctagattccccagctgctgttctctggagggagatgctgcccccacccccttaggcccgagggatcaggagctatgggaccagaggccctgtcatctttactgctgctgctcttggtggcaagtggagatgctgacatgaagggacattttgatcctgccaagtgccgctatgccctgggcatgcaggaccggaccatcccagacagtgacatctctgcttccagctcctggtcagattccactgccgcccgccacagcaggttggagagcagtgacggggatggggcctggtgccccgcagggtcggtgtttcccaaggaggaggagtacttgcaggtggatctacaacgactgcacctggtggctctggtgggcacccagggacggcatgccgggggcctgggcaaggagttctcccggagctaccggctgcgttactcccgggatggtcgccgctggatgggctggaaggaccgctggggtcaggaggtgatctcaggcaatgaggaccctgagggagtggtgctgaaggaccttgggccccccatggttgcccgactggttcgcttcta

SEQ ID NO: 79924 - DNA, 459 bp, Artificial Sequence
  derived and/or modified sequence
agatgctgcccccacccccttaggcccgagggatcaggagctatgggaccagaggccctgtcatctttactgctgctgctcttggtggcaagtggagatgctgacatgaagggacattttgatcctgccaagtgccgctatgccctgggcatgcaggaccggaccatcccagacagtgacatctctgcttccagctcctggtcagattccactgccgcccgccacagcaggttggagagcagtgacggggatggggcctggtgccccgcagggtcggtgtttcccaaggaggaggagtacttgcaggtggatctacaacgactccacctggtggctctggtgggcacccagggacggcatgccgggggcctgggcaaggagttctcccggagctaccggctgcgttactcccgggatggtcgccgctggatgggctggaaggaccgctggggtcaggag

SEQ ID NO: 79925 - DNA, 939 bp, Artificial Sequence
  derived and/or modified sequence
ctcccgacacccgagccccgccggcgcctcccgctcccggctcccggctcctggctccctccgcctcccccgcccctcgccccgccgccgaagaggccccgctcccgggtcggacgcctgggtctgccgggaagagcgatgagagagatgctgcccccacccccttaggcccgagggatcaggagctatgggaccagaggccctgtcatctttactgctgctgctcttggtggcaagtggagatgctgacatgaagggacattttgatcctgccaagtgccgctatgccctgggcatgcaggaccggaccatcccagacagtgacatctctgcttccagctcctggtcagattccactgccgcccgccacagcaggttggagagcagtgacggggatggggcctggtgccccgcagggtcggtgtttcccaaggaggaggagtacttgcaggtggatctacaacgactgcacctggtggctctggtgggcacccagggacggcatgccgggggcctgggcaaggagttctcccggagctaccggctgcgttactcccgggatggtcgccgctggatgggctggaaggaccgctggggtcaggaggtgatctcaggcaatgaggaccctgagggagtggtgctgaaggaccttgggccccccatggttgcccgactggttcgcttctacccccgggctgaccgggtcatgagcgtctgtctgcgggtagagctctatggctgcctctggagggatggactcctgtcttacaccgcccctgtggggcagacaatgtatttatctgaggccgtgtacctcaacgactccacctatgacggacataccgtgggcggactgcagtatgggggtctgggccagctggcagatggtgtggtggggctggatgactttaggaagagtcaggagctgcgggtctggcc

SEQ ID NO: 79926 - DNA, 515 bp, Artificial Sequence
  derived and/or modified sequence
gtgtctgaaggtggctattcactgagcgatggggttggacttgaaggaatgccaagagatgctgcccccacccccttaggcccgagggatcaggagctatgggaccagaggccctgtcatctttactgctgctgctcttggtggcaagtggagatgctgacatgaagggacattttgatcctgccaagtgccgctatgccctgggcatgcaggaccggaccatcccagacagtgacatctctgcttccagctcctggtcagattccactgccgcccgccacagcaggttggagagcagtgacggggatggggcctggtgccccgcagggtcggtgtttcccaaggaggaggagtacttgcaggtggatctacaacgactccacctggtggctctggtgggcacccagggacggcatgccgggggcctgggcaaggagttctcccggagctaccggctgcgttactcccgggatggtcgccgctggatgggctggaaggaccgctggggtcaggag

SEQ ID NO: 79927 - DNA, 1106 bp, Artificial Sequence
  derived and/or modified sequence
gatcccagaagtaggaggggcgtcttcccctcgtgggccctgagcgggactgcagccagccccctggggcgccagctttggaggcccccgacagctgctctcgggagccgcctcccgacacccgagccccgccggcgcctcccgctcccggctcccggctcctggctccctccgcctcccccgcccctcgccccgccgccgaagaggccccgctcccgggtcggacgcctgggtctgccgggaagagcgatgagaggtgtctgaaggtggctattcactgagcgatggggttggacttgaaggaatgccaagagatgctgcccccacccccttaggcccgagggatcaggagctatgggaccagaggccctgtcatctttactgctgctgctcttggtggcaagtggagatgctgacatgaagggacattttgatcctgccaagtgccgctatgccctgggcatgcaggaccggaccatcccagacagtgacatctctgcttccagctcctggtcagattccactgccgcccgccacagcaggttggagagcagtgacggggatggggcctggtgccccgcagggtcggtgtttcccaaggaggaggagtacttgcaggtggatctacaacgactgcacctggtggctctggtgggcacccagggacggcatgccgggggcctgggcaaggagttctcccggagctaccggctgcgttactcccgggatggtcgccgctggatgggctggaaggaccgctggggtcaggaggtgatctcaggcaatgaggaccctgagggagtggtgctgaaggaccttgggccccccatggttgcccgactggttcgcttctacccccgggctgaccgggtcatgagcgtctgtctgcgggtagagctctatggctgcctctggagggatggactcctgtcttacaccgcccctgtggggcagacaatgtatttatctgaggccgtgtacctcaacgactccacctatgacggacataccgtgggcggactgcagtatgggggtctgggccagctggcagatggtgtggtggggctggatgactttaggaagagtcaggagctgcgggtctggcc

SEQ ID NO: 79928 - DNA, 1121 bp, Artificial Sequence
  derived and/or modified sequence
gacgctcggacaaagccaggcagcgttggcagccccagacccgaccccaaaggcctgagactggggtgactgggacctaagagaatcctgagctggaggcccccgacagctgctctcgggagccgcctcccgacacccgagccccgccggcgcctcccgctcccggctcccggctcctggctccctccgcctcccccgcccctcgccccgccgccgaagaggccccgctcccgggtcggacgcctgggtctgccgggaagagcgatgagaggtgtctgaaggtggctattcactgagcgatggggttggacttgaaggaatgccaagagatgctgcccccacccccttaggcccgagggatcaggagctatgggaccagaggccctgtcatctttactgctgctgctcttggtggcaagtggagatgctgacatgaagggacattttgatcctgccaagtgccgctatgccctgggcatgcaggaccggaccatcccagacagtgacatctctgcttccagctcctggtcagattccactgccgcccgccacagcaggttggagagcagtgacggggatggggcctggtgccccgcagggtcggtgtttcccaaggaggaggagtacttgcaggtggatctacaacgactgcacctggtggctctggtgggcacccagggacggcatgccgggggcctgggcaaggagttctcccggagctaccggctgcgttactcccgggatggtcgccgctggatgggctggaaggaccgctggggtcaggaggtgatctcaggcaatgaggaccctgagggagtggtgctgaaggaccttgggccccccatggttgcccgactggttcgcttctacccccgggctgaccgggtcatgagcgtctgtctgcgggtagagctctatggctgcctctggagggatggactcctgtcttacaccgcccctgtggggcagacaatgtatttatctgaggccgtgtacctcaacgactccacctatgacggacataccgtgggcggactgcagtatgggggtctgggccagctggcagatggtgtggtggggctggatgactttaggaagagtcaggagctgcgggtctggcc

SEQ ID NO: 79929 - DNA, 1118 bp, Artificial Sequence
  derived and/or modified sequence
gaggaactgagaggagaaggagaagagagtgggcccgccttcagggtctggggccttccaggttgggtcgtaggggcgggagcgcacaggctgcgagagaggagcaaaggttggtggagggagaagagcagtctggggcctggctggacaggcccccgacagctgctctcgggagccgcctcccgacacccgagccccgccggcgcctcccgctcccggctcccggctcctggctccctccgcctcccccgcccctcgccccgccgccgaagaggccccgctcccgggtcggacgcctgggtctgccgggaagagcgatgagagagatgctgcccccacccccttaggcccgagggatcaggagctatgggaccagaggccctgtcatctttactgctgctgctcttggtggcaagtggagatgctgacatgaagggacattttgatcctgccaagtgccgctatgccctgggcatgcaggaccggaccatcccagacagtgacatctctgcttccagctcctggtcagattccactgccgcccgccacagcaggttggagagcagtgacggggatggggcctggtgccccgcagggtcggtgtttcccaaggaggaggagtacttgcaggtggatctacaacgactgcacctggtggctctggtgggcacccagggacggcatgccgggggcctgggcaaggagttctcccggagctaccggctgcgttactcccgggatggtcgccgctggatgggctggaaggaccgctggggtcaggaggtgatctcaggcaatgaggaccctgagggagtggtgctgaaggaccttgggccccccatggttgcccgactggttcgcttctacccccgggctgaccgggtcatgagcgtctgtctgcgggtagagctctatggctgcctctggagggatggactcctgtcttacaccgcccctgtggggcagacaatgtatttatctgaggccgtgtacctcaacgactccacctatgacggacataccgtgggcggactgcagtatgggggtctgggccagctggcagatggtgtggtggggctggatgactttaggaagagtcaggagctgcgggtctggcc

SEQ ID NO: 79930 - DNA, 232 bp, Artificial Sequence
  derived and/or modified sequence
agatgctgcccccacccccttaggcccgagggatcaggagctatgggaccagaggccctgtcatctttactgctgctgctcttggtggcaagtggagatgctgacatgaagggacattttgatcctgccaagtgccgctatgccctgggcatgcaggaccggaccatcccagacagtgacatctctgcttccagctcctggtcagattccactgccgcccgccacagcaggt

SEQ ID NO: 79931 - DNA, 1093 bp, Artificial Sequence
  derived and/or modified sequence
ggctttaggaagttatttaactgatctctgccctagtttcttcatgtgttaaatatggatagtaatagtatctaccttatgaagtgactgtgaagataaaattatggattctgtttaagggtttaggccagtgtctggcacaggggaagcattctaaaaatatagctgatgctgttaaacaatgactgttgttgttgttttactgttattatccccaaagcggcccattctgtctgttgctgtcagctatgactcagtcccctgattaacttacgcaccacccattttatcccctgcagagatgctgcccccacccccttaggcccgagggatcaggagctatgggaccagaggccctgtcatctttactgctgctgctcttggtggcaagtggagatgctgacatgaagggacattttgatcctgccaagtgccgctatgccctgggcatgcaggaccggaccatcccagacagtgacatctctgcttccagctcctggtcagattccactgccgcccgccacagcaggttggagagcagtgacggggatggggcctggtgccccgcagggtcggtgtttcccaaggaggaggagtacttgcaggtggatctacaacgactgcacctggtggctctggtgggcacccagggacggcatgccgggggcctgggcaaggagttctcccggagctaccggctgcgttactcccgggatggtcgccgctggatgggctggaaggaccgctggggtcaggaggtgatctcaggcaatgaggaccctgagggagtggtgctgaaggaccttgggccccccatggttgcccgactggttcgcttctacccccgggctgaccgggtcatgagcgtctgtctgcgggtagagctctatggctgcctctggagggatggactcctgtcttacaccgcccctgtggggcagacaatgtatttatctgaggccgtgtacctcaacgactccacctatgacggacataccgtgggcggactgcagtatgggggtctgggccagctggcagatggtgtggtggggctggatgactttaggaagagtcaggagctgcgggtctggcc

SEQ ID NO: 79932 - DNA, 588 bp, Artificial Sequence
  derived and/or modified sequence
ctgccggtgagcgccagcttcagggtcccacccccccatgcctggctcttggctgaacatttcttcccagcgcttccagcagccagaggcaggcgcccaagctcgctggctgttgctgagggcctgtagagatgctgcccccacccccttaggcccgagggatcaggagctatgggaccagaggccctgtcatctttactgctgctgctcttggtggcaagtggagatgctgacatgaagggacattttgatcctgccaagtgccgctatgccctgggcatgcaggaccggaccatcccagacagtgacatctctgcttccagctcctggtcagattccactgccgcccgccacagcaggttggagagcagtgacggggatggggcctggtgccccgcagggtcggtgtttcccaaggaggaggagtacttgcaggtggatctacaacgactccacctggtggctctggtgggcacccagggacggcatgccgggggcctgggcaaggagttctcccggagctaccggctgcgttactcccgggatggtcgccgctggatgggctggaaggaccgctggggtcaggag

SEQ ID NO: 79933 - DNA, 758 bp, Artificial Sequence
  derived and/or modified sequence
ggctttaggaagttatttaactgatctctgccctagtttcttcatgtgttaaatatggatagtaatagtatctaccttatgaagtgactgtgaagataaaattatggattctgtttaagggtttaggccagtgtctggcacaggggaagcattctaaaaatatagctgatgctgttaaacaatgactgttgttgttgttttactgttattatccccaaagcggcccattctgtctgttgctgtcagctatgactcagtcccctgattaacttacgcaccacccattttatcccctgcagagatgctgcccccacccccttaggcccgagggatcaggagctatgggaccagaggccctgtcatctttactgctgctgctcttggtggcaagtggagatgctgacatgaagggacattttgatcctgccaagtgccgctatgccctgggcatgcaggaccggaccatcccagacagtgacatctctgcttccagctcctggtcagattccactgccgcccgccacagcaggttggagagcagtgacggggatggggcctggtgccccgcagggtcggtgtttcccaaggaggaggagtacttgcaggtggatctacaacgactccacctggtggctctggtgggcacccagggacggcatgccgggggcctgggcaaggagttctcccggagctaccggctgcgttactcccgggatggtcgccgctggatgggctggaaggaccgctggggtcaggag

SEQ ID NO: 79934 - DNA, 485 bp, Artificial Sequence
  derived and/or modified sequence
ggaagggagggagccgaggcgagggggaggcggcgcctgggcccgagccgccccagccctggctcctctccccggaacaggcccccgacagctgctctcgggagccgcctcccgacacccgagccccgccggcgcctcccgctcccggctcccggctcctggctccctccgcctcccccgcccctcgccccgccgccgaagaggccccgctcccgggtcggacgcctgggtctgccgggaagagcgatgagagagatgctgcccccacccccttaggcccgagggatcaggagctatgggaccagaggccctgtcatctttactgctgctgctcttggtggcaagtggagatgctgacatgaagggacattttgatcctgccaagtgccgctatgccctgggcatgcaggaccggaccatcccagacagtgacatctctgcttccagctcctggtcagattccactgccgcccgccacagcaggt

SEQ ID NO: 79935 - DNA, 799 bp, Artificial Sequence
  derived and/or modified sequence
ctgccggtgagcgccagcttcagggtcccacccccccatgcctggctcttggctgaacatttcttcccagcgcttccagcagccagaggcaggcgcccaagctcgctggctgttgctgagggcctgtagagatgctgcccccacccccttaggcccgagggatcaggagctatgggaccagaggccctgtcatctttactgctgctgctcttggtggcaagtggagatgctgacatgaagggacattttgatcctgccaagtgccgctatgccctgggcatgcaggaccggaccatcccagacagtgacatctctgcttccagctcctggtcagattccactgccgcccgccacagcaggttggagagcagtgacggggatggggcctggtgccccgcagggtcggtgtttcccaaggaggaggagtacttgcaggtggatctacaacgactgcacctggtggctctggtgggcacccagggacggcatgccgggggcctgggcaaggagttctcccggagctaccggctgcgttactcccgggatggtcgccgctggatgggctggaaggaccgctggggtcaggaggtgatctcaggcaatgaggaccctgagggagtggtgctgaaggaccttgggccccccatggttgcccgactggttcgcttctacccccgggctgaccgggtcatgagcgtctgtctgcgggtagagctctatggctgcctctggagggatggactcctgtcttacaccgcccctgtggggcagacaatgtatttatctgaggccgtgtacc

SEQ ID NO: 79936 - DNA, 873 bp, Artificial Sequence
  derived and/or modified sequence
gggagccactgggactactgggtccgggagggggaagggagggctgcgagcccgaacgcgcggcgagaaggccgaggggagggaggggagcgaggagcgggaggaggaagggagggagccgaggcgagggggaggcggcgcctgggcccgagccgccccagccctggctcctctccccggaacaggcccccgacagctgctctcgggagccgcctcccgacacccgagccccgccggcgcctcccgctcccggctcccggctcctggctccctccgcctcccccgcccctcgccccgccgccgaagaggccccgctcccgggtcggacgcctgggtctgccgggaagagcgatgagaggtgtctgaaggtggctattcactgagcgatggggttggacttgaaggaatgccaagagatgctgcccccacccccttaggcccgagggatcaggagctatgggaccagaggccctgtcatctttactgctgctgctcttggtggcaagtggagatgctgacatgaagggacattttgatcctgccaagtgccgctatgccctgggcatgcaggaccggaccatcccagacagtgacatctctgcttccagctcctggtcagattccactgccgcccgccacagcaggttggagagcagtgacggggatggggcctggtgccccgcagggtcggtgtttcccaaggaggaggagtacttgcaggtggatctacaacgactgcacctggtggctctggtgggcacccagggacggcatgccgggggcctgggcaaggagttctcccggagctaccggctgcgttactcccgggatggtcgccgctggatgggctggaaggaccgctggggtcaggag

SEQ ID NO: 79937 - DNA, 560 bp, Artificial Sequence
  derived and/or modified sequence
cgttggaacgtccttgggcttctgaactagtgcccatgtgtgcctcggcctttcccaagggccagcttcttcctgagatgctgcccccacccccttaggcccgagggatcaggagctatgggaccagaggccctgtcatctttactgctgctgctcttggtggcaagtggagatgctgacatgaagggacattttgatcctgccaagtgccgctatgccctgggcatgcaggaccggaccatcccagacagtgacatctctgcttccagctcctggtcagattccactgccgcccgccacagcaggttggagagcagtgacggggatggggcctggtgccccgcagggtcggtgtttcccaaggaggaggagtacttgcaggtggatctacaacgactgcacctggtggctctggtgggcacccagggacggcatgccgggggcctgggcaaggagttctcccggagctaccggctgcgttactcccgggatggtcgccgctggatgggctggaaggaccgctggggtcaggaggtgatctcaggcaatgaggaccctga

SEQ ID NO: 79938 - DNA, 886 bp, Artificial Sequence
  derived and/or modified sequence
gtcagggacactgagaggtgggtgtgtgcatgccacatttagcctcgctgtttacagccagttcaagatgctgcccccacccccttaggcccgagggatcaggagctatgggaccagaggccctgtcatctttactgctgctgctcttggtggcaagtggagatgctgacatgaagggacattttgatcctgccaagtgccgctatgccctgggcatgcaggaccggaccatcccagacagtgacatctctgcttccagctcctggtcagattccactgccgcccgccacagcaggttggagagcagtgacggggatggggcctggtgccccgcagggtcggtgtttcccaaggaggaggagtacttgcaggtggatctacaacgactgcacctggtggctctggtgggcacccagggacggcatgccgggggcctgggcaaggagttctcccggagctaccggctgcgttactcccgggatggtcgccgctggatgggctggaaggaccgctggggtcaggaggtgatctcaggcaatgaggaccctgagggagtggtgctgaaggaccttgggccccccatggttgcccgactggttcgcttctacccccgggctgaccgggtcatgagcgtctgtctgcgggtagagctctatggctgcctctggaggggtgagtggctcagcttcctgggaatctgtttcctgagcaggggactggagggtggggagtgtggagaatgggcatccaggatcccttctcctgctgggaagctgtcactctgaggagggggctagccagcattgtctcctccatgccaatgagccagtggagagatacaagaagggacctgaaacctgcccaggcctgatgcagggatggggga

SEQ ID NO: 79939 - DNA, 756 bp, Artificial Sequence
  derived and/or modified sequence
atgccacacctggcctccctgttcactgccagtagccgttgttgccctcacccgctgcggcctgagggctcaggagcgatgggtccggaagcactcagcagcctccttctcctgctgttggtggctagcggcgacgctgatatgaaagggcacttcgacccggctaagtgccggtatgcgttgggtatgcaagaccgcaccataccagacagcgatatctccgcctcaagctcttggagcgacagtacagcagcccggcactcccgcctggaatcctcagatggggacggtgcctggtgtcccgccggctctgtgttccctaaggaggaagaatatctgcaggttgatctgcagcggcttcacctggtggcactggtcggcacccaggggaggcatgccggcggtcttgggaaagaattcagtagaagctacaggcttaggtactctcgtgacggacgccgctggatggggtggaaggacaggtgggggcaggaggtgatttccggtaacgaggaccccgagggggtagttcttaaagacttgggccctcctatggtggccaggttggtaaggttttaccccagggcggaccgggtgatgtctgtgtgcctgagggtggaactgtacggttgtctctggcgcggtgaatggctgagcttcctgggaatatgttttctctccagggggcttgagggtggcgagtgtggagagtgggcttcaaggataccatctcccgctggcaaattgtctttatag

SEQ ID NO: 79940 - DNA, 756 bp, Artificial Sequence
  derived and/or modified sequence
atgccccacctggccagcctcttcaccgccagcagccgctgctgcccccaccccctgcggcctgagggcagcggggccatgggccctgaggccctgagcagcctgctgctgctgctgctggtggccagcggagatgctgacatgaagggccactttgatcctgccaagtgccgctatgccctgggcatgcaggacaggaccatcccagacagcgacatcagcgccagcagctcctggagcgacagcacagctgcccggcacagccggctggagagcagtgatggagatggagcctggtgcccagctggcagcgtcttccccaaggaggaggagtacctgcaggtggacctgcagaggctgcacctggtggccctggtgggcacccagggcagacatgctgggggcctgggcaaggagttcagccgcagctaccgcctgcgctacagcagagatggaagacgctggatgggctggaaggaccgctggggccaggaggtgatctctggaaatgaagatcctgagggcgtggtgctgaaggacctgggcccccccatggtggcccggctggtgcgcttctaccccagggctgacagagtgatgtctgtgtgcctgcgggtggagctgtatggctgcctgtggagaggagagtggctgtccttcctgggcatctgcttcctgagccggggcctggagggcggggagtgtggggagtgggccagccgcatccccagccctgctgggaagctgagcctgtag

SEQ ID NO: 79941 - DNA, 756 bp, Artificial Sequence
  derived and/or modified sequence
atgccccacctggccagcctgttcaccgccagcagccggtgctgcccccatccgctgaggccagaggggtctggcgccatgggccctgaggccctctcttctctactgttgctcttgctcgtggcttctggggatgcagatatgaaggggcacttcgaccctgccaaatgccggtacgcccttggcatgcaggacaggactatccccgattctgacatctcggcctcatcctcatggtcagattctaccgccgctcgccactcccggttggaaagcagcgatggtgatggcgcctggtgcccggccggatcagtgttccccaaggaggaggagtacctccaggtggacctccagcgcctacacctagtggctctcgttgggacccagggccgacatgccgggggtctaggaaaggagttctctagaagctatagactgaggtacagtagagacgggagacgctggatggggtggaaggacagatgggggcaagaagtcatctctggtaatgaagaccctgaaggcgtggttctgaaggaccttggtccccctatggtagctcggttagttagattctatcctcgggccgatcgcgtgatgtcagtgtgcttacgcgtggaattgtatggatgcctgtggcgtggggaatggttaagttttctgggcatttgcttcctgagcaggggcctagaaggcggcgagtgcggagaatgggcctcgaggatccccagtccggcaggtaagctgagtctatag

SEQ ID NO: 79942 - DNA, 756 bp, Artificial Sequence
  derived and/or modified sequence
atgccacacctagcaagtctgtttacggccagctccagatgctgcccgcatcctctgcggcctgaaggcagcggagcgatgggcccagaagcactcagctctctcctacttctgttgctggtggcatctggggacgccgatatgaagggccatttcgaccctgcaaagtgtaggtatgcactggggatgcaggataggaccattcctgatagtgacatcagtgcttcgagctcctggtctgacagtaccgccgctcgccacagccggctcgaaagttccgatggcgacggtgcatggtgtccagccggttcggtctttccaaaggaggaagaatacctgcaggtggatttgcagcgattacacctggtggctctggttggaacccagggccgacacgccggtggactgggcaaggaattctcaaggagctaccgtctcagatactcccgggatggcagaaggtggatggggtggaaggacaggtggggacaggaagtaatttctggcaacgaggaccccgaaggggttgtcctcaaggatcttggccctcctatggtcgcacggctcgtgcggttctacccgagggcggaccgcgtgatgagcgtgtgcctccgggtggagttatatggctgtctctggcgcggtgagtggttgtcctttctcggaatttgctttctgagcaggggactcgagggaggagagtgcggagagtgggcttcacgtattccctcacccgctggtaagctttcattgtag

SEQ ID NO: 79943 - DNA, 2685 bp, Artificial Sequence
  derived and/or modified sequence
atgagcctgccccggtgctgcccccaccccctgcggcccgagggctcaggagcaatgggccctgaggccttgtcttctctcctactgctgcttctggtggcatctggagacgcggacatgaagggccattttgatccagctaaatgtagatatgcactgggcatgcaggaccggacaattcccgacagcgacataagtgcaagctcaagttggagtgactccacagccgcacgtcactcacggctggaaagtagcgacggagacggcgcctggtgtcccgctggttcagtgttccctaaggaggaagaatatctgcaggtggatctccagagactccacctggtagctctggtgggcacccagggaagacacgcaggtggcctgggtaaagaattttccagatcttacagactgagatattctcgggatggacgtcgttggatgggatggaaagatagatggggccaggaagttatctccggaaatgaagatcccgaaggcgtggtgttaaaagatctcggcccccccatggtggcacgactcgttaggttctatcctagggctgatagggtgatgtccgtctgtttgcgcgtggagctgtacggttgcctgtggcgggacgggttactgtcttacactgccccagtggggcagacgatgtaccttagcgaggcagtgtacctcaatgacagtacctacgacggacatacagtcggcggactacagtatggggggctcggccagctggccgacggagtggtcggcctcgatgacttcaggaaatctcaggagttgcgcgtgtggcccggctacgactatgtaggctggtcaaatcacagtttctcctccggttatgtcgaaatggagtttgagttcgacaggttgagagcatttcaggccatgcaggtgcactgcaacaacatgcataccctgggcgctcgcttgcctggcggcgtggagtgtcgttttagaaggggccccgctatggcttgggaaggagaacctatgcgccacaatctcggggggaatctgggagatccccgagcaagagctgtgagcgtgccactgggagggagggttgcgaggtttctacagtgtaggttcctattcgcaggaccatggctcctgttctccgagatcagctttatatcagatgtcgttaacaatagctcccccgcactcggtgggacgtttccaccagccccatggtggccaccgggcccaccccctacgaacttttcatccttggaactagagcccagaggccaacagccggtcgcaaaagccgagggctcacctacagcaattttaatcggctgcctggtagccataatactgcttctcctgctgatcatcgcgttgatgctgtggagattgcactggcgccgcctcctgtccaaggcggaaaggcgcgtcttagaggaagaactcaccgtgcacttaagcgttccaggcgatacaattctgatcaacaatcggcctggtccacgcgaaccccccccttaccaggaaccccgtcctcgagggaaccccccgcacagtgcaccttgcgttcccaatggaagcgcgtatagcggagactacatggagccggaaaaaccaggtgctccacttcttccccctccacctcaaaactccgtacctcactatgctgaagccgacattgtaaccctccagggcgtgaccggagggaatacttacgctgtccctgcgctgccaccaggtgctgttggcgatggccctcccagggtggactttcccaggtcccggcttcggttcaaagagaagctgggggaaggtcaattcggcgaggtgcacctgtgcgaggttgacagcccccaggatctggtttccctggattttcctctgaacgtgagaaaagggcatcccctactggttgctgttaaaattctgaggcctgacgcgacaaaaaatgctcggaatgactttctgaaggaggtaaagataatgagcagattgaaggaccctaacatcattcgactgcttggtgtatgcgtgcaagatgacccactgtgcatgattaccgactacatggagaacggtgacctgaaccagtttttgtctgcacatcagctggaggacaaggctgcggaaggcgcccctggcgacggacaggccgctcaaggcccaactatttcctaccccatgctccttcatgtggctgcccagattgcttcaggcatgaggtatttggctacactgaacttcgtacacagggacctggcaactcggaattgtctggtgggcgagaacttcacgattaaaattgccgactttggaatgtcccgaaacctttacgcgggcgattattacagagtccagggcagggctgtgctgcctattagatggatggcttgggaatgtatcttgatgggcaagttcaccacggcctccgatgtctgggcatttggtgtgaccttgtgggaagtgctcatgctttgccgtgcacagccattcgggcagttgaccgatgagcaagtaatagagaacgcaggggaattcttcagggatcagggtaggcaggtgtacctgagccgaccacccgcttgcccccaggggttgtatgagctaatgctgcgctgttggagccgggaaagcgaacagagaccacccttcagtcagctccaccgctttctggccgaggatgctctcaatacggtgtag

SEQ ID NO: 79944 - DNA, 2685 bp, Artificial Sequence
  derived and/or modified sequence
atgagcctgccccggtgctgcccccaccccctgcggcccgagggcagtggcgcaatgggtcctgaagccctgagcagccttctgctgttgctcttggtggcttcaggtgacgccgatatgaaggggcattttgatccagcgaaatgcagatacgccttaggcatgcaggacaggacaatccccgacagtgacatcagcgcttcctcgagttggagtgactccacggcagcaagacactctaggctggaaagtagcgacggcgacggcgcctggtgccctgccgggtccgtctttcctaaggaagaggaatacctgcaagtcgacctgcaaagattacatctggtggccctcgttgggacccaaggaaggcatgcaggtgggttgggaaaggagttctctcgttcttaccggctcaggtatagtcgtgacgggcggcgatggatggggtggaaggaccgctggggccaggaggtgatctccggtaacgaggatcccgaaggcgtggtcctcaaggacctggggcccccaatggtggccagactggtgcggttttatccccgggccgaccgagtgatgtcggtgtgtttacgcgtcgagctatatggatgcctgtggcgtgatggtctcttgagctacacagcacctgtcggacagacaatgtacttatctgaggcagtctatctaaacgacagcacgtacgacggccacacagttggtggactccaatatgggggcctcgggcagctcgccgatggtgtggttggtctcgacgatttcagaaagtcacaggagctgagagtgtggcccggctacgactatgtgggctggagcaatcactcttttagtagtggatacgtagagatggaatttgagtttgaccgattgagagcctttcaagcgatgcaggtccattgcaacaatatgcacacgctgggcgcaagattacctgggggcgtcgagtgtagatttagacgcggacccgccatggcttgggaaggagaaccaatgaggcataacctgggaggcaacctcggcgaccccagggcgcgggcagtctcagtgcccctgggaggacgggtcgccaggttcttacaatgccgatttttgtttgccggtccctggttgttgtttagcgaaatctctttcatatctgatgtggtcaacaatagcagcccagccctcgggggaacattcccgcctgccccatggtggccccctggccccccaccaaccaattttagctcactcgagctggaaccaagagggcagcaacccgtggcaaaggccgagggctcccctacagcaatacttattggctgtctagtagctattatcctactgctcctcttgattatcgcattgatgctgtggaggttacactggcgaaggttgctgagtaaggctgagcgacgggtgctggaggaggaattgactgtgcacctgtctgtccctggcgatacaatccttatcaacaatcggcccggcccccgcgaaccccccccttaccaggagccaaggccgagaggcaatcccccacactcggcgccatgcgtcccaaatgggagcgcttactctggggactatatggagcccgagaaacctggagcaccgcttctcccccctcctccccagaattccgtgcctcactacgccgaagccgatattgttacgcttcagggtgtgactggcggcaatacttatgctgtcccggctctgcctcctggggctgttggggacgggcccccacgcgtggactttccacgttccaggctgcgatttaaagagaaactcggcgaggggcagtttggagaggttcatttatgtgaggttgatagcccgcaagatctggtttcgctcgactttcctctgaatgtgcgcaaaggtcatccattgctagttgccgttaagatcctcaggccagatgctacaaaaaatgcccggaatgattttcttaaagaagtcaaaattatgtcacgccttaaagatccaaatataatccgactactgggggtgtgcgttcaggatgatccactctgtatgatcactgactacatggagaatggcgaccttaaccagttcttgagcgcacatcagctggaggacaaggccgccgagggcgcccctggcgacggccaggcagcccagggcccgactataagctatccaatgctcttacacgtggccgcccagattgccagtggtatgagatacctcgccactctgaatttcgtgcaccgggacctggccacccggaattgtctggtgggtgagaactttacaattaagatcgctgacttcggtatgtctcggaatttatacgctggggattattaccgtgttcaaggtagggctgtcctgcctatcaggtggatggcatgggagtgcatcctgatgggaaagtttaccacagcctccgacgtgtgggcctttggcgttactttgtgggaagtacttatgctttgccgggcccaaccgttcggccagctcactgacgagcaggtgatcgaaaacgctggggagttcttccgagaccagggcagacaggtttacctgtccagaccacctgcttgtcctcagggcctctatgagttaatgctgaggtgctggtcacgtgagtcggaacagagaccaccattttcccagttgcaccgcttcctagccgaggatgcactgaataccgtgtag

SEQ ID NO: 79945 - DNA, 756 bp, Artificial Sequence
  derived and/or modified sequence
atgccccacctggccagcctgttcaccgccagcagccggtgctgcccacatccccttcggcccgagggatctggagcaatgggtcctgaggccctgagttccttactgctgctgctgctggtggcttccggagatgccgacatgaagggccacttcgacccggccaagtgcagatatgccttggggatgcaagataggactattcccgactcagatatcagtgccagctctagctggagcgactcaacagccgcccgccatagtcgcctagaaagttctgacggggacggggcatggtgccccgccgggtctgtcttcccgaaagaggaggagtacctgcaggtggatctgcagcgcctccaccttgtcgcgctggtaggtacgcagggaagacacgccggagggctggggaaagagttttcccgttcttaccgcttacgctattcccgtgacggtcggcgctggatgggatggaaagacaggtggggacaagaggtcatatccggcaatgaggaccccgagggcgtggtgctgaaggacctgggtcctcctatggtagcaagactggtgcggttctaccctcgcgcggatcgcgtgatgtccgtttgcctcagagtcgaactgtacggatgcctgtggcggggggagtggctgtccttcttggggatttgcttcctgtcccgcgggctcgaggggggcgagtgcggagagtgggcatcaagaatcccaagcccagccgggaagctctctctgtag

SEQ ID NO: 79946 - DNA, 2685 bp, Artificial Sequence
  derived and/or modified sequence
atgagcctgccccggtgctgcccccaccccctgcggcccgagggcagcggggcaatgggcccagaagcactgtccagtctgctgctgttattgttggtggcaagtggcgacgcagatatgaagggccacttcgatccggcaaaatgtaggtacgctctgggcatgcaggatcggacaatcccagatagcgatatttcagcttcgtcctcttggtcagattctacagccgcaaggcattcgcgcctcgaatccagcgacggcgatggggcctggtgccccgccgggtcggtattccccaaggaagaagaatacctgcaggtggacttgcagcggttacatctcgtggccctggtcgggacccagggaaggcacgcaggtggcctcggaaaggaattcagtagatcatacaggttgcggtacagtcgggatggaaggagatggatggggtggaaagaccggtggggtcaagaggtcatctcaggtaacgaagacccagagggggtcgtactgaaagacctggggccccctatggtggcgagattagttagattctacccacgcgcggacagagtaatgtctgtctgcctgagggttgagctgtacggctgtctttggcgggatggacttctgagttatacagctcctgtaggccagacaatgtatctgtctgaagcagtctatcttaacgatagcacttatgacggccacacagtcggagggctccaatacggaggacttgggcaactagccgacggcgtggtcggtctggacgattttcggaaatcgcaggagctgcgcgtatggccagggtatgattatgtggggtggtcaaaccacagtttctcttctgggtacgtagaaatggagttcgagtttgacagactgagggccttccaggccatgcaggtccactgtaataatatgcacacactgggagcccggctccccgggggagtggagtgcaggttcaggcgaggacccgccatggcatgggagggagagcctatgagacacaacttgggcgggaacctaggagaccccagggcgcgggctgtgagcgtacccctcggaggcagagtcgctcgcttccttcaatgtaggttcctcttcgccggcccctggcttctcttctccgagatcagcttcatctccgacgtcgtgaataactcatctcctgcgctcggtgggacctttccccctgcaccctggtggccacctggaccgccccccacaaacttttccagcctggagctggagccacgcggccaacagcccgttgccaaagcagagggctcccccaccgcaattctcatcggctgcctcgttgcaattatcctgctgctgctgctgattatcgccctcatgctctggaggctgcattggcgaaggctactgagcaaggcagagcgtagagtgctggaagaggagctgacagtccatcttagcgtgccaggagacacaattctgatcaataaccgacccgggccacgggaacccccaccttaccaggaaccgaggcctcgcggaaatcctccccacagcgcaccctgtgtaccaaatggctcagcatatagcggggattatatggaacctgagaaaccaggtgcccccctgctccctccaccaccacagaatagcgtgccccattatgccgaagctgatatcgttacattacagggagtgacagggggcaacacatacgctgtgccagccctcccccctggcgccgtaggtgacgggcctcctagggttgacttcccccgaagtcgcttaaggtttaaagaaaaactcggcgaggggcagttcggggaggttcatttgtgtgaggtcgatagtccgcaagatttagtttccctggattttccactgaacgtcagaaaagggcaccccctcctagtcgcagttaagatcctgaggccagacgctaccaaaaatgctaggaacgactttctgaaggaggtcaagatcatgtctagacttaaagaccctaacatcatccgactgctaggggtgtgcgtccaggacgacccgctgtgtatgattacggattatatggagaacggtgacttgaaccaattcctgagcgcccaccagttggaagacaaagctgctgagggagcgcctggtgacggtcaggctgcccagggtccgaccatatcctaccctatgttgctacacgtggctgcacagattgcgagtggcatgaggtacttagccacattaaatttcgtgcacagggatctcgctaccagaaactgtcttgtcggtgaaaatttcaccattaaaatcgccgatttcggaatgtccagaaatctgtatgctggagattattacagggttcagggtagggctgtcctgcctatacgttggatggcctgggagtgcatccttatggggaaattcacaactgcgagcgacgtgtgggcatttggggtgacactatgggaggttttgatgctgtgtcgagctcagccattcggccagctgactgatgagcaggtgattgaaaacgccggggagttcttccgggatcagggaagacaagtgtacctgagtagaccacctgcatgtcctcaggggttatatgagcttatgttgcgatgctggagcagggaatctgagcagaggccgccttttagtcagcttcatcggttcttggccgaagatgctctcaatacagtgtag

SEQ ID NO: 79947 - DNA, 756 bp, Artificial Sequence
  derived and/or modified sequence
atgccccacctggccagcctgttcaccgccagcagccggtgctgcccccatccattgcgccctgaaggctcaggggccatggggcccgaggccctctcaagcctgctcttgctccttctggtcgcatcgggcgacgccgatatgaaaggccacttcgaccctgcaaaatgtagatatgccctcggcatgcaagatcggaccatcccggactctgatattagcgcaagctccagttggtctgattcaacggctgctcgccactcaagactggagagttccgatggtgatggtgcctggtgcccagctggttccgtgttccctaaggaagaagagtatctgcaggtcgaccttcagcggctgcatctcgtggccctggttggaacccagggccgacatgcggggggtctgggcaaagaattctcacgcagttacaggctacggtacagtagggacgggagacgatggatgggatggaaggatcgatggggacaagaggtcattagcgggaacgaggatccggaaggagttgtactgaaggacctgggaccacccatggttgctcggctcgttagattctatccacgggccgatagagtgatgtctgtctgcctgagggtggagttgtacggctgcctgtggaggggcgagtggctctcgtttttagggatctgtttcctgtcgcgcggactcgaagggggggagtgtggtgaatgggcctcccgaattccctcaccagcagggaagttatcgctatag

SEQ ID NO: 79948 - DNA, 756 bp, Artificial Sequence
  derived and/or modified sequence
atgccccacctggccagcctgttcaccgccagcagccggtgctgccctcacccgttgcgtcccgaggggtctggagccatggggcctgaggcactgtcgagcctgctgctactccttctggtggctagtggggatgccgacatgaagggtcactttgatcctgcaaagtgtcgctatgcactgggcatgcaggatagaaccattccagatagtgacatatctgcctcctcctcttggtctgactccactgcagcaagacacagcaggttggagtcatccgacggcgatggggcgtggtgcccagcaggctcagtattcccaaaagaagaagagtatctgcaggttgatctccaacgcttacaccttgtcgctctggtggggacgcaggggcgacacgctggaggtctgggaaaggagttctccaggtcatataggctgaggtactcccgagatggaagaagatggatgggatggaaagaccgctggggccaggaggtcatctcaggaaatgaagaccctgaaggtgttgtcctgaaggatctgggtccacccatggtggcacggttagtgagattctaccctcgggctgatcgggtcatgagcgtctgtctgcgagtcgagttgtatgggtgtctgtggcggggagaatggctttcattcttgggaatttgcttcctttcacgcgggttggagggcggagagtgcggcgaatgggcttcccgaattccctctcctgctggcaaacttagtttgtag

SEQ ID NO: 79949 - DNA, 756 bp, Artificial Sequence
  derived and/or modified sequence
atgccccacctggccagcctgttcaccgccagcagccggtgctgcccgcatccgttgcgacctgaaggatccggcgcaatgggccccgaggccctgtcctcactgctgcttctgttacttgtggcttcaggagacgctgacatgaaagggcactttgatccagccaagtgcaggtacgcactgggaatgcaagatcggaccattcccgactcagacatctctgcttcgtccagctggtccgacagcacagccgcccgacactctaggctggagtcctccgatggcgatggcgcctggtgccctgctgggtcagttttcccaaaagaggaagagtatctccaggttgatctgcaaaggctgcatctggtggccctcgtaggcactcagggtcgacacgcggggggcctcggcaaagagtttagtcgatcctatcggctccgttacagccgcgacggccgtcggtggatgggctggaaggacaggtgggggcaggaagttatttctggcaacgaggatccagagggtgttgtattgaaggatctcggaccccctatggtggctcggctggttagattctacccgagggctgaccgggtcatgtcggtctgcctgcgtgtcgaactgtatggttgcttgtggcgtggggaatggctgagctttctcggcatctgttttctgtcaagaggtctggaaggaggtgagtgcggcgaatgggcttcgcgcatccccagtcccgccggcaaattaagcttatag

SEQ ID NO: 79950 - DNA, 2685 bp, Artificial Sequence
  derived and/or modified sequence
atgagcctgccccggtgctgcccccaccccctgcggcccgagggcagcggcgctatgggcccggaggctcttagcagcctgttactcctactgttggtggccagcggagatgcggatatgaaaggacatttcgatcccgccaagtgcagatatgctctgggaatgcaggacaggaccatccccgacagcgatatctccgctagcagttcctggtctgattccactgcagcccggcattcccgcttggagtcgagcgatggagacggagcatggtgtccagctggcagcgtctttccaaaggaagaggagtacttgcaggtagaccttcagagacttcatctggtcgccctggtcggcactcaaggaaggcacgccggcggcctcgggaaagaattttcgagatcatatcgactgcgctacagccgggacggtagacgctggatgggatggaaggatcgttggggccaggaggtcatctctggcaatgaagatccagaaggggtcgtactgaaggatctggggccgcctatggtggccagactggtgaggttctaccctagggctgaccgagtgatgagtgtctgtttaagagtggagctgtacgggtgtttatggcgagatggtctcctatcttacactgccccagtgggtcagacaatgtacctgagcgaggctgtatatctgaacgactccacatacgacggccatacagtggggggcttgcagtacgggggtctggggcagctggcagacggcgtagtggggctggacgactttcgtaagtcccaagagcttagagtgtggcccggttacgattacgtgggctggagcaatcacagctttagtagtggatatgtggagatggagttcgagttcgatcgcctcagagcattccaggctatgcaggtgcactgtaataacatgcacactctgggggcaaggctgcctggcggagtggagtgtcgattcagacgagggccagccatggcttgggaaggcgagcctatgcgccacaatctgggagggaacctcggtgatccaagagctcgcgctgtgtcagtcccgttgggaggccgagtcgcgcggttcctgcaatgtaggttcctttttgcaggaccatggttgcttttctccgagatcagtttcattagtgacgtcgtgaataactcctctccagccttgggcggaacctttcccccagcgccatggtggcctcctgggccgcccccaacgaacttctcatcactagagctcgaaccccgcgggcagcaacctgtcgccaaggccgagggtagtcccaccgctatcctgataggctgtctagtggccatcatacttttacttctgctgatcatagctttgatgctgtggaggctgcattggcggcgactcctgagtaaagccgagaggcgagtattggaagaggaactgaccgttcacctgagcgtgccaggcgacaccatcctgatcaacaacaggcccggcccccgggagcctccgccttatcaggagcctcggccacggggtaaccccccccacagcgccccatgcgtcccaaacgggagtgcttattcgggtgattacatggaacccgaaaagccaggggctccactgctgcctcccccccctcagaactcagtaccacattacgcagaagctgatatcgtgactctacagggcgtcaccggaggcaacacctatgctgttcccgccctgcccccgggtgctgttggcgatggtcctcctagagttgattttcctcggtctcggctgcggtttaaagaaaagctgggggaaggacagttcggtgaagtccatctgtgtgaggtggactcaccacaggacttagtctcactggattttccgctgaacgttcgcaagggacaccctctacttgtggcggtcaaaatcttacggcccgatgctaccaagaatgctcgcaacgacttcctaaaagaggtgaagattatgtcaagattgaaggatccaaatatcatcagattgttgggcgtgtgcgtccaggatgacccactctgtatgatcactgattatatggaaaacggcgatctgaatcagtttttaagcgcacaccaactggaagataaggctgcagaaggcgccccgggggacggccaagccgctcagggccctacaatcagctatcccatgttattacacgtggctgctcagatcgcgagtggcatgcgctatctcgcaacattaaacttcgtccatcgggatcttgccacccggaattgtcttgtgggtgaaaattttacaatcaagatcgccgactttgggatgtccaggaacctgtacgcaggcgattactatcgcgtgcagggtagagcggttctcccaattagatggatggcctgggagtgtatacttatgggtaagttcaccaccgcttcagatgtttgggcttttggcgtgaccttatgggaagtgctgatgctgtgcagggctcaaccatttggtcagctcacagacgagcaggtcatcgagaatgcgggagagttcttcagagatcaggggcgccaagtctatctgagcaggccgcctgcatgtccgcaaggattgtacgagttaatgctgcgatgctggtctcgggagtctgagcagcggcctcccttcagccagcttcaccgctttcttgctgaagacgcactaaatacagtgtag

SEQ ID NO: 79951 - DNA, 675 bp, Artificial Sequence
  derived and/or modified sequence
ctggaggggtaggtgttctgggggaatgaatccctgggggcttggtgggacaggaaggcgggaagaagctgctcttcgagtgaccctggggctgtctgttagcaggtccctcagccgttggaacgtccttgggcttctgaactagtgcccatgtgtgcctcggcctttcccaagggccagcttcttcctgagatgctgcccccacccccttaggcccgagggatcaggagctatgggaccagaggccctgtcatctttactgctgctgctcttggtggcaagtggagatgctgacatgaagggacattttgatcctgccaagtgccgctatgccctgggcatgcaggaccggaccatcccagacagtgacatctctgcttccagctcctggtcagattccactgccgcccgccacagcaggttggagagcagtgacggggatggggcctggtgccccgcagggtcggtgtttcccaaggaggaggagtacttgcaggtggatctacaacgactgcacctggtggctctggtgggcacccagggacggcatgccgggggcctgggcaaggagttctcccggagctaccggctgcgttactcccgggatggtcgccgctggatgggctggaaggaccgctggggtcaggaggtgatctcaggcaatgaggaccctga

SEQ ID NO: 79952 - DNA, 2631 bp, Artificial Sequence
  derived and/or modified sequence
atgggaccagaagccctgtctagcctcttgcttctgctcttggttgcatcaggcgacgccgatatgaaggggcatttcgatccagctaaatgcaggtatgctttggggatgcaggatcgcactatacctgattccgacatctctgccagtagtagctggagcgatagtaccgccgctcgccattcacgactagagtctagcgacggcgatggagcttggtgtcctgccggatccgtgtttccaaaggaggaagagtatctccaggtcgatctccagcggttacatcttgtggctctggtgggcacacagggtaggcacgcgggaggcctgggaaaggagttcagccgaagttaccggctgcgatacagtagagatgggaggcgctggatggggtggaaggaccgctggggccaggaagtaatcagcggaaacgaagatcctgagggcgtcgtcctgaaagaccttggtccccctatggttgcccgtctcgtccgcttttaccccagggcagatagggtcatgtccgtatgcctgcgcgtcgagctgtatggatgcctctggagggatggtttgctgtcttataccgcgccagttgggcagaccatgtacctgtccgaagctgtttacttaaatgacagcacttatgatggacacaccgtgggcggtcttcagtatggcggtctgggccagctagccgacggtgtagtgggccttgatgacttccggaaaagtcaggagctaagggtttggcccggttacgattatgttggatggtccaatcactccttcagcagtgggtatgttgagatggagttcgaattcgaccgcctgagggcctttcaggccatgcaggttcactgcaataatatgcataccctcggtgcgaggcttccaggcggtgttgagtgccggttcagaaggggtcctgccatggcttgggaaggcgaaccaatgaggcataatttgggcggtaatctcggggaccccagagcccgtgccgtgagtgttcctctgggagggagagtggccagatttctgcagtgtcgctttttattcgcgggtccatggcttctcttctctgaaatttcgttcatttctgatgttgtgaataactcttcccccgcattaggaggcacatttccgcctgccccatggtggcccccaggaccccctcccacgaacttttcctcactggaattagagcccagagggcagcagccagtggccaaggcggagggctcacccaccgcaattcttattggatgtctagttgcaatcatcctcctccttcttctcattatcgcactaatgctgtggcgcttacattggaggcgcctcctttcgaaagctgaaagaagggttttagaagaagaactgacagtccacttgtccgtccccggagacactattctgattaacaaccgcccaggcccacgagaacccccaccttaccaggagccaagaccaaggggtaatcctccccattccgctccctgcgttcctaacggcagtgcctacagcggagattacatggaacccgaaaagccaggagcacccctgctgcctccccctcctcaaaacagcgtaccccattacgctgaagccgatattgttacacttcagggcgtcacggggggaaatacatacgccgtccccgctcttccacctggagcggtcggtgatggaccgccacgcgtggacttccccagatccagactcaggttcaaggaaaaattgggagaagggcagtttggagaggtgcacctctgcgaggtcgattctcctcaggatttggtgtctctggatttccccttgaatgtgcggaaaggccaccccttgctggtggcagtgaagattttgcgtcctgacgctacaaagaatgctagaaacgacttcctcaaagaagttaagattatgtcccgacttaaggatccgaatatcataaggctgctcggcgtgtgcgtgcaagacgatccgctgtgtatgattaccgattacatggaaaatggagacttgaaccaattcctctcagctcatcagctggaagacaaggccgcagagggcgcaccgggtgacgggcaggccgctcagggcccaactatttcttatccgatgcttctgcatgttgcagcccagatcgcttcaggcatgaggtaccttgcaactttgaactttgttcaccgagatctggccaccaggaactgtttggtaggtgaaaacttcaccatcaagattgccgattttggaatgtcaaggaatttatatgccggagactattaccgggttcaaggcagggccgtgcttccaatccgatggatggcatgggagtgtattctcatgggaaagttcactactgcctctgacgtgtgggcctttggtgttacgctgtgggaggttctgatgctgtgcagagcacagcctttcggacagctgactgatgagcaagtgattgagaatgccggagagttctttagggatcagggaagacaggtgtatctgagtaggcccccagcatgtccacaagggttgtacgagctgatgctccggtgctggagtcgagagagtgagcagaggcccccattcagccagctgcataggttcctggccgaagacgccctgaacacagtttag

SEQ ID NO: 79953 - DNA, 3832 bp, Artificial Sequence
  derived and/or modified sequence
ggctttaggaagttatttaactgatctctgccctagtttcttcatgtgttaaatatggatagtaatagtatctaccttatgaagtgactgtgaagataaaattatggattctgtttaagggtttaggccagtgtctggcacaggggaagcattctaaaaatatagctgatgctgttaaacaatgactgttgttgttgttttactgttattatccccaaagcggcccattctgtctgttgctgtcagctatgactcagtcccctgattaacttacgcaccacccattttatcccctgcagagatgctgcccccacccccttaggcccgagggatcaggagctatgggaccagaggccctgtcatctttactgctgctgctcttggtggcaagtggagatgctgacatgaagggacattttgatcctgccaagtgccgctatgccctgggcatgcaggaccggaccatcccagacagtgacatctctgcttccagctcctggtcagattccactgccgcccgccacagcaggttggagagcagtgacggggatggggcctggtgccccgcagggtcggtgtttcccaaggaggaggagtacttgcaggtggatctacaacgactgcacctggtggctctggtgggcacccagggacggcatgccgggggcctgggcaaggagttctcccggagctaccggctgcgttactcccgggatggtcgccgctggatgggctggaaggaccgctggggtcaggaggtgatctcaggcaatgaggaccctgagggagtggtgctgaaggaccttgggccccccatggttgcccgactggttcgcttctacccccgggctgaccgggtcatgagcgtctgtctgcgggtagagctctatggctgcctctggagggatggactcctgtcttacaccgcccctgtggggcagacaatgtatttatctgaggccgtgtacctcaacgactccacctatgacggacataccgtgggcggactgcagtatgggggtctgggccagctggcagatggtgtggtggggctggatgactttaggaagagtcaggagctgcgggtctggccaggctatgactatgtgggatggagcaaccacagcttctccagtggctatgtggagatggagtttgagtttgaccggctgagggccttccaggctatgcaggtccactgtaacaacatgcacacgctgggagcccgtctgcctggcggggtggaatgtcgcttccggcgtggccctgccatggcctgggagggggagcccatgcgccacaacctagggggcaacctgggggaccccagagcccgggctgtctcagtgccccttggcggccgtgtggctcgctttctgcagtgccgcttcctctttgcggggccctggttactcttcagcgaaatctccttcatctctgatgtggtgaacaattcctctccggcactgggaggcaccttcccgccagccccctggtggccgcctggcccacctcccaccaacttcagcagcttggagctggagcccagaggccagcagcccgtggccaaggccgaggggagcccgaccgccatcctcatcggctgcctggtggccatcatcctgctcctgctgctcatcattgccctcatgctctggcggctgcactggcgcaggctcctcagcaaggctgaacggagggtgttggaagaggagctgacggttcacctctctgtccctggggacactatcctcatcaacaaccgcccaggtcctagagagccacccccgtaccaggagccccggcctcgtgggaatccgccccactctgctccctgtgtccccaatggctctgcctacagtggggactatatggagcctgagaagccaggcgccccgcttctgcccccacctccccagaacagcgtcccccattatgccgaggctgacattgttaccctgcagggcgtcaccgggggcaacacctatgctgtgcctgcactgcccccaggggcagtcggggatgggccccccagagtggatttccctcgatctcgactccgcttcaaggagaagcttggcgagggccagtttggggaggtgcacctgtgtgaggtcgacagccctcaagatctggtcagtcttgatttcccccttaatgtgcgtaagggacaccctttgctggtagctgtcaagatcttacggccagatgccaccaagaatgccaggaatgatttcctgaaagaggtgaagatcatgtcgaggctcaaggacccaaacatcattcggctgctgggcgtgtgtgtgcaggacgaccccctctgcatgattactgactacatggagaacggcgacctcaaccagttcctcagtgcccaccagctggaggacaaggcagccgagggggcccctggggacgggcaggctgcgcaggggcccaccatcagctacccaatgctgctgcatgtggcagcccagatcgcctccggcatgcgctatctggccacactcaactttgtacatcgggacctggccacgcggaactgcctagttggggaaaatttcaccatcaaaatcgcagactttggcatgagccggaacctctatgctggggactattaccgtgtgcagggccgggcagtgctgcccatccgctggatggcctgggagtgcatcctcatggggaagttcacgactgcgagtgacgtgtgggcctttggtgtgaccctgtgggaggtgctgatgctctgtagggcccagccctttgggcagctcaccgacgagcaggtcatcgagaacgcgggggagttcttccgggaccagggccggcaggtgtacctgtcccggccgcctgcctgcccgcagggcctatatgagctgatgcttcggtgctggagccgggagtctgagcagcgaccacccttttcccagctgcatcggttcctggcagaggatgcactcaacacggtgtgaatcacacatccagctgcccctccctcagggagcgatccaggggaagccagtgacactaaaacaagaggacacaatggcacctctgcccttcccctcccgacagcccatcacctctaatagaggcagtgagactgcaggtgggctgggcccacccagggagctgatgccccttctccccttcctggacacactctcatgtccccttcctgttcttccttcctagaagcccctgtcgcccacccagctggtcctgtggatgggatcctctccaccctcctctagccatcccttggggaagggtggggagaaatataggatagacactggacatggcccattggagcacctgggccccactggacaacactgattcctggagaggtggctgcgcccccagcttctctctccctgtcacacactggaccccactggctgagaatctgggggtgaggaagacaagaaggagaggaaaatgtttccttgtgcctgctcctgtacttgtcctcagcttgggcttcttcctcctccatcacctgaaacactggacctgggggtagccccgccccagccctcagtcacccccacttcccacttgcagtcttgtagctagaacttctctaagcctatacgtttctgtggagtaaatattgggattggggggaaagagggagcaacggcccatagccttggggttggacatctctagtgtagctgccacattgatttttctataatcacttggggtttgtacatttttggggggagagacacagatttttacactaatatatggacctagcttgaggcaattttaatcccctgcactaggcaggtaataataaaggttgagttttccacaa

SEQ ID NO: 79954 - DNA, 3678 bp, Artificial Sequence
  derived and/or modified sequence
ctcccgacacccgagccccgccggcgcctcccgctcccggctcccggctcctggctccctccgcctcccccgcccctcgccccgccgccgaagaggccccgctcccgggtcggacgcctgggtctgccgggaagagcgatgagagagatgctgcccccacccccttaggcccgagggatcaggagctatgggaccagaggccctgtcatctttactgctgctgctcttggtggcaagtggagatgctgacatgaagggacattttgatcctgccaagtgccgctatgccctgggcatgcaggaccggaccatcccagacagtgacatctctgcttccagctcctggtcagattccactgccgcccgccacagcaggttggagagcagtgacggggatggggcctggtgccccgcagggtcggtgtttcccaaggaggaggagtacttgcaggtggatctacaacgactgcacctggtggctctggtgggcacccagggacggcatgccgggggcctgggcaaggagttctcccggagctaccggctgcgttactcccgggatggtcgccgctggatgggctggaaggaccgctggggtcaggaggtgatctcaggcaatgaggaccctgagggagtggtgctgaaggaccttgggccccccatggttgcccgactggttcgcttctacccccgggctgaccgggtcatgagcgtctgtctgcgggtagagctctatggctgcctctggagggatggactcctgtcttacaccgcccctgtggggcagacaatgtatttatctgaggccgtgtacctcaacgactccacctatgacggacataccgtgggcggactgcagtatgggggtctgggccagctggcagatggtgtggtggggctggatgactttaggaagagtcaggagctgcgggtctggccaggctatgactatgtgggatggagcaaccacagcttctccagtggctatgtggagatggagtttgagtttgaccggctgagggccttccaggctatgcaggtccactgtaacaacatgcacacgctgggagcccgtctgcctggcggggtggaatgtcgcttccggcgtggccctgccatggcctgggagggggagcccatgcgccacaacctagggggcaacctgggggaccccagagcccgggctgtctcagtgccccttggcggccgtgtggctcgctttctgcagtgccgcttcctctttgcggggccctggttactcttcagcgaaatctccttcatctctgatgtggtgaacaattcctctccggcactgggaggcaccttcccgccagccccctggtggccgcctggcccacctcccaccaacttcagcagcttggagctggagcccagaggccagcagcccgtggccaaggccgaggggagcccgaccgccatcctcatcggctgcctggtggccatcatcctgctcctgctgctcatcattgccctcatgctctggcggctgcactggcgcaggctcctcagcaaggctgaacggagggtgttggaagaggagctgacggttcacctctctgtccctggggacactatcctcatcaacaaccgcccaggtcctagagagccacccccgtaccaggagccccggcctcgtgggaatccgccccactctgctccctgtgtccccaatggctctgcctacagtggggactatatggagcctgagaagccaggcgccccgcttctgcccccacctccccagaacagcgtcccccattatgccgaggctgacattgttaccctgcagggcgtcaccgggggcaacacctatgctgtgcctgcactgcccccaggggcagtcggggatgggccccccagagtggatttccctcgatctcgactccgcttcaaggagaagcttggcgagggccagtttggggaggtgcacctgtgtgaggtcgacagccctcaagatctggtcagtcttgatttcccccttaatgtgcgtaagggacaccctttgctggtagctgtcaagatcttacggccagatgccaccaagaatgccaggaatgatttcctgaaagaggtgaagatcatgtcgaggctcaaggacccaaacatcattcggctgctgggcgtgtgtgtgcaggacgaccccctctgcatgattactgactacatggagaacggcgacctcaaccagttcctcagtgcccaccagctggaggacaaggcagccgagggggcccctggggacgggcaggctgcgcaggggcccaccatcagctacccaatgctgctgcatgtggcagcccagatcgcctccggcatgcgctatctggccacactcaactttgtacatcgggacctggccacgcggaactgcctagttggggaaaatttcaccatcaaaatcgcagactttggcatgagccggaacctctatgctggggactattaccgtgtgcagggccgggcagtgctgcccatccgctggatggcctgggagtgcatcctcatggggaagttcacgactgcgagtgacgtgtgggcctttggtgtgaccctgtgggaggtgctgatgctctgtagggcccagccctttgggcagctcaccgacgagcaggtcatcgagaacgcgggggagttcttccgggaccagggccggcaggtgtacctgtcccggccgcctgcctgcccgcagggcctatatgagctgatgcttcggtgctggagccgggagtctgagcagcgaccacccttttcccagctgcatcggttcctggcagaggatgcactcaacacggtgtgaatcacacatccagctgcccctccctcagggagcgatccaggggaagccagtgacactaaaacaagaggacacaatggcacctctgcccttcccctcccgacagcccatcacctctaatagaggcagtgagactgcaggtgggctgggcccacccagggagctgatgccccttctccccttcctggacacactctcatgtccccttcctgttcttccttcctagaagcccctgtcgcccacccagctggtcctgtggatgggatcctctccaccctcctctagccatcccttggggaagggtggggagaaatataggatagacactggacatggcccattggagcacctgggccccactggacaacactgattcctggagaggtggctgcgcccccagcttctctctccctgtcacacactggaccccactggctgagaatctgggggtgaggaagacaagaaggagaggaaaatgtttccttgtgcctgctcctgtacttgtcctcagcttgggcttcttcctcctccatcacctgaaacactggacctgggggtagccccgccccagccctcagtcacccccacttcccacttgcagtcttgtagctagaacttctctaagcctatacgtttctgtggagtaaatattgggattggggggaaagagggagcaacggcccatagccttggggttggacatctctagtgtagctgccacattgatttttctataatcacttggggtttgtacatttttggggggagagacacagatttttacactaatatatggacctagcttgaggcaattttaatcccctgcactaggcaggtaataataaaggttgagttttccacaa

SEQ ID NO: 79955 - DNA, 3678 bp, Artificial Sequence
  derived and/or modified sequence
ctcccgacacccgagccccgccggcgcctcccgctcccggctcccggctcctggctccctccgcctcccccgcccctcgccccgccgccgaagaggccccgctcccgggtcggacgcctgggtctgccgggaagagcgatgagagagatgctgcccccacccccttaggcccgagggatcaggagctatgggaccagaggccctgtcatctttactgctgctgctcttggtggcaagtggagatgctgacatgaagggacattttgatcctgccaagtgccgctatgccctgggcatgcaggaccggaccatcccagacagtgacatctctgcttccagctcctggtcagattccactgccgcccgccacagcaggttggagagcagtgacggggatggggcctggtgccccgcagggtcggtgtttcccaaggaggaggagtacttgcaggtggatctacaacgactgcacctggtggctctggtgggcacccagggacggcatgccgggggcctgggcaaggagttctcccggagctaccggctgcgttactcccgggatggtcgccgctggatgggctggaaggaccgctggggtcaggaggtgatctcaggcaatgaggaccctgagggagtggtgctgaaggaccttgggccccccatggttgcccgactggttcgcttctacccccgggctgaccgggtcatgagcgtctgtctgcgggtagagctctatggctgcctctggagggatggactcctgtcttacaccgcccctgtggggcagacaatgtatttatctgaggccgtgtacctcaacgactccacctatgacggacataccgtgggcggactgcagtatgggggtctgggccagctggcagatggtgtggtggggctggatgactttaggaagagtcaggagctgcgggtctggccaggctatgactatgtgggatggagcaaccacagcttctccagtggctatgtggagatggagtttgagtttgaccggctgagggccttccaggctatgcaggtccactgtaacaacatgcacacgctgggagcccgtctgcctggcggggtggaatgtcgcttccggcgtggccctgccatggcctgggagggggagcccatgcgccacaacctagggggcaacctgggggaccccagagcccgggctgtctcagtgccccttggcggccgtgtggctcgctttctgcagtgccgcttcctctttgcggggccctggttactcttcagcgaaatctccttcatctctgatgtggtgaacaattcctctccggcactgggaggcaccttcccgccagccccctggtggccgcctggcccacctcccaccaacttcagcagcttggagctggagcccagaggccagcagcccgtggccaaggccgaggggagcccgaccgccatcctcatcggctgcctggtggccatcatcctgctcctgctgctcatcattgccctcatgctctggcggctgcactggcgcaggctcctcagcaaggctgaacggagggtgttggaagaggagctgacggttcacctctctgtccctggggacactatcctcatcaacaaccgcccaggtcctagagagccacccccgtaccaggagccccggcctcgtgggaatccgccccactccgctccctgtgtccccaatggctctgcctacagtggggactatatggagcctgagaagccaggcgccccgcttctgcccccacctccccagaacagcgtcccccattatgccgaggctgacattgttaccctgcagggcgtcaccgggggcaacacctatgctgtgcctgcactgcccccaggggcagtcggggatgggccccccagagtggatttccctcgatctcgactccgcttcaaggagaagcttggcgagggccagtttggggaggtgcacctgtgtgaggtcgacagccctcaagatctggttagtcttgatttcccccttaatgtgcgtaagggacaccctttgctggtagctgtcaagatcttacggccagatgccaccaagaatgccaggaatgatttcctgaaagaggtgaagatcatgtcgaggctcaaggacccaaacatcattcggctgctgggcgtgtgtgtgcaggacgaccccctctgcatgattactgactacatggagaacggcgacctcaaccagttcctcagtgcccaccagctggaggacaaggcagccgagggggcccctggggacgggcaggctgcgcaggggcccaccatcagctacccaatgctgctgcatgtggcagcccagatcgcctccggcatgcgctatctggccacactcaactttgtacatcgggacctggccacgcggaactgcctagttggggaaaatttcaccatcaaaatcgcagactttggcatgagccggaacctctatgctggggactattaccgtgtgcagggccgggcagtgctgcccatccgctggatggcctgggagtgcatcctcatggggaagttcacgactgcgagtgacgtgtgggcctttggtgtgaccctgtgggaggtgctgatgctctgtagggcccagccctttgggcagctcaccgacgagcaggtcatcgagaacgcgggggagttcttccgggaccagggccggcaggtgtacctgtcccggccgcctgcctgcccgcagggcctatatgagctgatgcttcggtgctggagccgggagtctgagcagcgaccacccttttcccagctgcatcggttcctggcagaggatgcactcaacacggtgtgaatcacacatccagctgcccctccctcagggagcgatccaggggaagccagtgacactaaaacaagaggacacaatggcacctctgcccttcccctcccgacagcccatcacctctaatagaggcagtgagactgcaggtgggctgggcccacccagggagctgatgccccttctccccttcctggacacactctcatgtccccttcctgttcttccttcctagaagcccctgtcgcccacccagctggtcctgtggatgggatcctctccaccctcctctagccatcccttggggaagggtggggagaaatataggatagacactggacatggcccattggagcacctgggccccactggacaacactgattcctggagaggtggctgcgcccccagcttctctctccctgtcacacactggaccccactggctgagaatctgggggtgaggaggacaagaaggagaggaaaatgtttccttgtgcctgctcctgtacttgtcctcagcttgggcttcttcctcctccatcacctgaaacactggacctgggggtagccccgccccagccctcagtcacccccacttcccacttgcagtcttgtagctagaacttctctaagcctatacgtttctgtggagtaaatattgggattggggggaaagagggagcaacggcccatagccttggggttggacatctctagtgtagctgccacattgatttttctataatcacttggggtttgtacatttttggggggagagacacagatttttacactaatatatggacctagcttgaggcaattttaatcccctgcactaggcaggtaataataaaggttgagttttccacaa

SEQ ID NO: 79956 - DNA, 3845 bp, Artificial Sequence
  derived and/or modified sequence
gatcccagaagtaggaggggcgtcttcccctcgtgggccctgagcgggactgcagccagccccctggggcgccagctttggaggcccccgacagctgctctcgggagccgcctcccgacacccgagccccgccggcgcctcccgctcccggctcccggctcctggctccctccgcctcccccgcccctcgccccgccgccgaagaggccccgctcccgggtcggacgcctgggtctgccgggaagagcgatgagaggtgtctgaaggtggctattcactgagcgatggggttggacttgaaggaatgccaagagatgctgcccccacccccttaggcccgagggatcaggagctatgggaccagaggccctgtcatctttactgctgctgctcttggtggcaagtggagatgctgacatgaagggacattttgatcctgccaagtgccgctatgccctgggcatgcaggaccggaccatcccagacagtgacatctctgcttccagctcctggtcagattccactgccgcccgccacagcaggttggagagcagtgacggggatggggcctggtgccccgcagggtcggtgtttcccaaggaggaggagtacttgcaggtggatctacaacgactgcacctggtggctctggtgggcacccagggacggcatgccgggggcctgggcaaggagttctcccggagctaccggctgcgttactcccgggatggtcgccgctggatgggctggaaggaccgctggggtcaggaggtgatctcaggcaatgaggaccctgagggagtggtgctgaaggaccttgggccccccatggttgcccgactggttcgcttctacccccgggctgaccgggtcatgagcgtctgtctgcgggtagagctctatggctgcctctggagggatggactcctgtcttacaccgcccctgtggggcagacaatgtatttatctgaggccgtgtacctcaacgactccacctatgacggacataccgtgggcggactgcagtatgggggtctgggccagctggcagatggtgtggtggggctggatgactttaggaagagtcaggagctgcgggtctggccaggctatgactatgtgggatggagcaaccacagcttctccagtggctatgtggagatggagtttgagtttgaccggctgagggccttccaggctatgcaggtccactgtaacaacatgcacacgctgggagcccgtctgcctggcggggtggaatgtcgcttccggcgtggccctgccatggcctgggagggggagcccatgcgccacaacctagggggcaacctgggggaccccagagcccgggctgtctcagtgccccttggcggccgtgtggctcgctttctgcagtgccgcttcctctttgcggggccctggttactcttcagcgaaatctccttcatctctgatgtggtgaacaattcctctccggcactgggaggcaccttcccgccagccccctggtggccgcctggcccacctcccaccaacttcagcagcttggagctggagcccagaggccagcagcccgtggccaaggccgaggggagcccgaccgccatcctcatcggctgcctggtggccatcatcctgctcctgctgctcatcattgccctcatgctctggcggctgcactggcgcaggctcctcagcaaggctgaacggagggtgttggaagaggagctgacggttcacctctctgtccctggggacactatcctcatcaacaaccgcccaggtcctagagagccacccccgtaccaggagccccggcctcgtgggaatccgccccactccgctccctgtgtccccaatggctctgcctacagtggggactatatggagcctgagaagccaggcgccccgcttctgcccccacctccccagaacagcgtcccccattatgccgaggctgacattgttaccctgcagggcgtcaccgggggcaacacctatgctgtgcctgcactgcccccaggggcagtcggggatgggccccccagagtggatttccctcgatctcgactccgcttcaaggagaagcttggcgagggccagtttggggaggtgcacctgtgtgaggtcgacagccctcaagatctggttagtcttgatttcccccttaatgtgcgtaagggacaccctttgctggtagctgtcaagatcttacggccagatgccaccaagaatgccaggaatgatttcctgaaagaggtgaagatcatgtcgaggctcaaggacccaaacatcattcggctgctgggcgtgtgtgtgcaggacgaccccctctgcatgattactgactacatggagaacggcgacctcaaccagttcctcagtgcccaccagctggaggacaaggcagccgagggggcccctggggacgggcaggctgcgcaggggcccaccatcagctacccaatgctgctgcatgtggcagcccagatcgcctccggcatgcgctatctggccacactcaactttgtacatcgggacctggccacgcggaactgcctagttggggaaaatttcaccatcaaaatcgcagactttggcatgagccggaacctctatgctggggactattaccgtgtgcagggccgggcagtgctgcccatccgctggatggcctgggagtgcatcctcatggggaagttcacgactgcgagtgacgtgtgggcctttggtgtgaccctgtgggaggtgctgatgctctgtagggcccagccctttgggcagctcaccgacgagcaggtcatcgagaacgcgggggagttcttccgggaccagggccggcaggtgtacctgtcccggccgcctgcctgcccgcagggcctatatgagctgatgcttcggtgctggagccgggagtctgagcagcgaccacccttttcccagctgcatcggttcctggcagaggatgcactcaacacggtgtgaatcacacatccagctgcccctccctcagggagcgatccaggggaagccagtgacactaaaacaagaggacacaatggcacctctgcccttcccctcccgacagcccatcacctctaatagaggcagtgagactgcaggtgggctgggcccacccagggagctgatgccccttctccccttcctggacacactctcatgtccccttcctgttcttccttcctagaagcccctgtcgcccacccagctggtcctgtggatgggatcctctccaccctcctctagccatcccttggggaagggtggggagaaatataggatagacactggacatggcccattggagcacctgggccccactggacaacactgattcctggagaggtggctgcgcccccagcttctctctccctgtcacacactggaccccactggctgagaatctgggggtgaggaggacaagaaggagaggaaaatgtttccttgtgcctgctcctgtacttgtcctcagcttgggcttcttcctcctccatcacctgaaacactggacctgggggtagccccgccccagccctcagtcacccccacttcccacttgcagtcttgtagctagaacttctctaagcctatacgtttctgtggagtaaatattgggattggggggaaagagggagcaacggcccatagccttggggttggacatctctagtgtagctgccacattgatttttctataatcacttggggtttgtacatttttggggggagagacacagatttttacactaatatatggacctagcttgaggcaattttaatcccctgcactaggcaggtaataataaaggttgagttttccacaa

SEQ ID NO: 79957 - DNA, 2631 bp, Artificial Sequence
  derived and/or modified sequence
atgggcccagaagctctctcatccctgctcctcttactattagtagcctctggggacgctgacatgaagggccattttgaccctgctaagtgtagatacgccctcggaatgcaggatagaacgattcccgatagcgatattagcgcttcttctagctggtcagatagcactgctgcaagacattctaggctagaaagtagcgatggcgatggcgcttggtgtccagcgggatcagtatttccaaaagaggaagaataccttcaagtggacctccagaggctgcacctggtggcattagtcggcactcagggtcgacacgccggtggtttagggaaggagttttcaaggtcatatcgcctgagatattcccgggacggcaggcgctggatgggttggaaagacagatggggacaggaagtgatttcgggcaacgaagatcccgaaggggtggtcctgaaggacctaggaccccctatggtcgcccgtttggtgcgtttttaccccagagcagatagggttatgtccgtttgtctacgagtcgagctttacggatgcctgtggcgcgacggtctattgtcatataccgctcctgtgggtcagaccatgtacctgtcagaggccgtctatttgaacgatagcacctatgatggtcacactgttggcggactccagtacggaggcctgggtcagctcgcagatggagttgttggtttggatgattttcgtaaatcacaggaactgcgagtttggccgggatatgactatgtgggctggagtaaccactcattcagcagcggctatgtggagatggaattcgagtttgaccgccttcgcgctttccaggccatgcaggtacactgcaacaatatgcacactctcggggctagattgccaggcggtgtggagtgccggttcagaagaggcccagctatggcctgggaaggggagcctatgcgccataatctggggggtaacttgggagatccgagagcaagagctgtgtctgtgccgttaggcggacgggttgctcgcttcctgcagtgtcggtttctgttcgcagggccttggctgctgttttccgagatttcatttatctcggatgtggtcaacaactccagccccgctctaggcggtacattccctcctgcaccgtggtggccccctggaccacctccgacaaactttagctcactggaactggaaccgcgagggcagcagcctgtcgcgaaggctgaggggtcacccaccgctatacttatcggatgccttgtggctatcattctcctgcttctattgattatcgccttaatgttgtggaggctgcactggaggcggctactcagtaaggccgagcgtcgtgtgctggaggaagaattaactgtgcatttatccgttccaggagataccatattgatcaacaaccggccaggccctcgggagcctcctccctaccaggagccccgtccccgtggtaacccccctcactcagccccttgtgtgccaaatggaagtgcctacagcggagactacatggaacccgagaagcctggcgcacccctgttgccccctcccccacagaatagcgtgccgcattatgccgaggcagatatcgtgaccctgcagggcgtgaccggagggaacacttatgctgtgcctgctctgccccctggagcagtcggcgacggtccccctcgagtggactttcctagatcacgtcttaggtttaaagaaaagctgggcgagggacaatttggagaggtgcacctgtgcgaggtggactccccccaggatctggtgtcattggatttccccctgaatgtgaggaagggacaccccctgttagtggcggtgaagatactgaggcctgacgcaactaagaacgcccgaaacgattttctcaaggaggtgaagatcatgtctcggctgaaggatcccaacatcattaggttattgggcgtttgtgtgcaggatgatcccctttgcatgattacagactacatggagaacggcgacctcaaccagttcttgtctgctcatcagttagaggataaggccgctgagggagcccctggagacggccaagccgctcaggggcctaccatctcctaccctatgctattacatgtggcggcacagattgctagcggcatgaggtacttggcgaccctgaactttgtgcatagggacttggccactcggaattgccttgtgggcgaaaactttaccattaagatagcggatttcgggatgagcagaaacctctatgccggagactattaccgtgtgcagggcagggccgtgctgcctattcgatggatggcctgggagtgtatactgatgggaaaatttaccacagccagcgatgtctgggctttcggcgtgacgctgtgggaagtgctgatgctttgcagagctcagcccttcggccagctgactgacgagcaggtgatcgagaacgctggcgaattcttccgagatcaaggccgtcaggtctacctaagcagacccccagcttgccctcaggggttgtacgagctgatgctgcgctgttggtcccgcgagtcagagcagcggccaccatttagtcaacttcaccggttcctggctgaggacgcattaaatacagtttag

SEQ ID NO: 79958 - DNA, 2631 bp, Artificial Sequence
  derived and/or modified sequence
atggggccagaggccctgtcgagcctcctgctgttgctgctggttgcaagtggcgacgcggatatgaaggggcatttcgatcctgcgaaatgccggtatgccttggggatgcaggaccgcactattccggactcggacatttccgccagttccagctggtctgacagcacagcggcacgacactcccgcctcgagtcttcggacggagatggtgcctggtgccctgctggctcggtgtttcccaaggaggaggaatatctgcaggtggacctgcaacgcctgcatcttgtggccctagtggggactcaaggacgacatgctggcggactcggcaaggaattctcccggtcctatcgcttgagatactcccgtgacggcagacgatggatgggctggaaggaccgctggggtcaggaggtaattagtggcaacgaagaccccgagggggtagttctgaaagatctcggcccaccaatggtggcacggttggtcaggttttatccgcgtgctgacagggtgatgtcagtatgtctgcgggtggaactgtacggttgcctttggagagatggcctgcttagctatactgctcctgtaggacagactatgtatctgtccgaggccgtgtacctgaatgattctacctacgatggtcacacagtcggaggcctgcagtacgggggtttgggtcaactggccgatggagtggttgggcttgatgactttcggaaatctcaggagctgcgtgtgtggccaggatatgattatgtggggtggagtaaccactcattctccagcgggtatgttgagatggagttcgaattcgatcgccttagagcctttcaagctatgcaggtgcattgtaacaacatgcataccctcggggctcgcctgcctggcggagtggagtgtcgattcagaagaggtccagcaatggcttgggagggagagcccatgcggcacaacctgggaggtaatttaggtgatccacgcgctcgggctgtatcggtgcctttgggtggtcgggtggccaggtttctgcagtgcaggttcttatttgcgggtccatggttattgtttagtgaaatctctttcatcagtgacgtggtgaacaatagctcacccgcattaggcggtacctttcctcccgcaccgtggtggcctccaggtccgcctccaaccaatttcagttcactagaactcgagccccgagggcagcagcccgtggccaaggctgagggaagccctaccgccatactgatcggctgccttgtagcaatcatccttttgctgctactcatcattgcattgatgctctggaggctgcattggcggaggctgttatctaaggccgagagacgggtgctggaagaggagctaaccgtgcatctgagtgtgcctggagatacgatcctgatcaataatcggccaggccctagagagccaccgccttaccaggagccgagacccaggggcaatccgccacactcagctccttgcgtgcctaatggctccgcatatagcggcgattacatggagcctgaaaagccaggcgcacctttgctgccccctccaccacagaatagtgtgccccactacgcagaggctgacattgtgactcttcaaggcgtgactgggggaaacacctacgccgtccccgctctccccccaggcgcagtaggcgacggaccacctagagtggacttcccaaggagtcgtctgcggttcaaggaaaagctgggagaaggccagttcggcgaggtgcatctctgtgaagttgattccccgcaggacctggtatctctggatttcccactgaacgtaaggaaagggcatcctctacttgttgccgtaaaaatcctccggcctgatgcaactaaaaacgctagaaatgattttctgaaggaggtaaaaatcatgtcacgtctgaaagaccctaatatcatccggctgctgggagtgtgcgtgcaagacgatccactgtgtatgattaccgattatatggagaatggagatctcaaccagtttctcagtgcacaccagttagaagacaaggctgccgaaggagcacctggcgacggacaggcggcacagggtccgacgatatcttaccccatgttgctgcatgttgccgcacagatagctagtggcatgagataccttgctacactaaacttcgttcacagggatctggcaacacgcaattgtctggttggcgaaaattttactataaagatcgcagactttggaatgtccaggaatctgtacgcgggagactactatagagtgcaaggtcgcgctgtgttgcctatccgatggatggcctgggagtgcatcctgatgggcaagtttaccactgcttctgatgtctgggctttcggagtcacactgtgggaagtgttgatgctttgtcgggctcaacctttcggacaactgacagatgaacaggtaatagaaaatgcaggtgagtttttcagagatcaagggaggcaggtttatctatcgagaccccctgcttgcccccaaggtctgtacgagctgatgctaaggtgctggtctcgtgagtccgaacagcggcctccgttctcccagctgcaccgctttcttgccgaggatgctctgaacactgtgtag

SEQ ID NO: 79959 - DNA, 2631 bp, Artificial Sequence
  derived and/or modified sequence
atggggcctgaggccctcagtagcttgctgctcctattgctggttgcatccggggatgccgatatgaaaggacatttcgatccagccaagtgccgctatgcactcggcatgcaggatagaacaatccccgatagcgatatttccgcttctagtagttggtcagatagcaccgctgccagacactcgagactcgagagctctgatggagacggggcttggtgccctgccggttccgtctttccaaaggaggaagagtacctgcaggtggacctacaaagactgcacctggtggcgctagtcggcacccagggacggcatgctgggggactgggtaaggaatttagcaggtcctaccgcctccgatatagccgcgatggacggaggtggatgggttggaaggatagatgggggcaggaggtaatttccggaaacgaggacccagaaggagtggtcctgaaagatctggggcctccaatggtggcaaggctggtgcggttctatccacgcgctgaccgcgtaatgtccgtctgtctgagagtcgaactttatggatgcctatggagggacggactgctgtcttacaccgccccagttgggcaaaccatgtacctgtcagaagcagtttacctgaatgacagcacctacgacgggcacacagtgggcggtctccaatatggaggtttgggccagctggctgatggggttgttggattagatgacttccgaaaatctcaggaattacgagtctggcccggatatgactacgttggctggagtaaccatagtttctcatcagggtacgtcgaaatggagtttgaattcgatagactcagggccttccaggccatgcaagtccattgcaataacatgcatacgctgggggctcgcttgcccggaggcgttgagtgtcgctttagaaggggcccagccatggcctgggagggcgagcccatgagacataatctggggggaaacttgggggatccccgagcccgtgcagtgtccgtgcctctggggggtcgggtagccaggttcctccagtgtcgatttctatttgctggtccgtggttgttatttagtgagatctcctttattagcgatgtggtgaacaactccagtccagcactcggaggtacatttcccccagcgccatggtggccgcctgggcctcccccaacgaacttttcatcactcgaactggaaccccgaggccaacaacccgttgctaaagcagagggtagtcctactgcaatattgatcggatgtcttgtagcaattatactgctgctgctactcattattgctctgatgttgtggcgccttcattggcgtcggctgctttcgaaagccgagcgacgggtgctcgaggaagagttaactgtccacctgagcgtcccgggagacacgatcctgatcaataacaggccgggacccagagagccacccccttaccaggaaccaaggccaagggggaaccctccgcattcagccccatgtgtgcccaacgggtctgcctactccggggactatatggagcccgaaaagcctggggctccattgctgccaccccctccgcagaacagcgtgcctcattatgcagaggccgacatagtgacattgcagggcgtcaccgggggtaatacctatgcggtgccggctctccctcccggagcagtgggcgacggacctcctcgggtggatttcccccgatcgagattgcgcttcaaggagaagctgggcgaaggtcaatttggcgaggttcatctttgcgaggtcgattccccccaggatctcgtctcactggactttcccttaaacgtacgaaagggccacccgctgctggtggctgtgaagatcctacgacccgacgccactaaaaatgcacggaacgactttctcaaggaggttaaaatcatgtcacggttgaaagaccccaacatcatccggttacttggagtatgcgtgcaggacgacccgctgtgtatgattactgattacatggaaaatggggatctaaatcagttcctaagtgcccaccaactggaggacaaggctgctgagggtgcacccggtgacggccaagccgcacagggacctaccatctcttatcccatgttactccacgtcgccgctcagattgccagcggtatgcgatatctggcaacgttaaatttcgtacatagggatctcgcaactcgaaactgcttggtcggagaaaactttaccattaagattgcagacttcggcatgtccaggaacttatatgcgggtgattattaccgcgtgcagggtagggcagtccttccaatccgttggatggcatgggaatgtatcctaatgggtaagttcacaacagcttcagatgtttgggcctttggggtcacactgtgggaagtcttgatgctctgccgggcacaaccttttggccagttgactgatgagcaggtaattgaaaacgctggagaattttttcgcgaccagggcaggcaagtgtatctgagcaggccccctgcatgccctcagggcctttatgaactgatgctccgttgctggagtcgcgagtccgagcagcgtccacccttctcgcagctgcaccgctttctggcggaggatgctctgaatacagtgtag

SEQ ID NO: 79960 - DNA, 2631 bp, Artificial Sequence
  derived and/or modified sequence
atgggccctgaggcactgtctagtcttctgctgcttttgctggtagctagtggagatgcagacatgaagggccacttcgatcctgcaaaatgtaggtatgccctgggaatgcaggacagaaccatccctgattcggacatatcagcgagcagtagttggtcagacagcactgccgcacgacactcgagacttgagagcagcgacggcgacggagcctggtgccctgcaggttctgtctttcccaaggaagaggaatacctgcaggtggaccttcaacgtctgcacttagtcgcactggtcgggactcagggcaggcacgccggaggtctaggaaaagagtttagtcggtcttatcgtctgaggtactcgcgggatggccgtcgctggatggggtggaaggacagatggggacaggaagttatcagtggaaatgaggatccggagggagtggtcctgaaagacctcggacctcccatggtagctaggctggtccgattttatcccagggctgaccgggtgatgagcgtgtgcctccgcgtagagttgtatggctgcctgtggcgggatggactcctaagctataccgcacctgtgggacagacaatgtatttaagcgaagcggtgtatctgaatgacagtacttacgatggacataccgttggcggtctgcaatacggaggcttggggcagctcgccgacggggtggtcggcctggacgatttcagaaagtcacaggagttaagagtgtggccaggatacgattacgtaggatggagcaaccattccttcagctctgggtatgtggaaatggagttcgagtttgaccgactgcgggcttttcaggctatgcaggtccattgtaataacatgcacacactgggagctagactgcccggaggggtggagtgtcggttccgccgagggccagctatggcctgggaaggggagcctatgcggcataatctcggcggtaacctcggtgaccctagagccagagccgtttctgtgcccctaggcggtagagttgccaggttcctccagtgtcggttcctctttgcaggcccttggctgttgttcagtgagatcagcttcatctccgatgtggttaataactcctcgccagccctgggcggaactttccctccagccccatggtggcctcctggccctcccccaactaatttttcttcactagagttagagccacggggacagcagccagtggccaaggccgagggtagtcctacggcaatactaatcgggtgcctcgtggccataatcctcctgttgctcttgattatcgcccttatgctctggagacttcattggaggcggctgttatctaaagccgagcgccgtgtgctggaggaggagctgaccgtccatctctctgtccctggtgacacaatcctcattaacaacaggcccggacccagagaacctccaccttatcaggaacccagaccgagaggtaatcctccgcattccgccccttgtgtcccaaatggcagcgcatacagcggcgactatatggagcctgaaaaacccggagcaccactcctacctccgcctccccaaaattccgtcccccactatgcagaggccgacatcgttacgctgcagggagtgacagggggaaatacatatgctgtccctgccctgccacccggagcagtgggcgatggcccacccagagtggatttccccagaagtaggctgaggtttaaagagaagctcggagagggccagttcggtgaagtacatctgtgcgaggtcgacagtccccaggacctagttagtcttgacttcccactgaatgtgaggaaggggcacccacttttggtggcagtgaaaattctgcgaccagatgctacaaaaaacgcacggaatgacttcctcaaagaagtcaagatcatgagccggctcaaggacccaaatatcatccgcctccttggtgtgtgcgtccaagatgaccccctgtgtatgattaccgactatatggaaaacggagacttgaatcaatttttaagtgcccatcagctggaggataaagccgctgaaggggcacccggagatggccaagctgcgcagggtcccactatatcctatccaatgctactgcatgtggccgctcagattgcttctggcatgagatatttggcgacactgaactttgtgcacagagatctggcaacccgtaactgtctcgttggcgagaattttactattaagatcgcggattttggaatgtcccggaatttgtacgccggagactactatagggtccaggggagagccgtgctgcctatcaggtggatggcctgggaatgtatactcatgggcaagtttaccacagcaagcgacgtgtgggcttttggagtgacactgtgggaggtgctgatgctgtgccgggctcagccgttcggccagcttactgacgagcaggtgattgaaaacgccggagagttttttcgtgaccagggacggcaagtgtacctgtcacgccctccagcttgcccccaaggcctgtatgagctgatgttacggtgttggtcaagggagtcagaacaacgaccaccattttcacagcttcacagattcctggctgaggacgcattgaataccgtctag

SEQ ID NO: 79961 - DNA, 2631 bp, Artificial Sequence
  derived and/or modified sequence
atgggaccagaagctttaagcagtttgctcttgctgctactcgtggcctcaggcgatgctgacatgaaggggcacttcgatccagctaagtgccgctatgctctgggcatgcaggatcggacaataccagattccgatatttcagcctctagcagttggagcgacagcactgccgctaggcactccagattagaatcctccgatggagatggagcctggtgtcccgcagggagtgtgtttcccaaagaggaggaataccttcaggtggatctccaacggctgcacttagtggctcttgttgggacacagggacgccatgcaggtggacttggcaaggaatttagccggagttacaggctgagatattctagggacggccgacgctggatgggctggaaagatagatggggacaggaggtgatctcaggtaatgaggaccctgaaggcgttgtcctcaaagatctggggcctccaatggtggcccgtctggtccgtttttaccctcgagctgatagggtgatgtccgtgtgcctgagggtagagctctatggatgcctctggcgtgatggcttgttatcctatacagctcccgtcgggcagacgatgtacttgtccgaggctgtctacctgaacgattcaacatatgacggtcatactgtggggggtctccagtacgggggtctgggtcagctggcagacggcgttgttgggttggatgacttccgcaagtctcaagaactaagagtgtggccgggatacgattatgttggttggtccaaccatagttttagctccgggtatgtggagatggaattcgagtttgatagactgcgggcattccaggcaatgcaggtgcactgtaacaacatgcacacacttggcgctcgtctccccggaggcgtggaatgcagatttagacgaggaccagcaatggcctgggagggcgagcctatgaggcacaacctaggcggtaacctgggcgatcctagggcccgtgcggtctcagtaccactcggcggtcgtgtggcacgcttcttacagtgccgctttctgtttgccggaccgtggcttttattctccgagatttccttcatttccgacgttgttaataattcaagtcctgcactggggggaacattccccccagccccatggtggccacctggacctccacctacaaacttttcctccctggaactagagccgagggggcagcaaccagtcgccaaagccgaggggtctcccaccgctatccttattgggtgtcttgtagctataatcctactgctcctgttgattatcgcccttatgctgtggcggctgcactggagaagactgttgtcgaaagccgaacgacgtgtactggaagaggaattgacagtgcacctctccgtgcccggagacacgatcttaatcaacaatcgtcctggccctagagagccgcctccctatcaagagccacggccacgaggtaatccaccccattctgctccatgcgtgccaaatgggtcggcatattctggcgattatatggagcctgagaagcctggcgcacccttactaccccctccccctcaaaactcagtaccacattatgccgaggctgacattgttaccctccagggcgtcactgggggaaacacctacgcggtgccagcccttccgccaggcgcagttggagatggtcccccaagggtcgactttccaagatcccggcttcggttcaaagaaaagttaggcgaaggccagtttggggaggtgcacctttgtgaggtcgacagccctcaagatctagtgtcccttgattttccattgaacgtgaggaagggccaccctctgctggtagctgttaagatccttcgcccagacgccactaaaaacgctcgaaatgactttctgaaagaggttaagattatgtccagactgaaggaccctaatatcatcagactactgggagtgtgtgttcaagacgatccattgtgcatgattaccgattacatggagaatggcgacttaaatcagttcctgtctgcccaccagcttgaggataaagccgctgaaggcgcaccaggggacggacaggctgctcagggccctactatatcttatccaatgctcctccatgtcgccgcacagatcgcgtccggtatgaggtacctagccactctgaacttcgtacacagagacttggcaacccgcaactgcttagtgggagagaatttcacgattaagatagccgactttgggatgtcaaggaatctgtacgccggagactactacagggtgcagggcagggccgttcttcctatccgctggatggcttgggagtgcatactgatgggcaaattcactacagcctccgacgtgtgggcttttggggtaactttatgggaggtgctcatgttatgccgcgctcaacccttcggacaactcaccgatgaacaggttattgaaaatgctggcgagttcttccgcgaccaaggcagacaggtatatctgtcccgccctccagcatgccctcagggactgtacgagctcatgctccggtgctggagtcgagaatccgaacaaagacctccattctcacagctacaccgcttcctggccgaggatgctctcaatactgtgtag

SEQ ID NO: 79962 - DNA, 2631 bp, Artificial Sequence
  derived and/or modified sequence
atgggtcctgaagctcttagttccctgttacttttactgttggttgctagcggcgatgcggatatgaagggccactttgatcctgcaaagtgtagatatgcattgggcatgcaggatcgtaccattccagactcagatataagcgcatcgtcaagctggagtgactcgaccgccgcacggcattctcgactggagtccagtgacggggacggcgcttggtgccccgctggatcagtattcccaaaggaagaagagtatctgcaagtcgatcttcagcgtctccatctggtggccctcgtcgggacccagggcagacacgccggaggccttggcaaagagttctcacggagctatcgactgagatacagtagggatggtcgacgctggatgggttggaaagaccggtgggggcaagaggtgatctcagggaatgaggatcctgagggcgtcgttctgaaagacctgggcccacctatggtcgccagacttgttagattttatcccagggcagatagggtcatgtccgtgtgcctgagggtggagctgtacgggtgtttgtggcgagatggtcttctctcttatactgccccagtggggcagactatgtatctgtctgaggccgtatatcttaatgactctacttacgatgggcataccgtgggtgggcttcagtacggaggcctgggacaactcgccgacggggtcgtgggcctagatgactttcggaagtcccaggagctaagggtatggccagggtatgattacgtcgggtggagcaaccattcattttcttccgggtacgtcgagatggaattcgagtttgatagactccgcgcattccaagccatgcaagtgcattgtaacaatatgcacactcttggcgctcgcttaccaggtggagttgaatgtagattccggagaggccctgcgatggcttgggagggagaaccaatgagacacaatctggggggaaatcttggcgacccccgagcgagagctgtgtccgtgcccctgggtggtcgcgtcgctcggttcctgcaatgtaggttcctgtttgccggaccttggcttctgtttagtgagatttccttcatcagtgacgttgtcaacaacagctcaccagctcttggaggcacgttccccccagccccttggtggccacccggtcccccacccactaacttttctagcctcgaacttgagccacggggacagcaacctgtagccaaggcggaagggtctcccacagctatcctcatcggctgcctagtggcgatcatcttgttattgctgcttatcattgctctcatgctgtggcgactccactggcgaagactcctgtcaaaggctgaacgtagagttcttgaagaagagttgacggtacacctgtctgtgcccggtgacacaattctgatcaacaataggccaggccctagagaacccccaccctatcaggaacccagacctagagggaacccccctcactccgctccatgcgttcccaatggcagcgcctatagcggtgattatatggagcctgagaaaccgggtgctcctctattaccaccgcctccacaaaactccgtcccacattatgcggaagctgacatcgttaccctgcaaggggtgactgggggtaatacatatgctgtacccgctcttcctcccggagcagtcggcgacggccctcctcgcgtggatttccccaggtccagactgaggttcaaagagaaacttggggaagggcagtttggcgaagtacacctttgcgaagttgactcccctcaggacctggtaagtctcgacttcccgctgaacgtccggaaaggccatcctctcctggtggctgtaaaaattctgcgaccggacgccactaagaacgctcgcaatgactttctgaaggaggtgaaaatcatgtctcgcttgaaggatcccaacataattcgactcctgggagtctgcgttcaagacgacccactgtgcatgatcaccgattatatggaaaatggagatctcaaccagttcctaagcgcacatcagctcgaagacaaagccgctgaaggcgctcccggagacggccaggctgcccagggccctactatttcctacccgatgttgttgcacgtcgcagcccaaatcgcatccggaatgcgttaccttgcaactctaaacttcgtgcaccgggacctggctaccagaaactgtctagtcggggaaaactttaccatcaaaattgccgactttggcatgagcagaaatctctatgcgggagattactaccgggtgcagggtcgtgccgtcctgcccatacggtggatggcatgggagtgcatccttatggggaagttcacaactgctagcgatgtttgggctttcggggtgaccctctgggaggtgttgatgttgtgtcgagctcagccctttggccagttgaccgatgaacaggtgatcgagaacgccggtgaattcttcagagaccagggcagacaagtgtacctcagccggcctccagcatgtcctcagggcctctatgagctgatgctgcgttgttggtcaagagaaagcgagcagcgcccaccatttagccagctccaccgatttctggccgaggacgccctgaacactgtctag

SEQ ID NO: 79963 - DNA, 2631 bp, Artificial Sequence
  derived and/or modified sequence
atgggacctgaagcactcagcagcttactcctgctgctgctggtggcaagcggggacgcagatatgaagggccactttgatcctgccaaatgccgatacgctctgggaatgcaggaccgtaccatcccggactccgatattagtgctagttcttcttggtctgattcgactgcggctcgacattcccgacttgaatcttccgacggtgacggtgcctggtgtcccgctggcagcgtattccccaaggaggaggagtacctgcaagtcgatcttcaaaggctccatcttgtggctttggttggtacgcagggtcggcatgctggcggactggggaaggaatttagccggagttatcggcttcgttatagcagagacggacggcgatggatgggttggaaggatagatggggtcaggaagtgatttctggaaatgaggatcccgagggggtggtattaaaagacttaggtcccccaatggtcgccagactcgtgaggttctaccctcgagcagatcgtgtgatgtccgtatgtcttagggtggaactctatgggtgcctgtggcgggatggcctccttagctacaccgcccctgtgggccagaccatgtacctgtctgaagctgtttacctcaatgattccacctatgacggccatactgtaggcggactgcagtacggtggcctgggccagctggccgatggcgttgtgggcctggacgatttccggaaatctcaggagttgagagtctggccgggatacgactacgtcggctggtcaaaccattccttttcatcgggctacgtggagatggaattcgaattcgatcggctccgcgcttttcaggcgatgcaagtgcactgcaacaacatgcacaccctgggagctaggctcccagggggtgttgagtgtcgtttcaggaggggcccagcgatggcttgggaaggggagcccatgaggcacaacctgggcggaaatttaggagaccccagagcaagagctgttagcgtacctctggggggtcgcgtggccaggttcctgcagtgcagatttctcttcgctggcccatggcttctcttctcggaaattagttttatttcagacgttgtgaacaatagctctcctgccttaggaggaacgttccctcccgcaccatggtggccacctggccctcctcccaccaacttcagttccctcgagctcgaaccacgtggtcagcaacccgtcgccaaggcagaaggtagtccaaccgcaatactgataggctgcttagtcgccatcatcctcctgcttctgctaattatcgcccttatgttgtggcgattacactggcggagattactttctaaggccgagcgccgagtccttgaagaggaactaacagtacatctgagcgtgcccggagacaccattctgatcaataacaggccaggtcccagagaaccacccccttaccaggagccacggcctcgcggtaacccaccgcattctgcaccttgcgtacccaatggaagcgcttacagcggggactacatggaaccagaaaagccaggcgcaccgctgctgccacctccgcctcaaaatagtgttccacactacgctgaggccgacattgtcactcttcaaggcgtgacggggggaaacacttatgctgtgcctgcactgcccccaggtgctgtgggcgacggccctccaagggtcgatttccctcgctcacgactgagattcaaagagaaacttggggaagggcaatttggggaggtgcacctttgcgaggttgattcgccccaggaccttgtgtccctcgattttcccttgaatgttcgtaaaggccatcccctcttggtagccgttaagatcctaagacccgatgcaactaaaaatgcccgtaacgacttccttaaggaagtgaagatcatgtcacggctgaaggatcctaatatcatacggttattaggggtctgcgtacaggatgaccccctgtgtatgatcacagactacatggaaaacggcgatttgaatcagtttctcagtgctcaccagttagaggataaggctgctgagggagcccctggagatggccaggcggctcaaggaccaactatctcctaccccatgctgctgcacgtggcggcacagatcgccagcggcatgcgttatctggcaaccctgaacttcgtgcatagagatctcgcaactcggaattgcctcgtgggtgaaaactttacaatcaaaattgcagacttcggcatgagcaggaatttatacgctggcgattactatagagtgcaggggagggctgtacttccgatccggtggatggcgtgggaatgtatcttgatgggtaagtttacaacggcctccgatgtgtgggccttcggggttactttatgggaggtgttgatgctgtgtcgagcccaaccattcgggcagctgacagatgaacaggtgatcgagaacgccggtgagttctttcgggatcaggggaggcaggtgtatctgtcacggccaccagcatgcccgcaaggcctgtacgagctcatgctccggtgttggagtcgcgaaagtgagcagcgaccaccattctcacagctgcatcgatttctagcggaggatgcattgaatacagtatag

SEQ ID NO: 79964 - DNA, 2631 bp, Artificial Sequence
  derived and/or modified sequence
atggggccagaagctctctccagccttttgttgctcctgctggtggcctcaggggatgccgatatgaaaggacacttcgatcctgcaaagtgtagatatgctctgggcatgcaggaccgcacgattcctgactcagacataagcgccagcagcagttggagcgacagcacagcagccagacacagccgcttggaatctagcgacggggatggcgcttggtgccctgctgggagtgtcttccctaaagaggaagaatacctgcaggtggacctgcagagattacacctggtcgcactcgtgggaacgcagggccgacacgccggaggactcgggaaggagttcagccgttcttacaggctgcgctactctagggacgggaggcgctggatgggatggaaagaccggtgggggcaggaagtgatcagtggcaacgaggacccagagggggttgtgctgaaggatctgggaccccctatggtcgcaaggctggtccgcttttaccccagagcggaccgcgtcatgtccgtatgtctgagagtggaactttacggctgtctctggagagatggcttattgtcatacaccgcccctgtaggccagaccatgtatctatcagaagccgtgtatctaaatgattctacatacgacggacacacagtagggggattacaatacggcggactaggccaactggccgacggggtagttggactcgacgactttaggaagtcgcaagagctgcgcgtgtggcctggctacgactacgtaggctggtctaaccactcgttctcatcaggatacgtcgaaatggaattcgagttcgatcggctgagagctttccaggctatgcaggtgcattgtaacaacatgcacactcttggtgccaggctgcctggtggagttgaatgtaggttccggagaggtccagcaatggcctgggaaggagagccgatgcggcataatctgggagggaatctcggcgacccccgagcacgggcagtgtccgttcccctaggagggcgagtcgctaggttccttcagtgtagatttttattcgcaggaccgtggctcctgtttagcgaaatttcgttcatatccgatgtggtgaacaactcctctcccgctcttggcggaaccttcccgccagcaccttggtggccccctggtccccctccaactaatttcagtagtcttgagctggaacctcgaggccaacagcccgtggcgaaagctgaggggtccccaactgctatactcattggatgtctggtggcaataattctcttacttctgctgatcatagctctgatgctgtggagattacactggcggagattattatccaaagctgagagacgcgtcctcgaggaggaactcacagtgcacctcagtgtccccggagacaccatcctaattaacaatcgaccaggcccacgagaacccccaccgtaccaggaaccccgtcctcggggaaatccaccacactccgccccatgcgtcccgaacgggtccgcttactctggagattatatggaaccggaaaaaccgggtgcacctctgctacctccgcctccccagaatagcgtgccccactatgccgaggccgacatcgtgacactccagggtgtgaccggcggaaacacatacgccgtgcccgcactcccacccggagctgtcggcgacggtcctccccgagtcgattttccacggtcccggctgcgatttaaggagaaactgggcgaaggccagttcggtgaagtgcatctctgcgaggttgactccccacaggatcttgtgagtctcgatttccctctgaatgtgcggaagggccaccctctgttggtagcagtgaaaatcctgcggccagatgcaacgaagaacgcccgaaacgacttcctgaaggaagtgaagattatgtcacgcctgaaagaccccaatattataaggctgctaggcgtctgcgtgcaggacgatcccctctgtatgatcacagattacatggagaacggggacctaaatcagtttctgtcagcacaccagctcgaggacaaggcagctgaaggcgctcctggcgacgggcaagccgcacagggtcccaccatctcgtatcctatgttactccatgtagcggcacagatcgcttctgggatgcggtacctagcgaccctaaacttcgtgcacagggatctcgccacccggaactgcctggtgggagaaaatttcacaataaaaatagctgacttcggcatgtctagaaatctgtatgcaggagactactacagagtgcaagggcgagcagtcctgcccatccgatggatggcgtgggagtgtatcctaatgggtaagtttaccaccgcttctgacgtatgggcgttcggagtgaccctgtgggaggtcctcatgctctgcagggcacagccgtttggccagctgacagatgaacaggtgatcgagaacgcgggagagtttttccgggatcagggcaggcaggtgtacctgtcccgaccacccgcttgtcctcagggcctgtacgagctgatgcttcgctgctggtctcgagaatctgagcaaaggccacctttttcacagctgcaccggtttctagcagaagatgccctcaacacagtttag

SEQ ID NO: 79965 - DNA, 2631 bp, Artificial Sequence
  derived and/or modified sequence
atgggaccagaggcactttcgagcctgctgctcctgctgcttgtggcttcaggcgatgctgatatgaaaggtcactttgaccctgcaaaatgccggtacgctctcggaatgcaggacaggaccataccggactctgacatttctgccagctcgtcctggtctgactcaaccgcggctaggcactcccggctggaaagctccgacggtgatggtgcctggtgccccgcaggtagcgtctttcctaaggaggaagaatacctacaagtcgaccttcaaaggctgcacctcgtggcacttgtagggacacaaggaaggcatgctggaggtctcggtaaggagttttccagatcttatcgactgaggtatagtagagacggaagacgttggatggggtggaaggaccgctggggccaggaagtgatctcagggaatgaggatcccgagggcgtcgtactgaaggacctgggtccacctatggtcgcccgtctggtcagattttacccaagggctgacagggtcatgagtgtgtgtctgcgcgtagaactgtacgggtgtctgtggcgcgacggcctgttatcttacactgcacctgttgggcagactatgtatctatctgaagctgtgtacctgaatgattccacatacgacggtcacaccgtcggtggactgcaatacgggggtttgggccagctggcagacggtgtggtcgggctcgatgactttaggaagagtcaagagctcagggtttggccaggctatgattacgtgggttggtctaaccattcttttagcagtggttatgttgaaatggagtttgaatttgaccgactgagagcctttcaggctatgcaggtacactgtaacaatatgcataccctgggtgcaagactaccaggaggcgttgaatgtagattcagaaggggtcccgctatggcctgggaaggggaacccatgcgacataatctaggcggaaacctcggcgacccaagagctagagccgtatccgtaccattgggtggaagggtggccagatttctgcagtgccgattcttgtttgccggtccatggctgctgttcagtgagatttcatttatttcggacgtcgtgaacaattcaagtcctgctttgggaggtacattcccccctgcaccgtggtggccgcctggacctcccccaacgaacttcagctcgctcgagctggagcctcgtggacaacagcctgttgccaaggcagaggggtcaccaacggccatccttatcggttgtctggtcgctataattcttctgctcctgctgattattgcactcatgctgtggaggctccactggcggcgtctgctttccaaagcggaacgccgtgttttggaggaggagctgactgtccacctgagtgtcccgggagacactatcttaattaataataggcccggacccagagaaccccctccataccaagagccgcgaccaagaggaaaccctccacactcagccccatgcgtgcccaatgggtccgcctattcaggagattacatggaacccgagaagccgggagcccctctgttgcctcctccgccacagaactcagtgcctcactatgccgaggctgacatcgtcaccctacagggcgtgactgggggtaacacgtatgcagttcctgcgctgccgcctggcgcagtgggtgatgggcctccgagggttgattttcctcggtcccgtctgaggtttaaagaaaaactgggagaggggcagttcggcgaggttcacctgtgcgaggtcgattctcctcaggatttggtcagcctcgatttccctctgaatgtgcgaaaaggtcaccccctgctagttgccgtcaaaatcctgaggccagacgctaccaaaaacgccagaaacgacttcttgaaggaggtgaaaatcatgtcccggctcaaagatcctaacataatccggctccttggtgtgtgcgtgcaggatgatcctctgtgtatgatcacagactatatggaaaacggcgatttaaaccagtttctgtccgctcaccagctggaggataaggccgcagagggtgcacctggtgacggacaggcagcacaaggacctaccatcagttacccaatgctgctgcacgtggccgcacagattgccagtgggatgaggtacctggccactctcaattttgtacacagggacctggcaaccaggaattgcctggtgggagaaaatttcactattaaaattgccgacttcggaatgagtcgaaacttgtacgctggtgattactatcgggtccagggcagagctgtattacccatcaggtggatggcctgggaatgcatcctcatggggaaattcacaactgcatcagacgtgtgggcatttggtgtcacactgtgggaagttcttatgctctgtagggcacagccattcggacagttgaccgacgaacaggtgatcgagaacgctggcgaattcttccgggaccagggaaggcaggtatatctgagtcggcctcccgcatgtcctcagggcctatacgagttaatgctgaggtgctggtctcgggaatcggagcagcgacctccatttagccaattgcaccggtttctggccgaggacgcattgaacacggtttag

SEQ ID NO: 79966 - DNA, 2631 bp, Artificial Sequence
  derived and/or modified sequence
atgggccctgaagctctgtcgagtctcctactgctgctgctcgtcgcttcaggggacgccgatatgaaaggacactttgatcctgctaagtgccgctacgccctggggatgcaagacagaaccatacccgacagcgatatttccgcatcttcttcttggtccgacagtaccgcagctcgacactcaaggctcgaatctagtgacggtgatggcgcatggtgtcccgcaggttctgtattccctaaggaagaggaatatctgcaagtagatctacagaggttacatcttgtagcacttgttggaactcagggacgccacgctgggggattaggcaaagagttcagcagaagctacagactacgctacagccgcgatgggcgtcggtggatgggctggaaggatcggtggggacaagaggtgatttctgggaatgaagaccccgaaggagtggtactaaaggacctgggacccccaatggttgctcggttggttagattctaccctcgagctgatagggtgatgtctgtgtgtctgagggtcgagctgtatggctgtttgtggagagacgggcttctgtcctatactgcgccagttggccagactatgtacctgtccgaagccgtttatctcaacgactccacgtatgacggtcataccgtcgggggtctccagtacgggggactgggacagttagccgacggcgttgtaggtctcgacgatttcagaaagagtcaggagttgagagtgtggccagggtacgactatgtcggctggtctaaccactccttctcctccggttacgtcgagatggaatttgaattcgaccgattgcgggcatttcaggcaatgcaggtacactgtaacaatatgcacaccctgggcgcaagactccccggaggggtggaatgccgttttagaagaggcccagctatggcgtgggagggcgagccgatgcggcacaatcttggcggtaaccttggagacccacgtgccagggcagttagcgtgccactggggggtcgcgtggctcgcttcctacagtgcaggttcctattcgcaggtccatggctgcttttttcagaaataagtttcatttcagacgtcgtaaacaatagttccccagctctgggcggaacgtttccgccagccccttggtggccgcctggacctcccccaacaaactttagctcgctagagttggaaccccgaggtcagcagccggttgctaaagctgaaggctctccgacagccattctcattggttgtctggtagccatcatcctgctcctcttgctgattatcgcactcatgctttggcgcctgcactggcgcaggctgctcagtaaagcagagcgcagagtacttgaggaagaattgaccgtacatctgtccgtgccgggagacaccatcctgattaacaatcgcccaggcccacgggagcctcccccataccaggagcccagaccgcgtgggaatccccctcattccgcaccatgtgttcccaatggttctgcatacagcggtgactatatggagccagagaagccaggcgctcctttacttccgcctccccctcagaactctgtcccacactacgccgaagccgacatcgttacactgcaaggcgttaccggcggaaatacctacgccgtcccagctctccctcctggagctgtcggagacggccctcccagagtggactttcctcggtcgcggctgcggttcaaagaaaagctgggcgaagggcaattcggtgaggtgcatttgtgtgaggtggatagccctcaagacctggtatccctcgactttccgcttaacgtgaggaaaggccatccattactcgtggccgtcaaaatcctgaggcccgacgctactaaaaacgctcgcaacgacttcctgaaagaagttaagattatgagccgattgaaggatcccaatattataagattgctgggagtatgcgtgcaagatgacccactgtgcatgatcaccgactacatggagaatggcgacctgaatcaatttctgagtgctcatcagctggaggataaggcagctgagggggctcccggagatggacaagcggctcagggccctacaattagctatcccatgctgctacatgttgccgctcaaatcgcttcgggcatgagatacctagcaactcttaactttgtgcaccgggacctggcgactcgcaactgcctagtaggtgagaacttcaccatcaagatcgccgacttcggaatgagcagaaatctctatgccggtgattactaccgagtgcaggggagggccgtcctccctatcagatggatggcttgggaatgtatcctgatgggtaagtttacgaccgcttcggacgtgtgggcctttggcgtcaccctgtgggaggttctcatgctctgtagggcacagccgtttgggcaattaaccgatgagcaggtcatcgaaaatgcaggcgagttcttccgcgatcagggtcgccaggtctacttgtcaagacccccagcctgcccccagggtctatacgagctcatgcttaggtgctggtcccgggagagcgaacagcgccctcccttttcccagctacatagatttttggccgaggatgccctgaacaccgtgtag

SEQ ID NO: 79967 - DNA, 2631 bp, Artificial Sequence
  derived and/or modified sequence
atggggccagaggcgctctcgtctctgttattgctgctgctggtcgcttcaggggatgctgacatgaaggggcactttgacccagccaagtgcaggtatgccctgggtatgcaggacagaactattcctgattcagatatctctgcctcttcgtcctggtcagatagtacagctgccaggcacagccgattagaatcttctgatggagacggggcttggtgccctgccggttcagtgtttccgaaggaggaagagtatctgcaggtggatctgcagcggctgcacctggtggcccttgtcggcacacaaggcagacatgccggagggctgggcaaagaattttcgcgatcgtaccggctgcgatatagtcgggatggacgtagatggatgggctggaaagacaggtggggacaggaggtgattagcggcaacgaggatcctgagggggtggtgctcaaagacctcggcccaccgatggtggccagactcgtacgcttttaccccagagccgatcgcgtgatgagtgtgtgcttaagagtcgagctctacggatgtctgtggcgggacggcctgttatcctacaccgctccggtagggcagactatgtacctgtccgaggcagtatacctgaatgattcaacttacgatggacataccgtagggggactacaatacggaggcttggggcagcttgccgatggcgtggtaggactggacgatttccggaaaagccaggaactgcgcgtctggccaggctatgattatgtcggctggtcaaatcactcctttagtagcgggtacgtagaaatggagtttgagttcgacagactgagagctttccaggcaatgcaggtgcactgtaacaacatgcacacccttggcgctcggctgccgggtggcgttgaatgccgatttagacgtgggcctgccatggcttgggaaggggagcccatgcgccacaacctggggggtaacctgggagacccacgtgctcgtgccgtttctgtcccgctggggggtagggtcgcccgattcctgcaatgccgatttttattcgctggtccgtggttactattcagtgaaatctcctttattagcgacgtggttaataactctagtcctgccctcggcggtaccttccctcccgcaccgtggtggccacccggaccgcctcccacaaatttctcatccctggaactagaacccagggggcagcaacccgtggccaaagcagaggggtcccccacagctattctgataggctgtctcgttgctatcatactgctactattgctcatcatcgccctgatgttatggcgcttgcactggagaagactcctgtcaaaagctgaacgcagggtgctggaggaggagctgactgtccaccttagcgttccgggagacactatactgatcaataacagacctggacccagggagcctcccccatatcaggagcccagaccaagaggcaacccccctcatagcgctccttgcgtcccaaacggttctgcctactcaggggactacatggaaccagagaaacctggcgctccactactaccccctcccccacagaactccgtgccacattacgccgaggcagacatcgttacactgcagggcgtcacaggtggaaacacatacgccgtccccgcattgccacccggtgcggtgggggatggtccgcctcgtgtagatttcccacgctctagattaagatttaaggagaaactcggtgaaggtcagtttggggaggtgcacctgtgtgaggtggactctccccaggatcttgtaagcttggacttccctttgaatgttcgcaaggggcatcccctgctcgtggccgtcaagatacttcgccctgatgctacaaaaaacgcaagaaacgacttcctcaaggaggtgaaaattatgagtcggctgaaagacccaaatatcattaggctcttaggagtgtgtgttcaggacgaccctctgtgtatgattactgattatatggaaaatggcgacctgaatcaattcctcagcgcgcaccagttggaagacaaggccgctgaaggggctcccggtgatggacaagcggctcagggcccaactatcagttaccctatgctactgcacgtagctgctcagatagcctccggcatgcgctatctagctacactgaatttcgtgcatagggatctggctaccaggaattgtctcgttggcgaaaactttacaataaagatcgccgacttcggaatgtcgcgcaatctgtacgccggagactactatcgagtccaaggtcgggctgttctgcctattagatggatggcatgggagtgtatcctgatggggaagtttaccactgcctctgatgtctgggcgtttggcgtgacattatgggaggtcctgatgttatgccgggctcagccctttggccagctgactgacgaacaggtgattgagaatgccggagaatttttccgcgaccagggcaggcaggtctatttatcccgtcctccagcctgtccccagggactgtatgagcttatgctgcgctgctggagtagggaatcagagcagagacctcctttttcgcaactccacagattcttggcggaggacgcactgaacacggtgtag

SEQ ID NO: 79968 - DNA, 2631 bp, Artificial Sequence
  derived and/or modified sequence
atgggaccagaagctctgagcagtctcctgctgctgctattggtggccagtggagatgcggacatgaaaggccacttcgacccggctaaatgtagatatgccttgggcatgcaggatcggacgatccctgattcggacatttcagccagcagctcttggtcggacagcacagctgccaggcatagccgactggaatcaagtgatggagacggagcctggtgtccagctgggagcgtgtttcccaaagaggaggaataccttcaggttgacctgcagcgtctgcatcttgtggcactggtgggaacccagggacggcacgctggcggtcttggcaaagagttttctcgatcttaccgccttaggtacagcagggacgggaggcgctggatggggtggaaggacagatggggccaggaggttatcagtggtaatgaagatccagagggcgtggtgttgaaggacttgggtcccccaatggtggcaagactggtcagattttaccccagagccgaccgggtgatgagcgtgtgcctccgagtggagctgtatgggtgcctgtggcgtgatgggttattgagctacactgccccagtggggcagaccatgtacctgtcagaggccgtgtatctgaatgatagtacttacgacgggcatactgtcggaggactgcagtacggagggctgggccagctggctgatggcgttgttggtttggatgattttcggaaaagccaagagctaagagtgtggcccggatatgactatgtgggctggagtaatcatagcttctccagcgggtacgttgaaatggagttcgaattcgatcgtttgagagcctttcaggccatgcaggtacactgtaataacatgcatacgctgggcgcacgtctccctggtggggtcgaatgtcgctttaggcgcggacctgcgatggcttgggaaggcgagccgatgaggcacaacctgggagggaacctgggcgatccgcgtgccagggccgtctctgtgcctctgggtggtagggtggccagattccttcagtgcagattcctcttcgcaggaccctggttactcttttctgagatatcatttatcagcgatgtggtgaataacagttctccagcccttggaggaacctttcctcccgctccttggtggccaccagggccaccacctacgaacttctctagcctcgaattagagccacggggtcagcagccggtcgccaaggccgagggctcaccaactgccatacttatagggtgtctggtcgcaattatactcttactgctgttgatcatcgccctgatgctgtggagactgcactggcgcagacttttgagcaaagctgagcggagagtgttggaagaagagctgacggtccacctttccgttccgggagacacaattctgattaataaccgccctggtcccagagaacctcccccttaccaggaacccagaccaagggggaacccacctcactcagcaccttgcgttccaaacggctctgcatactcgggagattacatggaacccgagaaacccggagccccactgctgccacccccacctcagaatagcgtgcctcattacgctgaggccgatattgtgacccttcagggggttacaggcggtaatacttacgccgtgcctgccctacccccaggagccgtgggggatggaccccctcgtgtggactttccaaggagccgtcttaggtttaaggagaagttgggcgagggccaatttggagaagtgcatctgtgcgaggtcgattcacctcaagatctggtatcactcgacttccctttaaacgtccgcaagggccacccactgctggtggcggtgaagattctgcgtcccgatgcaaccaagaacgctagaaacgacttcctgaaggaggttaagattatgtcccggctgaaagatccaaatataatccgcctgcttggagtttgcgtgcaagacgatcccctgtgcatgataaccgactatatggaaaatggtgacctgaatcagttcctgtctgcccatcaactcgaggataaagctgctgagggcgctccaggagatggacaggctgcgcaggggccaacaatatcttaccctatgttgcttcatgttgccgcacagattgcctcagggatgagatacttagccactctgaacttcgtgcatagagacttggccacccgcaattgcttggttggagaaaattttaccattaaaatcgccgactttggcatgtccagaaacctttacgctggagattactatcgcgtgcaaggcagggccgtcttacctatccggtggatggcttgggagtgtatcctgatgggaaaatttacaactgccagcgatgtgtgggccttcggggtcacactgtgggaggtgctgatgctgtgccgcgcacagccatttgggcaactgactgacgaacaggtgatcgagaacgcaggggagttcttccgggatcagggccgacaggtgtacctgtctaggccccctgcctgcccccaagggctgtacgagctgatgctcaggtgctggtctcgggagtccgaacagagaccacccttcagtcaattgcatcggtttctggcggaggacgcattgaacactgtgtag

SEQ ID NO: 79969 - DNA, 2631 bp, Artificial Sequence
  derived and/or modified sequence
atggggccagaggccctgagttctctcctgctgctgttgctcgtggcctctggcgatgcagatatgaaagggcatttcgacccggctaagtgcagatacgcactgggcatgcaggatcgaactataccggactccgatataagtgcctcctcttcctggtccgactcaaccgccgcacggcattcgcggctggagtcttctgatggtgacggcgcttggtgccctgcaggatcggtatttccaaaggaggaggagtacctccaagttgatctgcaacggttacacttggttgctttggtaggtacccaggggaggcacgccggaggtcttgggaaagaattctccagatcgtatcgcttgcgatactccagagatggtcgtaggtggatgggatggaaggatagatggggtcaggaagtcatttctgggaatgaagacccagaaggagtggtgctgaaggaccttggtccaccgatggttgctagactggtgcggttctacccccgtgctgatcgggtcatgtccgtgtgtctaagggtggaattatacggctgcctatggcgcgatggtctcttgagctacaccgctccagtggggcaaacaatgtatctctcagaggctgtctatttaaacgacagcacatatgatggtcacaccgttgggggactgcagtacgggggactggggcagttggcagatggcgtcgttggcctggacgactttcggaaatctcaagaactgagggtgtggcctggctacgattatgttggctggagtaaccattctttctcgtctggatacgtagaaatggaattcgagttcgatcggttgcgggcattccaggctatgcaggtccattgcaataacatgcatacactgggtgccagactgcctggaggcgttgaatgtcggtttcgacgcggtccagccatggcgtgggagggagagcccatgagacacaatctgggtggtaatttgggcgatcccagagctagggccgtgtccgtacccttgggcggacgggtggctcggtttttgcaatgccgcttcctcttcgccggtccctggcttcttttcagcgaaattagcttcatttccgatgtggtcaataattcttcacctgctctcggcggtactttcccgcctgccccatggtggccccctgggcctccccctactaatttttcgtccctggagctcgaacccaggggccagcagcccgtggctaaagccgaggggtcacctacggctatactcatcggatgtctggttgccatcattttgttactgctgttaattatcgcattgatgctctggcgcttacattggaggagactgctcagcaaggcggagaggcgcgttctggaagaggaactgaccgttcacctttccgtacctggggacacaatcctgatcaacaacagacctggtcctagggagcctcccccataccaggaacctcgaccacgtggcaatcccccacactcggccccatgcgtcccaaatggttctgcctactccggcgattatatggagcccgaaaagccgggtgcacccctcctaccacccccaccccagaacagcgtacctcactatgccgaggccgatattgtcacactacaaggtgtcaccggagggaacacttacgccgtcccagctctgcctcctggtgccgtgggcgacggaccgccacgcgtcgattttcctagaagtaggttgagatttaaggaaaagctgggcgaaggacaatttggcgaagttcatttgtgcgaggtggactcccctcaggatctggtgagtctagatttccctttgaatgtgaggaaaggacatccactgctggtcgctgtgaagatcttaagacctgatgccaccaaaaatgcacgcaatgactttctgaaggaggtcaaaatcatgagcagactgaaagaccccaatatcattcggctgctgggggtgtgcgtgcaggacgatcccctgtgcatgatcactgactacatggagaacggcgacctgaatcagttcctgagcgcccatcagcttgaggacaaagctgccgagggggcaccaggtgacggacaagccgctcagggcccaacgatatcttaccctatgctcctgcatgtggccgctcagattgcttcaggtatgaggtacctggccacactcaattttgtccacagggacctggccactcgcaattgtctggttggagagaatttcactataaagatcgcagactttggaatgtcccggaatctctatgctggtgactactacagagttcaaggaagggccgtcttgcccataagatggatggcctgggagtgtatcttaatgggcaagttcaccacagccagtgatgtttgggctttcggggtcaccctttgggaggtgcttatgctgtgtagagcccagccattcggccagctgacagatgaacaggtgatcgaaaacgccggtgagttctttcgggaccaggggaggcaggtttaccttagccgaccccctgcctgccctcagggactgtacgagctgatgctccgctgctggagccgggagtccgagcagaggccccctttctcacagctgcataggttcctcgccgaggatgctcttaacactgtttag

SEQ ID NO: 79970 - DNA, 496 bp, Artificial Sequence
  derived and/or modified sequence
agtccagcgtctcctgggcctagattccccagctgctgttctctggaggggcccccgacagctgctctcgggagccgcctcccgacacccgagccccgccggcgcctcccgctcccggctcccggctcctggctccctccgcctcccccgcccctcgccccgccgccgaagaggccccgctcccgggtcggacgcctgggtctgccgggaagagcgatgagaggtgtctgaaggtggctattcactgagcgatggggttggacttgaaggaatgccaagagatgctgcccccacccccttaggcccgagggatcaggagctatgggaccagaggccctgtcatctttactgctgctgctcttggtggcaagtggagatgctgacatgaagggacattttgatcctgccaagtgccgctatgccctgggcatgcaggaccggaccatcccagacagtgacatctctgcttccagctcctggtcagattccactgccg

SEQ ID NO: 79971 - DNA, 2631 bp, Artificial Sequence
  derived and/or modified sequence
atgggacctgaagcgctgagctctctgcttctgttactgcttgtcgcgagcggcgatgcagatatgaagggccattttgaccctgcaaagtgcagatacgcgttgggaatgcaggatcggactatccccgatagcgacatttcagcgagttcatcctggagtgacagcaccgctgctagacattccagactagagtcctccgatggagacggagcttggtgtccagccggatcggtctttccaaaagaagaagaatatctccaggtggatctccagcgactgcatctggtggcactggtcggtacccagggcagacacgccggtggtctcggaaaggagttctccagatcttaccgcttgagatacagtcgagacggtcggagatggatgggttggaaagacaggtgggggcaggaagtgattagtgggaatgaagatcctgagggagtggtacttaaggatctcggtccgcctatggtggcccgattggtgcggttttatccacgtgccgacagagtgatgagcgtatgtttgcgagtggagctgtatggctgcctgtggcgcgatggactgctgagctataccgctcccgtcggacaaactatgtatctgtcggaggccgtgtatctgaacgactcaacctacgatggccataccgtgggtggacttcaatatggcggacttgggcaactggccgacggcgtggtgggattagatgatttcaggaagtctcaggagctgcgggtgtggcctggatacgactacgtagggtggtccaatcatagctttagctcagggtatgtagaaatggagttcgaatttgaccgcctgagggccttccaagccatgcaggttcattgtaacaacatgcacactctcggcgctcggctgccaggcggagttgagtgcaggttccgtcgcggtcctgcaatggcctgggagggcgagcccatgagacacaatctgggtggaaatctgggagacccgagggctagggccgtgtccgttcctctgggagggagagtggccaggttcctccaatgcagattcttgtttgccggaccatggttacttttcagtgaaataagttttataagcgacgttgtgaacaacagctctccagcactgggtgggacctttccacccgcaccctggtggccccctggccctccccctactaacttctcgtcccttgagctcgagcccagaggccagcagccggtcgctaaagctgaaggcagtcctacagcgatcctgattggatgtctggtcgctatcattctgctactgctcctcattatcgctctgatgctgtggcggctccactggagaaggctgctgtctaaagctgagaggagagtgctggaggaggaactgacagttcacctgagcgttcccggtgacactatactgataaacaatcggccaggtccccgtgagcctcccccttatcaagaacccaggccaaggggaaatccccctcacagcgcaccatgtgtgccaaacgggtcagcatattccggcgactatatggaacccgagaaacctggagcgccactgctgccccctcctccgcagaactctgtcccacactatgccgaagcggacatagtaactctgcagggggttacaggcggaaatacctatgctgtgcccgctctgcctccaggcgcagtaggtgatggcccaccccgtgtggactttccacggtctcgactgcgcttcaaagagaaattaggcgagggacaatttggtgaagtgcatttatgcgaagtagactcgccccaggaccttgtttccctggattttcctttgaacgtgcgaaaaggtcatcctctgctcgtcgctgtaaagatacttcgacccgacgcaaccaagaacgcccgaaatgatttcctcaaagaagtgaagatcatgtccagactcaaagatccaaatatcattcgcctgctgggtgtttgtgtgcaagacgaccccctgtgtatgattaccgattacatggaaaacggcgatctcaatcagtttctgagtgcccaccaactggaggataaagcggcagagggggctcccggtgacgggcaggctgcacagggccctactatcagctaccctatgctgctgcatgtggccgcacagatagcctcaggcatgagatacctagcgaccctcaatttcgttcacagggacctcgctaccagaaattgtctggtcggcgagaattttactataaaaatcgccgattttggcatgagcaggaacttatatgccggagactactacagagtacagggacgggctgttctccctataagatggatggcttgggaatgtatcctgatgggcaagtttaccacagccagcgatgtgtgggcatttggggtcactctctgggaggtgctgatgctttgtcgtgcacaaccgtttggtcaactcacagatgagcaggtgattgaaaatgcaggggagttctttagggaccagggacggcaggtgtatctctcacggcctccagcctgtccacagggcctctacgagcttatgctgagatgttggtctcgagagagcgaacagaggcccccattctctcaactccataggtttctcgctgaagatgccctcaatacggtgtag

SEQ ID NO: 79972 - DNA, 2631 bp, Artificial Sequence
  derived and/or modified sequence
atgggccctgaagcactttcctcccttctgctactgttattggttgcctcgggtgatgccgacatgaaggggcatttcgacccagctaagtgcaggtacgccctgggaatgcaagaccggacaataccagacagcgatatctccgcttcaagttcatggagcgatagcactgccgctcgacactcacggctggaaagttccgatggcgacggcgcttggtgtccagctgggagcgtctttcccaaggaggaagagtatcttcaggtggacctgcagaggctgcacttggtggccctagttggaactcaaggaagacacgccggtgggctgggcaaagagttcagcaggtcatataggttacgttacagccgtgacggcaggcggtggatggggtggaaggatagatggggccaggaggtgatctctggtaacgaggatccggagggtgtagtgctcaaagatctgggaccacccatggtggcgcgtttggtgagattctatccacgcgctgaccgggtgatgagcgtgtgtctgagggtggaactctatggctgcttgtggagagatggtcttctttcatacacagcacctgttggacagactatgtacctgtccgaggcagtctacctcaacgatagcacctatgacggccacaccgtggggggacttcagtacggcggacttgggcaattggccgacggtgtagtggggctggatgatttccgcaaaagtcaggaactaagagtgtggcccggatacgactatgtagggtggagcaaccactctttcagctcaggttatgtggaaatggaattcgagttcgatagactccgggcatttcaggccatgcaggtgcattgcaataacatgcatacgttgggcgcacggttaccaggaggtgttgaatgtcgtttcaggcgcggaccagccatggcttgggagggggagcccatgcgtcacaacctgggcggtaacctgggtgatccaagggcgcgtgccgtatccgtgcccctcggcggaagggtggctagattcctgcagtgtagattcctgtttgcagggccatggttattgttttcagagatctcctttattagtgatgtggtaaataactcttcacctgcgctgggcggaacatttccaccggcaccatggtggccacccggtcccccacccaccaacttcagctctcttgagctcgaaccaaggggccagcagccagttgcaaaggcagaaggatctccgactgccatactcataggctgcttagtcgcaatcatcctactgctccttctcatcattgcactgatgctgtggagacttcactggcggcgtcttttgtcaaaggcagaaagacgggttctggaagaggaactgacagttcatctgagtgtcccaggggataccatcctaattaacaataggcctgggccacgagaaccccctccctaccaggaaccacgtccccgaggtaatcctccacattccgccccatgcgtacccaatgggtcagcctatagtggggattatatggaacccgaaaagcctggcgcacctctgctgcctccacccccacagaactcggtaccacactacgctgaggctgatatcgttacgctccaaggcgtgaccgggggtaatacatacgctgtgcctgctttaccgccaggtgccgttggagatggaccaccccgtgtggacttcccacgctcacgtctgcggtttaaagagaagctcggcgagggtcagttcggagaggtacatttgtgtgaggttgactctccccaggatctagtctctctcgacttccctctaaacgtgaggaagggtcacccgctccttgtcgctgtcaaaatactgcgtcctgacgcaactaagaacgctagaaacgactttcttaaggaggtcaagattatgtcccggctcaaagatcctaacatcataaggctcctgggggtgtgcgtgcaggacgaccccctgtgcatgattacagactacatggaaaatggagatctaaatcaatttctcagcgcccatcagttagaggataaggccgctgagggagctccaggtgatggacaggctgcacaggggcctaccatatcatatcctatgctcctccatgtcgcagcacagatagcctctggaatgcggtatctcgccacgctgaactttgtgcacagagacttggccacacggaattgtctggtgggagagaacttcaccatcaaaattgcagatttcggcatgtctcggaatttgtatgctggtgactattacagggtacagggccgtgcggttcttcctattcgatggatggcatgggagtgtatcttgatgggcaaattcactactgcaagtgatgtatgggcatttggcgtgacattgtgggaagtcctgatgctgtgtagggcccagcctttcgggcaactgaccgacgagcaggtgatcgagaacgctggagagttcttccgcgatcaaggccgacaggtctatctgtcccggccaccagcctgtccgcaggggctgtacgaattaatgctgcggtgttggtctagagaatccgaacagaggccaccttttagtcagcttcatagatttctcgcggaggacgcacttaacaccgtgtag

SEQ ID NO: 79973 - DNA, 2631 bp, Artificial Sequence
  derived and/or modified sequence
atggggccagaagccttgtctagcttactcctcctgctgctcgtagcgtcaggggacgccgatatgaaagggcatttcgatccagctaagtgcagatatgccttgggaatgcaggatcgtacgatcccagactccgacataagcgctagctcctcttggtctgattcaactgctgcacgccactcacggctggagagcagcgatggcgacggagcttggtgtcccgcaggtagtgtgttccccaaagaggaggagtatctgcaggtggatctgcagcgtcttcacctcgtagccttggtgggtacacagggcagacatgccggtggcctcggaaaggagtttagtagaagttataggctcagatactcccgggatgggaggcgatggatgggatggaaggaccgctggggacaggaagtcatttcaggcaacgaagacccagaaggagtcgtgttaaaagatctcggtccacctatggttgccaggctggtgagattttatcccagagcagaccgcgtgatgtctgtgtgcttgagagtggagctgtacgggtgtctatggagggacgggctgctctcatataccgctcctgtgggccaaacaatgtacctgtccgaggctgtgtacctcaatgatagcacatatgacggccacacggttggaggcttacaatacggaggactgggtcagctcgctgacggcgttgtgggacttgatgactttcggaagagccaggagttgcgtgtttggccaggatacgattacgtaggctggagtaaccactcgttcagcagcggttatgtagaaatggagttcgaatttgaccggctgagggcctttcaggcaatgcaagtgcactgtaataacatgcatactcttggagcgcgtctgcctggtggcgttgagtgtcgcttcaggagggggccagctatggcatgggagggggagcccatgcgtcacaacctgggcggaaacctaggggatcccagggcaagggcagtctctgtgccgttgggcggtagggtcgcaaggttcctgcagtgtcgtttcctgttcgctggaccttggctgctcttctcagagattagtttcatctcagacgtagtaaataattcttcacccgctctgggagggactttccctcctgctccctggtggccaccaggcccaccgcctaccaattttagtagcctggagctggagccacgtgggcaacagccagttgcaaaagcagagggctcacctaccgcaattctcatcgggtgcctggtcgccatcattttattgttgctactcattattgctctgatgctatggcgcctacactggagacggcttctttcgaaagcagagagacgcgtgctagaggaggagctcacagttcatctttccgtccccggagacacaatcctgattaataatcggcctgggcctagggaaccacctccttaccaggagcctaggccgaggggcaatcctccacactccgctccttgtgtcccaaatggttcagcatacagcggagactatatggagcctgagaagcccggagcacccctcctgcccccacctccccaaaatagcgttccgcactatgccgaggcagacattgtcaccctccagggagtaaccggaggaaatacttacgccgtccctgccctgccaccaggtgcagtgggggatggccctcctcgtgtggattttcctcgatcacggttacgcttcaaagaaaaactgggtgaaggtcagttcggtgaagtccacctttgcgaagtggactcgccacaggatctggtcagcctggacttcccactgaacgtgagaaaggggcaccctctactggtagcagtgaagatcctgcgcccagacgcaactaaaaatgcaaggaacgacttcctcaaagaagttaaaatcatgagtcgactgaaagaccccaatatcatcagattattgggcgtgtgcgttcaggacgatccactgtgtatgatcacggactatatggaaaatggtgacttaaaccagttcttgtccgcacatcaactggaggacaaagccgcagaaggggctccaggcgacgggcaggcagcacagggtcctacgatcagctaccccatgttgcttcacgttgcggctcagatagcctcaggaatgcgctatcttgccacgctcaatttcgtgcacagagatcttgcaactaggaactgtctggtaggtgagaactttaccataaagattgcagacttcgggatgtctagaaatctctatgcaggcgactattacagggtgcaggggcgtgcagtgctgccaattcgctggatggcgtgggagtgtattctgatgggcaagttcaccaccgcctctgacgtctgggcgtttggtgtcactctatgggaggtgttgatgctgtgtcgagcccagcctttcggacagctgaccgatgagcaggtcatcgaaaacgctggcgagttctttcgtgaccagggaagacaggtctacttgtcccgtccacccgcatgtccccagggcctgtatgaactcatgctgagatgctggtccagggagtcagagcagcggccacccttttctcagctgcatcgctttctcgccgaagacgccctgaataccgtgtag

SEQ ID NO: 79974 - DNA, 873 bp, Artificial Sequence
  derived and/or modified sequence
gggagccactgggactactgggtccgggagggggaagggagggctgcgagcccgaacgcgcggcgagaaggccgaggggagggaggggagcgaggagcgggaggaggaagggagggagccgaggcgagggggaggcggcgcctgggcccgagccgccccagccctggctcctctccccggaacaggcccccgacagctgctctcgggagccgcctcccgacacccgagccccgccggcgcctcccgctcccggctcccggctcctggctccctccgcctcccccgcccctcgccccgccgccgaagaggccccgctcccgggtcggacgcctgggtctgccgggaagagcgatgagaggtgtctgaaggtggctattcactgagcgatggggttggacttgaaggaatgccaagagatgctgcccccacccccttaggcccgagggatcaggagctatgggaccagaggccctgtcatctttactgctgctgctcttggtggcaagtggagatgctgacatgaagggacattttgatcctgccaagtgccgctatgccctgggcatgcaggaccggaccatcccagacagtgacatctctgcttccagctcctggtcagattccactgccgcccgccacagcaggttggagagcagtgacggggatggggcctggtgccccgcagggtcggtgtttcccaaggaggaggagtacttgcaggtggatctacaacgactccacctggtggctctggtgggcacccagggacggcatgccgggggcctgggcaaggagttctcccggagctaccggctgcgttactcccgggatggtcgccgctggatgggctggaaggaccgctggggtcaggag

SEQ ID NO: 79975 - DNA, 3678 bp, Artificial Sequence
  derived and/or modified sequence
ctcccgacacccgagccccgccggcgcctcccgctcccggctcccggctcctggctccctccgcctcccccgcccctcgccccgccgccgaagaggccccgctcccgggtcggacgcctgggtctgccgggaagagcgatgagagagatgctgcccccacccccttaggcccgagggatcaggagctatgggaccagaggccctgtcatctttactgctgctgctcttggtggcaagtggagatgctgacatgaagggacattttgatcctgccaagtgccgctatgccctgggcatgcaggaccggaccatcccagacagtgacatctctgcttccagctcctggtcagattccactgccgcccgccacagcaggttggagagcagtgacggggatggggcctggtgccccgcagggtcggtgtttcccaaggaggaggagtacttgcaggtggatctacaacgactccacctggtggctctggtgggcacccagggacggcatgccgggggcctgggcaaggagttctcccggagctaccggctgcgttactcccgggatggtcgccgctggatgggctggaaggaccgctggggtcaggaggtgatctcaggcaatgaggaccctgagggagtggtgctgaaggaccttgggccccccatggttgcccgactggttcgcttctacccccgggctgaccgggtcatgagtgtctgtctgcgggtagagctctatggctgcctctggagggatggactcctgtcttacaccgcccctgtggggcagacaatgtatttatctgaggccgtgtacctcaacgactccacctatgacggacataccgtgggcggactgcagtatgggggtctgggccagctggcagatggtgtggtggggctggatgactttaggaagagtcaggagctgcgggtctggccaggctatgactatgtgggatggagcaaccacagcttctccagtggctatgtggagatggagtttgagtttgaccggctgagggccttccaggctatgcaggtccactgtaacaacatgcacacgctgggagcccgtctgcctggcggggtggaatgtcgcttccggcgtggccctgccatggcctgggagggggagcccatgcgccacaacctagggggcaacctgggggaccccagagcccgggctgtctcagtgccccttggcggccgtgtggctcgctttctgcagtgccgcttcctctttgcggggccctggttactcttcagcgaaatctccttcatctctgatgtggtgaacaattcctctccggcactgggaggcaccttcccgccagccccctggtggccgcctggcccacctcccaccaacttcagcagcttggagctggagcccagaggccagcagcccgtggccaaggccgaggggagcccgaccgccatcctcatcggctgcctggtggccatcatcctgctcctgctgctcatcattgccctcatgctctggcggctgcactggcgcaggctcctcagcaaggctgaacggagggtgttggaagaggagctgacggttcacctctctgtccctggggacactatcctcatcaacaaccgcccaggtcctagagagccacccccgtaccaggagccccggcctcgtgggaatccgccccactccgctccctgtgtccccaatggctctgcctacagtggggactatatggagcctgagaagccaggcgccccgcttctgcccccacctccccagaacagcgtcccccattatgccgaggctgacattgttaccctgcagggcgtcaccgggggcaacacctatgctgtgcctgcactgcccccaggggcagtcggggatgggccccccagagtggatttccctcgatctcgactccgcttcaaggagaagcttggcgagggccagtttggggaggtgcacctgtgtgaggtcgacagccctcaagatctggtcagtcttgatttcccccttaatgtgcgtaagggacaccctttgctggtagctgtcaagatcttacggccagatgccaccaagaatgccaggaatgatttcctgaaagaggtgaagatcatgtcgaggctcaaggaccccaacatcattcggctgctgggcgtgtgtgtgcaggacgaccccctctgcatgattactgactacatggagaacggcgacctcaaccagttcctcagtgcccaccagctggaggacaaggcagccgagggggcccctggggacgggcaggctgcgcaggggcccaccatcagctacccaatgctgctgcatgtggcagcccagatcgcctccggcatgcgctatctggccacactcaactttgtacatcgggacctggccacgcggaactgcctagttggggaaaatttcaccatcaaaatcgcagactttggcatgagccggaacctctatgctggggactattaccgtgtgcagggccgggcagtgctgcccatccgctggatggcctgggagtgcatcctcatggggaagttcacgactgcgagtgacgtgtgggcctttggtgtgaccctgtgggaggtgctgatgctctgtagggcccagccctttgggcagctcaccgacgagcaggtcatcgagaacgcgggggagttcttccgggaccagggccggcaggtgtacctgtcccggccgcctgcctgcccgcagggcctatatgagctgatgcttcggtgctggagccgggagtctgagcagcgaccacccttttcccagctgcatcggttcctggcagaggatgcactcaacacggtgtgaatcacacatccagctgcccctccctcagggagtgatccaggggaagccagtgacactaaaacaagaggacacaatggcacctctgcccttcccctcccgacagcccatcacctctaatagaggcagtgagactgcaggtgggctgggcccacccagggagctgatgccccttctccccttcctggacacactctcatgtccccttcctgttcttccttcctagaagcccctgtcgcccacccagctggtcctgtggatgggatcctctccaccctcctctagccatcccttggggaagggtggggagaaatataggatagacactggacatggcccattggagcacctgggccccactggacaacactgattcctggagaggtggctgcgcccccagcttctctctccctgtcacacactggaccccactggctgagaatctgggggtgaggaggacaagaaggagaggaaaatgtttccttgtgcctgctcctgtacttgtcctcagcttgggcttcttcctcctccatcacctgaaacactggacctgggggtagccccgccccagccctcagtcacccccacttcccacctgcagtcttgtagctagaacttctctaagcctatacgtttctgtggagtaaatattgggattggggggaaagagggagcaacggcccatagccttggggttggacatctctagtgtagctgccacattgatttttctataatcacttggggtttgtacatttttggggggagagacacagatttttacactaatatatggacctagcttgaggcaattttaatcccctgcactaggcaggtaataataaaggttgagttttccacaa

SEQ ID NO: 79976 - DNA, 591 bp, Artificial Sequence
  derived and/or modified sequence
atgccgcatctggcttctctgtttacggcgagtagtaggtgctgccctcatcccctgaggcctgagggcagtggtgctatgggaccagaagctcttagcagtctcctgcttctattgctggtcgctagtggcgacgcagatatgaaaggccatttcgatcctgccaaatgccggtatgcccttggcatgcaagaccggactatcccggactccgatatctcagcctctagctcatggtccgattcaacagccgctcgccactctaggctggagtccagcgatggggatggcgcatggtgtccagccggatctgtgttcccgaaggaagaagaatatctccaggtggaccttcagagactgcacctagtggctcttgtaggcacacaaggaaggcacgccggaggtctgggcaaggagttctcgagatcgtatcgcttacgctactctcgtgatggcagaagatggatggggtggaaagacagatggggtcaggaagtgataagcgggaatgaggacccagagggcgtagtcctgaaggacctgggccctcctatggtcgccaggctggttagattttatcctcgagcctag

SEQ ID NO: 79977 - DNA, 2685 bp, Artificial Sequence
  derived and/or modified sequence
atgtcgctgcccagatgctgtccacacccactccgtccggagggtagcggggcaatgggaccggaggctctgagctctctcttgctgctgctcctggtggcctcaggggatgccgacatgaaagggcactttgaccctgccaagtgccgctacgcactcggaatgcaggacaggaccattccagacagtgacatttctgctagtagctcatggagtgattccactgcagcacgccattctcggctggagtcctctgacggagacggggcttggtgcccagctggatctgtatttccaaaagaggaggagtatctgcaagtggacctgcagagactgcacctggtcgcactggtgggaactcaggggaggcatgccggtgggctgggaaaagaattcagccggtcttatcgactgaggtactcccgggacggcagacgatggatgggatggaaggataggtggggacaagaggtgattagcggcaacgaagatcctgagggcgtggtcctgaaagaccttgggccacctatggtggcccgactggttcggttttaccctagggccgatagggtgatgagtgtgtgcctaagggttgagctgtacgggtgtctgtggagggatggcctgctgagctatacagcccctgtcgggcagactatgtatctgtcagaagccgtgtacctgaatgacagcacatatgatggccacacagtggggggactgcaatacgggggactggggcaactggctgacggagttgtgggactggatgactttcgaaagtcacaagaactcagggtgtggccaggctatgattacgtaggctggtctaatcacagtttcagctccggatacgtggaaatggagtttgaatttgaccgcctgcgcgcttttcaggccatgcaagtacattgcaacaacatgcatacattaggcgcaaggttgccagggggtgttgaatgcaggtttcggagagggccagcaatggcttgggaaggagaacccatgcggcataatcttgggggaaacctgggagatcctcgagccagagccgtgagtgtgccactgggcggacgggttgctaggtttctccaatgtcgctttttattcgcaggaccctggcttctcttctcagagatatcttttatctctgatgtagtcaataattcttcacctgcccttgggggtacattcccacctgcaccctggtggccccctgggcctccgccaaccaactttagctctctcgagcttgaaccgagggggcagcagcccgtggctaaggctgagggatcccccaccgccatcctcatcggatgtcttgtcgctattatccttctcctcctgttgatcatagcactcatgctttggaggctgcattggcgccgattactgtccaaagcagagcggagggtgttggaggaagaactgactgtccacctctcagtccctggggatacaattctgatcaataaccgtccgggtcccagggagccccctccataccaggaacccaggcctcgtggcaatccaccacattccgccccatgcgtgcccaacggttcagcatactctggtgactacatggagcccgagaagcctggggcacccctgcttcccccacccccacaaaactcagttccacattacgcggaggctgatatcgtcaccttacagggcgtgaccggagggaacacttatgcagtcccggcactgcctccaggtgctgtgggtgacggaccccctcgggtggactttcccaggtcccggttacggtttaaggagaaactgggggagggtcaatttggcgaggtgcacctgtgtgaagtcgactcaccccaggacttggtgtccttagatttcccacttaatgttcggaagggccaccctctgctggtggcagtgaaaattctccgtcccgatgcaactaagaacgcgcgaaacgattttctgaaggaggttaagatcatgtcaaggttaaaggaccccaatatcatccgccttctgggagtgtgcgtccaggatgatccattgtgtatgataacagactatatggaaaatggtgacctcaaccagttcttatcagctcatcagctggaggataaggccgcagagggcgcacccggtgatggacaggctgctcaaggaccaacgatttcttaccccatgctgctgcacgtagcagctcagatagcctcagggatgcgctatttggctaccttaaatttcgtgcaccgggatctagcgactaggaactgtctcgtgggggagaactttaccatcaagattgctgatttcggcatgagcaggaacctgtatgctggggattattaccgcgtccaaggtcgggcagttctgccaattcgctggatggcttgggagtgcatcttgatgggaaagttcacaactgcatctgacgtttgggcctttggggtgaccctctgggaggtcctaatgctttgccgcgctcagccatttggccagctcaccgatgaacaggttattgagaacgcaggcgagttcttccgggaccagggacgccaggtgtacttaagcagaccccctgcttgcccacaaggactttacgagctcatgctgaggtgttggagtcgcgaatccgaacagcggcctccctttagccagctacaccgtttcctggccgaggatgccctcaataccgtgtag

SEQ ID NO: 79978 - DNA, 3588 bp, Artificial Sequence
  derived and/or modified sequence
agcctagagctggggcgaggtgggcatcaccactaggaatttctcctgaggcagtgagaagaggggacaaaggtttcaggactctctagctccttctgctctccccagtggacccctctgtctggcactgccatgccacttagctggggtcagcgtgggcctggggtgtggaatgtcccaccagggtatgacgggctgtagcttgcctggcaggcctgttggggctttcccagagcacagctcctggaaggaggggctgtgggctgccaggtgaggtgacttgggaagccttggccccacccccaggctggccccacccccagtccagcgtctcctgggcctagattccccagctgctgttctctggagggagatgctgcccccacccccttaggcccgagggatcaggagctatgggaccagaggccctgtcatctttactgctgctgctcttggtggcaagtggagatgctgacatgaagggacattttgatcctgccaagtgccgctatgccctgggcatgcaggaccggaccatcccagacagtgacatctctgcttccagctcctggtcagattccactgccgcccgccacagcaggttggagagcagtgacggggatggggcctggtgccccgcagggtcggtgtttcccaaggaggaggagtacttgcaggtggatctacaacgactgcacctggtggctctggtgggcacccagggacggcatgccgggggcctgggcaaggagttctcccggagctaccggctgcgttactcccgggatggtcgccgctggatgggctggaaggaccgctggggtcaggaggtgatctcaggcaatgaggaccctgagggagtggtgctgaaggaccttgggccccccatggttgcccgactggttcgcttctacccccgggctgaccgggtcatgagcgtctgtctgcgggtagagctctatggctgcctctggagggatggactcctgtcttacaccgcccctgtggggcagacaatgtatttatctgaggccgtgtacctcaacgactccacctatgacggacataccgtgggcggactgcagtatgggggtctgggccagctggcagatggtgtggtggggctggatgactttaggaagagtcaggagctgcgggtctggccaggctatgactatgtgggatggagcaaccacagcttctccagtggctatgtggagatggagtttgagtttgaccggctgagggccttccaggctatgcaggtccactgtaacaacatgcacacgctgggagcccgtctgcctggcggggtggaatgtcgcttccggcgtggccctgccatggcctgggagggggagcccatgcgccacaacctagggggcaacctgggggaccccagagcccgggctgtctcagtgccccttggcggccgtgtggctcgctttctgcagtgccgcttcctctttgcggggccctggttactcttcagcgaaatctccttcatctctgatgtggtgaacaattcctctccggcactgggaggcaccttcccgccagccccctggtggccgcctggcccacctcccaccaacttcagcagcttggagctggagcccagaggccagcagcccgtggccaaggccgaggggagcccgaccgccatcctcatcggctgcctggtggccatcatcctgctcctgctgctcatcattgccctcatgctctggcggctgcactggcgcaggctcctcagcaaggctgaacggagggtgttggaagaggagctgacggttcacctctctgtccctggggacactatcctcatcaacaaccgcccaggtcctagagagccacccccgtaccaggagccccggcctcgtgggaatccgccccactccgctccctgtgtccccaatggctctgcctacagtggggactatatggagcctgagaagccaggcgccccgcttctgcccccacctccccagaacagcgtcccccattatgccgaggctgacattgttaccctgcagggcgtcaccgggggcaacacctatgctgtgcctgcactgcccccaggggcagtcggggatgggccccccagagtggatttccctcgatctcgactccgcttcaaggagaagcttggcgagggccagtttggggaggtgcacctgtgtgaggtcgacagccctcaagatctggttagtcttgatttcccccttaatgtgcgtaagggacaccctttgctggtagctgtcaagatcttacggccagatgccaccaagaatgccaggaatgatttcctgaaagaggtgaagatcatgtcgaggctcaaggacccaaacatcattcggctgctgggcgtgtgtgtgcaggacgaccccctctgcatgattactgactacatggagaacggcgacctcaaccagttcctcagtgcccaccagctggaggacaaggcagccgagggggcccctggggacgggcaggctgcgcaggggcccaccatcagctacccaatgctgctgcatgtggcagcccagatcgcctccggcatgcgctatctggccacactcaactttgtacatcgggacctggccacgcggaactgcctagttggggaaaatttcaccatcaaaatcgcagactttggcatgagccggaacctctatgctggggactattaccgtgtgcagggccgggcagtgctgcccatccgctggatggcctgggagtgcatcctcatggggaagttcacgactgcgagtgacgtgtgggcctttggtgtgaccctgtgggaggtgctgatgctctgtagggcccagccctttgggcagctcaccgacgagcaggtcatcgagaacgcgggggagttcttccgggaccagggccggcaggtgtacctgtcccggccgcctgcctgcccgcagggcctatatgagctgatgcttcggtgctggagccgggagtctgagcagcgaccacccttttcccagctgcatcggttcctggcagaggatgcactcaacacggtgtgaatcacacatccagctgcccctccctcagggagcgatccaggggaagccagtgacactaaaacaagaggacacaatggcacctctgcccttcccctcccgacagcccatcacctctaatagaggcagtgagactgcaggtgggctgggcccacccagggagctgatgccccttctccccttcctggacacactctcatgtccccttcctgttcttccttcctagaagcccctgtcgcccacccagctggtcctgtggatgggatcctctccaccctcctctagccatcccttggggaagggtggggagaaatataggatagacactggacatggcccattggagcacctgggccccactggacaacactgattcctggagaggtggctgcgcccccagcttctctctccctgtcacacactggaccccactggctgagaatctgggggtgaggaggacaagaaggagaggaaaatgtttccttgtgcctgctcctgtacttgtcctcagcttgggcttcttcctcctccatcacctgaaacactg

SEQ ID NO: 79979 - DNA, 2685 bp, Artificial Sequence
  derived and/or modified sequence
atgtctctacccaggtgctgtccccaccctctgaggccggagggatccggcgcaatggggccagaagccttatcctctctgctgctgttactgctggtggcgtcaggggacgctgatatgaaaggacactttgatccagccaagtgtcgatatgcccttggcatgcaagacagaacgatcccggatagcgatatctccgccagtagctcctggtccgattctaccgcagccagacacagtcgtttagaatccagcgacggggacggcgcttggtgcccagctggcagcgttttcccaaaagaagaggaatacctccaagtggacctgcagcgcctgcacttggtggccttagtgggtacacagggtcgtcacgccggaggcctgggaaaggagttctcgagaagttaccgccttagatactcccgggatggtagacggtggatgggatggaaggatcgatgggggcaagaggtgatcagtgggaatgaggatcctgaaggggtcgtgctgaaagacctgggtcctccaatggtcgcacggctggtgcgcttttatccaagagctgaccgtgtaatgtcagtatgtttacgggtcgaactctatggctgtctctggcgcgatggcctgcttagctatacggctccagttgggcaaacaatgtacctgtccgaagccgtgtatctaaacgatagcacctacgacggacatacagtgggaggtctgcagtacggcggactcgggcagctggcagacggcgtggttggcctggatgatttccgtaaatcacaggaactgagggtttggcccggatacgattacgtcggctggagtaaccacagcttttccagcggatatgtggagatggaattcgagtttgatagactgcgtgcttttcaagctatgcaggtgcattgtaataacatgcatactctgggagccagactgccaggcggagtcgaatgtagattcaggcgaggacctgctatggcatgggagggggaacccatgagacataaccttgggggaaacctcggagacccccgagcgagggccgtgtccgttcctttaggtggcagggtcgctaggtttttgcagtgccgattcttgtttgctggaccttggcttctgttctccgaaatttctttcatttccgacgtggtgaacaattcaagccccgcactagggggaaccttcccaccagccccttggtggccgcctggtccccctcccacaaactttagctcacttgagctggagcctcggggacagcagcctgtggctaaggctgaagggtccccgactgctatcctgatcggatgcttggttgctattatcctgctgctgctcctgatcattgctctaatgctttggcgcctccactggcgccgactgctgagtaaagctgagagacgagtgctcgaggaagaactgacagtgcacctctcggttccaggggatacaatcttaataaataatcggccaggcccacgggagcccccaccctaccaagaacctaggcctcgcggaaatcccccacattcagctccatgcgtccccaatggatcagcctacagcggcgactacatggagccagagaagccaggtgcacctctgcttccgcctcctcctcagaactcggttccccactatgcagaagccgatatcgtcacgttgcagggcgtgacaggcggtaacacttacgctgtgccagctttacccccaggtgccgttggggacggccctccacgagtggatttcccccgaagtagactgaggtttaaagaaaagctgggtgagggacaattcggtgaagttcacttgtgtgaggttgacagcccccaggacttggtctccctcgatttccctctcaacgtgagaaagggccatcccctgctggttgctgtcaaaatactgcggccagacgccactaagaacgctcggaacgactttctaaaggaggtaaagatcatgtcgagactgaaggacccaaatatcatccggctcttgggggtttgcgtgcaggacgaccctctgtgcatgattacagattatatggaaaacggagatttgaatcaatttctctccgcgcaccagctggaagacaaagccgcagagggagctccaggtgatggacaggccgctcagggacccacaatctcctatcccatgttgctccacgttgcggctcaaattgcctctgggatgcgctacctagccaccctgaactttgtgcacagagatttggctacccgcaattgcttggtcggcgagaacttcaccataaaaattgctgactttggcatgtctcggaatctctacgctggggattactatagggtgcaggggagggccgtacttccaattagatggatggcttgggagtgtatcctgatgggcaagttcaccaccgcatctgacgtttgggcatttggcgtcaccctgtgggaggtgctgatgctatgtcgggctcagccctttggtcagctgacagacgagcaggtgatcgagaacgccggagagttctttcgagaccagggaagacaggtctatttatcacgtcccccagcatgcccgcaaggactctacgaactgatgctccgctgttggtcacgcgagtccgagcagcgcccaccgttcagccagctccaccgcttcctggcagaggacgccttgaacacagtctag

SEQ ID NO: 79980 - DNA, 2685 bp, Artificial Sequence
  derived and/or modified sequence
atgtctctcccgaggtgttgccctcacccgttacggccagagggcagtggcgctatgggtcccgaagctctgtcgtccctactccttttgctgttggtggccagcggtgatgctgacatgaagggacattttgatcccgctaaatgccggtatgccctgggaatgcaggacaggaccatccctgactccgacattagtgcctcttcgtcttggtcagattccacggccgcaagacactctaggcttgagtcatctgacggcgatggtgcgtggtgtcctgcaggatccgttttccctaaagaagaagagtatctgcaggtcgatcttcagcgcttgcacctcgttgcactagtgggaacacagggtaggcacgcaggtgggctgggcaaagaattctcacgatcttacagattacgatattcaagagatggcaggaggtggatgggatggaaggacagatgggggcaggaggtgatttctggcaatgaagaccccgagggagtcgtactaaaagacctcggaccacccatggtggcgaggttggttcgattctacccccgtgccgacagagtgatgagcgtatgcctccgtgtggagttgtacggttgcctgtggagagatggccttctgagttataccgcaccagtaggacagacgatgtacctgagtgaagccgtgtatctaaatgacagcacctacgatggacatacagtgggcggtctccagtacggagggctgggccagctcgcagatggtgtagttggtcttgatgattttagaaagagccaggaacttagagtctggcctggatatgactatgtggggtggtctaatcactcattctcaagcggttatgtcgagatggaattcgagtttgacaggctgagggctttccaggccatgcaggtccattgtaacaacatgcacactctcggggctcgattgcccggaggcgtggaatgcaggtttcggagggggcctgctatggcgtgggagggagagcccatgagacacaacctgggcggaaacctgggtgaccctcgcgcacgtgctgtcagtgtgccactgggtggtagagtcgctcggtttctgcaatgtagatttctgtttgctggaccatggttgttgttttccgaaatttcctttatttcagacgtggtgaataacagcagcccggcacttggaggaaccttccccccagcaccctggtggccacctggaccaccccctactaattttagttccctggaactggagccacgcggacagcaacctgtggccaaggcggaggggtcgcctaccgccatcttgatcggatgcctggtggccatcatcctcctgctactgctcattatcgccttaatgctctggcgactccattggagaaggctcctctcaaaggctgagcgccgagtcctagaggaggagctcaccgttcacctgagcgtgcccggtgatactattctgataaacaaccgccctgggcctagagaacccccaccctatcaggagcctcgccctcggggtaacccgccacacagcgcaccatgtgtgcccaatggcagcgcctattccggcgattatatggagcccgagaaacctggtgccccactcctccctcctccccctcagaatagcgttccacactacgccgaggccgatatcgtgactctgcaaggcgtgactggtggaaatacctacgctgtgcctgcacttccgcctggagccgtgggtgacggaccccctagggtcgattttccacgaagccggctgcgcttcaaagagaagctgggtgagggccagtttggagaagttcacctgtgtgaggtggacagccctcaagatttggtttccctggacttccccctgaacgtaaggaagggccaccctctgctggtggccgttaaaatcctgagaccagatgccactaaaaatgccagaaacgacttcctgaaggaggtaaagatcatgagcaggctgaaggaccccaatataattcgcctgttgggggtgtgcgtacaggacgatccactctgtatgatcacggattacatggagaacggcgatctcaatcagttcctgagcgctcatcaactagaggacaaagccgcagagggagcccctggagacggccaggctgcccagggccctaccatctcttaccccatgttgttgcatgttgctgcacagatcgcctccgggatgcgatatctggcaaccctcaatttcgtgcaccgggacctcgccacgaggaattgtctggtgggagagaacttcaccattaaaatcgccgatttcggcatgagcagaaacttatatgctggagattactatcgggtccagggaagggccgtactccccataagatggatggcttgggaatgcatcctgatgggaaagtttactaccgctagcgatgtgtgggcctttggcgtgacattgtgggaggtcctgatgctgtgccgggctcagccattcggacagttgactgacgagcaggtgattgagaacgctggggagttcttccgggatcagggtagacaggtgtatctgtccagaccacctgcttgcccccaaggtctttatgagctgatgctgaggtgctggtcccgcgagtccgagcagagaccacccttttcccagctgcaccgatttctcgctgaggatgctttgaacaccgtctag

SEQ ID NO: 79981 - DNA, 756 bp, Artificial Sequence
  derived and/or modified sequence
atgcctcatttagcctctctttttacagctagctcccggtgctgccctcatcctctccgacctgaaggctctggggctatggggccagaggctctgagtagtctgctgctcctcttacttgtcgcaagtggggatgcagatatgaaaggccattttgatcccgctaaatgccgatacgcgcttgggatgcaagatcggaccattccagactcagatatttctgccagcagtagttggagcgattctactgccgctcgtcacagccgccttgaatccagcgacggcgatggggcatggtgcccagcgggtagtgtgtttcccaaggaagaggaatacctgcaagttgacctccagcgattgcacctggtcgcactagtcggcacacagggaaggcacgctggaggactcggcaaagaattctcaaggtcttatcgtcttagatatagcagggatggacggaggtggatgggctggaaggatcgatgggggcaggaagttatctcaggaaatgaggatccagagggcgtcgtactcaaggatcttgggccacccatggtggcgaggctggtacgcttttatcctcgggcagatcgggtgatgtcagtctgcctgcgcgtagaactctacggatgcctttggcgcggtgagtggttatcattcctcggcatctgcttcctttcaagaggtctggaagggggtgaatgcggcgaatgggcctcgcgcatcccatcacctgcaggaaaactgtcgctgtag

SEQ ID NO: 79982 - DNA, 2685 bp, Artificial Sequence
  derived and/or modified sequence
atgtccttgccgaggtgttgcccacaccccctaagaccagaaggctccggagccatgggtccagaggcactgagtagcctcttgcttcttctgctggtggcgagcggcgacgctgatatgaaaggacactttgacccagccaagtgtagatacgccctgggcatgcaagacaggacaattcctgattccgacatctcagcatcatcttcctggagcgatagcacagctgccaggcattcccgactggagtctagtgacggcgacggagcttggtgtcccgcagggtctgttttcccgaaagaggaggagtatttgcaggtcgatctgcagaggttgcatctggtggcactagtgggtacacaggggaggcatgccggtggactgggcaaggaattctcccgctcatacagactccgctattcccgggacggccgtcgatggatggggtggaaggatcgatggggacaggaagtgatctctggcaatgaggatcctgaaggcgtcgtgcttaaagacttgggacccccaatggtggcccgtctggtgcgcttctaccccagagctgaccgggtaatgagtgtgtgtttaagagtagagctctatgggtgcctctggcgcgatggactgcttagctatacggcacccgtcggacaaacaatgtatctttccgaagctgtttacttgaatgatagtacatacgacgggcataccgtaggcggactgcagtatggcggtctgggacagctagccgacggcgtcgtgggccttgacgatttcaggaagtcgcaagaactgcgcgtgtggccaggttatgattatgttgggtggtcaaaccacagtttttcttccggttatgtcgagatggagttcgaattcgacaggctccgggcattccaggctatgcaagtccattgcaacaatatgcatactctcggcgcacggctacctgggggtgtggaatgcaggttccggagaggccctgccatggcctgggaaggggaaccgatgagacacaacctggggggaaacttgggcgatcccagggctagagctgtttccgttccgctggggggtagggtcgcgaggtttttgcaatgccgttttctgtttgctggtccttggttactgttctcagagataagttttatcagcgacgttgtgaataattcctccccagctctcggtggtactttccctccagctccatggtggccaccaggacccccaccaaccaacttttcctccctcgagctggagccgaggggacagcagcctgtggccaaagctgaagggtcacctacagctatacttattggatgtttggtggctatcatcctgttgttactgttgataatcgccttaatgctctggcgccttcactggaggcgattgcttagcaaagccgagcgaagagttctcgaagaagaactgaccgtacatttgtctgtcccaggggatacaatcttgattaataatcgtcccggacccagagaaccacccccttaccaggagcctaggccgagaggcaaccctccacatagcgctccttgtgtccccaatggttcagcctatagtggcgactacatggagcccgaaaagcctggggctccccttctgcctccaccaccccagaactcagttccacactatgccgaggcagacattgtgacgctgcagggagtcaccggagggaatacctatgctgtgcccgctctccccccaggagcagttggggatggaccccctcgagtcgattttccacggagccgactaaggttcaaggagaaactgggggaaggtcagtttggtgaagtgcatctttgcgaagtggacagcccccaggacctggttagtttggactttcccctcaatgtaaggaaaggacatccattgttagttgccgtgaaaatcctgcgccctgacgctacaaagaatgctcgtaacgatttcctcaaggaagtgaaaatcatgtcaagacttaaggatcccaatataatcagactgctgggtgtctgcgttcaagacgaccccttatgcatgataactgactatatggaaaacggagacctcaatcagttcctctccgcccatcagctcgaagataaagctgcagagggcgctcctggcgatggccaagctgcccaaggcccaactatttcctaccccatgttgctgcacgtggccgcacaaatagcttctgggatgaggtacctcgccacactaaactttgtgcaccgggacctcgcgaccaggaactgtctggtgggggagaacttcactatcaaaatcgcagacttcggtatgtctcggaacttatacgcaggtgactattatcgagtacaggggagggccgtcctgccaatccggtggatggcgtgggagtgcatccttatggggaaattcaccaccgccagcgacgtctgggcattcggagtgacactgtgggaagtgttgatgctgtgcagggcacagccattcgggcagctcaccgatgagcaagtcattgagaatgctggagagttctttcgcgaccaaggcagacaggtgtacttatcaagaccaccagcatgtccccagggactgtacgaactgatgcttagatgctggagcagggaatcagaacagcggcctccgtttagtcagctccatagattcctcgctgaggacgcattgaatacagtgtag

SEQ ID NO: 79983 - DNA, 756 bp, Artificial Sequence
  derived and/or modified sequence
atgccacacctcgcgagtctctttacagccagctctcgctgctgtccacacccccttaggccggaaggatcgggcgcaatggggcctgaagccttgagtagtttgctgcttctgctgctcgttgcatcaggagacgctgatatgaagggacacttcgatcccgctaagtgccggtatgccctgggcatgcaagaccgaactattccagattccgatatatcagcttcctcatcttggtctgacagcacggcggcacgacattctagactggaaagcagtgacggcgacggggcatggtgccccgctgggtccgtctttcctaaggaagaggagtatttacaggtggaccttcaacgtctgcacttggtcgccctggtgggcacgcagggcaggcacgctgggggactaggaaaggagttcagccgttcgtaccggcttcggtatagcagggatggcagacggtggatgggatggaaggatcggtgggggcaggaggtaatcagcggcaatgaggatcctgagggagtcgtgcttaaggatttgggccctcctatggtggctcggttagttcgtttctacccgagagcagatcgagtgatgtcagtttgcctgagggtcgaactctacggatgtctctggaggggggaatggctgtctttcctcggaatctgtttcttatctcgagggcttgaagggggtgagtgtggtgagtgggcgtcacgtatcccctctcctgccggtaaactgtccttatag

SEQ ID NO: 79984 - DNA, 756 bp, Artificial Sequence
  derived and/or modified sequence
atgcctcatctggccagtctttttacagcttcctcgcgttgttgtcctcaccctttgagaccagagggtagcggagcaatggggccagaagctctaagttctctgcttctactccttctagtggcgagtggtgatgcagatatgaaggggcactttgatcccgcaaaatgccgctatgctttgggcatgcaggacaggaccatcccagattctgatatcagcgcctcttccagctggtccgactcgaccgccgctaggcattcccgcctggagagttccgacggggacggcgcttggtgccccgctggtagcgtatttccgaaagaagaagaatacctccaggtggatctgcagcgactacacctggtagctctcgttggcacccagggcagacatgctggcggattaggcaaagagttttccaggagctatagactacggtattccagggacggcaggagatggatgggatggaaggatagatggggtcaggaggtcatatctggcaatgaagacccagaaggcgtggttctcaaagaccttggtccccctatggtagcgcgactggtgaggttctacccacgcgctgatcgggtgatgagcgtctgcctgcgcgtggagctgtacggatgcctctggagaggagaatggctgtccttcctcggcatctgtttcctgtcacgcggtcttgaaggaggcgagtgtggcgagtgggcttctaggattccctctccggctgggaagctctccctgtag

SEQ ID NO: 79985 - DNA, 756 bp, Artificial Sequence
  derived and/or modified sequence
atgccgcatctggccagcctattcactgcatcttccagatgctgccctcatcctctgcgccctgagggaagcggagcaatggggccagaagctttgtcctctctcctgctgttgcttctggtagcaagcggcgatgctgatatgaagggacactttgatcctgctaagtgtcgctacgccctcgggatgcaggaccgtacaatacccgattctgacattagcgcatcctccagctggtccgactccacagcagctaggcactcccggttagagtcctcggacggtgacggggcatggtgcccagccggaagcgtgttcccaaaagaagaagaatatcttcaggtcgaccttcaacgccttcacctggtcgccctggtgggcacccagggccgtcacgccggaggacttggtaaggagttttcacgctcctaccgtctccgctactcaagagatggcaggcggtggatgggctggaaagatcgctggggtcaagaggtcatcagtggaaacgaagatcccgagggcgtcgttttaaaagacctcggcccaccaatggtggcaaggcttgtaagattctaccccagagctgacagagtgatgtcagtatgtttgcgggtcgaactgtatggatgcttgtggagaggcgagtggctctcctttctaggcatctgcttcctgagccggggactggaagggggagagtgtggtgaatgggctagccggattcccagccctgctggcaagctaagcctgtag

SEQ ID NO: 79986 - DNA, 2685 bp, Artificial Sequence
  derived and/or modified sequence
atgtctcttcctcggtgctgcccccaccctttaaggcccgaagggtcgggtgccatggggcctgaggcgctgtcttccctgctgctgctgctccttgttgcatccggagatgccgacatgaagggacacttcgatccagcgaagtgtagatatgctctgggcatgcaagacagaaccatccctgacagcgatatcagtgcatccagtagttggtccgattccactgctgccaggcactcccgcttagaaagcagcgacggagacggcgcttggtgccccgctggatccgtctttcccaaagaagaggaatacctgcaggtggacctgcagcgtctccacctcgtggcactggtggggacccaaggacgccacgcagggggactaggaaaggaattcagtcgcagctacagattgcgttattctcgggacgggaggcgctggatgggctggaaagatcgttggggacaggaggtgatatccggaaatgaagacccggagggtgtcgtcctcaaggatctggggccacccatggtggctcgacttgtccggttttacccgagggctgacagggtgatgtcagtgtgcctgagggtagagctctatggctgcctgtggcgcgatggcttactgagctatactgccccagtgggacaaacaatgtacctgagtgaggctgtctacctaaacgactcgacttatgacgggcataccgtggggggtttgcagtacggaggcttaggtcagcttgccgatggtgtggtggggctcgatgattttcgaaagtctcaggagctccgcgtttggcccggatacgactacgtaggctggagtaatcattcattcagcagcggttacgttgaaatggaatttgagtttgataggcttagggccttccaggctatgcaagttcattgcaataatatgcacacattgggagcccgtcttcccggaggagtggaatgtcggtttaggagggggcctgccatggcatgggagggcgagccaatgcgacacaatttgggaggaaacctgggagacccacgtgcaagggccgtgtccgtaccacttggaggaagagtggcccgatttttgcagtgcagatttctgttcgccggaccatggctcttgttctccgagattagctttatctcagatgtcgtgaataactctagcccggcactgggcggaacttttccccctgcgccttggtggccaccagggcctccccctacaaatttctctagcctcgagctcgagccgcgtggccagcagcccgtggcaaaggccgaaggatcaccgaccgccattctaatcggctgtctggtggcaatcattctacttctcctgctcattattgcactgatgttatggaggttgcactggaggagactgctgtcaaaggccgagcgtagagtgctcgaagaggagctcacagtccatttatcagtgccaggcgacacaatcctgatcaataatcgaccagggccacgcgaaccccctccataccaggagcccaggccaagaggtaacccaccacactccgcaccctgcgtgcccaatggttcggcctatagcggagattatatggagccagaaaaacctggagccccattgctgccacccccacctcagaattccgtaccccactatgcagaggctgatatcgttacactgcagggggtgacgggaggcaatacatacgccgtcccggcactgccgcctggtgccgtcggggatggtccccctagggtggattttcctcggtctcgtctccgcttcaaagaaaagctgggcgaaggccagttcggtgaagtccatctctgtgaggtagatagcccccaggacctggtgtcactggactttccattaaatgtgcgaaaaggccaccctctccttgtcgccgttaaaatactgcgccctgacgccactaaaaatgcaagaaacgacttcctcaaggaagtgaagattatgtctcgattaaaagatccaaatattatccgcctgctgggagtgtgcgtgcaggatgatccactgtgcatgatcacagactatatggagaacggcgatctaaatcaatttctgtctgcccaccagttggaggacaaagccgcagaaggggctcccggagacggccaggctgcacagggacctactatttcttacccaatgctgctgcatgtagcagcccagatcgcaagcggaatgagatacttagccacgctgaacttcgtccatagagatctggcaaccagaaactgtttggtgggggaaaatttcaccattaagatcgctgatttcggcatgagccggaatctgtacgccggtgactactatcgcgtacagggcagggcagtgcttccaattcggtggatggcttgggaatgcatcctgatgggcaagttcacaaccgcctcggacgtgtgggcattcggagtgaccctttgggaggtgctcatgttgtgtcgggctcagcccttcggacagttgacagacgagcaggtgatcgaaaatgcaggggaatttttcagagaccaaggccgacaggtctacctatctcgtccgcctgcctgtccccagggactttacgagctcatgcttagatgttggtcccgggagagtgaacaaaggccccctttttcccaacttcatcgttttttagctgaagacgccctgaacactgtctag

SEQ ID NO: 79987 - DNA, 799 bp, Artificial Sequence
  derived and/or modified sequence
ctgccggtgagcgccagcttcagggtcccacccccccatgcctggctcttggctgaacatttcttcccagcgcttccagcagccagaggcaggcgcccaagctcgctggctgttgctgagggcctgtagagatgctgcccccacccccttaggcccgagggatcaggagctatgggaccagaggccctgtcatctttactgctgctgctcttggtggcaagtggagatgctgacatgaagggacattttgatcctgccaagtgccgctatgccctgggcatgcaggaccggaccatcccagacagtgacatctctgcttccagctcctggtcagattccactgccgcccgccacagcaggttggagagcagtgacggggatggggcctggtgccccgcagggtcggtgtttcccaaggaggaggagtacttgcaggtggatctacaacgactccacctggtggctctggtgggcacccagggacggcatgccgggggcctgggcaaggagttctcccggagctaccggctgcgttactcccgggatggtcgccgctggatgggctggaaggaccgctggggtcaggaggtgatctcaggcaatgaggaccctgagggagtggtgctgaaggaccttgggccccccatggttgcccgactggttcgcttctacccccgggctgaccgggtcatgagtgtctgtctgcgggtagagctctatggctgcctctggagggatggactcctgtcttacaccgcccctgtggggcagacaatgtatttatctgaggccgtgtacc

SEQ ID NO: 79988 - DNA, 800 bp, Artificial Sequence
  derived and/or modified sequence
actgccggtgagcgccagcttcagggtcccacccccccatgcctggctcttggctgaacatttcttcccagcgcttccagcagccagaggcaggcgcccaagctcgctggctgttgctgagggcctgtagagatgctgcccccacccccttaggcccgagggatcaggagctatgggaccagaggccctgtcatctttactgctgctgctcttggtggcaagtggagatgctgacatgaagggacattttgatcctgccaagtgccgctatgccctgggcatgcaggaccggaccatcccagacagtgacatctctgcttccagctcctggtcagattccactgccgcccgccacagcaggttggagagcagtgacggggatggggcctggtgccccgcagggtcggtgtttcccaaggaggaggagtacttgcaggtggatctacaacgactgcacctggtggctctggtgggcacccagggacggcatgccgggggcctgggcaaggagttctcccggagctaccggctgcgttactcccgggatggtcgccgctggatgggctggaaggaccgctggggtcaggaggtgatctcaggcaatgaggaccctgagggagtggtgctgaaggaccttgggccccccatggttgcccgactggttcgcttctacccccgggctgaccgggtcatgagcgtctgtctgcgggtagagctctatggctgcctctggagggatggactcctgtcttacaccgcccctgtggggcagacaatgtatttatctgaggccgtgtacc

SEQ ID NO: 79989 - DNA, 2631 bp, Artificial Sequence
  derived and/or modified sequence
atgggcccggaagccttgtcatctctcttactgttactgctagtggcgtcaggggatgcagatatgaagggccatttcgatccagctaaatgtaggtacgcactaggaatgcaggaccgaactatcccagactctgatatttccgcatccagttcttggtccgactctaccgccgcccgtcacagccggcttgagagtagcgacggcgacggagcctggtgcccggccggctcggtctttcccaaagaggaggaatatttgcaggtcgacctccagagattgcacctcgtcgcccttgtgggtactcagggccggcatgcgggaggattgggcaaggagttttctcgaagctaccgcttgaggtacagtcgcgatggcaggaggtggatgggatggaaagaccggtggggtcaagaggtcatttcaggaaacgaggatcccgaaggggtggtccttaaagacctgggccctccaatggtagcacggctcgttcgattttacccaagagccgacagagtgatgtctgtatgcttgagagtcgaattatacgggtgcctgtggcgagacggtctcctgtcatacaccgctcctgtgggtcagacaatgtaccttagcgaggccgtgtatctgaatgatagtacctacgatggacacacagtgggtggcctgcagtatggtggcctggggcaattggctgacggtgtggtaggcctagatgatttccgaaagtcccaggagctgagagtttggcccggatacgactatgtgggctggtcgaaccattcattctcctcagggtatgtagagatggagtttgagtttgatagactccgagcatttcaagccatgcaggtccactgtaataacatgcacacgctgggggctcgccttccaggaggggtggaatgtcgattcagacggggcccagccatggcttgggaaggagaacctatgaggcacaatctgggcggaaacctgggtgatccaagagcacgtgcagtctccgtacctctgggcggtagggtcgctaggttcctgcagtgtaggttcctgtttgcaggcccctggttactcttctcagaaatctcttttatcagcgatgtggtcaacaactccagtccagccctaggcggcactttcccccccgcaccctggtggcctccaggccccccccccactaatttttcaagcctggagctggaaccccgaggccagcaacccgtggctaaggcggaaggatcaccaactgccatacttatcggatgtctggttgctatcattctgctcctgctgttgataattgctctgatgctatggcggctccattggcgtcgcctgctttccaaagccgagaggcgggtcctcgaagaagagttaacagtgcatctctcagtccctggtgacacgattctgatcaataaccgccctgggcctcgcgaaccacccccctaccaggaacccagaccaagaggtaatccgccccacagtgccccctgtgtacccaatggtagcgcctactccggagactatatggaacccgagaagccaggcgctcctctgctacccccaccgccacagaacagcgtgccccattacgccgaggctgatattgtcaccctgcagggcgttactggcggcaatacatatgcagtacccgccctaccaccgggcgccgttggagacggaccccctcgggtggattttccccgttcaagacttcgctttaaggagaagctgggggagggacagtttggcgaagtgcacttatgcgaggtggattctccgcaggatttagtttccctggacttccctcttaatgttagaaagggccaccccctgctagttgccgtcaagattctgagacccgacgctaccaaaaatgctcggaacgactttctgaaggaggtgaaaatcatgagcagactaaaagaccccaacataataaggctgttgggggtctgcgtccaggacgacccactgtgcatgatcaccgactacatggaaaatggagatttgaaccaatttcttagcgcccatcagcttgaggataaggctgcggaaggagcccctggagatggacaggcggcccagggaccgactatctcttaccccatgctgctgcacgtggctgcacaaattgctagcggtatgaggtacctggccaccctgaattttgtccacagagatcttgccacaaggaactgcttggtcggggaaaattttaccatcaagattgctgacttcggcatgagcagaaacttgtacgcaggggactactatcgtgttcaaggcagggccgttctgcctatcagatggatggcgtgggaatgcattttgatgggaaagttcaccacagcttccgacgtctgggccttcggagtgaccttgtgggaagtgctgatgctatgccgggcacagccattcggacaactgacagacgaacaggtgatcgaaaatgccggggaattcttcagggaccagggcaggcaggtctatttgtcgcggcccccagcgtgcccccaggggctctatgagcttatgctacggtgctggtcccgggagagcgaacagcgaccgccttttagccagcttcaccgtttccttgccgaggacgcattaaatacagtttag

SEQ ID NO: 79990 - DNA, 3845 bp, Artificial Sequence
  derived and/or modified sequence
gatcccagaagtaggaggggcgtcttcccctcgtgggccctgagcgggactgcagccagccccctggggcgccagctttggaggcccccgacagctgctctcgggagccgcctcccgacacccgagccccgccggcgcctcccgctcccggctcccggctcctggctccctccgcctcccccgcccctcgccccgccgccgaagaggccccgctcccgggtcggacgcctgggtctgccgggaagagcgatgagaggtgtctgaaggtggctattcactgagcgatggggttggacttgaaggaatgccaagagatgctgcccccacccccttaggcccgagggatcaggagctatgggaccagaggccctgtcatctttactgctgctgctcttggtggcaagtggagatgctgacatgaagggacattttgatcctgccaagtgccgctatgccctgggcatgcaggaccggaccatcccagacagtgacatctctgcttccagctcctggtcagattccactgccgcccgccacagcaggttggagagcagtgacggggatggggcctggtgccccgcagggtcggtgtttcccaaggaggaggagtacttgcaggtggatctacaacgactccacctggtggctctggtgggcacccagggacggcatgccgggggcctgggcaaggagttctcccggagctaccggctgcgttactcccgggatggtcgccgctggatgggctggaaggaccgctggggtcaggaggtgatctcaggcaatgaggaccctgagggagtggtgctgaaggaccttgggccccccatggttgcccgactggttcgcttctacccccgggctgaccgggtcatgagtgtctgtctgcgggtagagctctatggctgcctctggagggatggactcctgtcttacaccgcccctgtggggcagacaatgtatttatctgaggccgtgtacctcaacgactccacctatgacggacataccgtgggcggactgcagtatgggggtctgggccagctggcagatggtgtggtggggctggatgactttaggaagagtcaggagctgcgggtctggccaggctatgactatgtgggatggagcaaccacagcttctccagtggctatgtggagatggagtttgagtttgaccggctgagggccttccaggctatgcaggtccactgtaacaacatgcacacgctgggagcccgtctgcctggcggggtggaatgtcgcttccggcgtggccctgccatggcctgggagggggagcccatgcgccacaacctagggggcaacctgggggaccccagagcccgggctgtctcagtgccccttggcggccgtgtggctcgctttctgcagtgccgcttcctctttgcggggccctggttactcttcagcgaaatctccttcatctctgatgtggtgaacaattcctctccggcactgggaggcaccttcccgccagccccctggtggccgcctggcccacctcccaccaacttcagcagcttggagctggagcccagaggccagcagcccgtggccaaggccgaggggagcccgaccgccatcctcatcggctgcctggtggccatcatcctgctcctgctgctcatcattgccctcatgctctggcggctgcactggcgcaggctcctcagcaaggctgaacggagggtgttggaagaggagctgacggttcacctctctgtccctggggacactatcctcatcaacaaccgcccaggtcctagagagccacccccgtaccaggagccccggcctcgtgggaatccgccccactccgctccctgtgtccccaatggctctgcctacagtggggactatatggagcctgagaagccaggcgccccgcttctgcccccacctccccagaacagcgtcccccattatgccgaggctgacattgttaccctgcagggcgtcaccgggggcaacacctatgctgtgcctgcactgcccccaggggcagtcggggatgggccccccagagtggatttccctcgatctcgactccgcttcaaggagaagcttggcgagggccagtttggggaggtgcacctgtgtgaggtcgacagccctcaagatctggtcagtcttgatttcccccttaatgtgcgtaagggacaccctttgctggtagctgtcaagatcttacggccagatgccaccaagaatgccaggaatgatttcctgaaagaggtgaagatcatgtcgaggctcaaggaccccaacatcattcggctgctgggcgtgtgtgtgcaggacgaccccctctgcatgattactgactacatggagaacggcgacctcaaccagttcctcagtgcccaccagctggaggacaaggcagccgagggggcccctggggacgggcaggctgcgcaggggcccaccatcagctacccaatgctgctgcatgtggcagcccagatcgcctccggcatgcgctatctggccacactcaactttgtacatcgggacctggccacgcggaactgcctagttggggaaaatttcaccatcaaaatcgcagactttggcatgagccggaacctctatgctggggactattaccgtgtgcagggccgggcagtgctgcccatccgctggatggcctgggagtgcatcctcatggggaagttcacgactgcgagtgacgtgtgggcctttggtgtgaccctgtgggaggtgctgatgctctgtagggcccagccctttgggcagctcaccgacgagcaggtcatcgagaacgcgggggagttcttccgggaccagggccggcaggtgtacctgtcccggccgcctgcctgcccgcagggcctatatgagctgatgcttcggtgctggagccgggagtctgagcagcgaccacccttttcccagctgcatcggttcctggcagaggatgcactcaacacggtgtgaatcacacatccagctgcccctccctcagggagtgatccaggggaagccagtgacactaaaacaagaggacacaatggcacctctgcccttcccctcccgacagcccatcacctctaatagaggcagtgagactgcaggtgggctgggcccacccagggagctgatgccccttctccccttcctggacacactctcatgtccccttcctgttcttccttcctagaagcccctgtcgcccacccagctggtcctgtggatgggatcctctccaccctcctctagccatcccttggggaagggtggggagaaatataggatagacactggacatggcccattggagcacctgggccccactggacaacactgattcctggagaggtggctgcgcccccagcttctctctccctgtcacacactggaccccactggctgagaatctgggggtgaggaggacaagaaggagaggaaaatgtttccttgtgcctgctcctgtacttgtcctcagcttgggcttcttcctcctccatcacctgaaacactggacctgggggtagccccgccccagccctcagtcacccccacttcccacctgcagtcttgtagctagaacttctctaagcctatacgtttctgtggagtaaatattgggattggggggaaagagggagcaacggcccatagccttggggttggacatctctagtgtagctgccacattgatttttctataatcacttggggtttgtacatttttggggggagagacacagatttttacactaatatatggacctagcttgaggcaattttaatcccctgcactaggcaggtaataataaaggttgagttttccacaa

SEQ ID NO: 79991 - DNA, 1257 bp, Artificial Sequence
  derived and/or modified sequence
gggagccactgggactactgggtccgggagggggaagggagggctgcgagcccgaacgcgcggcgagaaggccgaggggagggaggggagcgaggagcgggaggaggaagggagggagccgaggcgagggggaggcggcgcctgggcccgagccgccccagccctggctcctctccccggaacaggcccccgacagctgctctcgggagccgcctcccgacacccgagccccgccggcgcctcccgctcccggctcccggctcctggctccctccgcctcccccgcccctcgccccgccgccgaagaggccccgctcccgggtcggacgcctgggtctgccgggaagagcgatgagaggtgtctgaaggtggctattcactgagcgatggggttggacttgaaggaatgccaagagatgctgcccccacccccttaggcccgagggatcaggagctatgggaccagaggccctgtcatctttactgctgctgctcttggtggcaagtggagatgctgacatgaagggacattttgatcctgccaagtgccgctatgccctgggcatgcaggaccggaccatcccagacagtgacatctctgcttccagctcctggtcagattccactgccgcccgccacagcaggttggagagcagtgacggggatggggcctggtgccccgcagggtcggtgtttcccaaggaggaggagtacttgcaggtggatctacaacgactgcacctggtggctctggtgggcacccagggacggcatgccgggggcctgggcaaggagttctcccggagctaccggctgcgttactcccgggatggtcgccgctggatgggctggaaggaccgctggggtcaggaggtgatctcaggcaatgaggaccctgagggagtggtgctgaaggaccttgggccccccatggttgcccgactggttcgcttctacccccgggctgaccgggtcatgagcgtctgtctgcgggtagagctctatggctgcctctggagggatggactcctgtcttacaccgcccctgtggggcagacaatgtatttatctgaggccgtgtacctcaacgactccacctatgacggacataccgtgggcggactgcagtatgggggtctgggccagctggcagatggtgtggtggggctggatgactttaggaagagtcaggagctgcgggtctggccaggctatgactatgtgggatggagcaaccacagcttctccagtggctat

SEQ ID NO: 79992 - DNA, 2631 bp, Artificial Sequence
  derived and/or modified sequence
atgggccccgaagcgctatccagtctgcttcttcttctgcttgtagcctccggggatgccgatatgaagggccactttgacccggcgaagtgtcggtacgccttgggcatgcaagaccgcacaatcccagactcagacattagtgccagctcaagttggtccgatagcactgccgcaaggcacagtagacttgaaagttccgacggcgatggcgcatggtgccccgctggaagtgtgttccctaaggaagaggaatatttacaagtcgacttgcaaagattacatttagtcgcattggtgggcacccagggtagacacgctggcggcctcggcaaggaattctcaaggtcctaccggctccggtattctagggacggtagacgttggatgggttggaaagacaggtggggacaggaggtgattagcggaaacgaagacccagagggtgtggtactgaaagatctcggtccacctatggtggcacgactggttcgtttctatcctagggctgatagggtgatgtccgtttgtctgcgcgtcgaactgtacggttgtctgtggcgagatggtctcctgtcatatacggcgccagtcgggcaaacaatgtatttatccgaagcagtgtatctgaacgattctacctacgatggccacacggtaggaggcctgcagtacggagggctgggacagttggccgacggtgtggtgggcctggacgacttccgcaagtcacaagaactgagagtgtggcccggatacgattacgtcgggtggtccaatcacagtttttcttccggatatgtagagatggaattcgaatttgaccgattgcgggctttccaggcgatgcaggtgcattgtaataacatgcacacactgggagctaggctcccggggggagtggaatgtagattccgtcgggggcctgcaatggcttgggaaggagagcccatgagacacaatctgggtggaaacctgggggaccctagggcccgagctgtctcagtccccttgggtggaagggtcgccagattcctccagtgcagattcttattcgccggcccgtggctgctgttctcagagataagttttatttctgatgtggtcaacaactcttctcccgccttggggggcacattccctcccgcaccatggtggcccccaggaccacctccgacaaatttctctagtttggagctggagccgaggggtcagcagccagttgcaaaagccgagggttccccgacagctatcttaattggctgcctggttgcgatcatcctgcttctgctgctgattatagccctgatgctctggcggctccactggaggagactgctgagcaaagcggagcggcgcgtcctcgaggaggaactgaccgtgcatctgtccgtgcccggagataccatcctcattaacaatagacctggaccaagagagccaccaccttatcaggaacctcgaccgcggggtaaccccccacattccgctccttgtgttcctaacggctctgcatattccggagactatatggaacccgaaaagcctggcgcccccctgcttccacctccccctcagaactccgtgccacattacgccgaggctgacattgtcacactccagggcgtgactggaggtaacacttacgccgttccagctctgccacctggtgccgttggagacgggccgccgcgcgtggatttcccccgttctaggctgcgattcaaggaaaaactgggagagggccaattcggagaggtgcatctgtgtgaggtagattctccccaggacctggtttcacttgattttccccttaatgttagaaaaggccatccactgttagtcgcagtgaagattctgcggccagacgcaacaaaaaacgcacggaacgatttcctgaaagaagtcaaaattatgtcccggctgaaagatccgaatatcataagactccttggggtatgcgttcaggacgacccactctgtatgatcaccgactacatggagaacggagacctgaatcaatttttatccgcccatcagttggaggacaaggccgccgaaggagctccgggcgatggccaggccgcgcaggggccaaccatctcttatccaatgttgttgcacgttgccgctcagatcgcctcagggatgcggtacctagctacgctaaatttcgtgcaccgcgacttagcaactagaaattgcttagtaggggaaaatttcacgattaagattgctgattttgggatgagccgcaatttatacgccggagattattatagagtgcagggacgcgcggtgcttcctatacgttggatggcttgggaatgcatcctgatgggtaaatttacaactgctagtgacgtgtgggcgttcggcgtcaccttatgggaggtgttaatgttgtgccgggctcagccatttggacaacttactgacgaacaggtcatcgaaaatgctggtgagttcttccgagaccaaggaagacaggtttatttgagtagacctccagcatgcccacagggactgtacgagttgatgcttagatgctggtcacgtgagagtgagcagcgccccccttttagccaattgcatcgctttctagccgaggacgcccttaatacggtctag

SEQ ID NO: 79993 - DNA, 2631 bp, Artificial Sequence
  derived and/or modified sequence
atgggtcccgaggcactgtcctcactgctcttacttttgcttgtggcatcaggggacgctgatatgaaggggcatttcgaccctgccaagtgcaggtatgcgttggggatgcaagaccgtaccatacccgactctgacatctcggctagctccagttggagtgactcaaccgcagcccgacactcacgactggagagttccgatggcgatggcgcatggtgccccgccgggtcagtcttccccaaggaggaagaatacctgcaagttgacctgcagcggttacatttggtagcactagtgggcactcagggccggcacgctggcggactcggcaaagaattctctcgatcctaccgtctgcggtactctcgcgacgggcgtagatggatgggctggaaggaccggtggggacaagaggtgattagtggcaacgaggatccagaaggcgttgtcctgaaagatctcggccctccaatggtggcacgcttggttcggttctatccacgcgccgatagggtgatgagtgtatgcctgcgagtcgagttatacggatgcctgtggagggatggccttctcagctacacagcacctgttgggcagacaatgtacctgtccgaggcggtttacctgaacgattctacctatgatggacatacggtgggaggccttcaatacggaggactcggacagctggctgatggtgtggtcggcctggatgatttccggaagtcccaggaacttcgagtgtggccaggttacgactatgtgggttggtctaaccactcttttagctcgggctacgtcgaaatggagttcgagttcgatcggctcagagccttccaggcaatgcaggtgcactgcaacaatatgcacaccctaggggctagacttccaggcggcgtcgagtgcagatttcgccgcgggcctgccatggcatgggagggtgagcccatgcggcacaatctgggtggcaaccttggagatccacgagctcgggccgtgtccgtgcccctcggcggacgagtggcgcggttcctccagtgcaggttcttgtttgcaggcccctggctgctgttctccgagatttcctttatctccgacgttgtgaacaattcaagtcctgctttgggagggaccttcccccccgcaccatggtggccgccaggaccccccccgacaaattttagttcattggaactggaacctcgcgggcagcagccagtggcaaaggccgaaggcagccccacagcgattctaatcggatgtctggtcgcaatcatcctcctgcttctccttatcattgccctcatgttatggagactccactggcgaaggctactgtccaaggcagagcgaagagtccttgaagaagaactaacagtacacctgagcgtgcccggtgatactatactcataaacaaccgccctggcccccgggaaccccccccttaccaagaaccgcgccctcggggaaatcctccacacagcgctccgtgcgtgccgaacggaagcgcttacagcggcgactacatggaaccagagaagccaggcgcccctctgctgcccccccccccacagaacagcgttccgcactacgccgaggccgacatcgtcaccctccaaggggtcaccggaggtaacacctacgcagtcccagcactaccccctggcgcagtgggagatggacctccacgagtcgacttccctagatctagactgcggttcaaagaaaaacttggcgaaggtcagtttggagaagtgcatctatgtgaggtcgactccccccaggacttggtatctctcgacttccccctcaacgttcggaaaggccaccccctgctggtggctgtcaagatcctacgtcccgatgcaactaagaacgcaagaaatgacttcttgaaggaagtaaagataatgtcccgactgaaggatcctaatatcatcaggctcttaggcgtctgcgtgcaggacgacccactgtgtatgattaccgactatatggaaaacggcgaccttaatcagtttctgtcagcccaccagcttgaggacaaagcggctgagggagctcccggagacggacaggctgcccaaggccctacaatctcctaccccatgctactgcacgtggccgcacagattgcgagcggaatgcgttatcttgcaacactaaactttgttcatagagacctggctactcggaactgcctcgtaggggaaaacttcacgattaaaatcgccgattttggcatgtcaagaaacctctacgccggcgattattaccgggtccaaggcagggcggttctacccatcagatggatggcgtgggaatgtattctgatgggaaagttcaccacggcctcagatgtatgggcctttggcgtgacattatgggaggtgttgatgctttgccgggctcagccatttggtcaattgactgatgaacaggtgattgaaaacgctggggagttcttccgagaccaaggaagacaagtgtatctaagcagacctcctgcatgcccgcagggcctctatgaactgatgttacgatgttggagcagagagtccgagcagcggccgccgtttagccagcttcaccggttccttgcagaagacgcactgaatactgtctag

SEQ ID NO: 79994 - DNA, 2631 bp, Artificial Sequence
  derived and/or modified sequence
atgggccccgaggcgctgtcttctctgctattgttgctgctggtcgcatctggagacgcagacatgaaaggacatttcgatcctgctaagtgccggtatgccctcggaatgcaggatcgcactataccggactcagacatttctgcatcatccagttggtcagattccaccgctgctcgacatagcagactggagagcagtgatggagacggcgcttggtgtccagcaggctctgtgttccctaaggaggaggaatacttacaggtcgatctacaacgcttacacctggtggcactggtcggaacacaaggacgacacgccggggggctcggcaaggaattctcccggtcttatcgcctgcggtactcgcgtgatggtagaaggtggatgggctggaaggataggtggggccaagaagtgatatctggcaacgaagatccagaaggcgtggtactgaaagatttgggaccgccgatggtagctcgactggtgagattctacccaagagccgaccgtgttatgtcagtttgcctccgggtggagctatacgggtgcctgtggagggacggtctattgagctacaccgctcccgttggccagaccatgtacctttcagaggcagtctatctcaacgattccacctacgacggacacaccgtcggtggcctccagtacggcggattgggacagctcgcggacggcgtagtaggcctggacgactttcggaaatcacaagagcttagagtttggcccggctacgactacgtgggatggtcaaatcattccttctcaagcggctacgtggaaatggagttcgagttcgaccggctacgagccttccaggccatgcaggttcactgcaacaacatgcacacactgggggctcgtttacctggaggtgttgagtgtcgattcaggcgtggtcccgccatggcttgggagggagagcccatgagacacaaccttggcgggaacctcggagatccccgtgcccgggcagtgagcgtgcccctgggcggacgcgtggctcgtttccttcaatgtaggttcctattcgccggaccgtggctgttattttcagagatctctttcatttcggatgtggtgaataattccagcccagcccttggcgggacttttccccctgccccttggtggcctcccggccccccgcctaccaatttctcatctctggaactggagcccagaggacaacagcccgtagctaaagccgagggaagccctaccgcaatacttatcggctgcctcgttgcaatcattctcttgctcctgctgattatcgctcttatgctctggagactgcactggaggcgattgctgagcaaggcagagcggcgcgtcctggaagaggaacttactgttcacctaagtgtccctggcgatacaatcctgataaacaaccggccaggccctagggagcctccaccttatcaggaacccagaccacgtggcaatcccccacattctgccccatgcgtaccaaatgggtctgcctattccggcgactatatggaaccagagaagcctggtgcacccctgctgcctccgcccccacagaacagtgtgccccattacgctgaagccgacatcgtgacattgcagggggtgacaggcggcaatacctacgctgttcctgcacttcctcccggagccgtgggagatggtccacccagagtcgattttcctcggtcacgcctgcgattcaaagagaagcttggcgaaggacagtttggagaagtgcacctgtgcgaggtggactcaccccaagacttagtgtccctggattttccgcttaatgtgcgcaaagggcaccccctgctcgtggccgtgaaaatcttgcggcccgatgccactaagaatgctagaaacgacttcctgaaggaagttaagatcatgagtcgactgaaggaccccaacataatcaggctcttgggagtttgcgtgcaagacgatccattatgcatgatcactgattatatggaaaatggcgacctgaaccaatttctgtctgcccaccaactcgaagacaaagcagccgagggcgctcccggcgacggtcaagccgctcagggaccaaccattagctaccctatgctcctccacgtggcagcgcagattgccagcggaatgcgttacctcgcaaccctgaattttgttcacagagacctcgcaactagaaactgccttgtgggagagaatttcaccattaagattgctgatttcggaatgagccgcaacttatatgctggagattactatcgcgtccaggggcgagccgtattgcccatcaggtggatggcatgggagtgcatcttaatgggcaagttcactaccgccagcgatgtgtgggctttcggagtgaccctatgggaagttctaatgttgtgtcgagcacagccatttgggcaactgaccgacgagcaagtgattgagaatgccggcgagttcttccgagaccaggggcgccaggtgtatcttagccgcccacctgcctgtccccagggtttatacgagctaatgctcaggtgctggtccagagagtcagagcagcgccctccctttagtcagctgcatcggtttctcgctgaggacgcactgaacacagtgtag

SEQ ID NO: 79995 - DNA, 2631 bp, Artificial Sequence
  derived and/or modified sequence
atgggcccggaggccctgtcgagcttattgcttctcctgttagtggcgtctggtgatgccgacatgaaaggtcactttgatcccgccaaatgccggtacgctctggggatgcaggacagaaccatcccagatagcgatatctcagctagttcgtcttggtccgattctacagcagcaagacattcccgtttggagtctagtgacggggacggggcctggtgcccagccggcagcgtgttcccgaaagaggaggagtatcttcaggtcgaccttcagaggctgcacctggttgctctggtcggcacgcagggcaggcatgccggcggcctggggaaggagttctcccgttcgtaccgcttaagatacagccgggatgggcgtaggtggatgggatggaaggatcggtggggtcaggaggtcatctctggcaacgaagatcctgagggagttgtcctgaaggatctcggaccaccgatggtcgctagactcgttcgcttttatccgagagcagacagagtcatgtccgtgtgtctgagagtcgaattatacggatgcttgtggcgcgacggccttttaagctatacagctccggtcggacagaccatgtacctcagtgaggcagtttacctgaacgacagcacatatgacgggcataccgtaggtggactacaatatggggggttaggacagctggcagacggcgttgtggggctcgatgatttcagaaagtcccaggagttgcgcgtctggcccggatacgactacgtggggtggagcaatcacagctttagcagcggatacgtagagatggagtttgaatttgatcgcttgagagcattccaggcaatgcaggtgcactgtaacaatatgcacactctgggagcccgcctaccgggtggggttgaatgtcgtttccgcaggggacctgcaatggcatgggagggtgagcccatgcgtcacaacctcggcgggaaccttggagatcctcgcgcccgcgccgtttcagttccactcggaggccgtgttgctcgatttctgcagtgtcggtttctcttcgccgggccttggctgctgttctccgagatatccttcatttcagatgtggtcaacaactcttctcccgcactcggaggcacattccccccggccccatggtggccaccaggacctccgcccactaatttctcttctcttgagctggagccaaggggccaacagcccgttgctaaagcagagggtagcccaactgccatactcattggctgtttggtggccattatcctgttgctccttctgattattgcgctcatgctgtggcgactgcactggcggaggcttctttcaaaggcggaaaggcgcgtgcttgaggaagaattaactgtgcatctctcggtccccggcgatactatcctgattaataaccgcccaggtccacgggagccacctccctatcaggaaccccgcccccggggcaatcccccacattccgccccctgcgtgcccaatggctctgcgtactctggagactacatggagccagagaagcctggagccccgctcttgccccccccaccacagaattccgtgccacactacgcagaagccgatatcgtcactcttcagggcgtgactggagggaatacttacgctgttccggccttgccaccaggtgccgtcggagacggcccccctagagtagatttcccgagatcaagactgagatttaaggaaaagctgggggagggacagttcggcgaggtacacctgtgtgaagtggactcaccccaggacctagtcagcctcgactttccactgaacgtccgcaagggtcaccccttactcgtggccgtgaaaatcttgagacccgatgctacaaagaacgccaggaacgatttcctcaaagaggttaagattatgagccgactgaaagaccctaacattatacgcttgctgggcgtatgcgtgcaagacgaccctttgtgtatgattacggattatatggagaacggcgatctcaaccagttcttgtccgcgcatcagcttgaagacaaggccgcagaaggcgcccctggggatggtcaggcagcccagggtccgactatctcctatcccatgctgctacatgtggccgcgcaaatagcttccgggatgagatatctggcaaccctcaactttgtgcatcgtgacttggccacacggaattgcctcgtgggcgaaaattttaccataaaaattgcagatttcggaatgtccaggaatctgtacgcaggcgattattacagggttcaaggcagagcagtgttacctataagatggatggcctgggaatgcattctcatgggtaagtttaccaccgcaagcgacgtatgggcattcggcgtgacactttgggaggtgctaatgctttgtcgggctcagccgtttggacagctgaccgatgagcaagtgattgagaacgccggcgagttctttagggatcaaggcaggcaagtgtatttatctagaccacctgcttgtcctcagggcttgtacgagttgatgctgaggtgttggtcccgggagtccgaacagaggcccccattttcgcagctgcacaggtttctagccgaggatgccttgaatactgtttag

SEQ ID NO: 79996 - DNA, 2631 bp, Artificial Sequence
  derived and/or modified sequence
atgggccccgaagcactatcaagccttttgttgctgttgctggtggcctccggcgatgccgatatgaaagggcacttcgatcctgccaaatgtcgatacgctctggggatgcaggatcgcaccattccagactcagatatcagcgcatcaagttcttggagtgactctacagctgcgcggcacagtaggttagaaagcagcgacggcgatggcgcctggtgtccagccggcagcgtgtttccaaaggaggaggagtacctgcaagtcgatttgcagcgactccatctagttgcactggttggcactcagggaagacatgcgggcggattagggaaggagttctccagatcatacaggctccggtattctcgtgacggcagacgctggatgggctggaaggatcgctgggggcaggaagtcattagtggcaacgaagaccccgagggggtggtgttgaaagacctcggtcccccaatggtcgctagacttgtacggttttacccacgagccgacagggttatgagcgtgtgcctacgagttgagctctatgggtgtctctggcgggacggcctactgagctatactgctccggtagggcagaccatgtatctgtccgaagctgtgtatttaaatgactccacttacgatgggcacaccgtgggcggactgcagtacggtggcctcggccagcttgctgacggcgtggtggggctcgatgacttccggaagtcccaagagcttcgcgtatggcctggctatgattacgtgggttggagcaaccactcctttagttctggctatgtcgagatggagtttgaatttgacaggctgcgtgcattccaagctatgcaagtccattgtaacaatatgcacacgctcggggccagactgcccggaggagtggagtgcagattcagacggggtcccgccatggcgtgggaaggtgaaccaatgcgacacaacctgggcggcaatctgggcgatccacgcgctcgggccgtatccgttccattgggtgggagagtcgcccgctttcttcagtgtcgattcctgttcgcaggtccctggctcctgtttagcgagatatcctttatctccgacgtcgtaaataactccagccctgccctcgggggaaccttccctcccgccccttggtggccaccgggccctccccctactaatttctcaagcctcgaacttgaaccgcgaggccagcagccagtagctaaggccgaaggctcgcccacagctattctgatcggttgcctggtggctatcattctgcttctcttgctcatcattgcactcatgctgtggagactgcactggcggagattgctgtccaaggcggaaagaagagtgctggaggaggaacttactgtacaccttagtgtgcccggagatacgatccttatcaacaacagacccgggcctagggaaccccccccatatcaagagccacgccctcgcggcaatcctccccattcggccccttgcgtgcccaacggctcggcttatagcggcgactatatggagcccgagaaaccgggagctcctttacttcctcctcctcctcagaactcagttccccattacgccgaagccgatatcgtgactctgcaaggagtcactggaggcaatacgtatgctgtcccggctctgccaccaggtgccgttggcgatgggccgccaagggtggatttcccccggagccgactcagattcaaggaaaaactgggggaaggacagttcggagaggtccacctgtgtgaggtagattcaccccaagatctagtatctcttgactttcctctcaacgttcgcaaggggcacccactgcttgttgctgtcaaaattttgagacctgacgccaccaagaatgccagaaacgatttcctaaaagaggtcaaaatcatgtcccgacttaaggatcccaacatcatcaggttgctgggagtgtgtgtgcaggacgacccgctttgtatgatcacagactacatggaaaatggggacctgaatcagtttctctccgcacaccagctggaggataaggctgcagagggggccccgggtgacgggcaagctgctcagggcccaacaattagctaccccatgctgttgcacgtggccgcacagattgccagtggtatgcggtacctggcaaccctaaattttgtacacagggatctcgcgacacgtaactgcctggtgggggagaattttaccatcaaaattgcggacttcggcatgtctcgcaatctctatgcaggtgattactatagagtgcaaggccgggccgtgctcccaattcgttggatggcgtgggagtgtattctcatgggaaaatttacaaccgctagcgacgtctgggctttcggcgtgacactttgggaggtgctgatgttgtgtcgggcacaacccttcggccagctaacagatgaacaggtaattgagaacgccggtgagttttttagggatcaaggccggcaggtgtacctgtcccgacctccagcttgtcctcagggcctttacgagttaatgctcaggtgctggtcaagggaatcagagcagcgcccccccttttcacaattgcacagatttctcgccgaggatgcactgaacactgtttag

SEQ ID NO: 79997 - DNA, 2631 bp, Artificial Sequence
  derived and/or modified sequence
atgggtcccgaggccttgagctccctgctcctactgttgttggttgctagtggagacgccgatatgaaaggacactttgatcccgcgaagtgccgctatgctctgggaatgcaggataggacaattccggacagtgatattagcgcctcatccagctggtcagacagtaccgccgcccggcattccagacttgaaagctccgatggagacggtgcctggtgtcccgccggatctgttttccccaaggaggaggaatacctccaggtggacctgcagcgacttcacctcgtggccctggtaggcacacagggtaggcacgcaggggggttagggaaagaattttccagatcctataggctccgctattcaagggatggacggcgttggatggggtggaaagatcgctggggccaggaagtaataagtggtaacgaagacccggaaggcgttgtcctgaaagacctgggcccccccatggtcgcgcgcctggtgcgcttctatccacgcgccgatagggtgatgagcgtttgcctcagagtagagctgtacggctgcctctggcgcgatggactgctgtcctataccgcacccgtgggccagactatgtacttgtccgaggcagtgtatctcaacgatagtacttacgacggtcacacggtaggaggtctgcagtacggaggattgggacagttggccgatggcgtggtgggtctggatgattttagaaaatctcaagaactgcgggtttggcctgggtacgattatgtgggctggtccaaccatagcttctctagtgggtacgtggaaatggagtttgagtttgacagactcagagcatttcaggctatgcaggtacattgtaataatatgcatacactaggggcccggttacctggaggcgtagagtgcaggtttagaagaggaccagctatggcctgggaaggcgaaccaatgaggcataatctggggggaaaccttggtgacccacgggcaagagctgtcagtgtgccactaggcggacgcgtggcaagattcttacagtgtaggtttctcttcgccggaccatggcttctattctcggagatcagcttcatatctgatgtggttaacaattctagcccggccctaggtggcaccttcccaccggccccctggtggccccccggaccacctcccaccaacttcagctctctggaactagaaccccgtggccagcagcctgtggcaaaagccgagggcagcccaaccgccatcctgatcggatgcctggtggcaattatccttctactcctcttaatcatcgcacttatgctctggcgtctgcactggcggcgcctgctgagcaaggctgaacgtcgagtactcgaggaggagctgaccgtccatttgtctgtgcctggagatacgatactcattaataatagacccggccctcgtgagccacccccttatcaggagccaaggcctcgagggaatccaccccattccgccccttgtgtccccaatggctctgcctattctggagattatatggagccggagaagccgggagcaccactgttgccgccaccccctcaaaattctgtgccccactacgcagaggcagatatcgtcactcttcaaggagtgacaggaggcaacacatatgcagtcccagctcttccccccggagcagtgggagatggccctcctagggtagattttccgcgatcccggctaaggttcaaagagaagttgggtgagggacagtttggtgaagtacatctatgcgaggtggattctcctcaggatttagtgtccctggattttcctctgaatgttaggaagggccacccgctgctcgtcgcggtcaagattctacgcccggacgccacgaagaacgccaggaacgacttcctcaaagaagtgaagatcatgtctcgattgaaggacccaaatatcatccggctcctgggggtgtgcgttcaggacgacccgttatgcatgataaccgactacatggaaaacggcgatttaaatcaatttctgtcagcccaccagctggaggacaaggcagcagaaggcgctccaggggatggtcaggcagcccagggtcccactattagttacccaatgttgctgcatgtggctgcacagattgccagcggtatgagatatcttgcaactcttaattttgtgcaccgggatttagccacacgcaactgccttgttggagagaatttcacaatcaaaattgccgattttggcatgtcgcggaatctgtatgcgggtgactattatcgcgtacaaggtagggctgttctcccgatcaggtggatggcttgggagtgcattttaatgggtaagttcacgacagctagcgatgtgtgggcatttggggtcactctctgggaagtgcttatgctgtgtcgcgcccagcccttcggccagctgactgatgaacaggttatcgaaaacgccggggaattctttcgtgatcagggaagacaggtctacctctcccggccgcctgcctgtccccagggcctctatgagttgatgctgcgctgttggagtcgtgaaagcgagcagcgtcctcccttttcccagctacaccgttttctcgctgaagacgctcttaacaccgtgtag

SEQ ID NO: 79998 - DNA, 2631 bp, Artificial Sequence
  derived and/or modified sequence
atgggacctgaagccctctcaagtctgctgctcttgctgctcgtggcttccggcgacgcagacatgaaaggccattttgatccagctaagtgtaggtatgcgcttggcatgcaggatcgcacaatcccagattcagacatctctgctagctccagctggtctgacagcactgctgcgcggcactctaggctggaatcttctgatggcgacggcgcctggtgccctgccggaagcgtctttcctaaggaagaagagtatcttcaggtcgaccttcagagacttcaccttgtggccctcgtgggtactcaagggcggcatgcggggggactagggaaagaattttcacgctcctatcgactgcgctacagcagagacggcagaaggtggatgggctggaaggatagatgggggcaagaagtgatctcgggcaacgaagatcccgagggtgtggttctgaaagacctgggcccaccaatggtggcccggctcgtgagattttaccctagagccgatcgtgtaatgtctgtatgccttagggtggagctctacggatgtctatggcgggatggcctgctcagctatactgcccccgtgggtcagacgatgtacctgtcagaggccgtgtacttgaatgacagcacgtacgatggacacaccgtgggggggcttcaatatggaggtctgggtcagttagctgatggtgtggtggggctcgatgattttaggaaatctcaagaactgcgagtatggccgggctacgactacgtcgggtggtctaatcactctttcagttctggctacgtggaaatggagtttgaatttgataggctccgtgcttttcaggccatgcaggtgcactgtaataacatgcacacactcggagcacgcctgcccgggggcgtggagtgtaggtttcgccgaggtccggcaatggcctgggagggggaacccatgcgccataacctcggcggaaatcttggcgaccccagagcacgcgccgttagtgtgcctctcggcggtagggtcgcacggttcctacagtgcagatttctattcgcaggtccctggttgctcttctcagaaatctctttcatttctgacgtggtgaacaattcatcacccgcattaggggggaccttcccacctgcaccctggtggccccccggacccccccctaccaatttctcgtccctagagctcgagccaagaggacagcaacccgtcgccaaagccgaaggcagccccacagcaatcctcattggatgtttagtagctatcattttactcctcctgttgatcatagcccttatgctttggagattacactggcgccgcttacttagcaaggcggaacggcgcgtgctcgaggaagaactcactgtgcatctgagcgtgccaggcgacacgattttgattaataatcggccaggccccagggagccccctccgtaccaggagccccgtccaagggggaaccccccccattctgccccctgtgttcctaatggtagcgcctactccggtgactatatggaacccgagaagccaggggccccgctcctcccccccccaccacaaaactcagttccacattacgcagaagccgacattgtcaccctacagggcgtgactggggggaatacctacgcagtacccgctttgcctcccggggcggtgggggatggaccaccgagagtcgactttccccggagccgcttgcgcttcaaagaaaaattgggggaggggcagttcggcgaagtgcacctgtgcgaagtcgatagtccccaggacctagtctcactggacttccccttgaacgtacgtaaagggcaccccctacttgtagctgtcaaaatcttgcgaccagacgcgactaagaatgccaggaacgacttccttaaggaggtgaaaataatgagccgattgaaagacccgaacattatccggctgctaggcgtttgtgtccaggatgacccgttgtgcatgattactgactatatggaaaacggagacttaaatcagttcctgagtgcgcatcaattagaggacaaggcagccgagggagcaccaggcgacggacaagccgctcagggacctaccatcagttaccctatgctgttacacgtggccgctcagattgccagcggtatgcgctatctggccactttaaacttcgtgcacagagacttggcaacaaggaattgtcttgtcggcgagaatttcaccatcaagatcgccgattttggcatgagtcgcaacctatacgcaggcgactattatagagtacagggccgtgccgtattacctatccgctggatggcttgggaatgcattctaatgggaaaattcacgaccgctagcgatgtgtgggcattcggggttacgttgtgggaggtgttaatgctttgccgagcacagccgtttggccagttaaccgacgagcaagtaatagagaacgctggggagttcttccgcgatcagggccgccaagtctacctcagtaggccaccagcatgccctcaggggctgtacgagttgatgctgagatgttggagtagagaatcggaacagcgtcctccatttagtcagttacatcgatttctggcagaagacgcactcaacaccgtgtag

SEQ ID NO: 79999 - DNA, 2631 bp, Artificial Sequence
  derived and/or modified sequence
atgggaccagaggcgctgtcaagtctgctcctcctcctacttgttgcctctggtgacgccgatatgaagggccacttcgatcctgcaaagtgccgttatgcgctcggaatgcaggataggactattccagattccgatatttctgcatcctcctcgtggtcagatagcacagcagcccgtcactctcgactggagtctagcgatggcgacggtgcctggtgtccggctggtagtgtgttccccaaggaggaggaatatttacaggtggaccttcaaagactgcacctggtggctctcgtaggcacccaggggcggcatgcaggtggcctgggcaaggagttttctaggtcctatagacttaggtattcccgggatggaaggagatggatgggttggaaggatagatggggccaggaggttatttctggtaacgaagatccggagggggtggtcctcaaagacctcggaccacctatggtggcgaggttggtacgattctaccccagagcagacagggtgatgagtgtctgtctgcgggttgaactatatggctgtctgtggagagacggattgctcagttatacagctcctgtcggccagacaatgtatctgtctgaagcagtctacctgaacgattcaacctacgatggccacaccgtgggtggtctccaatatggcggactgggacaactcgctgatggtgtggttgggttggatgactttaggaagtcccaggagctccgcgtgtggcccggctacgactatgtcggatggtccaaccattcttttagctccgggtacgttgagatggaattcgaatttgatcggttacgagcctttcaggctatgcaagtccactgtaacaacatgcacaccctcggagcaaggctgcctggaggagtcgaatgccgatttagacgcgggccagctatggcttgggagggcgagccaatgcgccataacctgggaggcaatctgggcgacccgagggcccgtgctgtgtctgttcctctcgggggcagggtggctaggttcctgcagtgtcgatttctgttcgccggcccttggctgttgttttctgagatttcattcatttccgacgtggtcaacaacagcagtcccgctttaggcggcactttccctccagcaccatggtggccccctggccctccgcctacaaacttcagcagtctcgaacttgaaccacgtggacaacagcccgttgcgaaagcagagggcagccccaccgcaatcttaataggctgcctggtcgccatcattctgcttctcttgctcattattgccctgatgctctggaggctgcactggcgccgcctgctctccaaggccgagagacgggtgctcgaagaagaattaactgtacacttatcagtccccggcgatacaatcctcattaataatcgtccaggtcctcgcgaaccccccccctatcaggaacctagaccccgtgggaaccctccccactctgccccctgtgttcccaacggtagtgcctactctggggattacatggaacctgagaagccaggagccccccttctcccgccccctcctcagaacagtgtaccacattacgcagaggctgatatcgtcaccctgcagggagtgaccggagggaatacctatgctgtgcctgcactccccccaggggctgtgggcgacggcccacctagagtggacttccctcgatcacgtttacggttcaaggaaaaactgggcgagggtcagttcggcgaggtccacttgtgcgaagtcgatagcccccaggatctggtgtctctcgactttcctctcaacgttcggaagggacatccactcttagtggcagtgaagattttgcgccccgacgccacaaaaaatgccaggaacgatttcctcaaagaagtgaaaataatgtccaggctaaaagaccctaatattatccgcctactcggcgtgtgtgtccaggatgatccactttgtatgattaccgattacatggagaacggggacttgaaccagtttctctctgcccatcagctggaggacaaggctgccgagggagctcccggtgacggccaagccgcgcaggggcctacaataagttaccctatgctgttgcacgtagccgcccagattgcgagcgggatgagatatctagctactttgaatttcgtgcaccgagatctcgctacacgaaattgcctggtgggagaaaacttcactataaaaattgccgactttggcatgagtagaaacctgtatgcaggagactactacagggtgcagggaagggccgtcctgcctatcagatggatggcatgggaatgtatccttatgggtaagttcacgaccgcatccgatgtttgggccttcggcgtcacactgtgggaagtgcttatgctgtgcagggcccaaccatttggccaactcacagacgaacaggtgattgagaacgctggggagttctttagagatcaaggacgccaagtgtatctgtccagaccccccgcttgtccccaagggctgtacgaactaatgttgaggtgttggtccagggaaagcgagcaacgtcccccattctcccagctgcataggtttctagcagaggacgcccttaatacagtatag

SEQ ID NO: 80000 - DNA, 2631 bp, Artificial Sequence
  derived and/or modified sequence
atgggacccgaagcattaagctcactcctactcctgctgcttgttgcttccggcgatgccgatatgaagggccacttcgaccctgccaagtgtcggtatgctctgggaatgcaggaccgaacgataccagattccgatataagtgcctcttctagctggtcggattccaccgccgctcgccattctcggcttgagtcaagtgatggcgatggggcttggtgccccgccggaagcgtgttccccaaagaagaagaatacttgcaagtggacttgcagcgactgcatttagttgccctggtgggtactcagggaaggcacgcgggtgggctgggtaaagaattttcccggtcttatcgactgcgctatagtcgggatggaaggcgatggatgggctggaaagacagatggggccaagaagtgatatcaggaaacgaggaccctgaaggagttgtgctcaaggacctcggtccccctatggtggcgcggctggtgagattttacccacgcgccgacagggtgatgtcagtgtgtctgagagttgaactgtacggctgtctttggcgggacggactgctctcttatactgctcccgtgggccaaaccatgtatcttagtgaagcggtgtacctcaatgacagtacctatgacggacataccgtggggggtcttcagtacggcggactggggcagctggctgacggggttgtcggcctggatgacttcagaaaatcacaggagttgagggtatggcccggttacgactacgttggctggtcgaaccacagctttagcagcggatacgtcgagatggaattcgaattcgaccgactgagagcctttcaggctatgcaggtacactgcaataacatgcataccctaggagctcgacttccaggaggagtggagtgccgctttaggagaggtcccgctatggcatgggagggagagccaatgaggcacaaccttggagggaacctcggtgaccccagagcccgcgctgtcagcgttcccctgggcgggagggtggcgcggtttttgcagtgccgattcctctttgctggaccttggctgttgtttagcgaaataagttttatctcggacgtcgtgaacaactcttcacctgcccttgggggaacgttcccaccagccccttggtggccccccggacctccccctacaaatttcagcagcctggagcttgagcctcgcggacaacagcctgtcgcaaaagcggaaggatcaccaacagcaatcctcattgggtgcttagtagcgattattcttttactgctcttaattatcgctctgatgctgtggcggcttcattggcggagactactgtctaaggcagagcggagggtgttggaggaggagctcactgttcacctttctgtacctggagacacaatcctgataaacaatagacccggacctagggagcctcccccctatcaggaacccaggcctcgcgggaatcccccccatagcgctccttgcgttccaaacggcagcgcctacagcggtgattacatggagccagaaaagcctggtgcacctctgctgccccccccccctcagaacagcgtcccacattacgctgaagccgatatcgtcactctccagggcgttacaggcggtaatacttacgccgttcccgccctcccgcctggcgcagtgggggatggcccccctcgcgtggactttccgcgctccagactgcggttcaaagagaagttaggggaaggccagtttggggaggtccatttgtgcgaagttgactccccacaggacctcgtgtcattagattttccactgaatgtcaggaaggggcaccccctcctggtagctgtgaaaatcctgcggcctgatgcaaccaagaacgcacggaacgattttctcaaggaagtaaaaataatgtcccgactgaaggatcccaacattatccgactgctaggggtgtgtgttcaggatgatcctctttgtatgattactgactacatggaaaatggggaccttaaccagttcttgtctgctcaccagctggaagataaggctgcggaaggggccccaggcgacggccaggccgctcagggccctacaatctcctatcccatgcttctccatgtggccgcacagattgcttccggcatgcgttacttagctacccttaattttgttcatagagatcttgccactcggaattgtctggtaggtgaaaactttaccattaaaatcgcagatttcggaatgtctagaaatctttatgcaggggactattacagggttcaggggcgggcagttttgccaattcgatggatggcctgggagtgcattctgatgggaaagtttaccacagcttctgacgtgtgggcatttggggtgactctgtgggaggttctgatgctttgccgagctcagcctttcggacagctgacagatgagcaggtcattgagaacgccggtgaattctttcgcgaccaaggacggcaggtgtacctgagtaggcctcctgcctgtccacaggggctctacgagttgatgctgagatgctggagccgagagtccgagcagcggccaccatttagccagcttcatagatttctggccgaagatgccctcaacaccgtttag

SEQ ID NO: 80001 - DNA, 2631 bp, Artificial Sequence
  derived and/or modified sequence
atgggacccgaggcattgtccagtctgctgctgcttctcctggtggcgtctggagacgccgacatgaaagggcactttgacccagccaagtgcaggtatgcgttgggcatgcaagaccggaccattcctgattctgacatttccgcctcttcctcctggtcagatagcacagcagctaggcacagccgtttggagagttccgatggggatggggcttggtgcccagccggatccgtgttcccaaaagaagaagagtatctgcaggtcgacctccaaaggttacatttagtcgcccttgtaggcacacagggtagacacgctggagggcttggcaaagagttctcccgttcataccggttaaggtatagccgagatggccgcagatggatgggctggaaagacagatggggccaagaagtaatctcagggaatgaggaccccgagggcgtagttcttaaggatctcggacctccaatggttgcacgactggtacgattctacccccgcgccgatagggtgatgagtgtctgcttacgtgttgagttatacggctgcctgtggcgagacggtcttctctcgtatacagctccggtcggccaaaccatgtaccttagcgaggctgtgtacctcaatgactcaacgtacgatgggcacacggtcggggggcttcagtacgggggcctgggacaactggcagacggtgtagttggcctcgacgatttccggaaatcccaggagctgagggtctggccgggctatgactatgtgggttggtcaaatcatagctttagctctggttacgtggaaatggaatttgagtttgatagattacgggcctttcaggccatgcaggtacattgcaacaatatgcataccttgggggctagactgcctggaggcgtcgaatgccgctttagacggggtcctgccatggcatgggaaggtgaaccgatgcggcacaatcttggtgggaacttaggggacccccgggctagagccgttagtgtcccacttggcggccgcgttgcacggtttctgcaatgcagatttttgtttgccgggccgtggctgctttttagtgaaatctctttcatctccgacgtggtcaataattcatcacctgccctaggcggcaccttccctcctgctccctggtggccccctgggccgccacccacaaacttttcttcccttgaacttgagcctcggggacaacaacccgttgccaaggctgaggggtcccccacagctattctgattggctgcctcgttgcgatcatactattgcttctgctgattattgctctgatgctctggaggcttcattggagaagactgctgtcaaaagctgaacgcagagtactggaggaagagctgacggtccatctaagcgtgccgggagataccatactgataaacaaccgcccagggccccgtgaaccgcctccgtaccaggaacccaggccgcgcgggaacccaccccactccgctccctgtgtgccaaacgggtcagcatactccggagactacatggagcccgagaagcccggcgccccgctgcttcccccacccccccagaacagtgtccctcattacgcagaagccgacatcgtgaccctacagggcgtgaccggaggtaacacctacgcagtgcctgctttacccccaggggccgtcggcgacgggcctcctcgcgtggattttcctagaagccgattacggtttaaagagaagctgggtgagggccaatttggagaggtacatttgtgcgaagtagactctccacaagatttggtgtctctcgactttccactaaacgttcgtaagggacatcctttgcttgttgccgtcaagatcctgagaccggacgcaactaaaaacgctaggaatgacttccttaaggaggttaagataatgtctcggcttaaggacccaaatatcattaggttactcggtgtttgcgttcaggacgatccgctatgtatgatcacagactacatggagaacggcgacctaaaccagtttctctcagcacaccagctggaggacaaggccgccgagggagcacctggagatggacaggccgcccagggacccacgatctcttacccaatgctcttgcatgtcgccgcacagattgcgagcggcatgagatatctcgcaactctcaatttcgtgcaccgagacctggccactcgtaactgcctggtgggcgaaaacttcacaattaagatcgccgacttcgggatgagcagaaatctgtatgccggagactattaccgcgtgcaggggagagccgttctccctatccgctggatggcctgggaatgtatcttgatgggcaaatttactacagcatcagatgtgtgggcctttggtgtgacattatgggaagtgttgatgctgtgtagggcgcaaccctttggccagttaacagatgaacaggtgatcgagaacgctggtgagttcttcagggaccagggaaggcaggtctacctttctcgcccgcctgcttgtccacaaggcctgtatgagcttatgttgcgctgctggtcgagggagtcggagcagaggcctcctttttctcagctacacagatttctggcagaggacgccctgaacaccgtgtag

SEQ ID NO: 80002 - DNA, 2631 bp, Artificial Sequence
  derived and/or modified sequence
atgggaccggaggccctttcatccctcctactgctgcttcttgtggcctcaggcgatgctgatatgaagggccactttgacccggcaaaatgccgatacgcattaggtatgcaggatcgcaccattcccgactcagatatttcggcctctagttcgtggtcggatagtacagccgcccggcattcccggcttgaaagttccgacggcgacggagcatggtgccccgccgggagcgtatttccaaaggaggaagaatatctccaggtcgacctgcaacggctgcacctggttgcattggtcggaacacagggccgtcacgcaggcgggttaggcaaggagttcagtagatcgtataggctccgctacagccgggacggtagacgctggatgggatggaaggaccggtggggtcaggaagtcattagcggtaacgaggatccagaaggtgtcgtgctgaaagacttaggcccgcctatggtcgcccgactcgtaaggttctatcctcgggcggaccgggtgatgagtgtttgcctgcgggtcgagctgtatggatgcttatggagagatggcctgttgtcatacaccgccccagtaggccagaccatgtacctatcagaagccgtgtacctcaacgactccacatatgatgggcacaccgttggaggtctgcaatatggaggtttgggacagttggctgacggagtcgtaggactggatgacttcagaaagtctcaggagttacgtgtttggccaggctacgactacgttgggtggagcaaccactcattctctagtggatatgtcgaaatggagtttgagttcgaccgactcagggcgtttcaggctatgcaggttcattgtaacaatatgcacacgctaggcgcccgcctacctggaggggttgagtgcaggttccggagaggtccagcgatggcctgggagggggaacccatgaggcataacctgggaggcaatctgggagatccgagggcgcgggccgtttccgtgccgctgggcgggagagtggctcgcttcctccaatgccggttcctattcgccggaccgtggcttctcttttctgagatttccttcataagtgacgtagtcaataattcttcaccagcactaggaggaacatttccaccagccccttggtggccacctggcccgccaccaacaaactttagcagtttggagctggagccccgtggacagcaacccgtcgctaaggctgagggatccccaacagccatcttgattgggtgcctggtagctattatcctgctccttctgctcatcattgctctcatgctctggcggctgcactggcgcaggctgctcagcaaagcagaacgtcgggtgcttgaggaggaacttactgtgcatctgtccgtgcctggcgacacaattttgattaataatcggcctggcccgcgcgaaccacctccttaccaggaacctcggccaagaggaaaccctccccactcggccccctgcgttcccaatggcagcgcgtatagtggtgactatatggaacccgagaaacctggagctcccttactacctcctccccctcagaacagcgtcccgcattacgccgaggctgatattgtgactctgcagggagtgaccggggggaacacctatgcagtgccagcgctccccccaggagcggtaggagatggacccccaagagtggatttcccccggagcaggctgcgctttaaggagaagctgggtgagggacagttcggtgaggtgcatctgtgcgaagtggacagccctcaggatttggtgtcattagatttccctctgaatgtgagaaagggccaccccctgcttgttgccgtcaagattctgcgtcccgacgctaccaagaacgccagaaacgacttcctcaaggaggtcaaaattatgagtaggcttaaggatccaaatatcatacggctgctgggggtgtgtgtacaagatgaccccctttgcatgatcaccgactatatggagaatggcgatctgaaccaattcctgtcagcccatcagcttgaggacaaggctgctgagggggccccgggcgacggacaggctgcgcagggacccaccatctcctatcctatgcttctccatgtggctgcccagatcgcctctgggatgaggtaccttgctaccctcaattttgttcacagggatctcgctacgagaaattgtctggtgggtgagaattttacgattaagatcgctgacttcggaatgagccgcaacctgtacgcaggcgattactatcgcgtccagggaagagcagtgctacccataaggtggatggcttgggagtgtatcctgatggggaaatttactacagctagcgacgtttgggcattcggcgttactctgtgggaagtactcatgctttgccgcgcccagcctttcggtcaactgacggacgagcaggtcattgagaacgccggtgaattttttagagaccaaggtagacaagtgtatctctcgaggcccccagcctgccctcagggtctgtacgaactgatgctccgatgctggtcgagagagagtgaacagaggcctccgttttctcagctgcataggttcttagccgaggacgcacttaatactgtgtag

SEQ ID NO: 80003 - DNA, 2631 bp, Artificial Sequence
  derived and/or modified sequence
atgggtcccgaggccctgagctctttgctgctgctgctgttagtcgctagcggggacgccgacatgaaaggccactttgatcccgctaagtgtagatatgccctggggatgcaggaccgtaccatcccagactctgatatctccgccagcagttcttggtctgatagcacggcagctcgccattcgaggcttgaatccagcgacggtgatggagcctggtgcccggccgggtccgttttccccaaggaggaagagtacctccaggtggatctccagcgactccaccttgtggccctggtgggcacgcagggaaggcatgcaggcggtcttggcaaagaatttagtaggtcgtataggttgcgatattccagggatggccgaagatggatgggctggaaagacaggtggggacaggaagtcatcagcggcaacgaggaccccgagggtgtcgtgctgaaggatcttggtcccccaatggtggctagactggtccgcttctatccaagggccgacagagtgatgagcgtatgtcttcgtgttgaattgtacggctgtctgtggcgcgacggcctgctgtcatacacagccccggtgggacaaacaatgtatctgagtgaggccgtatacctaaatgatagcacctacgacgggcataccgtgggcggtctgcagtacggaggtcttggtcagctagcggacggggtcgtggggctggatgacttccggaagtcccaggagctacgagtgtggcctgggtatgattacgtcggctggtctaatcactcgtttagctctggctacgtagaaatggagtttgaattcgaccgactgcgtgcattccaagctatgcaggtacactgcaataacatgcacacattgggcgcaaggctccctggcggggtggagtgtcgctttcgccgggggcccgctatggcgtgggagggtgagccaatgagacataatctgggcggcaatcttggagacccacgcgcacgcgccgtaagcgtaccccttggcggaagggtggctaggtttctgcaatgtcggttccttttcgcgggcccttggctcttattttccgagattagtttcatttctgatgttgtcaacaatagcagtcctgctttagggggaactttcccccctgctccttggtggcctccaggacccccccctaccaatttttcatcactggagctggagccgaggggacagcaaccagtagctaaggcagaaggatctcccaccgctatattgatcgggtgtctggttgcaatcattctgctgttactgctgattatcgccctcatgttatggcgccttcattggcgacggctcctcagcaaagcagagagaagggtgttagaagaggagctcacggtccacctaagcgtacccggtgacaccatcctgattaataaccgaccgggaccgcgggaacctcctccgtaccaggagcctcggccccgaggcaaccccccccattctgcaccgtgcgttccaaacggctcagcatactccggtgactatatggaacctgagaagccgggcgcacccttacttcctcctcctccccagaatagtgtgccccactacgctgaggctgatattgtaacactccagggtgtgaccggcggtaacacttacgctgttccggcgctgcccccaggcgctgtgggtgatggtccgcccagagtggattttcctcgtagtcgtttgaggttcaaagaaaagctgggtgaaggacagttcggcgaagtgcatctctgcgaagtagacagccctcaggatttagtctccctggattttcctctgaacgtacggaaagggcatccactactggtagccgtgaaaatactcagacctgacgcgactaagaatgcgcgcaatgactttctgaaggaagtgaagatcatgtcaagactcaaggacccaaatattataagactgctgggggtctgtgtccaagacgacccactatgtatgatcaccgactatatggaaaatggtgacctgaatcagttcctgtctgcacatcagctagaggacaaggcagcagagggagcaccaggggacggccaagccgcccaggggccaaccatcagttaccctatgctgctccacgtggccgcgcagatagcatccggtatgagatatctggctactctgaattttgtacatcgcgatctggccaccaggaattgcctagtgggtgaaaattttaccatcaagatcgcagatttcggcatgagccggaacctttacgcaggcgattactaccgcgtccagggcagagcagtgctcccaataaggtggatggcctgggaatgtatccttatgggtaaatttaccactgcttcagacgtctgggctttcggtgtaactctgtgggaggtattaatgctatgtagggcccaaccctttggccaattgaccgacgagcaggtaatcgagaacgccggagaattctttagagatcagggcaggcaagtatacctgtctcgcccaccagcttgcccccaaggtctatatgaactgatgctgcgctgctggagtcgggagagcgagcagcgccccccattctctcagctccacagatttctggcagaagacgcactcaatactgtttag

SEQ ID NO: 80004 - DNA, 2631 bp, Artificial Sequence
  derived and/or modified sequence
atggggcccgaggcgctgtcgtctctgctgctgttgcttttggtcgcctctggtgacgctgatatgaagggacatttcgaccctgcaaaatgccggtacgccctgggtatgcaggacaggacaatacccgacagcgacatctctgctagctcaagctggtctgatagtactgctgctcgccacagccggttggagagttctgatggcgacggagcttggtgcccggccggatctgtgtttcctaaggaagaggagtacctgcaggtcgacctccagagacttcacttagtggccttggtaggaacacaaggccggcacgccggaggtttgggaaaagagttttcgcgaagctatcgtttgaggtattcaagggatggaaggcgatggatgggttggaaagaccgctggggccaagaggtgatttccggcaacgaagacccagaaggagttgtgctcaaagacttgggtccaccaatggtcgctcggcttgtgagattctatcccagggccgaccgagtgatgagcgtttgcctgagggttgagctctacggctgtctctggagagatgggctgctgagctacactgctcccgtggggcagactatgtatttatctgaggccgtgtacctgaatgacagtacctacgatggccatacagtgggtggcttacagtacgggggattagggcagctcgccgatggagtggtcggccttgacgacttccgaaagagccaggaactacgcgtctggcccggctatgattatgtcggatggtctaaccactctttttcttccggttatgtagagatggaattcgaattcgaccgactgcgcgcatttcaggcaatgcaagtgcattgtaacaacatgcatacccttggcgcacgattgccaggtggcgtagagtgccgcttcagacggggaccggcgatggcttgggaaggagagccaatgcgccataatctgggaggaaatctaggcgacccaagggcgcgcgcagtctccgtcccgctgggtggcagagtcgcgcgcttcttacagtgccgtttcctcttcgccggcccgtggctcctgtttagtgagataagcttcatttctgatgtcgttaacaattcctcgcctgccctcggtggcacatttcctccagccccttggtggccccccggaccccctcctacgaatttcagctctctcgagcttgagccacgcggccagcaacccgtggccaaggctgagggctctcctactgccatccttattggatgtctggtcgcaattattctgctgttgcttctcatcatcgcccttatgctgtggagactacattggcgcagactgttgtcaaaagccgagagacgcgttctagaggaagaattaactgtacatttaagcgtgcctggagacaccattctgattaacaacagacccggtcccagagagccaccaccctaccaggaaccaagaccaaggggcaatcccccccactctgctccatgtgtcccaaacggtagcgcatactcgggcgactacatggagcctgagaaacccggggcgccactgctcccccctcccccacagaactctgtgccccattatgcagaggctgacattgtcaccctacaaggggttacaggtgggaacacctatgccgtgcccgctctccccccaggggcggtcggcgatggtcctcctagggtcgacttcccacggagcaggctcagattcaaagaaaagctcggggagggccagttcggggaggtccatttgtgtgaggttgactctcctcaggatctggtctctctggactttccactgaacgtccgcaagggccatcccttgttagtggctgtaaagattctgaggcctgacgcaactaaaaacgccaggaatgatttcctcaaggaggtcaagatcatgtcccgacttaaggatcctaacattattaggcttttgggtgtgtgcgttcaagacgaccctctgtgtatgatcacagattatatggaaaacggcgatttaaaccaatttctttcagcccatcaactcgaagacaaggccgctgagggggcccccggcgacggtcaggctgcccagggacctaccatctcctatcccatgttgttgcacgttgctgctcagattgcgtctggtatgcgatacctcgctactctgaattttgtccatcgtgacttggctactcggaattgtctggtcggggaaaacttcaccatcaagatagcagattttggcatgtccagaaacctgtatgccggagattactacagagtgcaggggcgagcagttcttcctatccgctggatggcgtgggagtgtatcctgatgggcaagttcaccaccgcgagcgatgtttgggcctttggagtgacattatgggaagttcttatgctctgtcgcgcccagccttttggacagctgaccgacgagcaagtgattgagaatgctggcgagttctttagagaccaggggcggcaggtgtatttatctcggcctcccgcctgtccacaaggattatacgagctgatgctgcgttgctggtcgagagagtcagaacaaagaccgccatttagtcaactgcatagatttctagctgaggatgcgctaaacacggtttag

SEQ ID NO: 80005 - DNA, 587 bp, Artificial Sequence
  derived and/or modified sequence
agattccccagctgctgttctctggaggggtgtctgaaggtggctattcactgagcgatggggttggacttgaaggaatgccaagagatgctgcccccacccccttaggcccgagggatcaggagctatgggaccagaggccctgtcatctttactgctgctgctcttggtggcaagtggagatgctgacatgaagggacattttgatcctgccaagtgccgctatgccctgggcatgcaggaccggaccatcccagacagtgacatctctgcttccagctcctggtcagattccactgccgcccgccacagcaggttggagagcagtgacggggatggggcctggtgccccgcagggtcggtgtttcccaaggaggaggagtacttgcaggtggatctacaacgactgcacctggtggctctggtgggcacccagggacggcatgccgggggcctgggcaaggagttctcccggagctaccggctgcgttactcccgggatggtcgccgctggatgggctggaaggaccgctggggtcaggaggtgatctcaggcaatgaggaccctgagggagtggtgctgaagg

SEQ ID NO: 80006 - DNA, 2631 bp, Artificial Sequence
  derived and/or modified sequence
atggggcctgaagccctcagttcactgctcttactgttgctggtggcaagcggagatgctgatatgaagggccactttgatccagctaagtgtcggtatgcactgggaatgcaggatcgcacgatcccagactcagacatctccgcaagtagctcttggagcgattccaccgctgctcgccactcccgactcgagagttccgatggcgacggggcttggtgccctgctgggtctgtctttccaaaagaggaggaataccttcaagttgatctgcagcgtcttcatctggttgccctcgtcggaacacaggggagacacgcgggggggctcgggaaggaattctctaggtcctatagactgaggtacagcagagacggccggagatggatgggatggaaagaccgctggggtcaagaagtgattagtggtaacgaagatcccgagggggttgtgctcaaagatctcggcccacctatggtggctagactcgttagattttatcctcgagccgatagagtgatgtctgtgtgtttaagagttgagctgtatggatgtctttggcgcgacggtcttttgagttacactgcccccgttggtcaaactatgtatctgagcgaggctgtctatctcaatgactccacatatgacgggcacactgtcgggggcctgcagtacggcggcttaggacaactagctgacggcgtagtggggctcgacgacttcagaaagagccaagaattgagggtgtggcccgggtacgattacgtaggctggtctaaccacagttttagctcaggttacgtcgagatggagtttgagtttgacagactgcgcgcctttcaagccatgcaggtgcattgcaacaatatgcataccctcggtgcacgattgcctggcggtgtggagtgtcggtttcgtaggggacctgccatggcatgggaaggagaacccatgcggcataatctcggagggaacctgggggatcctcgagcccgcgctgtaagcgtacctctcggaggacgggtggccagattcttgcagtgcagattcttgttcgccggaccctggctactgttttccgaaatctctttcatatctgacgtggtcaacaattcttctcccgccttgggcggtacttttccccctgctccatggtggcctcccggcccgccccctaccaacttctccagtttggagctcgagccacggggacagcagccggtggccaaagccgaaggaagcccgacagccatcctgatcggctgcctggtggccatcattctgttgctgctgcttatcattgcactgatgttgtggcgcctgcactggcggcgcctgctcagtaaggccgagcgtcgagtgctcgaggaggagctgacagtgcacctgtcagtgcccggcgacactatcttgatcaacaatcgccccggtcccagggaacccccaccttatcaggaacctagacccagaggcaatccacctcatagtgcgccctgtgtcccaaatggctctgcctattccggagactacatggagcctgaaaaaccaggggctccactgctgccccccccaccacaaaattctgttccccactatgctgaagcagacatcgtcactttgcaaggcgtcacaggcgggaacacctacgccgtcccggccctcccgccaggagccgtgggcgatgggccaccacgggtggatttccctcggagcaggctcagatttaaggagaaattgggcgaaggacagttcggcgaggtccatctatgcgaggtggactcacctcaagatctggttagtctggatttccctctcaacgtacgcaaaggacaccctctgctggtagccgtcaaaatcctcagacctgatgcgaccaagaatgccagaaacgacttcctcaaggaggtaaagataatgtcacggctgaaagatcccaacatcataagactgctcggcgtctgtgtccaagacgatccgctgtgcatgattacagactatatggagaacggagatcttaatcagttcctgagcgcccaccagcttgaagacaaggctgccgaaggtgcacccggtgacggccaggccgcacaggggccgacaatctcctacccaatgctgcttcacgtggccgcacaaatcgcttctgggatgagatacctggcaacgctgaatttcgtgcacagggatctggctactagaaattgccttgtgggtgaaaacttcacaattaagatcgccgactttggaatgtctcggaacctttatgcgggcgattactatcgagttcagggacgcgcggtgcttcctatccggtggatggcatgggagtgcattttgatggggaagtttactacagctagtgatgtgtgggctttcggtgtcactttgtgggaggttttgatgctctgtagagcccaaccattcggacaacttaccgacgaacaagtaatagagaatgcaggagaattctttagggaccaggggcggcaggtgtatctgtctcggccccccgcctgcccgcaaggtctctatgaactaatgttgaggtgctggtccagggagtccgagcaacggcccccttttagtcagctccatcgttttctggccgaggacgccttgaataccgtttag

SEQ ID NO: 80007 - DNA, 2631 bp, Artificial Sequence
  derived and/or modified sequence
atggggcctgaggctctctcgtctctgctgctgctgctgttggtggcatctggcgacgcagacatgaaaggacatttcgaccccgcgaaatgccgttacgctcttggcatgcaggatcggacaatccctgatagtgatatttcggccagctcctcttggtctgacagtactgccgctagacactctcgacttgagtcttccgatggggacggtgcctggtgccccgccggttctgtgtttcctaaggaggaagagtacctgcaggtggacttgcagagactgcaccttgttgcactggtaggcacccaagggaggcatgccggaggccttggcaaggagttttcaagatcttatagacttcggtacagtcgcgacggcagacggtggatggggtggaaagatcggtggggccaggaggtcatctctggtaacgaagatcccgaaggcgtcgtgctcaaggatctcggcccaccgatggtggcacggcttgtgagattttacccccgggcagatagagtcatgagtgtctgtttgcgagtagaactctatggatgtctgtggcgggacggattactcagttacacagcgcccgtcggccagaccatgtatctgtctgaggccgtctatttaaatgattctacatatgacggacatactgtgggggggctgcaatatggggggttggggcagctcgctgatggcgtggtggggctggacgatttcagaaagtctcaggagctgagagtgtggcctggatacgattacgtgggttggtcaaatcacagctttagtagcggctatgttgaaatggagttcgaattcgacaggttgagggctttccaggctatgcaggtgcattgcaataatatgcatacactgggcgctagattgcccggcggcgtggagtgtaggtttcgccggggtcccgcaatggcttgggaaggggagccaatgagacataatctcggcggaaatttgggagatcccagggctagagccgtgtctgtgcccttgggtggtagagttgcacggtttctccaatgtcgtttcctcttcgctggaccatggctgctgttttcagaaatctcattcatatcggatgttgtcaacaacagttctcctgctcttggggggaccttccctccagccccctggtggccgccaggccctccacctacaaattttagctccctggagttggaacccagaggccagcaacctgtggccaaggccgaaggctccccgaccgctatcctgattggctgcctagtagcaattattctgctgctcctgttgatcatcgctttgatgctgtggagactgcactggcgtcgcctcctaagcaaggcagagaggcgtgtattagaggaggaattgaccgtacacctttcagtcccaggggacactatcctgatcaacaaccgccctggcccgagagagcctcctccttatcaagagccacgtccgagagggaatccaccgcattcagcaccctgcgtcccaaatggtagcgcctactcaggagactacatggaaccagagaagccaggggcacccctcctccctccgccaccacagaattcagtgcctcattatgcagaggcagatatcgttacactgcagggagtgaccggcggcaacacctacgcagtacccgcgctcccaccgggtgcagtgggcgacggcccccctcgcgtggacttcccaaggagtcggctaaggtttaaagagaagttgggcgaaggccagttcggagaggtccatctgtgcgaggtggactctccccaggacctggtgtcattggacttccctctaaatgttaggaaagggcaccctctactcgtagccgtcaaaatccttcgtccagacgcaactaaaaatgcaagaaatgattttttaaaagaggtcaagatcatgtccaggctcaaagatcctaacatcattcggcttctgggggtttgcgtacaggacgaccctctttgcatgataaccgactatatggagaacggagacctgaatcagttcctgtctgctcaccagcttgaagataaggctgctgagggtgctccaggagacggacaagccgcccagggtcccacaattagctatccaatgttacttcacgtcgccgctcagatagcgtctgggatgagatatttggcaacccttaattttgtgcacagagatcttgctacaagaaattgcctggtgggtgagaacttcactattaagatcgccgatttcgggatgagtcgcaatctctacgccggcgactactatcgagtacaaggcagggcggtcctgcccataagatggatggcatgggagtgtatcctgatggggaaatttaccaccgcttccgatgtgtgggctttcggggtgacactgtgggaagtgcttatgttgtgtagagcccaaccattcgggcagttgactgacgagcaggtcatcgagaatgcgggtgaattcttcagagaccagggccgacaggtgtatctctcaaggcccccggcttgtccccagggcttatatgaattgatgcttaggtgctggagtagagagtccgagcagaggcccccgtttagccagctgcaccgcttcctggccgaagatgcgctgaatacagtatag

SEQ ID NO: 80008 - DNA, 2631 bp, Artificial Sequence
  derived and/or modified sequence
atgggtccggaggcactgtcgtccctgctcctgcttctcttggtggccagcggcgacgctgacatgaagggccattttgatccagccaagtgtcggtatgcactaggaatgcaggaccgcactatcccggatagtgatatttccgcttcatcaagttggtcagactccacagccgctcggcactcaagacttgagtctagtgacggggatggggcatggtgtcctgccggatcagtgtttcccaaggaggaggagtatctgcaggttgatctgcagcggttgcatctcgtggctcttgtagggacacaaggcagacatgctgggggccttggcaaggaattctcacgatcctatcgactgcgctactcaagagacggcagacgctggatgggctggaaggataggtggggacaggaagtcatcagtggaaacgaggatccagagggtgtggttctcaaggatctcgggccacccatggtcgctaggctcgtgcgattctatccgagagctgatagggtgatgtctgtctgcctgagagtagaactgtacggttgtctgtggcgtgacggcttactttcctatacggcccctgtgggacaaacgatgtatctcagtgaagccgtgtatcttaatgacagtacttatgacggacacacagtcgggggactccagtacggcggcctgggccagcttgccgacggggtagtgggcctcgacgatttccggaagtcccaggagctgcgggtgtggcctggctatgattacgtcggctggagcaatcattcctttagcagcggttatgtcgaaatggaattcgagtttgatcggttgagggccttccaggcaatgcaggtacactgcaacaacatgcacactttaggtgctagattaccaggaggcgttgaatgccggttcaggcgcggtcctgccatggcgtgggagggggagccaatgcgccataaccttggcggaaatttgggcgaccctagagctcgagccgtgtctgtccccttgggcggacgcgtggctcgatttctgcagtgccgattcctctttgccggaccttggcttctcttttctgaaatttccttcatttctgatgtggtcaacaactcttcacctgctctcggcgggaccttccccccagcaccctggtggccacccggacccccccctaccaacttctctagtctggagttagagcctcggggtcagcaacccgtcgctaaggccgaagggtccccgacagctattctcatcggctgtctggtagccatcattctccttctgctcctgataatagctttgatgctgtggcgccttcattggagaagactcctgtccaaagcggagcgtcgtgtcctggaagaagaactcactgtacatcttagcgtgcctggggatacaatcctaatcaataacagacctggccctagagaaccacccccctaccaggagccccgtccccgcggtaatccccctcatagcgccccctgcgttcccaatggtagcgcatacagcggagattacatggagccagagaaaccaggtgctcctctcctgcctcctccaccacaaaattccgttccacactatgcagaagcagatatcgttaccctgcagggcgtgacagggggcaatacttatgccgttcccgccttgccacctggagcagtgggggatggaccacccagggtggactttcctagatctcgtcttagatttaaagaaaaactcggtgaaggccagtttggcgaagttcacctttgtgaagtcgacagcccccaggatctggtcagcctggatttcccactcaacgtgaggaaagggcaccccctcttggtggccgtgaagatcctgcggccagatgccactaaaaatgcgcgaaatgattttcttaaggaggtaaagattatgagcagactgaaggatccaaatatcattaggctgctgggcgtatgcgtgcaggatgaccccttgtgcatgattacagactatatggagaacggcgatctgaaccaattcctgtccgctcatcagctggaggacaaggctgccgaaggagcgccgggtgacgggcaagccgctcaagggcccacgatcagctatcccatgctacttcacgtagctgcccagatcgcgagtggcatgcgctacctcgcaaccttgaactttgtccatagggacttggccacccggaattgcctggtcggagagaacttcacgattaagattgccgatttcggaatgtcccgcaacttgtacgccggggattattatcgcgttcagggcagggccgtgctgccaattagatggatggcctgggagtgtatcctgatgggaaagtttaccactgcctctgatgtctgggcatttggggtgacgctgtgggaagttctaatgctttgtcgggcacagccattcggccaactgacagacgagcaggtcatcgaaaacgccggggaattcttcagggaccaggggagacaggtgtacctgagcagaccccctgcctgtccacaagggctctatgagctgatgttgcgctgctggagcagggaatcggaacagcgcccacccttctcccagctgcaccgctttctcgccgaggacgcgcttaacacagtatag

SEQ ID NO: 80009 - DNA, 591 bp, Artificial Sequence
  derived and/or modified sequence
atgccacacctcgcatcactcttcaccgcaagctcgagatgctgtccccatccactcagaccagagggtagcggagccatgggacctgaagccttaagctccctgcttctcttgctgttagtcgctagcggtgacgccgacatgaaaggtcactttgacccagctaagtgtcgttacgccctaggtatgcaagacagaaccatccctgattccgacatcagcgcttccagtagttggagcgacagcacggccgcacggcacagccggctggagagtagcgatggcgacggagcctggtgcccggctgggtcggtgttccctaaagaagaagaatacctacaggtggacctgcaacggctgcacctggtcgctctggtggggacacagggtcgtcacgctgggggcctaggcaaagaattttcgcgttcctacaggctgagatactcccgcgacggtagaagatggatgggttggaaagacaggtggggccaagaagtcatctctggcaacgaggacccagagggagttgtgctgaaagatctcgggcccccgatggtcgcaagactggtaaggttctacccccgcgcatag

SEQ ID NO: 80010 - DNA, 2685 bp, Artificial Sequence
  derived and/or modified sequence
atgtccttgcctcgctgctgtccccatcccctccggccagagggttctggagccatgggacctgaggcactcagcagcctactgctcttgttattggtggcgagtggagatgccgacatgaaaggtcacttcgacccagccaagtgcaggtacgctcttggcatgcaggatcgcacgattcccgactctgatatttctgcttcatcctcctggagcgactcaactgcggccagacattccagactcgaaagctcagatggtgacggggcgtggtgtccagccggcagcgtattcccaaaggaggaagagtacctgcaagttgatttgcagcgccttcacttggtggcccttgtaggtacccagggtagacatgccggagggcttggtaaagaattttccagatcttacagactgcgctacagccgggatggcagaagatggatgggctggaaagaccggtggggacaggaagtgatttccggaaatgaggatccagagggtgtagtgctaaaagacctcggacctccaatggtggctcggcttgtgaggttctaccctcgcgctgaccgggttatgagtgtgtgcctgcgcgtcgagctttatggctgcctgtggagagatggtttattgtcttacactgctcccgttggccaaaccatgtacttatcggaagcagtgtacttaaatgattccacgtatgacggacatacagtcgggggcttgcaatatggggggctgggacagctggccgatggcgtagtggggttggacgactttcggaaatctcaggagctgagagtttggcctgggtatgactatgttggctggagcaaccattcatttagctctgggtacgtcgaaatggaatttgagtttgaccgcctcagagctttccaggccatgcaggtgcactgcaacaacatgcacactctcggcgcgcgccttccagggggagtcgaatgtagatttcgccggggtccggccatggcttgggaaggcgagcccatgcgacacaacctgggcggcaatttaggtgatccacgggctcgggccgttagtgtgcctttggggggtcgtgtggcccgcttccttcaatgtaggttcctctttgctggcccctggctgctgttcagcgagatctcctttatttcagacgtagtcaataacagctcaccagctttgggaggcacattcccccccgcaccttggtggcctccaggtcccccccctaccaatttctccagcttggaattggaaccccggggccagcagcccgtggctaaggctgagggttcaccgacagcaattctgatcggatgtcttgtggccataattttgctgctattgctgatcatagcactcatgctgtggcgcctgcactggcgccgactgctttctaaagctgagcgaagagttctcgaggaagaattaacggtacatttatccgtgcctggcgacaccattctcatcaacaatagaccaggacccagagaacctccaccctaccaagaaccaaggccacgcggaaaccccccgcattcggctccgtgcgtccccaatggatccgcttactccggagactatatggagcctgagaaaccaggcgcaccactcctacccccccccccccagaactctgtcccacactacgcagaggcagacatcgtgacgctgcagggtgtcactggtggtaacacatacgccgttcccgcattgccgcctggagctgtgggggatggaccacccagggtggatttccctcgaagtcggcttcggttcaaagagaagctgggggagggacagtttggcgaggtccatctgtgcgaagtggattcacctcaggacttggtttctttggatttcccactgaacgttaggaaagggcacccactgctggtggctgtaaaaattctgagacccgatgcaactaagaatgctcgtaacgatttcttgaaagaagttaagatcatgtctcgattaaaggaccctaatattattcgacttcttggcgtctgcgttcaggatgaccccttatgcatgataaccgactacatggagaatggcgatctgaaccaatttctgagtgctcatcagctggaggataaggcagccgagggtgcgccaggagatggccaagccgcacagggaccgaccatctcctaccctatgttgctacacgtagccgcccagatcgcgtccgggatgagatacttggctacactgaactttgtgcatagggaccttgccacacgtaattgccttgttggggagaatttcaccatcaagatagccgactttgggatgtctagaaatctgtacgctggcgattattaccgggtccagggccgcgccgtgctcccaatccggtggatggcttgggaatgtatactgatgggaaaatttaccacagcctccgacgtatgggcttttggtgtgacactgtgggaagtcttgatgctatgcagagcacaaccttttggccaattgacggatgaacaggtgattgagaacgccggagaattttttagagatcaggggcgccaggtctatctttcccgtccgcccgcatgcccacaagggctgtatgaactgatgctccggtgctggtctagagaaagcgaacagagaccccccttcagccagctgcacagattcctggccgaggacgctctgaacacggtttag

SEQ ID NO: 80011 - DNA, 2685 bp, Artificial Sequence
  derived and/or modified sequence
atgtcattgcccagatgttgccctcatccacttagacccgaggggtccggagccatggggccagaagccctcagtagcctcttgcttttgctccttgtggcctcaggcgacgctgatatgaaaggccattttgacccagctaaatgtcgctacgctctgggaatgcaggaccggacgataccagactccgacatctctgcttcatcttcttggagcgattccactgcagcccgccactcacgcctggaatcaagtgacggagatggggcttggtgcccggccggtagcgtattcccaaaggaagaagagtacctccaggtggacctccagaggctgcatctggtggctctggtcggcacccaaggacgacacgctggaggattgggaaaggagttctccaggagctaccgcttacggtacagtcgggatggacgtcggtggatgggttggaaggaccgctggggacaggaagtaatctccgggaatgaggatcccgagggcgtcgtgttgaaagatctggggccgcccatggtcgcccgcttagtccggttctacccacgggcggatcgcgtaatgtccgtatgccttagggttgagctgtacggctgtctatggcgcgacggactcttaagttacaccgcgcctgtgggccagactatgtatctcagcgaggctgtgtacttgaacgattcaacatacgacggacacaccgtcggagggttgcagtatgggggtttaggccagctggccgacggtgtcgtaggactcgacgacttccgcaagtcacaggagttacgcgtgtggcccggctacgactacgtcggctggtctaaccattccttttcaagtgggtatgtggagatggagtttgaattcgatcggttgagggcgtttcaggctatgcaagtgcactgcaataacatgcatacactgggggctcggttaccagggggagtggagtgcaggttccggcgcggtccagcaatggcttgggaaggcgagcctatgaggcacaacctcggagggaatctcggggatcctcgggctcgggccgtgtctgtgcctttgggggggcgggtagctcgtttcctgcagtgcaggtttctctttgctggcccgtggctcctcttttccgaaattagctttatctcagacgttgtgaacaatagttcccctgcactgggtggaactttcccccctgctccctggtggcctcccggtccgcctcccaccaatttctcttccctggagctggagccccggggtcaacagcccgtggccaaagccgagggctcccccaccgctatactcatcggctgcctcgtcgcaatcattctgctgctgctgctcatcatcgccctcatgttatggagattgcattggagacggctcctgtcgaaagcggagaggcgggtcctcgaagaagaacttacggtgcacctgagtgtgcccggggacacaatacttattaataaccgaccaggcccaagagagccacccccataccaggagccccgtccgagaggaaaccctccgcatagcgccccatgcgtgccaaacggatcggcctacagcggagactacatggaacctgagaagccgggtgcaccactgctgccaccaccacctcagaacagcgttccacattatgcagaagcagatattgtaacattacaaggtgttaccgggggcaacacctacgcagtcccagctcttccccccggcgccgttggagatggtcctccgagagtggatttccctcggtctagactgaggtttaaggagaagctcggagaagggcagttcggagaagtgcacctgtgtgaggttgattctccccaggatctggtatccctcgactttccactaaatgtgagaaagggccaccctctgcttgttgcagttaagatcctaaggccagatgctacaaaaaacgcaagaaatgatttccttaaagaagtgaagattatgtccaggttaaaggaccccaatattatccgactgctaggcgtgtgtgttcaggacgaccccctgtgtatgatcaccgattacatggaaaacggagatctcaaccagtttcttagcgcacatcaactggaagataaggctgcagaaggggcccctggagacggacaggcggcccagggccctacaatctcatacccaatgctccttcacgtggccgcccagatcgctagtggtatgcgttacctggcaacactaaacttcgttcatagagatctagccacccgaaactgtctggttggagaaaatttcactataaaaatcgccgattttggaatgagccgtaacctatatgctggggattattaccgcgtgcagggtcgcgctgttctgccaattaggtggatggcgtgggaatgtatcctgatgggcaaatttactactgctagtgatgtctgggcctttggagtcactctatgggaagtcctaatgctgtgtcgagcccagcctttcggacagctgactgatgaacaagttatagaaaacgccggcgaattctttcgagatcagggacggcaggtgtatctgtccaggccccccgcctgcccacaggggctgtacgaattaatgctgaggtgttggtcccgagagagtgaacagcggccgcccttcagtcaattacaccgattcctagccgaagatgcactgaacacagtatag

SEQ ID NO: 80012 - DNA, 2685 bp, Artificial Sequence
  derived and/or modified sequence
atgtccctccctaggtgctgcccccatccacttcgccctgagggaagcggcgccatgggcccagaagctctgtctagcctgttgctgttgctcctggtggcctccggagacgccgacatgaaaggccacttcgaccctgccaaatgtcgctacgcactcggcatgcaagacagaactatccccgatagtgatatttcagcttccagcagttggtctgattctactgctgccagacactcgagattggaaagcagcgacggcgatggggcatggtgccctgcagggagcgtcttccccaaagaggaggaatacctgcaggtcgacttgcagcgcctccatttggtggctcttgtggggacccagggacggcacgccgggggccttggtaaagaattctctcgctcctacagactgagatactcacgtgatggacgccgatggatgggatggaaagacaggtgggggcaggaagtcattagcggaaacgaagatcctgaaggggtcgtattgaaagatctagggccccctatggtggctcggctggtgaggttctatccaagagccgatagagtcatgagcgtgtgcctgagagttgagctctacggatgcttgtggcgagacggacttctgagctacaccgcccccgtcgggcaaacgatgtacctcagcgaggcagtgtacttaaacgacagcacctatgatgggcacacagtgggtggactgcagtatgggggtctgggccagctcgcggatggcgtggtgggcttagatgacttccggaaaagccaggagttacgggtttggccagggtatgattatgtgggctggtctaatcacagtttctcatccggatatgtagagatggagttcgagttcgacagactgagggctttccaggccatgcaagttcattgcaataacatgcacactttgggagcacggctgcccgggggagtggaatgccgatttaggcggggcccagctatggcttgggagggagagcctatgaggcacaatctggggggaaatctgggcgatccgcgggctagagctgtgtccgtgccattgggaggacgggtggctcgtttcctgcagtgtcgtttcctcttcgctggtccatggttgctgttttcagaaatatcatttatttccgatgtagtgaataactcatcccccgcacttggaggaacctttcctcctgcgccttggtggccgcccggtcctccccctacgaattttagtagtctggagttggagccaaggggccagcaaccggttgctaaagctgaaggctctccaaccgccatcctgataggatgcctagttgcaattatattacttctgttgttgataattgccctcatgctgtggagactgcactggagacgtttactgagcaaagccgagcggagagttttagaggaagagctgaccgtgcatttatcagtgccaggtgacacaatcttaatcaataatcgccctggcccccgcgaacctccaccctaccaggaaccccgaccacgcggaaacccacctcattcagcaccatgtgtgcctaacggcagtgcctactcaggggattatatggagccagaaaaacctggtgctccactcctgcctccacccccccaaaactctgtcccccactacgcagaggccgacatcgtcacacttcagggcgtgaccgggggaaacacatatgcggttcccgctctgcctcctggtgcagtgggagatggaccacccagagttgactttccacgcagtcgcctgcgttttaaggagaaattgggagaaggccaatttggtgaggttcacttatgtgaagtggattccccacaggatttggtaagcctggatttccctctaaacgtcagaaagggtcatccacttctggtcgcggtcaaaattctccgcccagacgccaccaaaaacgcaagaaatgatttcctcaaagaagtaaagataatgtccagactgaaagaccctaacatcattcgactcctgggcgtgtgtgtgcaggatgaccccctgtgcatgattactgattatatggaaaatggcgatttgaatcaattcctctctgcgcatcaacttgaggacaaggcagccgaaggcgcccccggagatggacaggccgcccaggggcctactatctcttatcccatgctgctccatgtcgcagcgcaaatagcctcagggatgcgctacctcgcaactctgaattttgtgcaccgagatctggctacgaggaactgtctggtgggagagaacttcaccatcaaaatagcggatttcggcatgtctaggaacttgtatgctggggactactatcgggtgcaagggagggctgttctgcctattcggtggatggcatgggagtgcatactcatgggaaaatttacgaccgcttctgatgtgtgggcgttcggggtcacattatgggaggtcttaatgttgtgccgagcccagccattcggccaacttacagatgagcaggtcattgagaatgccggcgaattttttcgggatcaggggcgtcaagtgtatctgtctcggccccccgcctgcccccaggggctctacgaactgatgctcaggtgctggtcacgggagtccgagcagcggccaccattctcacagcttcatcgcttcttagcagaagacgctctgaataccgtgtag

SEQ ID NO: 80013 - DNA, 756 bp, Artificial Sequence
  derived and/or modified sequence
atgccacatttagcaagtctattcacagcttcttcgaggtgttgccctcatcctctcagaccggagggatcaggtgctatgggcccggaagctttatcttctttgctacttttgctgcttgttgcctcaggagacgccgatatgaaagggcattttgatccagccaagtgtagatacgccttagggatgcaggatcgtaccatccccgattcggatatatctgcttcgtcatcttggtccgacagcaccgccgcccgccactccaggttggaatcctctgatggagatggcgcttggtgccccgccggctccgtctttccaaaggaagaggagtatctgcaggtggatttgcagagactgcacctggtcgcactggtcggaacacaggggagacacgctggtggactgggtaaagagttctcaagaagttaccgtcttcgatattcccgagatggtcgccgctggatgggctggaaagatcggtgggggcaggaagttatcagtgggaatgaagatcctgagggagttgtcctgaaggatctgggaccccctatggtggctcgactagtgaggttctatcccagagcggatcgggtcatgtccgtatgtcttcgagttgagctgtacggatgtttgtggcggggggaatggctaagcttcctgggaatctgctttctcagccgcgggctggaaggaggagaatgtggcgagtgggcaagtcggatcccaagtcctgcaggcaagctttctctctag

SEQ ID NO: 80014 - DNA, 2685 bp, Artificial Sequence
  derived and/or modified sequence
atgtcattgccacgttgctgtccgcaccccttaaggccagaaggtagtggcgccatgggacctgaagccctcagctctctactcctactgttgttggtggcaagcggagatgctgatatgaaagggcactttgatcctgccaaatgccggtatgctcttggaatgcaggaccgtactatacctgacagtgacatcagtgcttccagctcctggtccgattccactgccgctcgtcattcacggctggagagttcagatggtgacggcgcatggtgcccagccggatccgtctttccgaaagaagaggagtatttacaggtcgaccttcagcgcctgcacctcgttgcgctggtcggtacgcagggtagacacgctgggggacttggtaaagaatttagccgctcttacagactaagatattcacgggatggcaggcggtggatggggtggaaagatcgctggggacaggaagtgatttccggtaacgaagatcctgaaggcgttgtgctgaaagatttagggccccccatggtcgcgagactcgtaaggttctatccccgcgctgaccgggttatgagcgtttgcctgcgagtggagttgtatggttgcttgtggcgtgacggcttgctgagttatactgcacccgtgggacagacaatgtacttaagtgaggcggtgtacttgaacgactccacatacgatggacacaccgttggcggcttgcaatacggcggcctgggtcagttagccgatggtgtggttgggcttgatgatttccggaaaagccaggagctcagagtttggcccggctacgattatgttggttggtccaatcattccttttcctccggctatgttgagatggagtttgagtttgaccggctgagagcatttcaagccatgcaggtacattgtaacaatatgcacacactgggtgcccgcttgcccggtggtgttgagtgccggttccggaggggccctgccatggcttgggagggagaacccatgagacacaatctgggcggtaacctcggcgaccctagggctcgtgccgtcagtgtccccctcggcggaagggtcgcccggtttttgcagtgcagattcttatttgctgggccctggctcctgtttagcgaaatttcttttatcagcgacgtcgttaataactcctccccagccttgggggggactttcccacctgctccgtggtggccccctggaccacctcccacgaactttagctccctggaactggaaccgagaggccaacaacccgtcgcgaaggccgaaggttcccctacggccattctcataggctgcctggtcgcaatcattctccttctgctgcttattatcgctcttatgctctggcgccttcattggaggaggttgctcagcaaggctgagagaagggtgctcgaagaggagttgactgtccacttgtcagttccgggcgataccatcttgattaataaccggcctgggccaagggagcctccaccgtaccaggagccacgtcctcggggcaatccaccacactcagccccctgtgtgcccaatggaagtgcatactcaggcgattacatggagcctgaaaagcctggagcgcccctgctgcctcccccccctcaaaacagtgtgccgcactatgcagaagctgatattgtgaccctgcagggggtgaccggtggaaatacatatgctgttcctgccctgcctccaggcgccgtcggggacgggccacccagggttgactttccaagatcccggttgcggttcaaagagaaactgggcgagggacagttcggagaagtgcatctctgtgaagtcgacagtccccaggaccttgtatctctggacttcccactaaacgtccgcaaggggcacccattactggtggccgtgaagatcctgcgacccgacgctaccaagaatgcacggaacgacttcctgaaagaggttaaaatcatgagcagacttaaagacccaaatattattcgcctgctgggcgtgtgcgtccaagacgaccctctgtgcatgattacagactatatggagaacggcgatctgaatcagttcctctctgcccatcagctggaggataaggctgcagagggggcccccggagacggacaggccgcacagggccccaccatttcatatccgatgttgctacatgtggccgctcaaattgcttccggcatgcgatacttggcgacactaaatttcgtgcatagggatttggccacccgaaattgcctagttggcgaaaactttacaattaagatcgccgatttcggtatgtcccggaacctgtacgcaggcgattactaccgtgtgcagggccgtgcagtgctccccattagatggatggcctgggaatgtatcctgatgggcaagttcacgaccgcatctgatgtttgggcttttggggttaccttatgggaggtactgatgctgtgcagagctcaaccgttcggccaactgacagatgaacaggtaatcgagaacgcaggggagttctttagagatcagggccgacaagtttacctctccaggcctcccgcttgccctcagggactttatgaactcatgctgaggtgttggtctagagagtctgagcaacgcccgccctttagccagctgcatcgattcctggcagaagacgcactcaataccgtttag

SEQ ID NO: 80015 - DNA, 756 bp, Artificial Sequence
  derived and/or modified sequence
atgccccatttggctagtctctttaccgcctctagtcggtgctgtcctcatcctctcagaccagagggatccggggccatgggacccgaggccctatctagcttgctgcttctactactggtcgcgtctggggacgccgatatgaagggccactttgatccagccaagtgcaggtacgcactgggtatgcaggaccgtaccatacctgactcagatataagtgcatcgagctcctggtcggacagcactgctgcgcgacactctagactggaatcctctgacggcgacggtgcctggtgtcctgctggtagcgtgtttcctaaagaagaagagtacttgcaggtggatctgcaacgactccatctggtggccctggttggtacccaagggcgccatgccggcggactgggcaaggagttctctcggagttatagactgcgttacagtagagacggacgacgatggatgggatggaaagatcgatggggacaggaggtgatctctggaaatgaggacccagaaggcgtggtcttgaaggatttgggccctcccatggtggccagattagtaagattctacccacgagcagatcgggtgatgagcgtgtgtcttagagtggagctatacggatgcctctggcgcggggagtggctgtcctttctggggatctgtttcttatcgaggggtctcgaaggcggcgaatgcggggaatgggcaagccgcattcctagtcccgccggcaaactgtccctgtag

SEQ ID NO: 80016 - DNA, 756 bp, Artificial Sequence
  derived and/or modified sequence
atgccccatctggcctccctgttcaccgcatcctcgagatgctgtcctcacccccttagaccagaaggctccggcgcaatggggcccgaggcattatccagcctattactgttgctactcgttgcctctggcgatgctgacatgaagggtcactttgacccagctaagtgccgctacgctctggggatgcaggaccgtacaattcccgactcagatatttccgctagctcctcatggagtgacagcacagctgcccgtcattctaggctcgagtcctcagacggcgatggggcgtggtgtcccgccgggagcgtgtttcccaaagaagaagaatatttacaggtggaccttcagcgcctccatctggtggccctagttggaacccaaggccgccatgccgggggactcggaaaggagttttcaagaagctacagactccgctatagccgcgatgggagacgctggatgggatggaaggaccgatggggacaggaagtgatctctgggaacgaggaccctgaaggagtggttttgaaagatttgggccctccaatggtggctagactggtgcgcttttacccccgcgccgaccgtgtgatgagcgtatgcttgagagtggaattgtatggatgtttgtggaggggcgagtggctgtccttcttagggatttgctttctgagccgcggtctggagggtggagaatgtggcgaatgggctagtcgcatcccttcgcctgctgggaaactctcactttag

SEQ ID NO: 80017 - DNA, 756 bp, Artificial Sequence
  derived and/or modified sequence
atgccccacctcgcctctctgttcaccgcctccagtcgttgttgccctcacccgctgagaccagaaggcagtggtgccatgggaccagaagccctcagttccctgcttctgctcctacttgttgcttcaggcgatgccgacatgaaaggacactttgaccccgccaagtgccgatacgcactaggcatgcaggaccgcactattccggactctgatatatccgcgtctagctcttggagcgattctacagcggctcgccatagtcgactggagagtagcgatggtgacggggcttggtgccctgccggaagcgtttttcctaaggaggaagagtacttacaggttgaccttcagcgcctgcacttggttgcattggtaggaactcaaggacgtcacgccggaggactcggcaaggagttcagtaggagctaccgattgcggtacagccgcgacggacgccgttggatgggctggaaggacaggtggggccaggaagtgatctcaggcaacgaagaccctgaaggagttgtcctcaaagacttggggcctccaatggtcgcgagactcgttcgattctatccccgagcggaccgtgtgatgtccgtgtgtttaagagtggaactgtacggctgcctgtggaggggcgaatggctaagcttcttgggaatatgttttttgtctagggggcttgaaggcggggaatgcggtgagtgggcttctcgcataccatctccggctgggaagttgagtttgtag

SEQ ID NO: 80018 - DNA, 2685 bp, Artificial Sequence
  derived and/or modified sequence
atgtcgttgcccaggtgttgcccccatccattacgacctgagggttccggtgcaatgggaccagaagcattgagtagtctgctgcttttactgctggtggcatctggggatgcggatatgaaaggccacttcgatccggccaaatgtcggtatgccctggggatgcaggaccgtaccattccagacagcgatatcagtgcatctagcagctggtctgacagcactgcagcgcggcatagtcgactggagagctcagacggagacggtgcttggtgccctgccggcagcgtcttcccaaaagaagaggagtatcttcaggtagaccttcagcggctgcacctcgtagcactcgtggggactcagggccggcacgctggcggcctcggcaaagagtttagtagatcttaccgcctgaggtatagcagagatggccggaggtggatgggctggaaagaccgctgggggcaggaagtgatttctgggaatgaagatcctgagggagttgtgcttaaagacctgggtccacccatggtagccagacttgtgaggttttacccaagagcagaccgggtgatgagcgtctgcctacgtgttgagctgtatgggtgcctgtggagggacggtctgctgagttatactgcacccgtgggccagacgatgtacttatctgaagccgtttatcttaatgacagtacatacgatggtcataccgtgggcggcttgcagtacggaggtctgggacaactcgccgacggcgtcgtgggtctcgatgactttcgcaaaagtcaagagttgagggtgtggcctgggtacgactatgttggatggtctaaccacagtttttctagcggttatgtggagatggaatttgagtttgaccgcttacgagcctttcaagcaatgcaggtgcactgtaacaacatgcatactctcggggcccgactcccaggaggggtggagtgtcgtttccgcagagggcccgctatggcctgggaaggggagcccatgcggcacaatctcggcggcaacctgggggatcctagggcccgggctgtgtccgtccctctaggtgggagagtcgcaaggttccttcagtgtcggtttcttttcgcaggaccttggctgttgttctccgagataagcttcatttccgatgtggtgaataattcgtcccctgccctcggcggcacatttccacctgccccatggtggcctccgggtccacccccaaccaacttcagcagcctggagctcgaacctaggggtcagcagcccgtcgccaaagctgagggcagtcctaccgctattctgataggttgtctcgttgctatcattttgctgctactgctgataatcgctctcatgctctggagactgcactggaggaggcttctctctaaggctgaaaggcgagtcctggaggaagaactgacggtccacttgtctgtgcccggggacactattctgattaataataggcctggaccaagagaacccccaccataccaagaaccccgtcctaggggcaatccccctcattcagcaccgtgcgtcccaaacggctctgcctatagcggtgattacatggaaccggagaagcccggcgcccccctgctcccaccacccccccagaacagtgtcccgcattatgcagaagcggatatagttactcttcagggtgtgaccggtggtaacacgtatgctgtgccagcactcccaccaggggccgtgggtgacggcccccctcgggtggactttcctcggtcccgtctacgcttcaaagaaaagttgggtgaaggtcagtttggcgaagtccacctttgtgaagtcgattctccacaggaccttgttagcctcgatttccccctaaacgtgcgaaaaggccaccccctgttggtcgccgtgaaaattcttaggcccgatgcgaccaagaacgcaaggaatgatttcctgaaagaagttaagatcatgagccggttaaaggaccccaatatcatcaggctacttggagtttgcgtgcaggatgatcccctttgtatgatcaccgactacatggaaaatggcgacctcaaccagtttctgtcagcacatcagctcgaagataaagctgctgaaggggcccccggggacggccaagccgcccagggacccactatttcatatcctatgctgttacacgtagcagctcagattgcatcggggatgcgatacctggctacattgaatttcgtgcacagggatcttgcaacccggaactgtctggtgggtgaaaatttcactataaagattgctgacttcggtatgtctcggaacctgtatgccggcgactattaccgagtgcagggtcgtgctgtgctgccaataagatggatggcctgggagtgcattctcatgggaaagtttacaaccgcatctgatgtgtgggcatttggcgtaacactttgggaagtgctgatgctctgtagggcccagccgtttgggcagctgaccgatgagcaggttatcgaaaacgctggagagttctttcgggaccagggcaggcaggtgtatctgtcgcgtcccccagcatgtccccagggactctatgaactcatgttgaggtgctggagtcgggagagcgagcagcgaccgccttttagccaactgcatagattccttgccgaggacgccctgaataccgtgtag

SEQ ID NO: 80019 - DNA, 2631 bp, Artificial Sequence
  derived and/or modified sequence
atgggacctgaggcactgtcgtcccttctccttctattactggtcgcctctggagatgctgatatgaagggtcactttgacccagctaagtgccgatatgccctgggcatgcaggatcggactatccctgattcggacataagcgcatcttctagctggtccgactccacagctgctagacattcgagactagagtcttctgatggtgatggcgcctggtgtcccgccggtagcgtgttcccaaaggaagaagaatacctccaagtcgacttgcaaagattacaccttgtcgccctggtcggaacccaaggaaggcatgctggcggtctcggtaaagagttttctagatcttacagattaaggtactccagagacggacgtcgatggatgggatggaaagacagatggggacaggaagttatctccggcaatgaagacccagaaggcgttgttctgaaagacttgggtcccccaatggtcgctcggttagtacgtttttacccccgggcggatcgtgttatgagcgtttgtcttcgggtggagctatacgggtgcctttggcgcgatggcttactttcatatacagcgcccgtggggcagacaatgtacctatccgaagctgtttacctcaacgactcaacgtacgacggacatacggtcgggggcctccagtacggcggccttgggcaattggccgatggcgtggtcggtctcgacgactttcgcaaatcccaagaactgcgcgtttggccaggatatgactatgtaggctggtctaaccactccttttcatcaggttatgtggagatggagttcgagttcgatagactgagagcatttcaagcaatgcaagttcattgcaacaatatgcacactctgggtgcccgccttccaggaggcgtagaatgtcgattcagacggggtccagctatggcctgggaaggagagccaatgcgacacaacttaggcggcaatttgggggacccgagagcacgggccgtgagtgtgccactcggtggaagagttgccagatttctgcagtgtaggtttttgttcgctggtccatggctcctgttctccgaaatatctttcatcagtgacgtggtaaacaactcctctccagctcttggaggtacctttccccctgctccttggtggcccccgggccctcctccaacaaacttttcatcactggaattggaaccgcgaggtcagcaaccagttgcaaaagctgaaggatcacccaccgctatcctgattgggtgcttagttgccattattctgctcctgttactgatcatagccctgatgctgtggcgccttcactggagaagactccttagcaaagccgagcggcgtgtgctcgaagaagaactcaccgttcatctctcagtcccgggtgataccattcttattaacaacagacccggccctagagaaccacctccataccaagaaccacgacctcgggggaacccgcctcattcagcgccatgtgtacctaacggtagtgcttacagcggagattatatggaacccgagaaaccaggggcccctttgctcccacctccaccccagaacagcgttcctcattatgcagaggcagatatagtgacacttcaaggtgtgactggcggaaacacatatgccgtgcccgccttaccacccggcgcagtaggagacggccctccaagggtggatttccctcgctccagactcaggttcaaggaaaagttgggtgagggtcagttcggcgaagtccatctttgtgaagtcgactcccctcaggaccttgtctccttggacttccctctgaatgtgaggaaagggcacccactcctcgtagcagtcaaaattctcagacccgacgccactaaaaatgcacggaatgactttttgaaagaagtgaaaattatgtcaagactcaaagacccaaacatcattagacttctgggagtgtgcgtccaggatgaccccctgtgcatgatcacagattacatggagaatggagacttgaatcagtttctgtccgcccatcagctggaagacaaagccgcagaaggagcgcccggagatggacaggcagcgcagggcccaacgatctcttaccccatgcttttgcacgtggctgctcagattgccagcggcatgcgttatctcgcaaccctcaacttcgtgcacagagaccttgctactaggaattgtctagtgggggaaaattttactatcaaaatcgcagactttggaatgtcaaggaacctgtacgccggtgattactatcgagttcaaggaagagccgttcttccaattaggtggatggcttgggaatgtatcctcatgggcaagttcactaccgctagtgacgtgtgggcgttcggggttactctctgggaggttctcatgttgtgtcgggcccagccatttggccaacttacagacgaacaagtgatcgagaacgctggggaattcttccgagatcagggcaggcaggtttacttatctcggccccccgcatgtccccagggattgtacgaactgatgctgagatgctggtcaagagaatccgaacagcgaccccccttttcccagctacataggtttctggcagaggatgcattgaataccgtgtag

SEQ ID NO: 80020 - DNA, 560 bp, Artificial Sequence
  derived and/or modified sequence
cgttggaacgtccttgggcttctgaactagtgcccatgtgtgcctcggcctttcccaagggccagcttcttcctgagatgctgcccccacccccttaggcccgagggatcaggagctatgggaccagaggccctgtcatctttactgctgctgctcttggtggcaagtggagatgctgacatgaagggacattttgatcctgccaagtgccgctatgccctgggcatgcaggaccggaccatcccagacagtgacatctctgcttccagctcctggtcagattccactgccgcccgccacagcaggttggagagcagtgacggggatggggcctggtgccccgcagggtcggtgtttcccaaggaggaggagtacttgcaggtggatctacaacgactccacctggtggctctggtgggcacccagggacggcatgccgggggcctgggcaaggagttctcccggagctaccggctgcgttactcccgggatggtcgccgctggatgggctggaaggaccgctggggtcaggaggtgatctcaggcaatgaggaccctga

SEQ ID NO: 80021 - DNA, 3720 bp, Artificial Sequence
  derived and/or modified sequence
gtcttcccctcgtgggccctgagcgggactgcagccagccccctggggcgccagctttggaggcccccgacagctgctctcgggagccgcctcccgacacccgagccccgccggcgcctcccgctcccggctcccggctcctggctccctccgcctcccccgcccctcgccccgccgccgaagaggccccgctcccgggtcggacgcctgggtctgccgggaagagcgatgagaggtgtctgaaggtggctattcactgagcgatggggttggacttgaaggaatgccaagagatgctgcccccacccccttaggcccgagggatcaggagctatgggaccagaggccctgtcatctttactgctgctgctcttggtggcaagtggagatgctgacatgaagggacattttgatcctgccaagtgccgctatgccctgggcatgcaggaccggaccatcccagacagtgacatctctgcttccagctcctggtcagattccactgccgcccgccacagcaggttggagagcagtgacggggatggggcctggtgccccgcagggtcggtgtttcccaaggaggaggagtacttgcaggtggatctacaacgactgcacctggtggctctggtgggcacccagggacggcatgccgggggcctgggcaaggagttctcccggagctaccggctgcgttactcccgggatggtcgccgctggatgggctggaaggaccgctggggtcaggaggtgatctcaggcaatgaggaccctgagggagtggtgctgaaggaccttgggccccccatggttgcccgactggttcgcttctacccccgggctgaccgggtcatgagcgtctgtctgcgggtagagctctatggctgcctctggagggactgcagtatgggggtctgggccagctggcagatggtgtggtggggctggatgactttaggaagagtcaggagctgcgggtctggccaggctatgactatgtgggatggagcaaccacagcttctccagtggctatgtggagatggagtttgagtttgaccggctgagggccttccaggctatgcaggtccactgtaacaacatgcacacgctgggagcccgtctgcctggcggggtggaatgtcgcttccggcgtggccctgccatggcctgggagggggagcccatgcgccacaacctagggggcaacctgggggaccccagagcccgggctgtctcagtgccccttggcggccgtgtggctcgctttctgcagtgccgcttcctctttgcggggccctggttactcttcagcgaaatctccttcatctctgatgtggtgaacaattcctctccggcactgggaggcaccttcccgccagccccctggtggccgcctggcccacctcccaccaacttcagcagcttggagctggagcccagaggccagcagcccgtggccaaggccgaggggagcccgaccgccatcctcatcggctgcctggtggccatcatcctgctcctgctgctcatcattgccctcatgctctggcggctgcactggcgcaggctcctcagcaaggctgaacggagggtgttggaagaggagctgacggttcacctctctgtccctggggacactatcctcatcaacaaccgcccaggtcctagagagccacccccgtaccaggagccccggcctcgtgggaatccgccccactccgctccctgtgtccccaatggctctgcctacagtggggactatatggagcctgagaagccaggcgccccgcttctgcccccacctccccagaacagcgtcccccattatgccgaggctgacattgttaccctgcagggcgtcaccgggggcaacacctatgctgtgcctgcactgcccccaggggcagtcggggatgggccccccagagtggatttccctcgatctcgactccgcttcaaggagaagcttggcgagggccagtttggggaggtgcacctgtgtgaggtcgacagccctcaagatctggttagtcttgatttcccccttaatgtgcgtaagggacaccctttgctggtagctgtcaagatcttacggccagatgccaccaagaatgccaggaatgatttcctgaaagaggtgaagatcatgtcgaggctcaaggacccaaacatcattcggctgctgggcgtgtgtgtgcaggacgaccccctctgcatgattactgactacatggagaacggcgacctcaaccagttcctcagtgcccaccagctggaggacaaggcagccgagggggcccctggggacgggcaggctgcgcaggggcccaccatcagctacccaatgctgctgcatgtggcagcccagatcgcctccggcatgcgctatctggccacactcaactttgtacatcgggacctggccacgcggaactgcctagttggggaaaatttcaccatcaaaatcgcagactttggcatgagccggaacctctatgctggggactattaccgtgtgcagggccgggcagtgctgcccatccgctggatggcctgggagtgcatcctcatggggaagttcacgactgcgagtgacgtgtgggcctttggtgtgaccctgtgggaggtgctgatgctctgtagggcccagccctttgggcagctcaccgacgagcaggtcatcgagaacgcgggggagttcttccgggaccagggccggcaggtgtacctgtcccggccgcctgcctgcccgcagggcctatatgagctgatgcttcggtgctggagccgggagtctgagcagcgaccacccttttcccagctgcatcggttcctggcagaggatgcactcaacacggtgtgaatcacacatccagctgcccctccctcagggagcgatccaggggaagccagtgacactaaaacaagaggacacaatggcacctctgcccttcccctcccgacagcccatcacctctaatagaggcagtgagactgcaggtgggctgggcccacccagggagctgatgccccttctccccttcctggacacactctcatgtccccttcctgttcttccttcctagaagcccctgtcgcccacccagctggtcctgtggatgggatcctctccaccctcctctagccatcccttggggaagggtggggagaaatataggatagacactggacatggcccattggagcacctgggccccactggacaacactgattcctggagaggtggctgcgcccccagcttctctctccctgtcacacactggaccccactggctgagaatctgggggtgaggaggacaagaaggagaggaaaatgtttccttgtgcctgctcctgtacttgtcctcagcttgggcttcttcctcctccatcacctgaaacactggacctgggggtagccccgccccagccctcagtcacccccacttcccacttgcagtcttgtagctagaacttctctaagcctatacgtttctgtggagtaaatattgggattggggggaaagagggagcaacggcccatagccttggggttggacatctctagtgtagctgccacattgatttttctataatcacttggggtttgtacatttttggggggagagacacagatttttacactaatatatggacctagcttgaggcaattttaatcccctgcactaggcaggtaataataaaggttgagttttcc

SEQ ID NO: 80022 - DNA, 2631 bp, Artificial Sequence
  derived and/or modified sequence
atgggacccgaagcactgtcttccctcctactgcttttgttagtagcttccggcgacgcagacatgaagggtcatttcgacccagccaaatgcaggtacgccttgggcatgcaggatcgcacgatcccagatagcgacatttcagcaagtagcagctggtctgattccacagccgcccgacactcgagactggagtcgtcagacggcgatggagcttggtgcccagctggatccgtgtttccaaaagaggaagagtaccttcaagtcgacctgcaacgattgcacctggtggctctcgttgggacccaaggcagacatgctggcggactaggtaaggaattttcacgaagttatagactgaggtatagtcgggatggcagacggtggatgggatggaaagatcggtggggccaggaagtgatctccggtaacgaagaccctgaaggagtggtcttgaaggacctgggcccacctatggtggcccggcttgtcagattctatccaagagcggacagggtgatgagcgtgtgcctacgagtcgagctctatggctgtctttggcgagacggacttctaagctatactgcgcctgtcggacagaccatgtatctatcggaggcagtttatctcaacgatagtacatatgatggtcataccgtgggtggattgcaatacggcggtttgggacagttggccgacggcgtggtaggtctagatgacttcagaaaaagccaagagttacgcgtttggcccggctatgattatgttggttggtcaaatcacagcttctcatcagggtacgtggagatggagttcgagtttgataggctccgcgctttccaggccatgcaggtgcactgcaataacatgcatactcttggggcccgactgccagggggcgtggaatgcaggtttagacgcggtcccgccatggcctgggagggcgaacctatgcggcataacctgggcggcaatttgggcgatcctcgggcccgggctgtaagtgtgcccctaggaggacgtgtggctcggtttctgcagtgccggtttctttttgctggcccttggctcctcttctccgaaatctctttcatctccgatgtcgtcaataactcctccccagccctcggaggtacgtttccacccgcaccttggtggccccccggcccaccccccacaaacttcagtagtttggaactcgaaccgagaggccaacagcctgtagcaaaggccgagggcagtcctacagctattctgatcgggtgtcttgttgccatcatcttgctcttgctgctgattattgctttgatgctctggcgcctgcactggaggagacttctgagcaaagcagaaaggagagtgctcgaggaggaattgaccgtgcacctcagtgtgccaggtgacactatcctgataaacaaccgtcctggccccagagagcccccgccctaccaggaaccacgacctagaggcaacccaccccactccgcaccatgtgtccccaatggctctgcgtactctggcgactatatggaacctgagaagcccggcgcccctttgttaccccccccaccacagaattctgtcccgcattacgcagaggccgacattgtgacccttcagggagttaccggtgggaacacctatgccgtaccagccttaccaccaggagccgttggggacgggccgcctcgtgtggacttccccagaagccgactgcgtttcaaagaaaaacttggcgaaggacagtttggcgaagtgcatctttgtgaagttgatagcccgcaagacctggtgagccttgacttcccccttaacgttcggaaaggtcaccctctcctggtcgccgtgaaaattttacgccccgatgccacaaaaaacgccagaaacgatttcctaaaagaagtgaaaataatgtccagactgaaagaccccaatatcatccgattgttgggtgtgtgtgtgcaggatgaccctttgtgtatgattaccgattatatggagaatggcgatctgaatcagtttctttccgcccatcagctggaggacaaagcggccgaaggagccccgggagatgggcaagctgctcagggcccaacaatttcatatccgatgctactgcatgtagcggcccaaattgcctctggcatgaggtatctagcaacactgaacttcgttcatcgggatctggccaccagaaattgtctcgtgggtgagaacttcactatcaaaatcgcagacttcggaatgtccagaaacttatatgcaggagattactacagagtgcaaggaagagcggttctgccgataagatggatggcatgggagtgtatactcatgggaaaatttactactgctagcgacgtgtgggcttttggagttaccctgtgggaggtattaatgctctgtcgcgctcagccttttgggcagctcaccgacgagcaagttatcgagaacgctggagaattttttagagaccagggcagacaggtctatttatcacgtccacccgcctgtcctcagggcctgtacgagctcatgctccgctgttggtcgagggaaagcgaacagaggccaccattttcccaactgcacagattcctcgccgaggacgcgctgaacactgtttag

SEQ ID NO: 80023 - DNA, 2631 bp, Artificial Sequence
  derived and/or modified sequence
atgggacctgaggccctcagttctctcctgctgcttctgctggttgcctcaggtgacgccgatatgaaaggccattttgatcccgccaaatgtaggtacgcattggggatgcaagaccgaacaatccctgattctgatatttctgccagtagctcttggagtgacagcactgctgcccgccacagtcggctggagtcttcagatggtgacggcgcctggtgccccgcaggtagcgtgtttccaaaggaagaggaatacctgcaagttgatctgcagaggctacatcttgttgcactcgtggggacccagggacgtcacgcaggcggactaggaaaggagttttctcgcagctataggctgcggtatagtagggacggcagacgatggatgggctggaaagataggtgggggcaggaagtgatttcggggaacgaggatcctgaaggcgtggtgctaaaagatctgggacctcctatggtggctagactggttcggttctatccaagagccgaccgggtgatgtcagtgtgtcttcgcgtagagctgtatggatgtctgtggagagatgggttactctcatatacagctcctgtcggtcagacgatgtatctctcagaggctgtgtacttgaacgactcaacctacgacggccacaccgttggaggcttacaatatggcggtctgggacagctggccgacggcgtggtcggacttgatgactttaggaagagccaggagctgcgtgtttggcccggatacgattacgtaggatggagcaaccattcattcagcagtggctatgttgagatggaatttgagttcgatcgtcttagagcatttcaagcgatgcaggtccactgtaataacatgcatacccttggcgcgcgcttaccaggaggggttgaatgtcgatttagacgcggtcctgcaatggcctgggaaggtgagccaatgcggcataatttggggggtaacttgggcgaccctcgggctcgcgcagtaagcgttccgctgggtggcagggtagcccggttcttgcagtgcaggttcctgtttgctggtccctggctcctattcagtgaaatctctttcatctcagatgtggtcaataactctagccccgctcttggtggcacatttcctccagctccatggtggcccccgggccccccccctactaacttctcatccttagagctcgaacctcgcgggcagcagccagtggcaaaggccgaaggcagccccacagcgattctaatcggatgtctggtcgcaatcatcctcctgcttctccttatcattgccctcatgttatggagactccactggcgaaggctactgtccaaggcagagcgaagagtccttgaagaagaactaacagtacacctgagcgtgcccggtgatactatactcataaacaaccgccctggcccccgggaaccccccccttaccaagaaccgcgccctcggggaaatcctccacacagcgctccgtgcgtgcctaacggctctgcttattcaggcgactacatggaacccgaaaagccaggcgcccccctcctacccccaccaccgcaaaactctgtcccccactacgccgaggccgacattgtgacgttacagggtgtgaccggaggcaatacctatgccgttccagccttgccaccaggggccgtgggagacgggccacccagggtggactttcctcgctctagactgcgctttaaggagaagctgggagaaggtcaattcggagaagtccacctctgcgaagtggacagccctcaggatctggtcagtctggattttcccctcaacgtgagaaagggccacccactgctggtcgctgtaaaaatactgcgccctgatgctacaaaaaacgcccggaacgacttcctgaaagaagtaaagatcatgtcccgcctgaaagacccaaatatcatccgactcttaggcgtgtgtgtccaggacgaccctttatgcatgatcacagattatatggaaaacggcgacttgaaccagtttttgtccgcacatcagttagaagataaggctgctgaaggcgcccccggcgatggacaggctgcacaagggcctactatatcgtatcctatgttactacacgtggccgctcagatcgcctccggaatgcggtatctggctaccttgaattttgttcatcgggacctggcaactcggaactgccttgttggagaaaattttactataaaaattgctgacttcgggatgtcacggaacctctacgctggagattactatagagttcagggccgcgcagtcctgcccattcgctggatggcttgggagtgcattctgatgggaaagtttacaacagcgtcagacgtttgggcctttggcgtgacactctgggaggtgttaatgctgtgtagagcccagccttttggccagctgacggatgagcaagtcatcgaaaatgctggagaatttttccgagatcaaggacgccaggtatatctatcaaggccgccagcctgtccacagggactgtatgagcttatgctccggtgttggtccagagagtctgagcaacgtcctcctttttcccagctacaccgctttctcgccgaagacgccctaaataccgtatag

SEQ ID NO: 80024 - DNA, 2631 bp, Artificial Sequence
  derived and/or modified sequence
atggggccggaagctttgtcctctctactgctcttactactcgtggcgtctggtgatgccgacatgaagggacattttgaccctgcaaaatgtagatatgccctgggaatgcaggaccgaacgattccagactctgatatctcagcgtccagctcttggtctgattccactgccgcgcgacatagtcgcttggaaagctcagacggggacggcgcatggtgccccgccggatcagtctttccaaaggaggaagagtatctgcaggtagaccttcaacgccttcatttagtggccttagtggggactcaaggaaggcacgcaggaggtctaggcaaggaatttagtagatcatacaggttgaggtactcccgggatggtcgacgatggatgggttggaaagatcgatggggccaggaagtgatttccggcaacgaggatcccgaaggtgtggtgctgaaagatttgggaccccctatggtcgcccgcttagtgaggttctacccacgagccgatcgggtgatgtctgtctgcttgcgcgtggagttgtatggatgtttatggcgggatggtctcctttcttacacggcccccgtgggacagactatgtacttgagcgaggcagtatacctgaacgatagtacatacgacggccatacagtaggcggactgcaatatgggggcttgggccaactggcggatggcgtagtcggactggacgactttagaaaatcccaggaactccgggtttggccgggatacgattacgtgggatggagcaatcattccttcagttctggttacgttgaaatggaattcgagttcgacagactcagagccttccaagcgatgcaggtgcactgcaataacatgcacacacttggggcaagactaccaggcggcgtggaatgtagattccgaagaggtccggcaatggcctgggaaggggaacccatgagacacaatctcggaggaaatcttggggatcctagagcgcgggctgtgagcgtccctctgggcggccgcgtggcacgctttctgcagtgtcggtttttgttcgctggtccctggctcctgtttagtgaaatttcttttataagtgatgtggtgaacaatagcagccctgctcttggcggcacatttcctcctgcaccctggtggcccccaggtcccccccctaccaacttttctagtcttgagctagagccgagaggtcagcagccagtggcaaaggcagaaggaagccccacagccatcttaatcgggtgcctcgtcgccattattttgttgcttctcctgattattgccttgatgctctggcgcctacactggaggaggcttctgtccaaagctgagcgacgcgtgctagaggaagaactcacagtgcatcttagcgtgcccggcgacacaatcctgatcaataatcgtccaggcccacgcgaaccaccgccgtaccaggaaccccgtcctcgagggaacccacctcatagcgctccatgcgtgcccaatggcagtgcttactcaggggattatatggagcccgaaaagccaggggcccccctgcttccgcccccgcctcaaaactcagtcccccattatgcagaggccgatatcgtgacattacagggcgtcaccggtgggaatacgtatgcggtgcccgcgttacctccgggggcagtgggcgatggaccgccaagagtggactttcctaggtcaaggttgcgattcaaagagaagctcggagaaggtcaattcggcgaagtgcacctgtgtgaagtagattccccccaggatttggtgagtctcgatttcccactgaacgtcaggaaggggcacccattactggttgctgtgaagatactgagacctgacgccactaagaatgctcgcaatgactttttgaaagaggtaaaaatcatgtctaggctaaaagaccccaacatcatccgactcctcggtgtgtgtgtacaagatgatcccctctgcatgattaccgactatatggaaaacggcgacctcaaccaatttctgagtgctcaccagctggaggataaggctgctgagggggcaccaggggacggtcaagctgctcaaggccctacgatcagctatccaatgcttttacacgttgccgcccagattgcaagtggaatgagatacctggcaaccctaaactttgtgcaccgcgacttggctaccagaaactgcctggtgggagaaaactttaccatcaagatcgctgacttcggtatgtctaggaatttgtatgccggcgactactacagagtgcagggtagggctgtccttccgatcagatggatggcctgggagtgtattttgatgggcaaattcaccacggctagtgacgtatgggcctttggcgtcacgttatgggaggtcctgatgctttgcagagcccagccctttggacagttaaccgatgagcaagtaatagaaaatgctggcgagttctttcgagaccagggccggcaggtgtatctgagtcggccgcccgcctgccctcaaggcctgtacgagttaatgctgagatgttggtcgagggaatcagagcaacgcccccctttctcccagctccatcgcttcctcgcagaagacgcactgaatacagtgtag

SEQ ID NO: 80025 - DNA, 3832 bp, Artificial Sequence
  derived and/or modified sequence
ggctttaggaagttatttaactgatctctgccctagtttcttcatgtgttaaatatggatagtaatagtatctaccttatgaagtgactgtgaagataaaattatggattctgtttaagggtttaggccagtgtctggcacaggggaagcattctaaaaatatagctgatgctgttaaacaatgactgttgttgttgttttactgttattatccccaaagcggcccattctgtctgttgctgtcagctatgactcagtcccctgattaacttacgcaccacccattttatcccctgcagagatgctgcccccacccccttaggcccgagggatcaggagctatgggaccagaggccctgtcatctttactgctgctgctcttggtggcaagtggagatgctgacatgaagggacattttgatcctgccaagtgccgctatgccctgggcatgcaggaccggaccatcccagacagtgacatctctgcttccagctcctggtcagattccactgccgcccgccacagcaggttggagagcagtgacggggatggggcctggtgccccgcagggtcggtgtttcccaaggaggaggagtacttgcaggtggatctacaacgactccacctggtggctctggtgggcacccagggacggcatgccgggggcctgggcaaggagttctcccggagctaccggctgcgttactcccgggatggtcgccgctggatgggctggaaggaccgctggggtcaggaggtgatctcaggcaatgaggaccctgagggagtggtgctgaaggaccttgggccccccatggttgcccgactggttcgcttctacccccgggctgaccgggtcatgagtgtctgtctgcgggtagagctctatggctgcctctggagggatggactcctgtcttacaccgcccctgtggggcagacaatgtatttatctgaggccgtgtacctcaacgactccacctatgacggacataccgtgggcggactgcagtatgggggtctgggccagctggcagatggtgtggtggggctggatgactttaggaagagtcaggagctgcgggtctggccaggctatgactatgtgggatggagcaaccacagcttctccagtggctatgtggagatggagtttgagtttgaccggctgagggccttccaggctatgcaggtccactgtaacaacatgcacacgctgggagcccgtctgcctggcggggtggaatgtcgcttccggcgtggccctgccatggcctgggagggggagcccatgcgccacaacctagggggcaacctgggggaccccagagcccgggctgtctcagtgccccttggcggccgtgtggctcgctttctgcagtgccgcttcctctttgcggggccctggttactcttcagcgaaatctccttcatctctgatgtggtgaacaattcctctccggcactgggaggcaccttcccgccagccccctggtggccgcctggcccacctcccaccaacttcagcagcttggagctggagcccagaggccagcagcccgtggccaaggccgaggggagcccgaccgccatcctcatcggctgcctggtggccatcatcctgctcctgctgctcatcattgccctcatgctctggcggctgcactggcgcaggctcctcagcaaggctgaacggagggtgttggaagaggagctgacggttcacctctctgtccctggggacactatcctcatcaacaaccgcccaggtcctagagagccacccccgtaccaggagccccggcctcgtgggaatccgccccactccgctccctgtgtccccaatggctctgcctacagtggggactatatggagcctgagaagccaggcgccccgcttctgcccccacctccccagaacagcgtcccccattatgccgaggctgacattgttaccctgcagggcgtcaccgggggcaacacctatgctgtgcctgcactgcccccaggggcagtcggggatgggccccccagagtggatttccctcgatctcgactccgcttcaaggagaagcttggcgagggccagtttggggaggtgcacctgtgtgaggtcgacagccctcaagatctggtcagtcttgatttcccccttaatgtgcgtaagggacaccctttgctggtagctgtcaagatcttacggccagatgccaccaagaatgccaggaatgatttcctgaaagaggtgaagatcatgtcgaggctcaaggaccccaacatcattcggctgctgggcgtgtgtgtgcaggacgaccccctctgcatgattactgactacatggagaacggcgacctcaaccagttcctcagtgcccaccagctggaggacaaggcagccgagggggcccctggggacgggcaggctgcgcaggggcccaccatcagctacccaatgctgctgcatgtggcagcccagatcgcctccggcatgcgctatctggccacactcaactttgtacatcgggacctggccacgcggaactgcctagttggggaaaatttcaccatcaaaatcgcagactttggcatgagccggaacctctatgctggggactattaccgtgtgcagggccgggcagtgctgcccatccgctggatggcctgggagtgcatcctcatggggaagttcacgactgcgagtgacgtgtgggcctttggtgtgaccctgtgggaggtgctgatgctctgtagggcccagccctttgggcagctcaccgacgagcaggtcatcgagaacgcgggggagttcttccgggaccagggccggcaggtgtacctgtcccggccgcctgcctgcccgcagggcctatatgagctgatgcttcggtgctggagccgggagtctgagcagcgaccacccttttcccagctgcatcggttcctggcagaggatgcactcaacacggtgtgaatcacacatccagctgcccctccctcagggagtgatccaggggaagccagtgacactaaaacaagaggacacaatggcacctctgcccttcccctcccgacagcccatcacctctaatagaggcagtgagactgcaggtgggctgggcccacccagggagctgatgccccttctccccttcctggacacactctcatgtccccttcctgttcttccttcctagaagcccctgtcgcccacccagctggtcctgtggatgggatcctctccaccctcctctagccatcccttggggaagggtggggagaaatataggatagacactggacatggcccattggagcacctgggccccactggacaacactgattcctggagaggtggctgcgcccccagcttctctctccctgtcacacactggaccccactggctgagaatctgggggtgaggaggacaagaaggagaggaaaatgtttccttgtgcctgctcctgtacttgtcctcagcttgggcttcttcctcctccatcacctgaaacactggacctgggggtagccccgccccagccctcagtcacccccacttcccacctgcagtcttgtagctagaacttctctaagcctatacgtttctgtggagtaaatattgggattggggggaaagagggagcaacggcccatagccttggggttggacatctctagtgtagctgccacattgatttttctataatcacttggggtttgtacatttttggggggagagacacagatttttacactaatatatggacctagcttgaggcaattttaatcccctgcactaggcaggtaataataaaggttgagttttccacaa

SEQ ID NO: 80026 - DNA, 3942 bp, Artificial Sequence
  derived and/or modified sequence
agattccccagctgctgttctctggaggggttcctggggcggagatgtgcagtggagcgagaacttcctgtgaccgtgacattgtctaggtggaaccgatcccagaagtaggaggggcgtcttcccctcgtgggccctgagcgggactgcagccagccccctggggcgccagctttggaggcccccgacagctgctctcgggagccgcctcccgacacccgagccccgccggcgcctcccgctcccggctcccggctcctggctccctccgcctcccccgcccctcgccccgccgccgaagaggccccgctcccgggtcggacgcctgggtctgccgggaagagcgatgagaggtgtctgaaggtggctattcactgagcgatggggttggacttgaaggaatgccaagagatgctgcccccacccccttaggcccgagggatcaggagctatgggaccagaggccctgtcatctttactgctgctgctcttggtggcaagtggagatgctgacatgaagggacattttgatcctgccaagtgccgctatgccctgggcatgcaggaccggaccatcccagacagtgacatctctgcttccagctcctggtcagattccactgccgcccgccacagcaggttggagagcagtgacggggatggggcctggtgccccgcagggtcggtgtttcccaaggaggaggagtacttgcaggtggatctacaacgactgcacctggtggctctggtgggcacccagggacggcatgccgggggcctgggcaaggagttctcccggagctaccggctgcgttactcccgggatggtcgccgctggatgggctggaaggaccgctggggtcaggaggtgatctcaggcaatgaggaccctgagggagtggtgctgaaggaccttgggccccccatggttgcccgactggttcgcttctacccccgggctgaccgggtcatgagcgtctgtctgcgggtagagctctatggctgcctctggagggatggactcctgtcttacaccgcccctgtggggcagacaatgtatttatctgaggccgtgtacctcaacgactccacctatgacggacataccgtgggcggactgcagtatgggggtctgggccagctggcagatggtgtggtggggctggatgactttaggaagagtcaggagctgcgggtctggccaggctatgactatgtgggatggagcaaccacagcttctccagtggctatgtggagatggagtttgagtttgaccggctgagggccttccaggctatgcaggtccactgtaacaacatgcacacgctgggagcccgtctgcctggcggggtggaatgtcgcttccggcgtggccctgccatggcctgggagggggagcccatgcgccacaacctagggggcaacctgggggaccccagagcccgggctgtctcagtgccccttggcggccgtgtggctcgctttctgcagtgccgcttcctctttgcggggccctggttactcttcagcgaaatctccttcatctctgatgtggtgaacaattcctctccggcactgggaggcaccttcccgccagccccctggtggccgcctggcccacctcccaccaacttcagcagcttggagctggagcccagaggccagcagcccgtggccaaggccgaggggagcccgaccgccatcctcatcggctgcctggtggccatcatcctgctcctgctgctcatcattgccctcatgctctggcggctgcactggcgcaggctcctcagcaaggctgaacggagggtgttggaagaggagctgacggttcacctctctgtccctggggacactatcctcatcaacaaccgcccaggtcctagagagccacccccgtaccaggagccccggcctcgtgggaatccgccccactccgctccctgtgtccccaatggctctgcctacagtggggactatatggagcctgagaagccaggcgccccgcttctgcccccacctccccagaacagcgtcccccattatgccgaggctgacattgttaccctgcagggcgtcaccgggggcaacacctatgctgtgcctgcactgcccccaggggcagtcggggatgggccccccagagtggatttccctcgatctcgactccgcttcaaggagaagcttggcgagggccagtttggggaggtgcacctgtgtgaggtcgacagccctcaagatctggttagtcttgatttcccccttaatgtgcgtaagggacaccctttgctggtagctgtcaagatcttacggccagatgccaccaagaatgccaggaatgatttcctgaaagaggtgaagatcatgtcgaggctcaaggacccaaacatcattcggctgctgggcgtgtgtgtgcaggacgaccccctctgcatgattactgactacatggagaacggcgacctcaaccagttcctcagtgcccaccagctggaggacaaggcagccgagggggcccctggggacgggcaggctgcgcaggggcccaccatcagctacccaatgctgctgcatgtggcagcccagatcgcctccggcatgcgctatctggccacactcaactttgtacatcgggacctggccacgcggaactgcctagttggggaaaatttcaccatcaaaatcgcagactttggcatgagccggaacctctatgctggggactattaccgtgtgcagggccgggcagtgctgcccatccgctggatggcctgggagtgcatcctcatggggaagttcacgactgcgagtgacgtgtgggcctttggtgtgaccctgtgggaggtgctgatgctctgtagggcccagccctttgggcagctcaccgacgagcaggtcatcgagaacgcgggggagttcttccgggaccagggccggcaggtgtacctgtcccggccgcctgcctgcccgcagggcctatatgagctgatgcttcggtgctggagccgggagtctgagcagcgaccacccttttcccagctgcatcggttcctggcagaggatgcactcaacacggtgtgaatcacacatccagctgcccctccctcagggagcgatccaggggaagccagtgacactaaaacaagaggacacaatggcacctctgcccttcccctcccgacagcccatcacctctaatagaggcagtgagactgcaggtgggctgggcccacccagggagctgatgccccttctccccttcctggacacactctcatgtccccttcctgttcttccttcctagaagcccctgtcgcccacccagctggtcctgtggatgggatcctctccaccctcctctagccatcccttggggaagggtggggagaaatataggatagacactggacatggcccattggagcacctgggccccactggacaacactgattcctggagaggtggctgcgcccccagcttctctctccctgtcacacactggaccccactggctgagaatctgggggtgaggaggacaagaaggagaggaaaatgtttccttgtgcctgctcctgtacttgtcctcagcttgggcttcttcctcctccatcacctgaaacactggacctgggggtagccccgccccagccctcagtcacccccacttcccacttgcagtcttgtagctagaacttctctaagcctatacgtttctgtggagtaaatattgggattggggggaaagagggagcaacggcccatagccttggggttggacatctctagtgtagctgccacattgatttttctataatcacttggggtttgtacatttttggggggagagacacagatttttacactaatatatggacctagcttgaggcaattttaatcccctgcactaggcaggtaataataaaggttgagttttccacaa

SEQ ID NO: 80027 - DNA, 2631 bp, Artificial Sequence
  derived and/or modified sequence
atgggccccgaagccctgtcttctttgctcttgctcttgttggttgcgtcaggcgatgcagatatgaaaggtcatttcgatccagctaagtgcagatacgccctgggtatgcaagacagaacaatccccgacagcgatataagtgcctcaagttcttggtcggatagtactgccgcaaggcacagccggttagagtcatccgacggcgatggtgcatggtgcccagccggcagcgtgtttccaaaagaagaggaatatcttcaagttgacctgcagcgcctgcatctagtggctcttgtcggaactcagggccgccatgcgggcggtctcggaaaggagtttagtagatcatataggctgagatatagccgagatgggagaagatggatggggtggaaagatcgctggggacaggaagtgatctctggcaatgaggatccagagggtgtcgtgctaaaagatttaggcccgcctatggtagcaaggctggtccgattttaccctagggctgatcgggttatgagtgtctgcttgcgggtggaactgtacgggtgtctgtggcgagatggactgttgtcctacactgctcctgtaggacagaccatgtacctgtctgaagcagtctatctcaatgacagcacctacgacggccatacagttggcggcctgcagtacgggggactcggacaactggcggacggcgtcgtcggactcgacgatttcaggaaatctcaagagcttagggtgtggcctggttacgactacgttggctggtccaatcattccttttcttctggctacgtggagatggaatttgaatttgacagactgcgcgctttccaagcgatgcaagtccattgcaataacatgcacacgctcggagctagactcccgggaggcgttgaatgtcgtttccgcaggggacctgcaatggcatgggagggtgagcccatgcgtcacaacctcggcgggaaccttggagatcctcgcgcccgcgccgtttcagttccactcggaggccgtgttgctcgatttctgcagtgtcggtttctcttcgccgggccttggctgctgttctccgagatatccttcatttcagatgtggtcaacaactcttctcccgcactcggaggcacattccccccggccccatggtggccaccaggacctccgcccactaatttctcttctcttgagctggagcctagaggccagcagcccgtcgccaaggctgaaggatctcccaccgcaatattgatagggtgcttggtggccattatcctgctattgctgttgattatcgcccttatgttatggagacttcattggcgccgactgttgagcaaagccgagcggcgtgttctcgaggaagagctgaccgtccacctgtccgtccctggagacacaattctaattaacaacaggcctggcccccgcgaacccccaccctaccaggagccccgaccaagaggcaatccccctcactccgccccttgcgtgccaaatggctcagcatattcaggagactacatggagccagaaaaacccggggcacctttgctaccaccacccccacagaattccgtgccgcattacgccgaagcggatatagttactctacagggggtcacaggcggaaacacttatgctgtccccgccctcccccccggagctgtaggagatgggccgccacgggtagatttccctagaagcagactgagattcaaagaaaagctaggtgagggacagtttggcgaggtgcacttatgtgaagttgattcaccacaggacctagtgtctctggattttccacttaatgttagaaaaggccatcccctcttggttgccgttaagattctgagaccagacgcaaccaagaacgccaggaatgattttctaaaagaggtgaaaattatgagccggctcaaagacccaaatataatcagactgcttggcgtttgcgtacaggacgatcctctttgcatgatcactgactacatggagaatggagatttgaaccaattcctcagtgcccaccagctggaagacaaagccgctgagggcgccccaggcgatggtcaggccgcacagggtccaaccatcagctacccaatgctgctgcacgtggctgcccagatcgcatctggaatgaggtatctggcgacccttaactttgtgcaccgtgatctggcgacaagaaattgccttgttggagagaactttacaattaaaattgccgattttggaatgtctcgtaatctctatgctggggactactaccgagttcagggaagagcagtgctgcctattagatggatggcatgggaatgtattctcatggggaagttcacaacagcgtctgacgtatgggcatttggagtcacactgtgggaggtgctgatgctctgccgtgcgcaacctttcggccaactgactgatgaacaagtgatcgagaatgcaggggaattttttcgggatcaggggagacaggtctatctgagtcggcctcccgcctgtcctcagggcctttacgaactcatgctaagatgctggagcagagaatccgagcaacggcctccattctcacagcttcataggttcttagccgaagatgctttgaacactgtctag

SEQ ID NO: 80028 - DNA, 2631 bp, Artificial Sequence
  derived and/or modified sequence
atgggcccagaagcactctcatccctattactgctgttgttggtggcctccggagatgccgacatgaagggtcactttgatcctgctaaatgtcgctacgctctcggtatgcaggaccgaactattccggactcagatatctcagcgtcaagtagctggtcagatagcacggcagcccgccattcccgcctggaatcttctgacggcgatggcgcttggtgccctgcaggcagcgtgttccccaaagaggaagaatatctacaggtggatctccagcgtcttcatcttgtcgctctggttgggactcagggcagacacgccggagggctgggcaaagaattctcacggagttaccgcctaaggtatagccgggatggcaggagatggatggggtggaaagacagatggggacaggaagtgataagcggcaacgaagacccagaaggtgtcgtcctgaaggacttaggccctccaatggttgctaggttagtccgattttatcctcgcgccgaccgcgttatgagcgtgtgtctcagagtggagctatatggttgcttatggagagatggcctcttatcatatactgctcccgtgggccagaccatgtatctaagtgaggcagtttacctaaatgatagtacatacgatggtcataccgtgggcggccttcagtacggaggcttgggccaactggcagacggtgtagtgggtctggatgatttccgaaaaagtcaggagctgcgcgtgtggcctggatatgattatgtcggatggagcaatcactcattcagcagcggatacgtggagatggaatttgaatttgacaggctccgggcattccaagctatgcaagtgcattgcaacaacatgcatacactgggcgctaggctaccagggggggtcgaatgcagatttagaagaggtcccgcaatggcatgggaaggagaacccatgcgtcataacttggggggcaatctgggcgatccacgcgctagagccgtttccgtgccgctgggcggacgcgttgccagatttctccaatgccggtttttgttcgcgggcccatggctactgttcagcgaaattagtttcatctcagatgtggtcaataactctagcccagccctgggaggtacatttccccctgccccttggtggccaccaggaccgccaccaaccaattttagctctttggaattggagccccgcggccagcagcctgttgcaaaagcggaaggatcccctaccgccatactgatcggctgcctggtagccatcatcctcctgctgctgctgataatagcacttatgctctggcgattgcattggcgcagattgctatctaaagctgaaaggcgagtactagaagaggagctgaccgtgcacctgtccgtgcccggagacacaatcctgatcaataatagacctggcccaagagaacctcccccctaccaagagcctcgccctagaggtaatccgccccactctgcaccctgtgttccgaatggttccgcctatagcggggattatatggaacctgagaagccaggagcccctctcctgccccccccacctcagaactccgttccccattatgctgaagctgatatcgtgacccttcagggggtgactggcgggaatacttatgccgtaccagctctgcccccaggcgccgttggagatggacctccaagagtggatttcccgaggtctagattgagatttaaagagaaactcggagagggacagtttggcgaagtgcatctgtgtgaagttgacagtccccaggacttggtctctctcgacttccctcttaacgtacggaaaggtcatccactgcttgtagccgttaagattctgcgtccagacgccacaaaaaatgccaggaatgacttcctaaaggaggtaaaaatcatgtctaggctgaaggacccaaacatcatcagactgctgggagtgtgtgtgcaagacgaccctctgtgcatgattaccgattacatggaaaacggcgacctgaatcaatttctgtcagcacaccaactcgaagataaagccgccgaaggtgctccaggcgacggccaggccgctcagggccccactatttcttaccctatgcttttacatgtggcagcccaaatcgcaagcggcatgcgctacttggcaaccctcaactttgtacaccgagatttagctactcgcaactgtctggtcggggaaaattttaccatcaaaattgcagattttggaatgtccagaaacctctatgctggcgactactaccgagtccagggccgcgcagttttacccatccggtggatggcctgggaatgtatactgatgggcaaatttacgaccgcatctgatgtctgggccttcggtgtaactttgtgggaggtcctgatgctgtgtcgcgcccagccttttggccaattgaccgatgaacaggtgatagagaatgccggcgaattttttagagatcagggaaggcaggtatacttgtctcggcccccagcctgtccccagggcttgtacgagttaatgcttcgatgttggagtcgcgaaagtgaacagagaccgcccttttcacagttgcatcggtttcttgctgaggatgcccttaataccgtctag

SEQ ID NO: 80029 - DNA, 2631 bp, Artificial Sequence
  derived and/or modified sequence
atggggcctgaggccctgagttctctgctgctgcttctcttggttgcatcaggagatgctgatatgaaaggccatttcgaccctgctaaatgtagatatgccctcggaatgcaagaccgtacgattcccgattctgatatttctgcttctagctcatggtccgacagtacagcggcgcgacactcccgacttgagtcttccgatggcgacggcgcgtggtgccctgcagggtcggtgtttcctaaggaagaagagtacctgcaggttgacctccaaagactccatctggtggcgctggtcggcacccaaggcagacacgctgggggtctgggaaaggaattttcccgaagctatagactgagatacagcagagacgggagacgctggatggggtggaaagacagatggggtcaggaggtgattagcggtaacgaggatcctgagggtgtcgtgctcaaagatctcggcccaccaatggtggcaagactcgttcggttctatccaagagccgatcgcgtaatgagcgtgtgtttgcgagtggagctctacggatgtctctggagggatggtttgctgagttacactgctcccgttggacaaactatgtacttgtccgaggcagtgtatctcaacgatagtacttacgacggtcacacggtaggaggtctgcagtacggaggattgggacagttggccgatggcgtggtgggtctggatgattttagaaaatctcaagaactgcgggtttggcctgggtacgattatgtgggctggtccaaccatagcttctctagtgggtacgtggaaatggagtttgagtttgacagactcagagcatttcaggctatgcaggtacattgtaataatatgcatacactaggggcccggttacctggaggcgtggaatgcagattcaggcggggacccgcaatggcctgggaaggagagcccatgaggcataatctgggaggaaatctgggtgatccacgcgctagggccgtgtcagtccccttgggaggccgcgtggccagattcctgcagtgtagattcctattcgccggcccttggcttcttttcagtgaaatttctttcatctccgatgtcgtcaataactcaagtcctgctctcggaggcacctttccccccgccccttggtggccgccagggcccccccctactaacttctcttctctggaactggaaccacggggacaacagccagttgctaaagccgaaggatcacccaccgctattcttattggttgccttgtcgcaattattctacttctcctcctaattatcgcactgatgctttggcggctgcactggcgtcggctgctgagcaaggctgagcgacgtgtgctagaagaggaactgactgtgcatctgtcagtgccaggagacacaattttgatcaataatagacccgggccaagagaacctccaccctatcaggaaccaagacccaggggtaatccccctcacagcgcgccttgtgttcctaacgggtcagcatactccggagactacatggaacctgagaagccaggagcccccttgctgcctcctcctccccaaaactcagtgcctcattatgccgaagccgatattgtaaccctgcagggcgtcaccggtggaaacacatacgccgtccccgctctaccaccgggcgccgtaggcgatggacccccgagagtcgatttccctcgttcacgactgcgtttcaaagagaagctgggagagggccagtttggcgaagtacatttgtgcgaagtggattccccccaggacctggttagcctcgattttccactaaatgtgcggaaggggcacccactgctggtcgctgtgaagattctcagaccagatgctacaaaaaatgcccggaacgattttctgaaagaggtcaagataatgagccgcctgaaagacccaaacataattaggcttcttggcgtgtgcgttcaggacgaccccctgtgtatgatcacagactacatggaaaacggagacctgaaccagtttctatcagctcaccagctagaggacaaggcagctgaaggagcacctggcgatggacaggcagcccagggccctaccattagctaccctatgcttctgcatgtagcagctcagatagcaagtggtatgagatacttagcaacgttgaacttcgtgcaccgagacctggctacaagaaactgtctggtgggagagaatttcaccattaagatagctgacttcggaatgtcaaggaatctgtacgcaggagactactaccgagtgcagggcagggctgtactgccaattagatggatggcttgggagtgcattcttatgggcaagtttaccacagcaagcgatgtgtgggctttcggcgtgactctgtgggaggtgctcatgctttgcagagctcaaccattcggtcagctgacggatgagcaagttatcgaaaacgctggcgagttcttcagggatcagggccgccaagtctacctctcccggccacctgcctgtccacagggactatacgagctgatgctccgttgttggtctcgagaatccgaacagcgcccacccttctctcaacttcatcgctttctggctgaagatgccttaaataccgtgtag

SEQ ID NO: 80030 - DNA, 2631 bp, Artificial Sequence
  derived and/or modified sequence
atgggccctgaggctctgagcagcttgctgctgctgcttctggttgcttctggagacgccgatatgaaagggcatttcgaccctgccaaatgccgttatgcactaggtatgcaagacagaaccattccagactccgacattagcgcaagttctagctggtctgacagcactgctgcccggcacagccgcctcgaatccagcgatggggatggggcctggtgtcccgctggatcagttttccccaaagaagaagaatacctgcaagttgacctacagcgcctccatctcgtggcactggtcggcacacaaggtaggcatgccggcggactgggcaaggaattcagccggtcttatcgacttaggtactccagagatgggagaagatggatgggttggaaagacagatggggacaggaggttatttctgggaacgaagatcccgagggtgtggtattgaaggacctggggcctccaatggttgctaggctggttcgtttctacccgagggcggatagggtgatgagtgtgtgcttaagggtcgaactgtacggatgcctttggcgcgatggtctcctgagctataccgctccagtgggacagacaatgtacctaagcgaggctgtttacctgaatgatagcacttacgatggccatacagtgggaggactccagtatggcggactaggccaactcgctgacggtgtcgtaggacttgatgattttcggaaatctcaggagctgcgtgtttggccaggctatgactatgtgggatggagtaatcacagtttttctagcggctatgtcgagatggagttcgaattcgacagacttagggcttttcaggctatgcaggtgcactgtaataatatgcacacactgggcgcaagattgccagggggagtcgaatgccggttccgaaggggcccagccatggcttgggaaggtgagccaatgagacataatcttggcggcaatctgggagacccgagggccagagcagtgagcgttccacttggaggaagagtcgccaggtttcttcagtgccgatttctgtttgcaggcccatggctcctttttagtgagatctccttcatatccgacgtcgtgaataattcgtcccccgccctcggagggacctttccacctgccccatggtggccaccaggccctccaccaacaaatttcagcagtttagaacttgaacctcgaggacagcagcccgttgcaaaagctgagggttcccccaccgctatactgatcggttgtctcgttgcaataatccttctgctactactcatcattgccctgatgctctggcgacttcactggcggcggctgttgagtaaagctgagagacgagtgcttgaggaagaactgaccgtgcacctgtccgttcccggcgataccatacttattaacaaccggcctgggcctcgcgagcccccaccctaccaggaacctagacccaggggaaatcctccacactctgcaccctgcgtacccaacggatctgcctattctggagactatatggaaccagagaaacccggtgccccgttgcttccccctcctccgcagaatagcgtgccccactatgctgaagccgatatagtgactctgcaaggcgtcaccggcggtaacacgtacgccgtgccagctctccctcccggtgcagtgggggatggaccccctagggttgactttcctcgtagcaggctgcggtttaaggagaaactaggtgagggccaatttggagaagtgcacttatgtgaagtcgactcccctcaggacctcgtttccctcgatttcccgttgaatgtgaggaaaggccatcctctgctcgttgccgtcaagattttacgcccagacgccaccaaaaatgctcgtaatgacttcctgaaagaggtgaaaattatgtcccggctcaaagaccccaacatcatccgactgttgggggtttgtgtacaagacgacccactctgtatgatcactgattacatggagaatggcgaccttaaccagtttttatcagcgcaccaacttgaagataaagccgccgaaggggcaccaggggacggtcaggctgcccaaggccccactatatcgtatcctatgctgctccacgtcgccgcacagatcgcgtcaggaatgaggtaccttgccaccctcaactttgtacatagagacttggcaacgcggaattgcctggtgggggagaactttacaattaaaatcgccgatttcggaatgagcagaaacctgtatgctggagactattaccgggttcaggggagagccgtgctgcccattaggtggatggcttgggagtgtatcttaatggggaaatttaccacagcaagcgacgtctgggctttcggagtgaccctgtgggaggttttaatgctgtgtcgggcccagccttttggccagctgaccgacgaacaggttattgagaatgcgggagagtttttccgggatcaaggtcgccaagtgtatctgagtcgcccccccgcttgcccacagggactttatgagcttatgctgagatgttggagtagagaaagcgagcagagaccaccttttagtcagctccacaggttcttagcagaagacgcattgaatacagtttag

SEQ ID NO: 80031 - DNA, 2631 bp, Artificial Sequence
  derived and/or modified sequence
atgggtcccgaggctcttagcagtctactgctgctgctgctcgtagcatcaggtgatgccgacatgaaagggcattttgatcccgccaaatgccgttacgcactgggcatgcaggaccgcactattcccgacagtgatattagcgcttcaagctcatggtcagatagcacagccgcccggcattcaagactggagtcatctgatggagacggggcctggtgccccgccggttcagtctttcctaaggaggaagaatatttgcaggtagatctccagcgcctccacttggtcgctttagtagggacacagggaagacatgcaggaggccttggcaaggagttctcccgttcctatcgcttaagatacagtcgagatggtcgcagatggatgggatggaaggatcgctggggtcaagaagtaatttctggcaacgaggacccagaaggagttgtgttgaaagacctgggcccccccatggttgctagactggtgcggttttatccgagggctgatcgcgtgatgtcagtttgcctgcgcgtggaactctatggttgcctttggcgcgacggactcctgagttacaccgctcctgtgggtcagacaatgtatctcagcgaagctgtatacttaaatgatagtacttacgacggccacacagtcggcggcttgcagtatggcggcttgggacagctggcggacggagtagtaggtctggatgattttcggaaatcacaagagctccgcgtgtggcccggctacgattatgtaggctggtctaatcattccttcagctctggttacgttgagatggaatttgagtttgatcgactccgcgcgtttcaggctatgcaggtccattgcaacaatatgcacacactgggtgctcgtcttcctggaggtgtagaatgtaggtttaggcggggccccgcaatggcctgggagggtgagcctatgaggcacaatctcgggggaaatttgggagatcccagagcaagggcagtatccgtgcctctaggagggcgggtcgcccggtttctacaatgtcgattcctcttcgcaggcccctggctcctgttttctgaaatttcctttattagtgatgtcgttaacaattcttccccagctcttggagggactttcccccccgccccctggtggccaccaggcccaccacccaccaatttctctagccttgagttagagcccagagggcagcagcccgtggctaaagcagaagggagtcctaccgcaattttaatcgggtgtttagtcgctatcatcttgctgctgttactcatcatcgcattaatgttatggagactccattggagaaggttactgtctaaagccgagagacgggtcctcgaggaagagctcaccgttcacttatcagttccaggagacacaattcttatcaacaaccggccaggcccaagggagccaccaccttatcaggagccaagaccacggggtaatcctcctcattccgcgccctgcgtgcctaatgggagcgcttatagtggcgactacatggaacctgaaaagccaggagcaccactgctgcctccacccccccaaaactctgtgccacattacgccgaggccgacatcgtgacactgcagggagtgacaggtgggaatacctacgcggttccagctctacccccaggcgcagttggcgatggaccaccgcgagtagacttccctcgatcccgcctcagattcaaagaaaagttgggagaaggccaattcggagaggttcacttatgcgaggttgactccccacaggacctcgtctcgctcgactttccattaaatgtgcgtaaaggacatcccttgcttgtcgccgttaaaattctgcgccccgacgctaccaaaaacgcccggaacgactttttaaaagaggtgaaaattatgagccggttgaaggaccccaatatcatacgcctactgggcgtatgtgtccaagacgatcctctgtgtatgattaccgactacatggagaatggcgacctgaaccagtttctcagcgctcaccagttagaagataaggcggccgaaggagccccaggagatggacaggctgcccagggcccaactataagttatccgatgctccttcacgtagcagcccaaattgcgagcgggatgcgctatttagcgacgctgaactttgtacatagggatttggcgactcgaaactgcctagttggggagaattttacaattaagattgctgacttcggaatgagcagaaatctctatgctggagactattacagggtgcagggcagagcagttttgcctattagatggatggcatgggaatgtattttaatgggcaagtttacaaccgctagtgatgtatgggcatttggcgtcactttgtgggaggtgctgatgttgtgccgagcccagccttttggtcagctaacagatgagcaggtaattgagaatgcaggagagttttttagagatcaaggacgccaggtctatttatccaggccacccgcctgccctcaaggtctgtacgaactgatgttgagatgttggtcacgggaatccgagcagcgtcctcctttctcacagctacaccgctttcttgccgaggatgcactaaatactgtgtag

SEQ ID NO: 80032 - DNA, 2631 bp, Artificial Sequence
  derived and/or modified sequence
atgggtcccgaagccctgtcctcgctactgctgctgctacttgtcgccagcggagacgccgatatgaaggggcattttgaccccgcaaagtgtcgttatgcactcggaatgcaggaccggacgatccccgatagcgacatatcagcctcctcatcgtggagcgactcaaccgccgccaggcactcgcgactcgaaagttctgatggagacggcgcatggtgtccagccggctcggtctttcccaaagaagaggaatatctccaagtggacctccagcgcttacatctcgttgcactcgtcggtactcagggaagacacgcaggtgggttggggaaggaattttcacggtcctacagactgaggtattctcgggatggaagaaggtggatgggctggaaagatcgatggggccaggaggtaatcagcggcaatgaggaccccgaaggggtggtgcttaaggatctgggtcccccaatggtggctaggctcgtaagattttaccctcgggctgaccgtgttatgagtgtctgcctgcgagtcgagctttacggatgtctatggagggacgggctgttaagctatactgctccggttggccagacaatgtatcttagtgaggcagtgtacctaaatgattcaacatatgacgggcacacggtcggaggattacaatatggtggactgggtcagctggccgacggtgttgttgggctcgacgattttaggaagagccaagaactaagggtgtggcctggctacgattacgtggggtggagcaatcattctttcagtagtggctacgtggagatggaatttgagttcgataggttaagggcattccaagcgatgcaggtacattgcaacaacatgcacaccctgggtgcacgactgcctgggggcgtcgagtgtcgctttcggcgtggaccagcaatggcatgggaaggagaaccaatgagacataaccttggcggtaacttaggtgacccaagagctcgtgcagtttcagttcctctgggggggcgggtggctcgtttcctacaatgtcgatttttgtttgccggcccatggttgcttttttctgagatttcttttatctctgacgtcgtgaataactcttccccagctctggggggaaccttccctcctgccccctggtggccaccgggccccccaccaaccaattttagtagtctggagttagagccccgaggccaacagcctgtagccaaggcggaggggagccctacggccattctgattggatgtcttgtcgcaattatcttgttactcctgcttataattgctctgatgctctggagactgcactggcggcggcttttgtcgaaggcagagaggagagtgctcgaagaggaacttaccgtgcacttatcagtccctggagatacgattctcatcaacaacaggccaggaccacgagaaccaccaccttatcaagaaccccgccctcgcggtaatcccccacactcagcgccttgtgtccccaatggtagcgcctattcaggagactacatggaacccgaaaaaccaggcgcgcccctgctcccaccccctcctcagaactccgtcccacactacgctgaggctgacatcgtcacacttcagggcgtgacaggaggcaacacatacgcagtcccagccctccctccgggcgccgtcggggacggaccccctagagtcgacttcccgcgcagtagactcagatttaaagaaaaactcggagaaggccagttcggcgaggtccacttatgtgaagtcgatagcccacaagacctggtgtcccttgacttcccacttaacgtcaggaaggggcatcctctgctcgtagccgtgaaaatactgaggccagatgccaccaaaaacgcacgtaacgattttctgaaagaagttaagataatgtcccgactaaaggatcctaacatcatccgactgctgggggtgtgcgttcaggacgatcctctttgcatgatcactgactatatggaaaatggtgacttgaatcagttcttgtctgcccaccaactggaggataaagctgccgaaggggcacctggagatgggcaagcagcacagggaccgacaattagttatcctatgctgcttcacgttgccgcgcagatcgcctcaggcatgcgctacttggcaacactcaattttgtgcaccgggatctggctacccggaattgtctagtgggggaaaattttaccattaagatcgcggacttcggtatgtcaaggaatctgtacgccggagactactacagagttcagggacgagccgttcttcctataagatggatggcctgggaatgtatactgatgggaaagttcactacagccagcgacgtatgggcatttggtgttacactgtgggaagttctaatgctatgtagagctcagcctttcgggcagttgaccgacgaacaagtgatcgagaacgccggggagttcttccgcgaccagggaagacaggtgtacctctctcgtccacccgcctgcccccagggtctctatgagctcatgctacgctgctggtcaagagaatccgagcaacgaccccccttttcccagttacatagatttctcgccgaagacgctttgaatactgtgtag

SEQ ID NO: 80033 - DNA, 2631 bp, Artificial Sequence
  derived and/or modified sequence
atgggacccgaggcactgtcttccttactgctcttattgcttgtagcctcaggcgatgcggacatgaaaggacactttgacccggccaagtgccggtatgcgctaggaatgcaagatcggaccatccccgattcagacatctcagcaagctcttcatggtcagatagtactgcagctaggcactctcgtttggagagctctgacggagacggcgcatggtgcccggcaggaagcgtgttccctaaggaggaggaatatttacaagtggacttacaaaggctgcatctggtcgccctggttggaactcagggtagacacgcagggggcttaggaaaagagttttctcggtcatatagactgcgctatagcagagacggcagaaggtggatgggctggaaagaccgctgggggcaggaagtgattagcggtaatgaggatcccgagggtgtggtgctgaaggacctgggacctcccatggtggcaaggctggttcggttttatccaagggctgatagagtaatgagcgtctgtcttcgtgtagagttgtatggatgtctttggcgcgacggactgttaagctataccgcaccagtgggtcagacaatgtatctttccgaggcggtatacctcaacgattcaacctacgacggccataccgtgggaggcttacaatacggcggactggggcagctggccgatggggtggtgggattggacgactttagaaaaagccaagaactccgagtctggcctggctacgattatgttggttggagcaatcattctttctcaagtgggtatgttgagatggaattcgagttcgacagattaagggccttccaggctatgcaggtgcactgtaataatatgcatactctgggcgcccgcctgcctggcggagttgagtgcaggtttagacgaggcccagcaatggcttgggaaggcgagcccatgagacacaatttaggggggaacttaggggatcccagggcccgggccgtgtcagtcccactaggcgggcgtgtggccagattcctgcagtgtaggtttctatttgccggaccatggcttctcttttccgaaatctcttttattagtgacgtagtgaacaatagttctccggccctcggtggcactttcccacctgccccgtggtggcctcccggcccaccaccaacgaacttttcctcattggaactggagccccggggacagcagcctgtggccaaggctgagggcagtcctaccgctatcctcatcgggtgtcttgttgccatcatattgcttttgttgctgatcatcgcacttatgctgtggagattgcactggcgaagacttctgtctaaggccgaaagacgtgttctggaagaagagctgactgtacacctgtccgtacccggcgacaccatactgatcaacaaccgtcctggacctagagaaccacccccctaccaggaaccaagacctagagggaatccaccacacagcgcgccttgtgtccccaatggttccgcctatagcggcgattatatggagccagagaagccaggcgcccctctgctgcccccgcccccacagaactccgtccctcactacgctgaggcagacattgtgacactgcagggagtgaccgggggaaacacatacgccgtgccagcactcccccccggtgcggttggcgacggaccccctcgcgtcgattttccacgctctaggctgagatttaaagagaagctgggcgaaggccaattcggtgaagtgcacctctgtgaagttgattcgcctcaggatttggtcagtctggacttccccctaaacgtgcgtaaaggtcaccctcttttagtcgccgtgaaaattctgaggcccgacgcaacgaaaaatgctaggaatgattttctaaaagaggtgaagatcatgtctcgccttaaagatccgaatattatcagactgctgggggtctgcgttcaagatgatccgttgtgtatgattactgactatatggaaaatggggatttaaaccaatttctgtctgcccaccagctggaggacaaagctgcagagggcgctccgggagatggtcaagcagcccagggaccgactataagttacccaatgctcctccatgttgccgcacaaattgcttcggggatgaggtatctggctacactaaatttcgtccatcgtgatcttgccacacgcaattgcctagtcggagaaaatttcactattaaaatcgctgatttcggcatgtctaggaatctgtatgccggggactactatcgagtgcaaggccgagcggtcctgccaatccgttggatggcgtgggagtgcattctcatggggaagttcactaccgcaagcgatgtgtgggctttcggcgtcaccctttgggaagtgctcatgttgtgtcgcgctcaaccatttggccagttgactgatgagcaagtgatcgaaaacgccggagagttttttcgcgatcagggtcggcaagtgtacctcagtcggcctccggcctgccctcagggtctctacgaactgatgctcagatgttggtcccgtgagtcagagcagagacctccgttctcccagctgcacagatttctcgcagaggatgcattaaacaccgtgtag

SEQ ID NO: 80034 - DNA, 2631 bp, Artificial Sequence
  derived and/or modified sequence
atgggcccggaggccttaagctctctgcttctccttttactcgttgcgtctggggatgctgacatgaaaggccattttgaccccgctaaatgcagatatgctctgggcatgcaggaccggaccattcccgactctgacataagcgcttcaagttcttggtctgattccaccgctgctcggcattccagactggagagctcggacggagatggcgcctggtgcccggctggtagcgtgtttccaaaggaagaagagtaccttcaggtcgaccttcagcgactgcacttagtggcactcgtagggactcaggggagacacgccggggggttgggcaaagagttcagtcgcagttacaggctgagatattctcgcgacggtagaagatggatgggatggaaggacagatggggccaggaggtcatttcaggaaacgaagacccagagggagtggtgcttaaggatttgggcccaccaatggtggctagattggtgagattctacccaagggcagaccgcgtgatgagtgtgtgcctcagagtggaactctacggttgcctttggagggacgggctgttaagctacacagccccggtgggacagaccatgtacctatcagaagccgtgtacctcaacgactccacatatgatgggcacaccgttggaggtctgcaatatggaggtttgggacagttggctgacggagtcgtaggactggatgacttcagaaagtctcaggagttacgtgtttggccaggctacgactacgttgggtggagcaaccactcattctctagtggatatgtcgaaatggagtttgagttcgaccgactcagggcgtttcaggctatgcaggttcattgtaacaatatgcacacgctaggcgcccgcctacctggaggggttgagtgccggttccgacgagggcccgctatggcttgggagggggaacctatgaggcacaatttgggtggcaacctcggcgatcccagagcgagggcagttagcgtgcctctaggaggcagagtggctaggttcctacagtgtcgtttcctgtttgctggtccatggttgcttttttccgaaatctcttttatttccgacgtcgtaaacaattcttcaccagctctaggagggacttttcctccagccccttggtggcccccaggcccgccccctaccaacttcagttcactcgagctggagccacgcggtcagcagcccgtggctaaggctgaaggttcacccactgccattcttatcggatgcctcgtcgccatcattctgctgctgttattgattatcgccttaatgctctggaggctccattggcgccgattattatccaaggctgaacgccgggttctggaagaggaattaactgtccacctatccgttcctggcgacacgattctaataaataatcgacccggtccccgagaaccacccccttatcaggagccacgtccgcgcggcaaccccccgcactccgctccctgtgttccaaacggtagcgcgtacagcggagactacatggaaccggagaagcccggcgcacctttgctcccgccccccccccaaaattctgtaccccactatgctgaagccgacattgtaacactgcaaggggtgactggcggtaacacgtacgccgtcccggcgctaccgcctggcgcagtgggagacggtccccctcgcgtggactttccccgctcccggcttcgctttaaggaaaaacttggtgaaggccagttcggagaagttcatttatgtgaagtcgattcgccacaagacctggtatcgctcgactttccactcaatgtgaggaaaggccaccccctcctcgtcgcagtgaagattcttcgacccgatgctactaaaaatgcacggaacgattttcttaaagaagtcaagatcatgtcgagattgaaggatcctaacattatccgcctgctgggagtgtgtgtccaggatgatcctctgtgtatgattactgactatatggaaaacggtgacttgaaccagtttttgtctgcccaccaactggaagataaggctgccgagggagctccaggcgatggacaggccgctcaggggccaacaattagttaccccatgcttcttcacgtggcggcccaaatcgctagtggaatgagatacttagccaccctcaatttcgtccatagggacctggctactcgcaactgcctcgtgggagagaatttcacaattaagatcgctgatttcggaatgagtcggaacctgtatgcgggagattactatagggtgcaaggcagagcagtgctgccgattaggtggatggcatgggagtgtatcttgatgggcaagtttacaacagcgtctgatgtctgggccttcggcgtgacactctgggaggtactgatgctttgccgcgcccagcctttcggtcaactgacggacgagcaggtcattgagaacgccggtgaattttttagagaccaaggtagacaagtgtatctctcgaggcccccagcctgccctcagggtctgtacgaactgatgctccgatgctggtcgagagagagtgaacagaggcctccgttttctcagctgcataggttcttagccgaggacgcacttaatactgtgtag

SEQ ID NO: 80035 - DNA, 2631 bp, Artificial Sequence
  derived and/or modified sequence
atgggacccgaggctctgtcttcactcctgctgttgctcctcgttgcctccggggacgctgatatgaaaggacacttcgatccagctaaatgccgttatgccctggggatgcaagaccggactatccctgattctgatataagcgcctcctctagctggtctgactctaccgcagctaggcattctcgacttgaatccagcgatggggatggcgcatggtgccccgcaggttctgtattccccaaagaagaagaatatctccaagtcgacttacagaggctgcacctggtagctctcgtagggacacaaggccggcatgcgggagggctgggaaaggaatttagtagaagctaccgcctgcgctatagtcgcgatggccgcagatggatgggctggaaggatagatggggacaggaagtgatcagcggtaatgaagatcccgaaggagtagtattgaaggatctgggtccccccatggtggctaggctagtccgtttttatcctcgggccgatcgggttatgagtgtttgcttacgcgttgagctatatggctgcctttggcgagacgggctgttgagctacactgcgcccgtgggtcagaccatgtatttgtctgaggctgtatacctgaacgatagcacatatgacgggcacactgttggaggacttcagtatggcggactggggcagctcgctgacggcgttgtgggtctggatgattttcggaagtcccaggagcttcgggtctggcctggatatgactacgttggctggtctaaccactcattctcctcaggatacgtggaaatggaatttgagttcgatcgcttgagggcatttcaggctatgcaggtgcattgtaataatatgcatacacttggagcccgcttaccaggtggggtcgagtgtcgatttcggcgcggacccgccatggcctgggagggggaacctatgagacacaatctgggcggtaacctgggcgaccctagagctcgagccgtatccgtgcccctgggcggccgcgtcgccagattcctgcagtgccgcttcttattcgctgggccgtggctgcttttttctgagatctcgttcatcagtgacgtagttaataacagctcacccgcgttgggcggaaccttcccccccgctccatggtggcctccaggcccaccaccaactaacttctctagccttgaactcgagcccagaggccagcagcccgttgcaaaggccgaagggtctcctacagccatcctgataggttgtctcgtcgccattatcctgctgctgctgttgatcatagctctgatgttgtggagattgcattggcggagactcttgtccaaggcggagcgaagagtcctggaggaggaacttacagtacacctgtcagtccccggcgatactattcttatcaacaatagacctggtccccgagagccccccccatatcaagagccccgcccacgcggcaaccccccccattcggccccttgcgtccccaatggcagtgcctactcaggagactatatggaacctgaaaaacccggagccccactcctgcctccaccaccacagaacagcgtgccgcattatgctgaagcagatattgtgaccctccaaggagtgaccggcggaaacacttatgctgtaccagcgctgcccccaggagcggtgggtgacgggccccccagggttgactttccaaggtccaggctacggttcaaggaaaaattgggagaagggcagttcggtgaagtgcatctatgcgaggtggactcgccccaagaccttgtgtccctcgatttcccgcttaacgtccgaaaaggccaccctcttttggttgcagtgaagatcctccgccctgatgccactaagaacgcacgcaacgacttcctgaaagaagtgaaaatcatgagccgacttaaagaccccaatattataagactgcttggcgtttgtgtgcaggacgatccactgtgcatgattactgattacatggagaatggagacctaaaccagttcctgtctgcacatcaactggaagacaaagccgccgaaggagcgcctggggatggacaagccgcgcagggccccactataagttacccaatgttgctccatgttgccgcacagatcgcatccggaatgcggtatctcgctacgctcaacttcgtgcaccgagatcttgccacacgtaactgtctcgttggcgaaaatttcacgatcaagattgccgactttgggatgtcacggaacctctatgccggtgactattacagggtacagggacgagccgtattaccaatcagatggatggcttgggagtgcatcctcatgggcaagttcaccaccgcctctgacgtttgggcctttggcgtgaccttatgggaggtgttgatgttgtgtagagcccaacccttcggccaacttacagacgaacaagtgattgagaatgccggagagttttttcgggatcaaggtcgacaggtgtatttgagtcggccaccagcctgcccgcaggggctgtatgaacttatgctccggtgttggtcccgtgagtcagagcagagaccaccattcagccaattacacagattcctcgccgaggacgctttaaataccgtgtag

SEQ ID NO: 80036 - DNA, 2631 bp, Artificial Sequence
  derived and/or modified sequence
atggggcccgaagcactatcttcgctcctcctgcttctgctggtagcctccggtgacgcggatatgaaggggcactttgaccctgccaagtgtcgttacgctctgggtatgcaagaccgcactatccctgactcagacattagcgcttcatctagttggtcagattccacggctgctcggcattcccgtctcgaatccagtgatggcgacggcgcctggtgtccagccggctcagtgttccccaaggaagaggaatatctgcaggtggacctccaaaggctacatctggttgctctggtgggaactcagggacgtcatgcgggggggctcgggaaggaattttctagaagctatagactcaggtactctcgtgatggcagacgctggatgggatggaaagatcgctgggggcaagaagttatatctggtaatgaagatcccgaaggcgttgtgttgaaagatttaggcccaccaatggtggctcgactggtgcgtttttaccctcgcgccgatcgggttatgtccgtctgtttacgagtggaactgtatggctgcctgtggagagatggcttgctgtcatacactgctccagtgggacaaacaatgtatctgagtgaagcggtgtatctcaatgattcaacatacgatgggcatacagtagggggcttacagtacggtggcctgggacagctggctgacggagtagtaggattggacgatttcagaaaaagtcaggaactgagagtgtggcctggctacgactatgtgggatggtctaaccatagcttcagttctgggtatgtggagatggaatttgagtttgatcgtctgagagcatttcaggcaatgcaggttcactgtaacaatatgcataccctgggagcacgcctccccggcggtgttgagtgtcgattcagaagaggacccgccatggcatgggaaggcgaacccatgcgacacaatctgggcggcaatttgggagacccaagggccagagcagtatctgtccctcttggaggccgggttgctaggttccttcaatgtcgcttcctattcgctgggccatggctcctgtttagcgagatctcgtttatctccgatgtggtgaacaacagtagcccagctctaggcggtaccttcccccccgctccttggtggcctccgggccccccccccacaaacttctcatccttagaactggagccacgcggccagcaacccgtggccaaggctgagggctctcctactgccatccttattggatgtctggtcgcaattattctgctgttgcttctcatcatcgcccttatgctgtggagactacattggcgcagactgttgtcaaaagccgagagacgcgttctagaggaagaattaactgtacatttaagcgtgcctggagacaccattctgattaacaacagacccggtcccagagagccaccaccctaccaggaaccaagaccaaggggcaatcccccccactctgctccatgtgtccctaacggatccgcctattccggggattacatggaaccagagaagcccggtgccccactgctgccgccccccccccagaactcagttccccattacgcagaagccgatatcgttaccctccagggagtgactgggggaaatacatacgcagtgccggctctgcctccgggcgcagtaggggacggcccacccagagtagacttccctcggtctcgtttgagattcaaagaaaaactcggtgaaggacaattcggcgaagtgcatctctgtgaagtagacagccctcaagatcttgtttctcttgactttccactgaatgttcgtaagggccatcccctcctggttgccgtgaagattcttagacctgacgccaccaagaacgcacgtaatgattttttgaaagaagtgaaaatcatgagcagactgaaggaccccaatatcatccggctgctgggggtctgtgtgcaggatgaccccctctgtatgattactgactacatggagaacggcgaccttaatcagtttttgtcagcccaccaactcgaggataaagcagccgaaggtgccccaggggatggacaggccgctcaaggtcccaccatctcctacccaatgcttctgcatgtggccgcccaaatagcttctgggatgagatacctggctactttgaattttgtgcatagggacctcgcaactagaaattgcctggtcggtgaaaatttcactattaagattgctgatttcggtatgagcagaaacttatacgccggtgattactatagagtacagggacgtgcggttctgccaattaggtggatggcgtgggaatgtatcctcatgggaaagtttaccacagcttccgacgtgtgggcgttcggtgttactctctgggaagtcctgatgctatgtagagcccagccctttggacaactcacagatgaacaggttatcgaaaatgctggcgagttcttccgcgatcagggtcgtcaggtgtatttaagccgaccccccgcatgcccccagggactttacgagttgatgctaaggtgttggtctagagaatccgaacagcgcccacccttttcccagttacatcgctttctcgccgaggatgctcttaacactgtgtag

SEQ ID NO: 80037 - DNA, 1248 bp, Artificial Sequence
  derived and/or modified sequence
aatgccgctttctgtttcctctgcctcccttcatctccttttgtctggggtttctttgtctggggtctccctttggttctgtttcacagttctcagcctcccctccctttctccacagccaggctgctcagtccctctctgcgggggcctagaggctcggtgaggggagcgggacttggttgccatggtcacattgaagccagccgcagctggcccgggcagctgctcctcctgggcccggggccccggacgctcggacaaagccaggcagcgttggcagccccagacccgaccccaaaggcctgagactggggtgactgggacctaagagaatcctgagctggagagatgctgcccccacccccttaggcccgagggatcaggagctatgggaccagaggccctgtcatctttactgctgctgctcttggtggcaagtggagatgctgacatgaagggacattttgatcctgccaagtgccgctatgccctgggcatgcaggaccggaccatcccagacagtgacatctctgcttccagctcctggtcagattccactgccgcccgccacagcaggttggagagcagtgacggggatggggcctggtgccccgcagggtcggtgtttcccaaggaggaggagtacttgcaggtggatctacaacgactgcacctggtggctctggtgggcacccagggacggcatgccgggggcctgggcaaggagttctcccggagctaccggctgcgttactcccgggatggtcgccgctggatgggctggaaggaccgctggggtcaggaggtgatctcaggcaatgaggaccctgagggagtggtgctgaaggaccttgggccccccatggttgcccgactggttcgcttctacccccgggctgaccgggtcatgagcgtctgtctgcgggtagagctctatggctgcctctggagggatggactcctgtcttacaccgcccctgtggggcagacaatgtatttatctgaggccgtgtacctcaacgactccacctatgacggacataccgtgggcggactgcagtatgggggtctgggccagctggcagatggtgtggtggggctggatgactttaggaagagtcaggagctgcgggtctggccaggctatgactatgtgggatggagcaaccacagcttctccagtggctatgtggagatggagtttgagtttgaccggctgagggccttccaggctatgcaggtccactg

SEQ ID NO: 80038 - DNA, 2631 bp, Artificial Sequence
  derived and/or modified sequence
atgggacccgaggccctgtccagcttgcttttgctcctgcttgtggcctcaggagacgccgatatgaagggccattttgaccctgccaaatgccgctatgcattaggaatgcaggacaggactatccccgattctgacatctcagcgagctccagctggtctgattctacggctgcaagacactctcgcctcgaatcctcagacggagatggagcctggtgccctgctggcagcgtattcccaaaggaagaagaataccttcaagtggacttacagcgcttgcatctcgtggcactcgttggaacacaggggagacacgcgggggggctcgggaaggaattctctaggtcctatagactgaggtacagcagagacggccggagatggatgggatggaaagaccgctggggtcaagaagtgattagtggtaacgaagatcccgagggggttgtgctcaaagatctcggcccacctatggtggctagactcgttagattttatcctcgagccgatagagtgatgtctgtgtgtttaagagttgagctgtatggatgtctttggcgcgacggtcttttgagttacactgcccccgttggtcaaacgatgtacctctctgaagcagtgtatctgaacgattctacgtacgatgggcatacggttgggggcctacagtatggtggactgggacagcttgccgatggcgtggttggattggatgattttagaaagtctcaggagctccgcgtgtggcctggttacgattatgtcggttggagcaatcattcattttcttccggctatgtggagatggagtttgaattcgatagactaagagcatttcaagctatgcaggttcattgcaacaatatgcacacactgggagcccgactgcccgggggggttgaatgccgatttcgaagagggccagctatggcttgggaaggggagcccatgagacataacctgggaggaaatttgggggatcctcgggcaagagcggtcagtgttcctctgggaggacgggtggccagattccttcagtgcagattcttattcgcagggccatggcttctgtttagcgagatttcgtttatctccgacgtagtcaacaactcatcaccggcactgggtggaactttccctcctgccccatggtggcctcccggacctccacccacaaacttttcatctctggaactagaacctagggggcagcaacctgtcgcaaaagccgagggctcccctactgcaattcttatcggttgcttggtagccatcatccttctgctcttgttgataattgccctcatgttgtggcggctacattggagacggttgttaagcaaggctgagcgtagagtccttgaggaggaactgacggttcatttgagcgtacccggggatacaattctgatcaataaccggcctggaccacgcgagccccctccctaccaggaaccccggccccgcggaaatccaccccattccgcgccatgcgtgcccaacggatcagcttactccggagactacatggagccagagaaaccaggcgctcctcttctgcccccacctcctcaaaattccgtgccacattatgccgaggctgacattgtcacattgcagggcgtaactggcgggaacacttacgcagtcccggccctgccacctggtgcagtcggagatggtcctccccgggtggatttccctcggagccggctccgctttaaagaaaaactgggagagggtcagtttggagaagtacacctgtgtgaggtcgactctccccaagatcttgtgtctttggactttccactcaatgtaagaaaagggcacccactgctagtggcagtaaaaatcctgaggcctgacgctactaaaaacgctaggaacgactttctaaaagaagtgaagataatgtcaagacttaaggacccaaacatcattagattactgggcgtttgtgttcaggatgatcctctatgtatgatcacagactacatggaaaatggcgacctgaatcagttcctctctgcgcaccaattagaggacaaggctgccgaaggggctcccggagatggccaggccgctcagggaccaaccatctcttatcctatgctactacacgtagccgcacagattgccagcggaatgagatatttagcaacactgaacttcgtacaccgggaccttgccactcgaaattgcttggtgggagagaacttcacaatcaaaatagccgattttggaatgtcccgaaatctatacgcgggcgattactatcgggtacagggaagagccgtgctaccgattagatggatggcgtgggaatgtattctaatgggaaagtttacaactgctagcgacgtgtgggccttcggggtcactctgtgggaggtactgatgctttgtcgagcacagccattcggccagctgaccgacgagcaagtcattgaaaatgcaggcgaatttttccgagaccaaggtagacaggtgtacttgagcagacccccagcttgccctcagggcctctacgaattaatgttgagatgctggtccagagagtctgaacaacgcccacctttctcccaattgcacagatttttggctgaggacgcattgaataccgtatag

SEQ ID NO: 80039 - DNA, 2631 bp, Artificial Sequence
  derived and/or modified sequence
atggggcccgaggcgctctcatctcttttactcctgctcctggtcgcctccggtgatgctgatatgaaaggacacttcgatccggccaagtgtagatacgccctgggtatgcaagacagaacaatcccagactctgatattagcgcaagttcctcttggagcgacagtaccgccgctagacattctaggctcgaatccagtgacggcgatggggcgtggtgccccgccggcagcgtgttccctaaggaggaagaatatctccaagtagaccttcaacggctccatctggtcgcattagtgggtacacagggcagacatgccggaggcctgggtaaggaatttagtaggtcttatcgactccggtacagcagagacggacgaagatggatgggatggaaagacaggtggggccaggaggtgatcagcgggaatgaggatcctgagggcgtggtgttgaaggatctggggccgcccatggtggctcggctggtgcggttctatccgagagctgatagagtcatgagtgtgtgcttgagagtggagttatatggatgtttgtggagggacggacttctgtcatacacagctcctgttgggcagactatgtacctgtccgaggcagtctaccttaacgattcaacatatgacggacacacagtaggcgggttacagtacggagggcttggccagcttgcagatggagtggtaggacttgacgactttcgcaaaagtcaggagttgcgcgtgtggccaggttatgattatgtgggatggtcaaaccacagtttttctagcggctacgtcgagatggagtttgagtttgataggcttcgagcctttcaggctatgcaagtgcattgtaacaatatgcacaccctgggagcaagattgccaggaggagttgagtgtcgcttccgaagaggccccgcaatggcttgggagggtgaacccatgagacataacctgggtggcaatttgggagatcctcgtgcccgggcagtctctgtccctctgggcggtagggtggcacgcttcttacagtgtcggttcttgttcgccggcccctggttgctgttctcggagatttcatttataagcgacgtggtcaacaacagctccccagcgttgggcggaacctttccgccggctccgtggtggcctccaggaccccctcccacaaactttagcagtctggaattggaacctcggggtcagcagcctgttgccaaagccgagggttcacccaccgctatcctgatcggatgtttggttgccatcattttactgttgcttttgattattgccctgatgctatggagactccattggaggcgcctcctctcgaaggcagaacgacgggtgctggaagaagagctgaccgtgcacttaagtgtacctggcgatacaatccttataaacaaccgccctgggcctcgggagcctcccccttaccaagaaccaagacctagaggcaatcctccacactctgctccctgcgtacccaacggctcagcctacagcggagactatatggaacctgagaaacctggcgcacccctgctgccccctcccccccaaaactcggtaccacactacgcggaagccgatatcgtcacacttcaaggagtaacgggaggaaatacctatgctgtacccgctttgccacccggcgctgtcggcgatgggccaccacgggttgattttccaaggtccaggcttaggtttaaggaaaaattaggcgaggggcagtttggggaggtccatctgtgtgaggttgacagtccacaagaccttgtttctctagactttcccctgaacgttagaaaaggtcatccgcttttggtcgccgtgaagattctaaggccagacgctaccaagaatgcccggaacgatttcctcaaagaagtgaagatcatgtcacgccttaaagatccgaacattatcagattgctgggcgtatgtgtgcaggatgacccattgtgcatgattactgattacatggaaaacggagacctgaaccagtttctgtcagcgcatcagctcgaagataaggccgcagagggggcacctggagatggccaagcagctcaaggaccgactatctcgtatccgatgctgctgcacgtcgctgctcaaatagccagtggaatgaggtacctggctacactaaattttgtgcacagggatctggcgacgagaaattgtctggtgggagaaaacttcacaataaagatcgctgatttcgggatgtctcgcaatttatacgccggggattattaccgcgtacagggccgtgctgttctgcctattaggtggatggcctgggaatgcatactaatgggaaagtttactactgcatcagacgtctgggcatttggcgtaacgctatgggaggttcttatgttgtgtcgcgcccagccatttggtcaacttacagacgaacaggtgatcgaaaacgcaggagagtttttcagagatcaaggtaggcaagtgtatcttagtaggccaccggcctgtcctcaaggactatacgagctgatgctgcgttgttggtcacgggaatctgagcagcgcccacctttcagccaactgcaccgcttccttgccgaagacgctctgaataccgtatag

SEQ ID NO: 80040 - DNA, 2631 bp, Artificial Sequence
  derived and/or modified sequence
atgggtcctgaagccctatcttccctgctccttctgcttctggtggctagtggtgacgccgacatgaaaggacattttgatccagccaaatgtaggtatgcgttaggtatgcaagacagaactatacccgactccgatatctcagcatcttcatcttggagcgatagtaccgctgcccgccatagtcgtctcgagtcatctgacggggatggtgcttggtgccccgcgggttctgtgtttcctaaggaggaagaatatctccaagtggatcttcaacgtttgcacttagtggcacttgttgggacacagggcagacatgctgggggcttgggcaaagaattttctaggtcttataggttgaggtattctagagatggcaggcggtggatggggtggaaggatcggtggggacaggaagtgatcagcgggaatgaggacccagaaggagtggtgctaaaggacctaggaccccctatggtggctcggctcgttagattctatccaagagcagatagagtgatgtcggtgtgcctgcgcgttgagctgtatggctgtttatggcgggatgggttgctctcgtataccgccccagtgggtcaaactatgtatctgagtgaggcagtatatcttaacgacagcacatatgatggtcacacagtcggcggccttcaatatggcgggctcggacagctggccgacggagtggtgggcctggatgactttcgtaaatcccaggagctaagagtatggccgggatacgattacgtcgggtggtctaatcatagcttctcgtccggatatgtcgaaatggaatttgaattcgatcgtctgagagcttttcaagcaatgcaagtccattgcaataacatgcacacccttggagctcgcctcccaggcggagtcgagtgtagattcagacggggacctgcaatggcatgggagggggaaccaatgcgacataacctcggcggtaatctgggcgatccacgggctcgcgctgtgtctgttccgctcggcggacgtgtagctcgctttcttcaatgcaggttcctatttgctggcccttggctcctgtttagtgaaattagttttatatccgacgtggtaaacaacagcagcccagcactgggcggcacgtttcctccagctccttggtggccaccggggcctccccccactaacttttctagcctggaactggagccaagaggtcagcaaccggtcgccaaagctgaaggcagccccaccgctattctaattgggtgcctggtcgctatcatactactcttgcttctgataattgccctgatgttgtggagattgcattggcgccggctgttgagcaaggcagaacggcgggttctggaggaagaactgacagtacacctcagtgtcccaggcgacaccatccttatcaacaatcggccaggacctagagagccacccccatatcaagaaccacgtcctcgaggaaaccccccacactcagctccatgtgttcccaacggctcggcctatagcggagattacatggaaccagagaagccaggtgccccacttcttccccccccaccccaaaactcagtaccccactatgccgaagcggatatcgtgactcttcagggtgtgacaggcggcaatacctacgctgtgcctgccttgcctcctggtgcagtaggtgacggacctccccgcgtggattttcctcgctctcggttgaggtttaaagagaagttaggcgagggccagttcggcgaggttcatctttgcgaagtcgactcaccccaagacttggtttccctcgactttcctctgaacgtgagaaaagggcatcccctgcttgtggctgtaaagatactaaggcctgacgcaacaaagaacgccaggaatgatttcttaaaagaggtgaagatcatgtcccgactgaaagacccaaatatcatccggctcctgggagtgtgtgtgcaggatgacccgctgtgtatgatcaccgactatatggaaaatggagacctcaaccagttcctgtccgctcatcaattggaagataaagccgctgagggcgctccaggcgatggccaggctgcgcaaggtcccaccatttcctatcctatgttactacatgtcgctgctcagattgctagtggcatgcgatacctggctacgcttaactttgtgcacagagatctagcgacgcgtaactgcctcgtgggcgaaaacttcactatcaaaatagccgattttggaatgtcacgcaacttatacgccggcgactactacagggtgcaagggagagcagtccttccaattaggtggatggcatgggagtgtatcttaatggggaaatttacaacagccagcgatgtttgggcttttggagtcacactttgggaggttcttatgctgtgtcgcgctcagccattcggacagcttaccgacgaacaggtcatcgagaatgcaggggaattttttagagatcaaggcaggcaagtctacctttcaagaccacccgcttgcccccaaggattatacgaactcatgcttcgctgttggtctagggagagcgaacagagaccgccattttcccaactgcaccggtttctggctgaagatgccttgaatacagtctag

SEQ ID NO: 80041 - DNA, 591 bp, Artificial Sequence
  derived and/or modified sequence
atgcctcatttagccagcttatttactgcctcctccagatgctgcccgcatccactgagacctgaaggttcaggggccatgggtcccgaagccctgtcaagtctgctgctgttgctcctggttgcctctggtgatgcagatatgaaaggccacttcgatcctgcaaaatgtcgatacgccttgggaatgcaagaccgtaccattcccgactcagacatttccgcgtccagctcatggagtgactcaactgccgcacggcactctcgattagagtcttctgatggagatggggcctggtgcccagccggcagcgtgttccccaaggaagaggaataccttcaagtggatctacagcgtctgcacctggtggccctcgttggcacacagggacgccatgcaggtggattgggcaaggagttttctcggtcataccgtctaagatattcccgcgatggtagaagatggatgggttggaaggatagatggggacaggaagtgatcagcggaaatgaggaccctgaaggagtagttctgaaggatttgggaccacctatggtagctcgtttggtgcgcttctaccccagggcctag

SEQ ID NO: 80042 - DNA, 2685 bp, Artificial Sequence
  derived and/or modified sequence
atgtctttgcctcgctgctgtccacatccactgcgaccggaaggaagcggtgccatgggccccgaagccctctcctccctgctcttattactccttgtcgcatccggggacgctgacatgaaaggtcattttgaccccgccaagtgccgatatgccctgggaatgcaggatcgtaccatccctgacagcgacatttcagcttcttcctcatggagtgatagtaccgccgccagacacagtcgcctcgagtcttctgacggtgatggggcctggtgcccggcaggatcagtctttccgaaagaagaggaatatttacaggtggatctccaaagactgcatctggttgcactcgtagggacccaaggacggcacgcaggtggactgggtaaggagttcagcaggtcctataggcttcgctactcaagggacggccgccggtggatgggctggaaggataggtggggtcaagaggtgatatctgggaacgaagatcccgagggagtcgtattgaaggacctgggaccacctatggtagctcgactggtacgtttctacccgagagcagatagagtgatgtcggtctgcctcagagtcgaattgtatggctgtctgtggagagacgggctgctgtcatacaccgcacctgtggggcaaacaatgtacctaagcgaagccgtctacttgaacgattcaacatatgatggtcataccgtgggaggtctgcaatacggaggattaggacaactggcagatggcgtggtcggcctggacgatttccggaaatctcaggagctgcgcgtgtggccgggttacgactatgtgggctggagcaaccacagcttttccagtggctatgtggaaatggaattcgaattcgataggctgagggctttccaggcaatgcaggtacattgcaacaatatgcacacactgggcgctcggctccctggaggcgtggaatgcagatttagacgtggccccgcaatggcttgggaaggggaacctatgagacataacctgggaggtaacttgggcgaccctcgtgccagggctgtgtctgttccactaggcggaagggttgcacgattcctgcagtgccgcttcttgttcgccggaccctggctgctgtttagcgaaattagttttatcagcgatgtggttaataactcatcaccagctttgggaggtactttccctccagcaccatggtggccaccagggccaccacccactaacttttcctcgctcgaattggaaccccgaggtcagcagcctgttgctaaagctgaaggatcacctactgccatcttaatcggctgcctggttgccattatcctgttgttactgttaattattgctctcatgttatggcggctgcattggcggcgcctgttgtccaaagctgagcgccgggtcctcgaagaagagctgaccgttcacctgagcgttccaggagacacaattctcattaataaccgcccaggtccccgagagcctcccccgtatcaggagccaaggcctagaggcaatccaccacatagcgcaccttgtgtgcctaatggaagtgcgtactccggcgactatatggagcccgagaagcctggcgcaccactgctgccccctcctccccaaaatagtgtgccacattatgctgaggctgacattgtgaccctccaaggtgtgacggggggcaatacatacgccgtacctgctttgccgcccggtgccgtaggagatggaccgccacgagtggacttcccaagaagcaggctgagatttaaagagaaacttggtgagggccagtttggcgaggtccatctgtgcgaagtggattcacctcaggacttggtttctttggatttcccactgaacgttaggaaagggcacccactgctggtggctgtaaaaattctgagacccgatgcaactaagaatgctcgtaacgatttcttgaaagaagttaagatcatgtctcgattaaaggaccctaatattattcgacttcttggcgtctgcgttcaggatgaccccttatgcatgataaccgactacatggagaatggcgatctgaaccaatttctgagtgctcatcagctggaggacaaggctgcagagggggcaccaggcgatggtcaggcagctcaaggacctactatcagctatccgatgttgttacatgttgctgctcagatagcgagtggaatgcggtatttggcaacactgaacttcgtgcaccgcgatctcgccacaagaaactgtctcgtcggagagaattttactatcaaaatagccgatttcggaatgtctaggaacctttatgccggcgattattatcgggttcaggggcgcgctgtccttccaatccggtggatggcctgggaatgcatcttaatgggtaagtttaccacagcctccgacgtatgggcttttggtgtgacactgtgggaagtcttgatgctatgcagagcacaaccttttggccaattgacggatgaacaggtgattgagaacgccggagaattttttagagatcaggggcgccaggtctatctttcccgtccgcccgcatgcccacaagggctgtatgaactgatgctccggtgctggtctagagaaagcgaacagagaccccccttcagccagctgcacagattcctggccgaggacgctctgaacacggtttag

SEQ ID NO: 80043 - DNA, 2673 bp, Artificial Sequence
  derived and/or modified sequence
cgggagccgcctcccgacacccgagccccgccggcgcctcccgctcccggctcccggctcctggctccctccgcctcccccgcccctcgccccgccgccgaagaggccccgctcccgggtcggacgcctgggtctgccgggaagagcgatgagagagatgctgcccccacccccttaggcccgagggatcaggagctatgggaccagaggccctgtcatctttactgctgctgctcttggtggcaagtggagatgctgacatgaagggacattttgatcctgccaagtgccgctatgccctgggcatgcaggaccggaccatcccagacagtgacatctctgcttccagctcctggtcagattccactgccgcccgccacagcaggttggagagcagtgacggggatggggcctggtgccccgcagggtcggtgtttcccaaggaggaggagtacttgcaggtggatctacaacgactgcacctggtggctctggtgggcacccagggacggcatgccgggggcctgggcaaggagttctcccggagctaccggctgcgttactcccgggatggtcgccgctggatgggctggaaggaccgctggggtcaggaggtgatctcaggcaatgaggaccctgagggagtggtgctgaaggaccttgggccccccatggttgcccgactggttcgcttctacccccgggctgaccgggtcatgagcgtctgtctgcgggtagagctctatggctgcctctggagggactgcagtatgggggtctgggccagctggcagatggtgtggtggggctggatgactttaggaagagtcaggagctgcgggtctggccaggctatgactatgtgggatggagcaaccacagcttctccagtggctatgtggagatggagtttgagtttgaccggctgagggccttccaggctatgcaggtccactgtaacaacatgcacacgctgggagcccgtctgcctggcggggtggaatgtcgcttccggcgtggccctgccatggcctgggagggggagcccatgcgccacaacctagggggcaacctgggggaccccagagcccgggctgtctcagtgccccttggcggccgtgtggctcgctttctgcagtgccgcttcctctttgcggggccctggttactcttcagcgaaatctccttcatctctgatgtggtgaacaattcctctccggcactgggaggcaccttcccgccagccccctggtggccgcctggcccacctcccaccaacttcagcagcttggagctggagcccagaggccagcagcccgtggccaaggccgaggggagcccgaccgccatcctcatcggctgcctggtggccatcatcctgctcctgctgctcatcattgccctcatgctctggcggctgcactggcgcaggctcctcagcaaggctgaacggagggtgttggaagaggagctgacggttcacctctctgtccctggggacactatcctcatcaacaaccgcccaggtcctagagagccacccccgtaccaggagccccggcctcgtgggaatccgccccactccgctccctgtgtccccaatggctctgcctacagtggggactatatggagcctgagaagccaggcgccccgcttctgcccccacctccccagaacagcgtcccccattatgccgaggctgacattgttaccctgcagggcgtcaccgggggcaacacctatgctgtgcctgcactgcccccaggggcagtcggggatgggccccccagagtggatttccctcgatctcgactccgcttcaaggagaagcttggcgagggccagtttggggaggtgcacctgtgtgaggtcgacagccctcaagatctggttagtcttgatttcccccttaatgtgcgtaagggacaccctttgctggtagctgtcaagatcttacggccagatgccaccaagaatgccaggaatgatttcctgaaagaggtgaagatcatgtcgaggctcaaggacccaaacatcattcggctgctgggcgtgtgtgtgcaggacgaccccctctgcatgattactgactacatggagaacggcgacctcaaccagttcctcagtgcccaccagctggaggacaaggcagccgagggggcccctggggacgggcaggctgcgcaggggcccaccatcagctacccaatgctgctgcatgtggcagcccagatcgcctccggcatgcgctatctggccacactcaactttgtacatcgggacctggccacgcggaactgcctagttggggaaaatttcaccatcaaaatcgcagactttggcatgagccggaacctctatgctggggactattaccgtgtgcagggccgggcagtgctgcccatccgctggatggcctgggagtgcatcctcatggggaagttcacgactgcgagtgacgtgtgggcctttggtgtgaccctgtgggaggtgctgatgctctgtagggcccagccctttgggcagctcaccgacgagcaggtcatcgagaacgcgggggagttcttccgggaccagggccggcaggtgtacctgtcccggccgcctgcctgcccgcagggcctatatgagctgatgcttcggtgctggagccgggagtctgagcagcgacc

SEQ ID NO: 80044 - DNA, 2685 bp, Artificial Sequence
  derived and/or modified sequence
atgagtctgccccgctgttgtccccatccgcttcgtcccgaaggcagtggtgcgatgggcccagaagctctctcatctttgctcctactcttgctcgtggcctctggcgatgccgatatgaagggacatttcgatccggctaaatgtcgatacgccctcggcatgcaagatagaaccatccccgactctgacatctctgctagttcatcctggtccgactccactgctgctcggcattccaggctggaatcctcagatggcgacggcgcatggtgtcccgccgggagtgtgtttcctaaagaggaagagtaccttcaggtcgatcttcagcggctccatctcgttgcattagtgggtactcagggcagacacgctggtgggctgggtaaggagtttagtcgaagctatcggctgagatattcacgtgatggacggcgatggatgggatggaaggacaggtgggggcaagaagtaatttctggcaatgaagaccccgaaggagttgtactcaaggacctagggccaccaatggtggctcggcttgtgcggttttaccccagagccgaccgcgtaatgagcgtgtgtctacgcgtagagttgtatggctgcctttggagagatgggctactgagctatacggcacctgtcggccagacaatgtatctatccgaggcagtctacctcaacgatagcacttatgatggtcacacagtgggaggcttgcaatacggcggactgggtcagctggcagatggtgtagtggggctggatgactttaggaagtcacaagagctaagagtgtggccagggtacgactacgttggttggagtaaccacagtttttcatctggatacgtggagatggagttcgaatttgatcgactgagagcattccaggcgatgcaagtacattgtaacaatatgcatactttaggagcccggttgcctggtggcgtggaatgtagattcagaagaggaccagccatggcgtgggagggcgagcctatgaggcacaatctcggcggcaacttgggtgatccaagggcaagagccgtaagtgttccgctcggcggtagagttgcccgctttctgcagtgtagattcctctttgccggaccttggctgttgtttagcgagatctccttcatttctgacgtagtgaacaactcatcccccgccttgggggggacgtttccacccgctccctggtggcccccaggacccccacccacaaactttagctctctggaactggagcccagagggcagcaacccgtcgctaaagcagaaggcagtcccactgcaatcctcatcggttgcttggtagctatcattctgttactgctcctcattatcgcgctgatgctatggcgtttacattggaggagactgctttcaaaggctgagcgtagagtcttggaagaagagttgactgtacatctgtccgttccgggagacacaatactgattaacaatcgccccggacctagggaacctccgccctatcaagaacctcgtcctcgcggaaacccgccacacagcgctccatgcgttcccaacggctctgcatactcaggagactacatggaacccgaaaaaccaggcgccccgctgctccccccacctccccaaaacagtgtgccacactatgccgaagcggatatcgtgactctgcagggggtcaccggtgggaacacatatgcggtccccgccctgcccccaggtgccgtcggcgacggccccccccgcgtagactttccacggtcacggcttagattcaaagaaaaactaggcgagggccagttcggagaggtgcacctgtgtgaggttgattccccccaggaccttgtctcgttggactttccactcaacgtcagaaaaggacatcccttgctcgtcgcggttaagatcctccgtccagacgccaccaagaatgcccgcaacgactttttgaaggaagtgaagatcatgtctaggttgaaagatccaaacatcataagactgctgggagtgtgcgtccaagacgaccctctgtgtatgataactgattacatggagaacggtgacttaaatcagtttttatccgcccatcaattagaagataaagcagctgaaggcgctcctggtgacggacaggcagcccaaggacctaccattagctatccaatgcttctacacgtggcagctcaaatcgcatcaggcatgcgatatctggccacactgaacttcgtccatagagacctcgccacaaggaactgcctcgtgggggagaacttcacaattaagattgccgactttgggatgtctaggaatctgtatgctggtgactactatagggttcagggtagggctgtgctaccaatccgctggatggcctgggagtgtatcctcatgggtaagttcactactgcctccgacgtgtgggctttcggcgttaccttatgggaggtgctgatgctttgtcgcgctcagcctttcggacagctcacagacgaacaggtaatagaaaatgctggcgaattttttcgcgaccaaggccgccaggtctacctctccagaccccctgcttgtccacaaggcctctacgaattgatgctgcgatgttggagtcgggaatccgagcagcgcccgcccttctcccagctccatagattcctggcagaagacgcgttgaacactgtctag

SEQ ID NO: 80045 - DNA, 2685 bp, Artificial Sequence
  derived and/or modified sequence
atgtccctgccccgatgttgcccgcatccgttgcgtcctgaaggaagtggcgcaatggggcctgaagcacttagctccctccttttacttctcctcgtagcttctggcgatgccgacatgaagggtcacttcgatccagcaaaatgccgttacgctttgggcatgcaggataggacaatccctgattcggatattagcgcttcaagttcttggtccgatagcacagctgcaagacacagcagactcgagtcgagcgatggtgatggagcctggtgtcccgccggaagtgttttcccaaaagaagaagagtacctccaggtggacttgcaaagactgcatttggtggctctcgtgggtactcaggggagacatgcaggcggattgggcaaggagttctccagaagctatagacttagatactcccgggatgggagaagatggatgggttggaaggacagatggggccaggaagtgataagcggtaacgaggaccccgagggagttgtcttgaaggatctggggcccccaatggtcgcccgcctggtgcgtttttatccacgagctgatcgagttatgtcagtgtgtctgagagtcgaactctatggctgtttatggagggacggattgctctcatatactgcaccagtaggccagaccatgtacctcagtgaggcagtgtatttgaatgactcaacttacgacggacatacagtggggggattgcaatacggaggactagggcaattagcggacggggtcgtagggctggacgacttccggaagagtcaggagttacgagtgtggcccggatacgactacgttggatggagcaaccactccttcagcagtggatatgtggaaatggagttcgagttcgacaggctgagagcttttcaggccatgcaggtccactgtaacaatatgcatactctgggggctaggctcccaggtggagtcgagtgcagattcagaagaggtccagcaatggcctgggagggagagccaatgcgccacaacctgggtggaaacctcggagatcctagggcacgcgctgtgtctgtccccctaggaggtcgagttgcgcgttttctgcagtgtcggttcctgttcgccggaccctggctgctgttttctgaaattagctttatatctgacgtggtaaacaactcttcgcccgcactaggaggcacatttccacctgcgccttggtggccgcccggtcctccccctacgaattttagtagtctggagttggagccaaggggccagcaaccggttgctaaagctgaaggctctccaaccgccatcctgataggatgcctagttgcaattatattacttctgttgttgataattgccctcatgctgtggagactgcactggagacgtttactgagcaaagccgagcggagagttttagaggaagagctgaccgtgcatttatcagtgccaggtgacacaatcttaatcaataatcgccctggcccccgcgaacctccaccataccaggaacctaggccaagaggcaaccctccgcattctgcaccctgcgtgccaaacggatccgcctactccggtgactatatggaaccagagaagcctggtgcccctctcctgcctcctcctcctcagaattcagtaccccactacgcagaagccgatatagtgaccctacagggtgtgacaggagggaatacctatgctgttccagctcttccacctggcgctgttggagacggcccgcccagggtagatttcccccggagcaggttaagattcaaagagaaactcggtgaagggcaattcggcgaggtgcatctgtgtgaagtcgactccccacaagatctggttagtcttgattttccgctgaatgttcgtaaggggcacccactattagtggctgtgaagatcctgcgtcccgacgcaacaaaaaacgcaaggaacgattttttgaaggaggtcaaaatcatgtccagactcaaagacccaaatatcatacgcctgttaggagtttgtgtgcaagacgaccctctctgtatgattacagattatatggaaaatggcgacctgaaccagtttttgtcagctcaccagcttgaagacaaagccgctgagggtgccccaggcgatggacaggctgcccaaggacccaccatatcctatcccatgctgctgcatgtggcggcccagattgccagcggtatgcgatacttggctacacttaatttcgtccatagggacctcgctacaaggaattgtctggttggagaaaatttcacgattaaaattgcagatttcggaatgagtcggaatctctacgctggtgactattatagagttcaaggacgagctgtgctccctatacggtggatggcatgggagtgtattctaatgggcaaatttacaactgcctccgacgtgtgggcatttggggttactctatgggaagtgctcatgttgtgtcgtgctcagcctttcggacagctgacggatgagcaggttatcgagaatgcgggtgagtttttcagagaccagggaagacaagtatatctgtcacgtccacccgcctgcccacaaggactgtacgagcttatgctgcgctgctggtctcgtgaatcggaacagcggcccccgttctcccaattgcatagattccttgctgaagatgcactgaataccgtgtag

SEQ ID NO: 80046 - DNA, 756 bp, Artificial Sequence
  derived and/or modified sequence
atgccccatctagcctctctcttcactgcttcgtccaggtgttgcccccatcccttgcgacctgaaggatctggggctatggggcctgaggccctttcatcattgctgctgctccttctggttgcctctggagatgctgatatgaagggacatttcgaccctgcaaaatgtagatatgcactgggaatgcaagacaggaccatacccgatagcgacatctccgcctcctcaagttggtcagattcgaccgccgccagacattcacgactcgagtcaagcgacggagacggcgcttggtgcccagcgggctcagtgttccctaaagaggaggagtatttacaggtggacctacaacgtttacatctggtcgccctcgtgggcactcagggccgacacgctggcggcttgggtaaagagttctcacggtcataccggttgagatattccagggatggcaggcgttggatgggatggaaagatagatgggggcaggaagtgatctcgggtaatgaagatcctgaaggagtggttttaaaagatttaggcccaccaatggtcgcaaggttggtgaggttttacccacgggctgatcgggtgatgagcgtctgtttgagagtggaactgtatggctgtctgtggcggggagaatggctgtcatttctaggaatttgcttcctgtccagaggacttgagggcggagagtgtggagagtgggcctctcggatacccagtccggcagggaaactaagtctgtag

SEQ ID NO: 80047 - DNA, 2685 bp, Artificial Sequence
  derived and/or modified sequence
atgtctctccccagatgttgcccccaccccctgaggccagagggctccggagccatgggacctgaagccctttcgtcgctgctgctgcttctccttgtggccagtggagacgccgatatgaaagggcacttcgatcctgctaaatgccgttacgcactgggcatgcaagacagaacgatccccgactcggacatctctgcatcgtctagttggtctgattcaacagctgctagacactcacgcctggaatcttccgatggcgatggcgcttggtgcccagctggaagcgtttttccaaaggaagaggagtatttacaggtcgaccttcagcgcctgcacctcgttgcgctggtcggtacgcagggtagacacgctgggggacttggtaaagaatttagccgctcttacagactaagatattcacgggatggcaggcggtggatggggtggaaagatcgctggggacaggaagtgatttccggtaacgaagatcctgaaggcgttgtgctgaaagatttagggccccccatggtcgcgagactcgtaaggttctatccccgcgctgaccgggttatgagcgtttgcctgcgagtggagttgtatggatgcctttggagggatgggctgctgtcttacaccgcacccgtgggtcagaccatgtatttatctgaagcggtgtatctgaatgactccacatacgacggtcatactgtgggtggcttgcagtacgggggactcggacaactcgcggatggggtggtcggattggacgattttcgaaaatcccaagaacttagagtctggcctggctacgattacgtgggatggtccaatcactctttctcatcggggtatgtcgagatggaattcgaatttgaccggcttcgcgctttccaagccatgcaggtgcattgtaataatatgcacacactaggggcccggctgccaggtggagtggagtgtaggtttcggcggggtccagctatggcatgggagggagagcccatgaggcacaacttgggtggcaatctgggcgatccaagagcacgcgcagtgtcagttccactcggcggcagagtagcgcgttttctgcagtgtaggttcctcttcgccgggccctggctgttgttttctgaaatctctttcatatcagatgttgttaacaattcctcccctgctctaggaggcactttcccgcccgctccttggtggccacccggtcccccccctaccaacttctcttcacttgagctagagccacgcggacagcaaccagtcgctaaagcagaaggaagccccaccgctatactcattggctgcttggttgctataatacttctgctcctcctcattatagcgctgatgttgtggcggctgcactggcggaggctgctgagcaaggctgaacgacgggttctggaagaggaactcactgtgcatcttagtgtccccggcgatactatactaataaataataggccaggccctcgcgagccaccaccgtatcaggagccccgcccaagaggtaatccgccacattccgccccctgtgtgcctaacgggtcggcctactcgggtgactatatggaaccagagaagccaggagctcccttactgcccccacccccgcagaactcagtgccacactatgccgaagcagacatcgtaacactccagggcgtgacaggcggcaacacctatgccgttcctgccctccccccgggcgcagtcggtgatggccccccacgggttgatttcccaaggagcagattgagatttaaggaaaaactgggagagggccaattcggggaagtgcatctgtgtgaggtcgacagcccccaggaccttgtcagtttggattttcctctgaatgtgaggaagggccatcccctccttgtcgctgtcaaaattttgagaccagatgccaccaaaaacgccagaaacgacttccttaaagaagtgaagattatgtcccggttaaaggatcccaatatcattagactactcggcgtttgcgtgcaggacgatccattgtgtatgattaccgactacatggaaaatggtgatctgaaccagttcctcagcgcacatcagttagaggacaaggctgctgagggagccccaggagacgggcaggcggcacaggggccaacaatcagctatcctatgttactgcacgtcgcagcacaaatcgcatcagggatgagatatttggccactctgaactttgtccatagggatcttgcaacccgtaattgcctcgtgggcgagaactttaccataaaaatcgccgactttggaatgtcacggaatctatatgctggagattattaccgagtacagggtcgggcagtcttgccgattcggtggatggcctgggaatgcattcttatgggtaaattcacaactgcctccgacgtctgggcttttggagtgacactctgggaggtgttgatgttatgtcgcgcccaaccctttggccaattgacagatgagcaggttattgaaaatgcaggcgaattcttcagagatcagggaagacaggtgtacctctcaagaccgccggcgtgcccccaaggcctctacgagcttatgctgagatgctggtccagggaatcagagcaacggccccctttctcgcagcttcacaggttcttagcggaggatgctctgaacaccgtatag

SEQ ID NO: 80048 - DNA, 756 bp, Artificial Sequence
  derived and/or modified sequence
atgccacatttagccagcctgttcacagctagctctcgatgctgtcctcatcctctcaggcccgaaggctccggcgcgatggggcccgaagcactgtccagccttctgctcctgctccttgtggcttctggagacgcagacatgaaaggacacttcgatccagccaaatgcagatacgctttgggcatgcaagacagaacaattcccgattccgacatttctgcttcaagcagctggagcgactctactgccgcgagacacagcaggttggaaagttccgacggcgatggcgcatggtgccctgctggctccgtgtttcccaaagaggaagagtacttgcaggtcgacttacagaggctacatctggtcgcattggtcggtacacaaggcaggcacgctggcgggttggggaaggaattttcacggtcttaccggctgcggtactctcgagatggtcggagatggatgggatggaaagatcggtggggacaggaagtcataagcgggaatgaggatccggagggcgttgtcttaaaggacttgggcccgcctatggtggcccgactggtgagattctacccacgcgctgacagagtgatgagtgtctgccttagagtggaattgtacggatgtttatggagaggggagtggttatcctttctaggcatttgtttcctttcccggggtctagaaggcggcgaatgtggcgagtgggcatcacggattccttcacccgctggaaagttgtccctgtag

SEQ ID NO: 80049 - DNA, 756 bp, Artificial Sequence
  derived and/or modified sequence
atgccccatttggccagcctgtttactgcttcaagccgatgttgcccacacccgctgaggcctgagggatccggcgctatgggaccagaagccctctctagcttgctgctccttctgctcgttgcatccggtgacgcagacatgaaaggtcatttcgatcccgcgaaatgtaggtacgctttggggatgcaagaccgcactatccccgacagtgatatttccgccagttcgtcctggtctgacagcaccgctgcgaggcactcccgactagaatcttccgatggagatggtgcgtggtgcccagctggttcggtattcccaaaggaggaggaatacttgcaggttgacctgcagcgactccacttagttgcactcgtgggcacccaaggcagacacgctgggggattgggcaaggagttttcacggtcataccggttgagatacagccgagacggacgacggtggatgggatggaaggataggtgggggcaggaggtaatatcagggaatgaagatcctgagggggtggttctgaaggacttgggtcctcccatggtggccagactggtgcgcttctatccacgggccgatcgggtcatgtcagtgtgcctgcgagttgagctttacgggtgtctgtggcgcggggaatggctttctttcctggggatctgtttcttatcaagagggcttgagggcggagagtgtggcgagtgggcttctagaattccctcaccagccggtaaattgtcactgtag

SEQ ID NO: 80050 - DNA, 756 bp, Artificial Sequence
  derived and/or modified sequence
atgccacacctcgcctccctctttaccgcgtcctcacgatgctgcccacaccctcttagacccgaaggatccggcgcaatggggcctgaagccctttcctcacttttacttctgcttctggttgcctctggtgacgctgatatgaaaggacactttgatcctgccaagtgtcgctatgctctgggaatgcaggaccgaaccatacctgactctgatatcagtgcctcctctagctggagcgactcaaccgcagcgcggcactctaggcttgagtcctcagacggtgacggcgcttggtgccccgctggctcggtatttccaaaggaagaggagtacctccaagtggacctccagagattacatcttgtggctcttgtgggcactcaagggcgtcacgcaggtggtttgggcaaagaattttccagatcatataggcttcgatacagtagagatggtaggcgatggatggggtggaaggacaggtggggacaggaagtgatcagtggtaacgaggacccagagggcgtggtgcttaaggatctgggaccgccaatggtggctagactggtgcggttttatccgagggccgatcgggtgatgtccgtgtgtttaagagtggaactgtacggctgcctgtggaggggcgaatggctaagcttcttgggaatatgttttttgtctagggggcttgaaggcggggaatgcggtgagtgggcttctcgcataccatctccggctgggaagttgagtttgtag

SEQ ID NO: 80051 - DNA, 2685 bp, Artificial Sequence
  derived and/or modified sequence
atgtccctaccacggtgctgcccacacccccttagacccgaaggttcaggtgctatgggccccgaagccctgtcttccctactattgctgctccttgtggcatctggcgatgcggacatgaagggccactttgatcccgcaaagtgccgctacgcgctcggaatgcaggacaggactataccagattccgacatatcagcttcttcctcttggtcagatagtactgccgctcggcatagccggcttgaatccagcgacggcgacggggcgtggtgccccgctggttctgtgtttccaaaggaggaggagtatttacaggtggaccttcaacgcctgcacttggttgctcttgtagggacccagggaagacacgccggggggctcgggaaggaattcagtaggtcttataggctccgatacagtcgtgatggtagacggtggatgggctggaaagacagatggggtcaggaggtcataagtggcaatgaagatccagagggtgtagtcctgaaagacctaggccctccgatggtggctcgtttggtgagattctatccccgtgccgatagagtgatgtccgtgtgccttcgagtcgaactctatgggtgcctctggagggacggactccttagctatacggctcccgtaggacagacaatgtacctgtcagaggctgtctacctgaacgatagtacctatgacggacacactgtcggcggcctgcagtatgggggtctcgggcaattagcagacggggtggtcggattggacgattttaggaagtctcaagaacttagagtttggcccggttacgattatgtggggtggtctaatcatagcttcagctctggatatgttgaaatggaattcgaatttgaccggttgagggcttttcaggccatgcaagtccactgcaacaatatgcacactcttggagctaggctgcctggaggtgtggagtgtcgtttccgccgcggtcctgccatggcttgggaaggagaacccatgagacataacctgggcggaaacctgggtgacccaagggccagagctgtcagcgtgccgctgggaggtagggttgctaggtttttacaatgtcgattccttttcgccggcccctggcttctgttctcagaaatttcctttatcagcgacgtggttaataatagcagtcccgccctaggcggtaccttccccccggccccatggtggccccccgggccaccccccacaaatttttcaagccttgagctggagccaagaggtcaacaacccgttgccaaggctgaagggtcaccaactgctattctgattggctgtcttgttgctattatcctgctgcttttactcataattgctcttatgctgtggcgattacactggcgcagactcctgtcaaaagccgagagaagagtgctcgaggaggaacttacagtgcacctgtctgtcccaggagacaccatcttgatcaataaccgccctggaccaagagaaccacctccctatcaagaaccccgacctagaggaaacccaccccatagcgccccctgcgtccctaatggcagcgcgtactcaggggattacatggaacccgagaagccaggcgctcctttactaccccccccgcctcaaaattccgtgcctcactacgctgaagctgacatcgtgacattgcagggcgtgaccggaggtaacacttacgccgtgcctgctctgccccccggagcagtaggtgacggtccccctagagtggactttccaaggagccgcctgagatttaaagaaaaactgggtgagggacagtttggcgaagtccacctttgtgaagtcgattctccacaggaccttgttagcctcgatttccccctaaacgtgcgaaaaggccaccccctgttggtcgccgtgaaaattcttaggcccgatgcgaccaagaacgcaaggaatgatttcctgaaagaagttaagatcatgagccggttaaaggaccccaatatcatcaggctacttggagtttgcgtgcaggatgatcccctttgtatgatcaccgactacatggaaaatggcgacctcaaccagtttctgtcagcacatcagctcgaagacaaagccgccgaaggcgcccccggcgacggacaagcggcccagggccctacaatctcatatccgatgctgttgcatgttgcggcgcaaattgcttctggcatgagatacctggcgactctcaatttcgtacacagagacctggctacaagaaactgcctcgttggcgaaaattttacaattaagatagcagacttcgggatgtctagaaacttgtatgccggcgactattacagagtacaaggccgtgccgttctgccaattagatggatggcctgggaatgcatactgatgggtaagtttacaacagcgagcgacgtgtgggccttcggtgtgactctttgggaagtccttatgctgtgccgcgcccagccctttggtcagctgacagacgaacaagttatcgaaaacgcaggcgaattctttagagaccagggccgtcaggtttaccttagcagaccaccagcctgtcctcaaggactgtacgagttgatgttgcgatgttggtcaagggagtctgagcagcgcccacccttttcacagctgcatcgattcttagccgaggatgctttgaacaccgtttag

SEQ ID NO: 80052 - DNA, 574 bp, Artificial Sequence
  derived and/or modified sequence
acttttcaaatgctactaaggaaagttagacatggaacttaatagttttcacaggtattcacgagtcctcaggagtccagagacctcagtttgagaacactatcctagcactgaccttgacttccagggtgaccttgagccaggctgctcagtccctctctgcgggggcctagaggctcggtgaggggagcgggacttggttgccatggtcacattgaagccagccgcagctggcccgggcagctgctcctcctgggcccggggccccggacgctcggacaaagccaggcagcgttggcagccccagacccgaccccaaaggcctgagactggggtgactgggacctaagagaatcctgagctggagagatgctgcccccacccccttaggcccgagggatcaggagctatgggaccagaggccctgtcatctttactgctgctgctcttggtggcaagtggagatgctgacatgaagggacattttgatcctgccaagtgccgctatgccctgggcatgcaggaccggaccatcccagacagtgacatctctgcttccagctcctggtcagat

SEQ ID NO: 80053 - DNA, 527 bp, Artificial Sequence
  derived and/or modified sequence
ggacaaagccaggcagcgttggcagccccagacccgaccccaaaggcctgagactggggtgactgggacctaagagaatcctgagctggagagctacgtcatctcaatctcctccttcgctccctggcctcagtttccagtttattcagtggcatcaggcccccgacagctgctctcgggagccgcctcccgacacccgagccccgccggcgcctcccgctcccggctcccggctcctggctccctccgcctcccccgcccctcgccccgccgccgaagaggccccgctcccgggtcggacgcctgggtctgccgggaagagcgatgagagagatgctgcccccacccccttaggcccgagggatcaggagctatgggaccagaggccctgtcatctttactgctgctgctcttggtggcaagtggagatgctgacatgaagggacattttgatcctgccaagtgccgctatgccctgggcatgcaggaccggaccatcccagacagtgacatctctgcttccagct

SEQ ID NO: 80054 - DNA, 636 bp, Artificial Sequence
  derived and/or modified sequence
agaaactctgtgagggttgtcagggacactgagaggtgggtgtgtgcatgccacatttagcctcgctgtttacagccagttcaagatgctgcccccacccccttaggcccgagggatcaggagctatgggaccagaggccctgtcatctttactgctgctgctcttggtggcaagtggagatgctgacatgaagggacattttgatcctgccaagtgccgctatgccctgggcatgcaggaccggaccatcccagacagtgacatctctgcttccagctcctggtcagattccactgccgcccgccacagcaggttggagagcagtgacggggatggggcctggtgccccgcagggtcggtgtttcccaaggaggaggagtacttgcaggtggatctacaacgactgcacctggtggctctggtgggcacccagggacggcatgccgggggcctgggcaaggagttctcccggagctaccggctgcgttactcccgggatggtcgccgctggatgggctggaaggaccgctggggtcaggaggtgatctcaggcaatgaggaccctgagggagtggtgctgaaggaccttgggccccccatggttgcccgactggttcgcttctacccccgggctg

SEQ ID NO: 80055 - DNA, 572 bp, Artificial Sequence
  derived and/or modified sequence
agaggcagccaccttctggaagtgggaactggggggactggatgtctgggtctcaggaaggcagagcagggataactgggcccaagatgccctgaacctgataagaggtggcagtcgagtccctcaggactccagggcctggagacttcagtacagggctctgagaccagtacaggttaggatagcttttcctgcagcaggggaggggagagtagttacttgggtttgtaaggagatgccatttagaatagttttatgtggggtaagcttcctgggcctgaggaacagagtagggattttcaaactttaatgggcacaggtcacctgggaattgtgttaaaaggcagattttgattgagcaggtcaagggtgagcctgagattctgatttcttccatgcttccagagatgctgcccccacccccttaggcccgagggatcaggagctatgggaccagaggccctgtcatctttactgctgctgctcttggtggcaagtggagatgctgacatgaagggacattttgatcctgccaagtgccgctatgccctgggcatgcaggaccggaccat

SEQ ID NO: 80056 - DNA, 571 bp, Artificial Sequence
  derived and/or modified sequence
ctcagccgttggaacgtccttgggcttctgaactagtgcccatgtgtgcctcggcctttcccaagggccagcttcttcctggcccccgacagctgctctcgggagccgcctcccgacacccgagccccgccggcgcctcccgctcccggctcccggctcctggctccctccgcctcccccgcccctcgccccgccgccgaagaggccccgctcccgggtcggacgcctgggtctgccgggaagagcgatgagaggtgtctgaaggtggctattcactgagcgatggggttggacttgaaggaatgccaagagatgctgcccccacccccttaggcccgagggatcaggagctatgggaccagaggccctgtcatctttactgctgctgctcttggtggcaagtggagatgctgacatgaagggacattttgatcctgccaagtgccgctatgccctgggcatgcaggaccggaccatcccagacagtgacatctctgcttccagctcctggtcagattccactgccgcccgccacagcaggttggagagcagtgacggggatggggcctgg

SEQ ID NO: 80057 - DNA, 460 bp, Artificial Sequence
  derived and/or modified sequence
gtgtttgctctgtctcagaaactctgtgagggttgtcagggacactgagagagatgctgcccccacccccttaggcccgagggatcaggagctatgggaccagaggccctgtcatctttactgctgctgctcttggtggcaagtggagatgctgacatgaagggacattttgatcctgccaagtgccgctatgccctgggcatgcaggaccggaccatcccagacagtgacatctctgcttccagctcctggtcagattccactgccgcccgccacagcaggttggagagcagtgacggggatggggcctggtgccccgcagggtcggtgtttcccaaggaggaggagtacttgcaggtggatctacaacgactgcacctggtggctctggtgggcacccagggacggcatgccgggggcctgggcaaggagttctcccggagctaccggctgcgttact

SEQ ID NO: 80058 - DNA, 542 bp, Artificial Sequence
  derived and/or modified sequence
gagcgggactgcagccagccccctggggcgccagctttggaggcccgagggatcaggagctatgggaccagaggccctgtcatctttactgctgctgctcttggtggcaagtggagatgctgacatgaagggacattttgatcctgccaagtgccgctatgccctgggcatgcaggaccggaccatcccagacagtgacatctctgcttccagctcctggtcagattccactgccgcccgccacagcaggttggagagcagtgacggggatggggcctggtgccccgcagggtcggtgtttcccaaggaggaggagtacttgcaggtggatctacaacgactgcacctggtggctctggtgggcacccagggacggcatgccgggggcctgggcaaggagttctcccggagctaccggctgcgttactcccgggatggtcgccgctggatgggctggaaggaccgctggggtcaggaggtgatctcaggcaatgaggaccctgagggagtggtgctgaaggaccttgggccccccatggttg

SEQ ID NO: 80059 - DNA, 556 bp, Artificial Sequence
  derived and/or modified sequence
agttagacatggaacttaatagttttcacaggtattcacgagtcctcaggagtccagagacctcagtttgagaacactatcctagcactgaccttgacttccagggtgaccttgagagatgctgcccccacccccttaggcccgagggatcaggagctatgggaccagaggccctgtcatctttactgctgctgctcttggtggcaagtggagatgctgacatgaagggacattttgatcctgccaagtgccgctatgccctgggcatgcaggaccggaccatcccagacagtgacatctctgcttccagctcctggtcagattccactgccgcccgccacagcaggttggagagcagtgacggggatggggcctggtgccccgcagggtcggtgtttcccaaggaggaggagtacttgcaggtggatctacaacgactgcacctggtggctctggtgggcacccagggacggcatgccgggggcctgggcaaggagttctcccggagctaccggctgcgttactcccgggatggtcgccgctggatgggctggaa

SEQ ID NO: 80060 - DNA, 673 bp, Artificial Sequence
  derived and/or modified sequence
acattgaagccagccgcagctggcccgggcagctgctcctcctgggcccggggccccggacgctcggacaaagccaggcagcgttggcagccccagacccgaccccaaaggcctgagactggggtgactgggacctaagagaatcctgagctggaggcccccgacagctgctctcgggagccgcctcccgacacccgagccccgccggcgcctcccgctcccggctcccggctcctggctccctccgcctcccccgcccctcgccccgccgccgaagaggccccgctcccgggtcggacgcctgggtctgccgggaagagcgatgagagagatgctgcccccacccccttaggcccgagggatcaggagctatgggaccagaggccctgtcatctttactgctgctgctcttggtggcaagtggagatgctgacatgaagggacattttgatcctgccaagtgccgctatgccctgggcatgcaggaccggaccatcccagacagtgacatctctgcttccagctcctggtcagattccactgccgcccgccacagcaggttggagagcagtgacggggatggggcctggtgccccgcagggtcggtgtttcccaaggaggaggagtacttgcaggtggatctacaacgactgcacctggtggctctggtggg

SEQ ID NO: 80061 - DNA, 573 bp, Artificial Sequence
  derived and/or modified sequence
agattccccagctgctgttctctggaggggttcctggggcggagatgtgcagtggagcgagaacttcctgtgaccgtgacattgtctaggtggcccccgacagctgctctcgggagccgcctcccgacacccgagccccgccggcgcctcccgctcccggctcccggctcctggctccctccgcctcccccgcccctcgccccgccgccgaagaggccccgctcccgggtcggacgcctgggtctgccgggaagagcgatgagaggtgtctgaaggtggctattcactgagcgatggggttggacttgaaggaatgccaagagatgctgcccccacccccttaggcccgagggatcaggagctatgggaccagaggccctgtcatctttactgctgctgctcttggtggcaagtggagatgctgacatgaagggacattttgatcctgccaagtgccgctatgccctgggcatgcaggaccggaccatcccagacagtgacatctctgcttccagctcctggtcagattccactgccgcccgccacagcaggttggagagcagtgacggggat

SEQ ID NO: 80062 - DNA, 562 bp, Artificial Sequence
  derived and/or modified sequence
agtccagcgtctcctgggcctagattccccagctgctgttctctggaggggttcctggggcggagatgtgcagtggagcgagaacttcctgtgaccgtgacattgtctaggtggcccccgacagctgctctcgggagccgcctcccgacacccgagccccgccggcgcctcccgctcccggctcccggctcctggctccctccgcctcccccgcccctcgccccgccgccgaagaggccccgctcccgggtcggacgcctgggtctgccgggaagagcgatgagagagatgctgcccccacccccttaggcccgagggatcaggagctatgggaccagaggccctgtcatctttactgctgctgctcttggtggcaagtggagatgctgacatgaagggacattttgatcctgccaagtgccgctatgccctgggcatgcaggaccggaccatcccagacagtgacatctctgcttccagctcctggtcagattccactgccgcccgccacagcaggttggagagcagtgacggggatggggcctggtgccccgcagggtcg

SEQ ID NO: 80063 - DNA, 3073 bp, Artificial Sequence
  derived and/or modified sequence
cccctctcactcagtgcggaggaactgagccccgggaggaggtgctcctgtgcagccccactgagtcagctcatctatcgcctgccctccacctggccagtccctgcgggcatctaactgctaagcctccgctcagccaacacccagttggtcagtctggtcacagtccagcaaaaagagggactgccactctaacccaccagtgacaccactcttcccggctggatggtcaattagctctggcatgagagaatgtcactgccgagatgctgcccccacccccttaggcccgagggatcaggagctatgggaccagaggccctgtcatctttactgctgctgctcttggtggcaagtggagatgctgacatgaagggacattttgatcctgccaagtgccgctatgccctgggcatgcaggaccggaccatcccagacagtgacatctctgcttccagctcctggtcagattccactgccgcccgccacagcaggttggagagcagtgacggggatggggcctggtgccccgcagggtcggtgtttcccaaggaggaggagtacttgcaggtggatctacaacgactgcacctggtggctctggtgggcacccagggacggcatgccgggggcctgggcaaggagttctcccggagctaccggctgcgttactcccgggatggtcgccgctggatgggctggaaggaccgctggggtcaggaggtgatctcaggcaatgaggaccctgagggagtggtgctgaaggaccttgggccccccatggttgcccgactggttcgcttctacccccgggctgaccgggtcatgagcgtctgtctgcgggtagagctctatggctgcctctggagggatggactcctgtcttacaccgcccctgtggggcagacaatgtatttatctgaggccgtgtacctcaacgactccacctatgacggacataccgtgggcggactgcagtatgggggtctgggccagctggcagatggtgtggtggggctggatgactttaggaagagtcaggagctgcgggtctggccaggctatgactatgtgggatggagcaaccacagcttctccagtggctatgtggagatggagtttgagtttgaccggctgagggccttccaggctatgcaggtccactgtaacaacatgcacacgctgggagcccgtctgcctggcggggtggaatgtcgcttccggcgtggccctgccatggcctgggagggggagcccatgcgccacaacctagggggcaacctgggggaccccagagcccgggctgtctcagtgccccttggcggccgtgtggctcgctttctgcagtgccgcttcctctttgcggggccctggttactcttcagcgaaatctccttcatctctgatgtggtgaacaattcctctccggcactgggaggcaccttcccgccagccccctggtggccgcctggcccacctcccaccaacttcagcagcttggagctggagcccagaggccagcagcccgtggccaaggccgaggggagcccgaccgccatcctcatcggctgcctggtggccatcatcctgctcctgctgctcatcattgccctcatgctctggcggctgcactggcgcaggctcctcagcaaggctgaacggagggtgttggaagaggagctgacggttcacctctctgtccctggggacactatcctcatcaacaaccgcccaggtcctagagagccacccccgtaccaggagccccggcctcgtgggaatccgccccactccgctccctgtgtccccaatggctctgcctacagtggggactatatggagcctgagaagccaggcgccccgcttctgcccccacctccccagaacagcgtcccccattatgccgaggctgacattgttaccctgcagggcgtcaccgggggcaacacctatgctgtgcctgcactgcccccaggggcagtcggggatgggccccccagagtggatttccctcgatctcgactccgcttcaaggagaagcttggcgagggccagtttggggaggtgcacctgtgtgaggtcgacagccctcaagatctggttagtcttgatttcccccttaatgtgcgtaagggacaccctttgctggtagctgtcaagatcttacggccagatgccaccaagaatgccaggaatgatttcctgaaagaggtgaagatcatgtcgaggctcaaggacccaaacatcattcggctgctgggcgtgtgtgtgcaggacgaccccctctgcatgattactgactacatggagaacggcgacctcaaccagttcctcagtgcccaccagctggaggacaaggcagccgagggggcccctggggacgggcaggctgcgcaggggcccaccatcagctacccaatgctgctgcatgtggcagcccagatcgcctccggcatgcgctatctggccacactcaactttgtacatcgggacctggccacgcggaactgcctagttggggaaaatttcaccatcaaaatcgcagactttggcatgagccggaacctctatgctggggactattaccgtgtgcagggccgggcagtgctgcccatccgctggatggcctgggagtgcatcctcatggggaagttcacgactgcgagtgacgtgtgggcctttggtgtgaccctgtgggaggtgctgatgctctgtagggcccagccctttgggcagctcaccgacgagcaggtcatcgagaacgcgggggagttcttccgggaccagggccggcaggtgtacctgtcccggccgcctgcctgcccgcagggcctatatgagctgatgcttcggtgctggagccgggagtctgagcagcgaccacccttttcccagctgcatcggttcctggcagaggatgcactcaacacggtgtgaatcacacatccagctgcccctccctcagggagcgatccaggggaagccagtgacactaaaacaagaggacacaatggcacctctgcccttcccctcccgacagcccatcacctctaatagaggcagtgagactgca

SEQ ID NO: 80064 - DNA, 538 bp, Artificial Sequence
  derived and/or modified sequence
acccgaccccaaaggcctgagactggggtgactgggacctaagagaatcctgagctggaggtgtctgaaggtggctattcactgagcgatggggttggacttgaaggaatgccaagagatgctgcccccacccccttaggcccgagggatcaggagctatgggaccagaggccctgtcatctttactgctgctgctcttggtggcaagtggagatgctgacatgaagggacattttgatcctgccaagtgccgctatgccctgggcatgcaggaccggaccatcccagacagtgacatctctgcttccagctcctggtcagattccactgccgcccgccacagcaggttggagagcagtgacggggatggggcctggtgccccgcagggtcggtgtttcccaaggaggaggagtacttgcaggtggatctacaacgactgcacctggtggctctggtgggcacccagggacggcatgccgggggcctgggcaaggagttctcccggagctaccggctgcgttactcccgggatggtcg

SEQ ID NO: 80065 - DNA, 615 bp, Artificial Sequence
  derived and/or modified sequence
acccccagtccagcgtctcctgggcctagattccccagctgctgttctctggaggggcccccgacagctgctctcgggagccgcctcccgacacccgagccccgccggcgcctcccgctcccggctcccggctcctggctccctccgcctcccccgcccctcgccccgccgccgaagaggccccgctcccgggtcggacgcctgggtctgccgggaagagcgatgagagagatgctgcccccacccccttaggcccgagggatcaggagctatgggaccagaggccctgtcatctttactgctgctgctcttggtggcaagtggagatgctgacatgaagggacattttgatcctgccaagtgccgctatgccctgggcatgcaggaccggaccatcccagacagtgacatctctgcttccagctcctggtcagattccactgccgcccgccacagcaggttggagagcagtgacggggatggggcctggtgccccgcagggtcggtgtttcccaaggaggaggagtacttgcaggtggatctacaacgactgcacctggtggctctggtgggcacccagggacggcatgccgggggcctgggcaaggagttctc

SEQ ID NO: 80066 - DNA, 547 bp, Artificial Sequence
  derived and/or modified sequence
agaagtaggaggggcgtcttcccctcgtgggccctgagcgggactgcagccagccccctggggcgccagctttggagagatgctgcccccacccccttaggcccgagggatcaggagctatgggaccagaggccctgtcatctttactgctgctgctcttggtggcaagtggagatgctgacatgaagggacattttgatcctgccaagtgccgctatgccctgggcatgcaggaccggaccatcccagacagtgacatctctgcttccagctcctggtcagattccactgccgcccgccacagcaggttggagagcagtgacggggatggggcctggtgccccgcagggtcggtgtttcccaaggaggaggagtacttgcaggtggatctacaacgactgcacctggtggctctggtgggcacccagggacggcatgccgggggcctgggcaaggagttctcccggagctaccggctgcgttactcccgggatggtcgccgctggatgggctggaaggaccgctggggtcaggaggtgatctcagg

SEQ ID NO: 80067 - DNA, 572 bp, Artificial Sequence
  derived and/or modified sequence
agtgcggaggaactgagccccgggaggaggtgctcctgtgcagccccactgagtcagctcatctatcgcctgccctccacctggccagtccctgcgggcatctaactgctaagcctccgctcagccaacacccagttggtgtctgaaggtggctattcactgagcgatggggttggacttgaaggaatgccaagagatgctgcccccacccccttaggcccgagggatcaggagctatgggaccagaggccctgtcatctttactgctgctgctcttggtggcaagtggagatgctgacatgaagggacattttgatcctgccaagtgccgctatgccctgggcatgcaggaccggaccatcccagacagtgacatctctgcttccagctcctggtcagattccactgccgcccgccacagcaggttggagagcagtgacggggatggggcctggtgccccgcagggtcggtgtttcccaaggaggaggagtacttgcaggtggatctacaacgactgcacctggtggctctggtgggcacccagggacggcatgccgggggcctgggcaag

SEQ ID NO: 80068 - DNA, 623 bp, Artificial Sequence
  derived and/or modified sequence
gcttttgtgtacttgtctggttgggacttcgtgtttctttcttgggattgttgtctgggactgcaagcaggagatgctgcccccacccccttaggcccgagggatcaggagctatgggaccagaggccctgtcatctttactgctgctgctcttggtggcaagtggagatgctgacatgaagggacattttgatcctgccaagtgccgctatgccctgggcatgcaggaccggaccatcccagacagtgacatctctgcttccagctcctggtcagattccactgccgcccgccacagcaggttggagagcagtgacggggatggggcctggtgccccgcagggtcggtgtttcccaaggaggaggagtacttgcaggtggatctacaacgactgcacctggtggctctggtgggcacccagggacggcatgccgggggcctgggcaaggagttctcccggagctaccggctgcgttactcccgggatggtcgccgctggatgggctggaaggaccgctggggtcaggaggtgatctcaggcaatgaggaccctgagggagtggtgctgaaggaccttgggccccccatggttgcccgactggttcgcttctacccccgggct

SEQ ID NO: 80069 - DNA, 539 bp, Artificial Sequence
  derived and/or modified sequence
ccagaggcaggcgcccaagctcgctggctgttgctgagggcctgtaggtgtgtccaggactgagtggtgtggtggagacagagatgctgcccccacccccttaggcccgagggatcaggagctatgggaccagaggccctgtcatctttactgctgctgctcttggtggcaagtggagatgctgacatgaagggacattttgatcctgccaagtgccgctatgccctgggcatgcaggaccggaccatcccagacagtgacatctctgcttccagctcctggtcagattccactgccgcccgccacagcaggttggagagcagtgacggggatggggcctggtgccccgcagggtcggtgtttcccaaggaggaggagtacttgcaggtggatctacaacgactgcacctggtggctctggtgggcacccagggacggcatgccgggggcctgggcaaggagttctcccggagctaccggctgcgttactcccgggatggtcgccgctggatgggctggaaggaccgctggggtcagga

SEQ ID NO: 80070 - DNA, 604 bp, Artificial Sequence
  derived and/or modified sequence
cgttgggagcccaggggaatcagggcctgggcgtctggacccccgggtcccttagaacgcccttcagagagaggaactgagaggagaaggagaagagagtgggcccgccttcagggtctggggccttccaggttgggtcgtaggggcgggagcgcacaggctgcgagagaggagcaaaggcccccgacagctgctctcgggagccgcctcccgacacccgagccccgccggcgcctcccgctcccggctcccggctcctggctccctccgcctcccccgcccctcgccccgccgccgaagaggccccgctcccgggtcggacgcctgggtctgccgggaagagcgatgagaggtgtctgaaggtggctattcactgagcgatggggttggacttgaaggaatgccaagagatgctgcccccacccccttaggcccgagggatcaggagctatgggaccagaggccctgtcatctttactgctgctgctcttggtggcaagtggagatgctgacatgaagggacattttgatcctgccaagtgccgctatgccctgggcatgcaggaccggaccatcccagacagtgacatctctgcttccagct

SEQ ID NO: 80071 - DNA, 580 bp, Artificial Sequence
  derived and/or modified sequence
gtgtttctttcttgggattgttgtctgggactgcaagcagggtatgtttttatctactgtgaggttcctggggcggagatgtgcagtggagcgagaacttcctgtgaccgtgacattgtctagagatgctgcccccacccccttaggcccgagggatcaggagctatgggaccagaggccctgtcatctttactgctgctgctcttggtggcaagtggagatgctgacatgaagggacattttgatcctgccaagtgccgctatgccctgggcatgcaggaccggaccatcccagacagtgacatctctgcttccagctcctggtcagattccactgccgcccgccacagcaggttggagagcagtgacggggatggggcctggtgccccgcagggtcggtgtttcccaaggaggaggagtacttgcaggtggatctacaacgactgcacctggtggctctggtgggcacccagggacggcatgccgggggcctgggcaaggagttctcccggagctaccggctgcgttactcccgggatggtcgccgctggatgggctggaaggaccgctggggtcagg

SEQ ID NO: 80072 - DNA, 956 bp, Artificial Sequence
  derived and/or modified sequence
cagttgctttgcctactcagtctcactgtttcatcttccctgggtctcttggtccccttccttttgactgtgtgtgattttcagtgtgcctccatccttctcctgctcctcttcttcctcctcccgaccactcaactttgtcctggcctcatttttggcctcttctggccagtgatcagaccctctggcccactacggccagagctggctgggcctgagggaggcttgccctgaggactcctgagtccccctcccactccactccgttgggagcccaggggaatcagggcctgggcgtctggacccccgggtcccttagaacgcccttcagagagaggaactgagaggagaaggagaagagagtgggcccgccttcagggtctggggccttccaggttgggtcgtaggggcgggagcgcacaggctgcgagagaggagcaaaggttggtggagggagaagagcagtctggggcctggctggacaggcccccgacagctgctctcgggagccgcctcccgacacccgagccccgccggcgcctcccgctcccggctcccggctcctggctccctccgcctcccccgcccctcgccccgccgccgaagaggccccgctcccgggtcggacgcctgggtctgccgggaagagcgatgagagagatgctgcccccacccccttaggcccgagggatcaggagctatgggaccagaggccctgtcatctttactgctgctgctcttggtggcaagtggagatgctgacatgaagggacattttgatcctgccaagtgccgctatgccctgggcatgcaggaccggaccatcccagacagtgacatctctgcttccagctcctggtcagattccactgccgcccgccacagcaggttggagagcagtgacggggatggggcctggtgccccgcagggtcggtgtttcccaaggaggaggagt

SEQ ID NO: 80073 - DNA, 3047 bp, Artificial Sequence
  derived and/or modified sequence
gagccccgggaggaggtgctcctgtgcagccccactgagtcagctcatctatcgcctgccctccacctggccagtccctgcgggcatctaactgctaagcctccgctcagccaacacccagttggtcagtctggtcacagtccagcaaaaagagggactgccactctaacccaccagtgacaccactcttcccggctggatggtcaattagctctggcatgagagaatgtcactgccgagatgctgcccccacccccttaggcccgagggatcaggagctatgggaccagaggccctgtcatctttactgctgctgctcttggtggcaagtggagatgctgacatgaagggacattttgatcctgccaagtgccgctatgccctgggcatgcaggaccggaccatcccagacagtgacatctctgcttccagctcctggtcagattccactgccgcccgccacagcaggttggagagcagtgacggggatggggcctggtgccccgcagggtcggtgtttcccaaggaggaggagtacttgcaggtggatctacaacgactgcacctggtggctctggtgggcacccagggacggcatgccgggggcctgggcaaggagttctcccggagctaccggctgcgttactcccgggatggtcgccgctggatgggctggaaggaccgctggggtcaggaggtgatctcaggcaatgaggaccctgagggagtggtgctgaaggaccttgggccccccatggttgcccgactggttcgcttctacccccgggctgaccgggtcatgagcgtctgtctgcgggtagagctctatggctgcctctggagggatggactcctgtcttacaccgcccctgtggggcagacaatgtatttatctgaggccgtgtacctcaacgactccacctatgacggacataccgtgggcggactgcagtatgggggtctgggccagctggcagatggtgtggtggggctggatgactttaggaagagtcaggagctgcgggtctggccaggctatgactatgtgggatggagcaaccacagcttctccagtggctatgtggagatggagtttgagtttgaccggctgagggccttccaggctatgcaggtccactgtaacaacatgcacacgctgggagcccgtctgcctggcggggtggaatgtcgcttccggcgtggccctgccatggcctgggagggggagcccatgcgccacaacctagggggcaacctgggggaccccagagcccgggctgtctcagtgccccttggcggccgtgtggctcgctttctgcagtgccgcttcctctttgcggggccctggttactcttcagcgaaatctccttcatctctgatgtggtgaacaattcctctccggcactgggaggcaccttcccgccagccccctggtggccgcctggcccacctcccaccaacttcagcagcttggagctggagcccagaggccagcagcccgtggccaaggccgaggggagcccgaccgccatcctcatcggctgcctggtggccatcatcctgctcctgctgctcatcattgccctcatgctctggcggctgcactggcgcaggctcctcagcaaggctgaacggagggtgttggaagaggagctgacggttcacctctctgtccctggggacactatcctcatcaacaaccgcccaggtcctagagagccacccccgtaccaggagccccggcctcgtgggaatccgccccactccgctccctgtgtccccaatggctctgcctacagtggggactatatggagcctgagaagccaggcgccccgcttctgcccccacctccccagaacagcgtcccccattatgccgaggctgacattgttaccctgcagggcgtcaccgggggcaacacctatgctgtgcctgcactgcccccaggggcagtcggggatgggccccccagagtggatttccctcgatctcgactccgcttcaaggagaagcttggcgagggccagtttggggaggtgcacctgtgtgaggtcgacagccctcaagatctggttagtcttgatttcccccttaatgtgcgtaagggacaccctttgctggtagctgtcaagatcttacggccagatgccaccaagaatgccaggaatgatttcctgaaagaggtgaagatcatgtcgaggctcaaggacccaaacatcattcggctgctgggcgtgtgtgtgcaggacgaccccctctgcatgattactgactacatggagaacggcgacctcaaccagttcctcagtgcccaccagctggaggacaaggcagccgagggggcccctggggacgggcaggctgcgcaggggcccaccatcagctacccaatgctgctgcatgtggcagcccagatcgcctccggcatgcgctatctggccacactcaactttgtacatcgggacctggccacgcggaactgcctagttggggaaaatttcaccatcaaaatcgcagactttggcatgagccggaacctctatgctggggactattaccgtgtgcagggccgggcagtgctgcccatccgctggatggcctgggagtgcatcctcatggggaagttcacgactgcgagtgacgtgtgggcctttggtgtgaccctgtgggaggtgctgatgctctgtagggcccagccctttgggcagctcaccgacgagcaggtcatcgagaacgcgggggagttcttccgggaccagggccggcaggtgtacctgtcccggccgcctgcctgcccgcagggcctatatgagctgatgcttcggtgctggagccgggagtctgagcagcgaccacccttttcccagctgcatcggttcctggcagaggatgcactcaacacggtgtgaatcacacatccagctgcccctccctcagggagcgatccaggggaagccagtgacactaaaacaagaggacacaatggcacctctgcccttcccctcccgacagcccatcacctctaatagaggcagtgagactgca

SEQ ID NO: 80074 - DNA, 3047 bp, Artificial Sequence
  derived and/or modified sequence
gagccccgggaggaggtgctcctgtgcagccccactgagtcagctcatctatcgcctgccctccacctggccagtccctgcgggcatctaactgctaagcctccgctcagccaacacccagttggtcagtctggtcacagtccagcaaaaagagggactgccactctaacccaccagtgacaccactcttcccggctggatggtcaattagctctggcatgagagaatgtcactgccgagatgctgcccccacccccttaggcccgagggatcaggagctatgggaccagaggccctgtcatctttactgctgctgctcttggtggcaagtggagatgctgacatgaagggacattttgatcctgccaagtgccgctatgccctgggcatgcaggaccggaccatcccagacagtgacatctctgcttccagctcctggtcagattccactgccgcccgccacagcaggttggagagcagtgacggggatggggcctggtgccccgcagggtcggtgtttcccaaggaggaggagtacttgcaggtggatctacaacgactccacctggtggctctggtgggcacccagggacggcatgccgggggcctgggcaaggagttctcccggagctaccggctgcgttactcccgggatggtcgccgctggatgggctggaaggaccgctggggtcaggaggtgatctcaggcaatgaggaccctgagggagtggtgctgaaggaccttgggccccccatggttgcccgactggttcgcttctacccccgggctgaccgggtcatgagtgtctgtctgcgggtagagctctatggctgcctctggagggatggactcctgtcttacaccgcccctgtggggcagacaatgtatttatctgaggccgtgtacctcaacgactccacctatgacggacataccgtgggcggactgcagtatgggggtctgggccagctggcagatggtgtggtggggctggatgactttaggaagagtcaggagctgcgggtctggccaggctatgactatgtgggatggagcaaccacagcttctccagtggctatgtggagatggagtttgagtttgaccggctgagggccttccaggctatgcaggtccactgtaacaacatgcacacgctgggagcccgtctgcctggcggggtggaatgtcgcttccggcgtggccctgccatggcctgggagggggagcccatgcgccacaacctagggggcaacctgggggaccccagagcccgggctgtctcagtgccccttggcggccgtgtggctcgctttctgcagtgccgcttcctctttgcggggccctggttactcttcagcgaaatctccttcatctctgatgtggtgaacaattcctctccggcactgggaggcaccttcccgccagccccctggtggccgcctggcccacctcccaccaacttcagcagcttggagctggagcccagaggccagcagcccgtggccaaggccgaggggagcccgaccgccatcctcatcggctgcctggtggccatcatcctgctcctgctgctcatcattgccctcatgctctggcggctgcactggcgcaggctcctcagcaaggctgaacggagggtgttggaagaggagctgacggttcacctctctgtccctggggacactatcctcatcaacaaccgcccaggtcctagagagccacccccgtaccaggagccccggcctcgtgggaatccgccccactccgctccctgtgtccccaatggctctgcctacagtggggactatatggagcctgagaagccaggcgccccgcttctgcccccacctccccagaacagcgtcccccattatgccgaggctgacattgttaccctgcagggcgtcaccgggggcaacacctatgctgtgcctgcactgcccccaggggcagtcggggatgggccccccagagtggatttccctcgatctcgactccgcttcaaggagaagcttggcgagggccagtttggggaggtgcacctgtgtgaggtcgacagccctcaagatctggtcagtcttgatttcccccttaatgtgcgtaagggacaccctttgctggtagctgtcaagatcttacggccagatgccaccaagaatgccaggaatgatttcctgaaagaggtgaagatcatgtcgaggctcaaggaccccaacatcattcggctgctgggcgtgtgtgtgcaggacgaccccctctgcatgattactgactacatggagaacggcgacctcaaccagttcctcagtgcccaccagctggaggacaaggcagccgagggggcccctggggacgggcaggctgcgcaggggcccaccatcagctacccaatgctgctgcatgtggcagcccagatcgcctccggcatgcgctatctggccacactcaactttgtacatcgggacctggccacgcggaactgcctagttggggaaaatttcaccatcaaaatcgcagactttggcatgagccggaacctctatgctggggactattaccgtgtgcagggccgggcagtgctgcccatccgctggatggcctgggagtgcatcctcatggggaagttcacgactgcgagtgacgtgtgggcctttggtgtgaccctgtgggaggtgctgatgctctgtagggcccagccctttgggcagctcaccgacgagcaggtcatcgagaacgcgggggagttcttccgggaccagggccggcaggtgtacctgtcccggccgcctgcctgcccgcagggcctatatgagctgatgcttcggtgctggagccgggagtctgagcagcgaccacccttttcccagctgcatcggttcctggcagaggatgcactcaacacggtgtgaatcacacatccagctgcccctccctcagggagtgatccaggggaagccagtgacactaaaacaagaggacacaatggcacctctgcccttcccctcccgacagcccatcacctctaatagaggcagtgagactgca

SEQ ID NO: 80075 - DNA, 3720 bp, Artificial Sequence
  derived and/or modified sequence
gtcttcccctcgtgggccctgagcgggactgcagccagccccctggggcgccagctttggaggcccccgacagctgctctcgggagccgcctcccgacacccgagccccgccggcgcctcccgctcccggctcccggctcctggctccctccgcctcccccgcccctcgccccgccgccgaagaggccccgctcccgggtcggacgcctgggtctgccgggaagagcgatgagaggtgtctgaaggtggctattcactgagcgatggggttggacttgaaggaatgccaagagatgctgcccccacccccttaggcccgagggatcaggagctatgggaccagaggccctgtcatctttactgctgctgctcttggtggcaagtggagatgctgacatgaagggacattttgatcctgccaagtgccgctatgccctgggcatgcaggaccggaccatcccagacagtgacatctctgcttccagctcctggtcagattccactgccgcccgccacagcaggttggagagcagtgacggggatggggcctggtgccccgcagggtcggtgtttcccaaggaggaggagtacttgcaggtggatctacaacgactccacctggtggctctggtgggcacccagggacggcatgccgggggcctgggcaaggagttctcccggagctaccggctgcgttactcccgggatggtcgccgctggatgggctggaaggaccgctggggtcaggaggtgatctcaggcaatgaggaccctgagggagtggtgctgaaggaccttgggccccccatggttgcccgactggttcgcttctacccccgggctgaccgggtcatgagtgtctgtctgcgggtagagctctatggctgcctctggagggactgcagtatgggggtctgggccagctggcagatggtgtggtggggctggatgactttaggaagagtcaggagctgcgggtctggccaggctatgactatgtgggatggagcaaccacagcttctccagtggctatgtggagatggagtttgagtttgaccggctgagggccttccaggctatgcaggtccactgtaacaacatgcacacgctgggagcccgtctgcctggcggggtggaatgtcgcttccggcgtggccctgccatggcctgggagggggagcccatgcgccacaacctagggggcaacctgggggaccccagagcccgggctgtctcagtgccccttggcggccgtgtggctcgctttctgcagtgccgcttcctctttgcggggccctggttactcttcagcgaaatctccttcatctctgatgtggtgaacaattcctctccggcactgggaggcaccttcccgccagccccctggtggccgcctggcccacctcccaccaacttcagcagcttggagctggagcccagaggccagcagcccgtggccaaggccgaggggagcccgaccgccatcctcatcggctgcctggtggccatcatcctgctcctgctgctcatcattgccctcatgctctggcggctgcactggcgcaggctcctcagcaaggctgaacggagggtgttggaagaggagctgacggttcacctctctgtccctggggacactatcctcatcaacaaccgcccaggtcctagagagccacccccgtaccaggagccccggcctcgtgggaatccgccccactccgctccctgtgtccccaatggctctgcctacagtggggactatatggagcctgagaagccaggcgccccgcttctgcccccacctccccagaacagcgtcccccattatgccgaggctgacattgttaccctgcagggcgtcaccgggggcaacacctatgctgtgcctgcactgcccccaggggcagtcggggatgggccccccagagtggatttccctcgatctcgactccgcttcaaggagaagcttggcgagggccagtttggggaggtgcacctgtgtgaggtcgacagccctcaagatctggtcagtcttgatttcccccttaatgtgcgtaagggacaccctttgctggtagctgtcaagatcttacggccagatgccaccaagaatgccaggaatgatttcctgaaagaggtgaagatcatgtcgaggctcaaggaccccaacatcattcggctgctgggcgtgtgtgtgcaggacgaccccctctgcatgattactgactacatggagaacggcgacctcaaccagttcctcagtgcccaccagctggaggacaaggcagccgagggggcccctggggacgggcaggctgcgcaggggcccaccatcagctacccaatgctgctgcatgtggcagcccagatcgcctccggcatgcgctatctggccacactcaactttgtacatcgggacctggccacgcggaactgcctagttggggaaaatttcaccatcaaaatcgcagactttggcatgagccggaacctctatgctggggactattaccgtgtgcagggccgggcagtgctgcccatccgctggatggcctgggagtgcatcctcatggggaagttcacgactgcgagtgacgtgtgggcctttggtgtgaccctgtgggaggtgctgatgctctgtagggcccagccctttgggcagctcaccgacgagcaggtcatcgagaacgcgggggagttcttccgggaccagggccggcaggtgtacctgtcccggccgcctgcctgcccgcagggcctatatgagctgatgcttcggtgctggagccgggagtctgagcagcgaccacccttttcccagctgcatcggttcctggcagaggatgcactcaacacggtgtgaatcacacatccagctgcccctccctcagggagtgatccaggggaagccagtgacactaaaacaagaggacacaatggcacctctgcccttcccctcccgacagcccatcacctctaatagaggcagtgagactgcaggtgggctgggcccacccagggagctgatgccccttctccccttcctggacacactctcatgtccccttcctgttcttccttcctagaagcccctgtcgcccacccagctggtcctgtggatgggatcctctccaccctcctctagccatcccttggggaagggtggggagaaatataggatagacactggacatggcccattggagcacctgggccccactggacaacactgattcctggagaggtggctgcgcccccagcttctctctccctgtcacacactggaccccactggctgagaatctgggggtgaggaggacaagaaggagaggaaaatgtttccttgtgcctgctcctgtacttgtcctcagcttgggcttcttcctcctccatcacctgaaacactggacctgggggtagccccgccccagccctcagtcacccccacttcccacctgcagtcttgtagctagaacttctctaagcctatacgtttctgtggagtaaatattgggattggggggaaagagggagcaacggcccatagccttggggttggacatctctagtgtagctgccacattgatttttctataatcacttggggtttgtacatttttggggggagagacacagatttttacactaatatatggacctagcttgaggcaattttaatcccctgcactaggcaggtaataataaaggttgagttttcc

SEQ ID NO: 80076 - DNA, 886 bp, Artificial Sequence
  derived and/or modified sequence
gtcagggacactgagaggtgggtgtgtgcatgccacatttagcctcgctgtttacagccagttcaagatgctgcccccacccccttaggcccgagggatcaggagctatgggaccagaggccctgtcatctttactgctgctgctcttggtggcaagtggagatgctgacatgaagggacattttgatcctgccaagtgccgctatgccctgggcatgcaggaccggaccatcccagacagtgacatctctgcttccagctcctggtcagattccactgccgcccgccacagcaggttggagagcagtgacggggatggggcctggtgccccgcagggtcggtgtttcccaaggaggaggagtacttgcaggtggatctacaacgactccacctggtggctctggtgggcacccagggacggcatgccgggggcctgggcaaggagttctcccggagctaccggctgcgttactcccgggatggtcgccgctggatgggctggaaggaccgctggggtcaggaggtgatctcaggcaatgaggaccctgagggagtggtgctgaaggaccttgggccccccatggttgcccgactggttcgcttctacccccgggctgaccgggtcatgagtgtctgtctgcgggtagagctctatggctgcctctggaggggtgagtggctcagcttcctgggaatctgtttcctgagcaggggactggagggtggggagtgtggagaatgggcatccaggatcccttctcctgctgggaagctgtcactctgaggagggggctagccagcattgtctcctccatgccaatgagccagtggagagatacaagaagggacctgaaacctgcccaggcctgatgcagggatggggga

SEQ ID NO: 80077 - DNA, 3720 bp, Artificial Sequence
  derived and/or modified sequence
gtcttcccctcgtgggccctgagcgggactgcagccagccccctggggagccagctttggaggcccccgacagctgctctcgggagccgcctcccgacacccgagccccgccggcgcctcccgctcccggctcccggctcctggctccctccgcctcccccgcccctcgccccgccgccgaagaggccccgctcccgggtcggacgcctgggtctgccgggaagagcgatgagaggtgtctgaaggtggctattcactgagcgatggggttggacttgaaggaatgccaagagatgctgcccccacccccttaggcccgagggatcaggagctatgggaccagaggccctgtcatctttactgctgctgctcttggtggcaagtggagatgctgacatgaagggacattttgatcctgccaagtgccgctatgccctgggcatgcaggaccggaccatcccagacagtgacatctctgcttccagctcctggtcagattccactgccgcccgccacagcaggttggagagcagtgacggggatggggcctggtgccccgcagggtcggtgtttcccaaggaggaggagtacttgcaggtggatctacaacgactgcacctggtggctctggtgggcacccagggacggcatgccgggggcctgggcaaggagttctcccggagctaccggctgcgttactcccgggatggtcgccgctggatgggctggaaggaccgctggggtcaggaggtgatctcaggcaatgaggaccctgagggagtggtgctgaaggaccttgggccccccatggttgcccgactggttcgcttctacccccgggctgaccgggtcatgagcgtctgtctgcgggtagagctctatggctgcctctggagggactgcagtatgggggtctgggccagctggcagatggtgtggtggggctggatgactttaggaagagtcaggagctgcgggtctggccaggctatgactatgtgggatggagcaaccacagcttctccagtggctatgtggagatggagtttgagtttgaccggctgagggccttccaggctatgcaggtccactgtaacaacatgcacacgctgggagcccgtctgcctggcggggtggaatgtcgcttccggcgtggccctgccatggcctgggagggggagcccatgcgccacaacctagggggcaacctgggggaccccagagcccgggctgtctcagtgccccttggcggccgtgtggctcgctttctgcagtgccgcttcctctttgcggggccctggttactcttcagcgaaatctccttcatctctgatgtggtgaacaattcctctccggcactgggaggcaccttcccgccagccccctggtggccgcctggcccacctcccaccaacttcagcagcttggagctggagcccagaggccagcagcccgtggccaaggccgaggggagcccgaccgccatcctcatcggctgcctggtggccatcatcctgctcctgctgctcatcattgccctcatgctctggcggctgcactggcgcaggctcctcagcaaggctgaacggagggtgttggaagaggagctgacggttcacctctctgtccctggggacactatcctcatcaacaaccgcccaggtcctagagagccacccccgtaccaggagccccggcctcgtgggaatccgccccactctgctccctgtgtccccaatggctctgcctacagtggggactatatggagcctgagaagccaggcgccccgcttctgcccccacctccccagaacagcgtcccccattatgccgaggctgacattgttaccctgcagggcgtcaccgggggcaacacctatgctgtgcctgcactgcccccaggggcagtcggggatgggccccccagagtggatttccctcgatctcgactccgcttcaaggagaagcttggcgagggccagtttggggaggtgcacctgtgtgaggtcgacagccctcaagatctggtcagtcttgatttcccccttaatgtgcgtaagggacaccctttgctggtagctgtcaagatcttacggccagatgccaccaagaatgccaggaatgatttcctgaaagaggtgaagatcatgtcgaggctcaaggacccaaacatcattcggctgctgggcgtgtgtgtgcaggacgaccccctctgcatgattactgactacatggagaacggcgacctcaaccagttcctcagtgcccaccagctggaggacaaggcagccgagggggcccctggggacgggcaggctgcgcaggggcccaccatcagctacccaatgctgctgcatgtggcagcccagatcgcctccggcatgcgctatctggccacactcaactttgtacatcgggacctggccacgcggaactgcctagttggggaaaatttcaccatcaaaatcgcagactttggcatgagccggaacctctatgctggggactattaccgtgtgcagggccgggcagtgctgcccatccgctggatggcctgggagtgcatcctcatggggaagttcacgactgcgagtgacgtgtgggcctttggtgtgaccctgtgggaggtgctgatgctctgtagggcccagccctttgggcagctcaccgacgagcaggtcatcgagaacgcgggggagttcttccgggaccagggccggcaggtgtacctgtcccggccgcctgcctgcccgcagggcctatatgagctgatgcttcggtgctggagccgggagtctgagcagcgaccacccttttcccagctgcatcggttcctggcagaggatgcactcaacacggtgtgaatcacacatccagctgcccctccctcagggagcgatccaggggaagccagtgacactaaaacaagaggacacaatggcacctctgcccttcccctcccgacagcccatcacctctaatagaggcagtgagactgcaggtgggctgggcccacccagggagctgatgccccttctccccttcctggacacactctcatgtccccttcctgttcttccttcctagaagcccctgtcgcccacccagctggtcctgtggatgggatcctctccaccctcctctagccatcccttggggaagggtggggagaaatataggatagacactggacatggcccattggagcacctgggccccactggacaacactgattcctggagaggtggctgcgcccccagcttctctctccctgtcacacactggaccccactggctgagaatctgggggtgaggaagacaagaaggagaggaaaatgtttccttgtgcctgctcctgtacttgtcctcagcttgggcttcttcctcctccatcacctgaaacactggacctgggggtagccccgccccagccctcagtcacccccacttcccacttgcagtcttgtagctagaacttctctaagcctatacgtttctgtggagtaaatattgggattggggggaaagagggagcaacggcccatagccttggggttggacatctctagtgtagctgccacattgatttttctataatcacttggggtttgtacatttttggggggagagacacagatttttacactaatatatggacctagcttgaggcaattttaatcccctgcactaggcaggtaataataaaggttgagttttcc

SEQ ID NO: 80078 - DNA, 3047 bp, Artificial Sequence
  derived and/or modified sequence
gagccccgggaggaggtgctcctgtgcagccccactgagtcagctcatctatcgcctgccctccacctggccagtccctgcgggcatctaactgctaagcctccgctcagccaacacccagttggtcagtctggtcacagtccagcaaaaagagggactgccactctaacccaccagtgacaccactcttcccggctggatggtcaattagctctggcatgagagaatgtcactgccgagatgctgcccccacccccttaggcccgagggatcaggagctatgggaccagaggccctgtcatctttactgctgctgctcttggtggcaagtggagatgctgacatgaagggacattttgatcctgccaagtgccgctatgccctgggcatgcaggaccggaccatcccagacagtgacatctctgcttccagctcctggtcagattccactgccgcccgccacagcaggttggagagcagtgacggggatggggcctggtgccccgcagggtcggtgtttcccaaggaggaggagtacttgcaggtggatctacaacgactgcacctggtggctctggtgggcacccagggacggcatgccgggggcctgggcaaggagttctcccggagctaccggctgcgttactcccgggatggtcgccgctggatgggctggaaggaccgctggggtcaggaggtgatctcaggcaatgaggaccctgagggagtggtgctgaaggaccttgggccccccatggttgcccgactggttcgcttctacccccgggctgaccgggtcatgagcgtctgtctgcgggtagagctctatggctgcctctggagggatggactcctgtcttacaccgcccctgtggggcagacaatgtatttatctgaggccgtgtacctcaacgactccacctatgacggacataccgtgggcggactgcagtatgggggtctgggccagctggcagatggtgtggtggggctggatgactttaggaagagtcaggagctgcgggtctggccaggctatgactatgtgggatggagcaaccacagcttctccagtggctatgtggagatggagtttgagtttgaccggctgagggccttccaggctatgcaggtccactgtaacaacatgcacacgctgggagcccgtctgcctggcggggtggaatgtcgcttccggcgtggccctgccatggcctgggagggggagcccatgcgccacaacctagggggcaacctgggggaccccagagcccgggctgtctcagtgccccttggcggccgtgtggctcgctttctgcagtgccgcttcctctttgcggggccctggttactcttcagcgaaatctccttcatctctgatgtggtgaacaattcctctccggcactgggaggcaccttcccgccagccccctggtggccgcctggcccacctcccaccaacttcagcagcttggagctggagcccagaggccagcagcccgtggccaaggccgaggggagcccgaccgccatcctcatcggctgcctggtggccatcatcctgctcctgctgctcatcattgccctcatgctctggcggctgcactggcgcaggctcctcagcaaggctgaacggagggtgttggaagaggagctgacggttcacctctctgtccctggggacactatcctcatcaacaaccgcccaggtcctagagagccacccccgtaccaggagccccggcctcgtgggaatccgccccactctgctccctgtgtccccaatggctctgcctacagtggggactatatggagcctgagaagccaggcgccccgcttctgcccccacctccccagaacagcgtcccccattatgccgaggctgacattgttaccctgcagggcgtcaccgggggcaacacctatgctgtgcctgcactgcccccaggggcagtcggggatgggccccccagagtggatttccctcgatctcgactccgcttcaaggagaagcttggcgagggccagtttggggaggtgcacctgtgtgaggtcgacagccctcaagatctggtcagtcttgatttcccccttaatgtgcgtaagggacaccctttgctggtagctgtcaagatcttacggccagatgccaccaagaatgccaggaatgatttcctgaaagaggtgaagatcatgtcgaggctcaaggacccaaacatcattcggctgctgggcgtgtgtgtgcaggacgaccccctctgcatgattactgactacatggagaacggcgacctcaaccagttcctcagtgcccaccagctggaggacaaggcagccgagggggcccctggggacgggcaggctgcgcaggggcccaccatcagctacccaatgctgctgcatgtggcagcccagatcgcctccggcatgcgctatctggccacactcaactttgtacatcgggacctggccacgcggaactgcctagttggggaaaatttcaccatcaaaatcgcagactttggcatgagccggaacctctatgctggggactattaccgtgtgcagggccgggcagtgctgcccatccgctggatggcctgggagtgcatcctcatggggaagttcacgactgcgagtgacgtgtgggcctttggtgtgaccctgtgggaggtgctgatgctctgtagggcccagccctttgggcagctcaccgacgagcaggtcatcgagaacgcgggggagttcttccgggaccagggccggcaggtgtacctgtcccggccgcctgcctgcccgcagggcctatatgagctgatgcttcggtgctggagccgggagtctgagcagcgaccacccttttcccagctgcatcggttcctggcagaggatgcactcaacacggtgtgaatcacacatccagctgcccctccctcagggagcgatccaggggaagccagtgacactaaaacaagaggacacaatggcacctctgcccttcccctcccgacagcccatcacctctaatagaggcagtgagactgca

SEQ ID NO: 80079 - DNA, 3845 bp, Artificial Sequence
  derived and/or modified sequence
gatcccagaagtaggaggggcgtcttcccctcgtgggccctgagcgggactgcagccagccccctggggagccagctttggaggcccccgacagctgctctcgggagccgcctcccgacacccgagccccgccggcgcctcccgctcccggctcccggctcctggctccctccgcctcccccgcccctcgccccgccgccgaagaggccccgctcccgggtcggacgcctgggtctgccgggaagagcgatgagaggtgtctgaaggtggctattcactgagcgatggggttggacttgaaggaatgccaagagatgctgcccccacccccttaggcccgagggatcaggagctatgggaccagaggccctgtcatctttactgctgctgctcttggtggcaagtggagatgctgacatgaagggacattttgatcctgccaagtgccgctatgccctgggcatgcaggaccggaccatcccagacagtgacatctctgcttccagctcctggtcagattccactgccgcccgccacagcaggttggagagcagtgacggggatggggcctggtgccccgcagggtcggtgtttcccaaggaggaggagtacttgcaggtggatctacaacgactgcacctggtggctctggtgggcacccagggacggcatgccgggggcctgggcaaggagttctcccggagctaccggctgcgttactcccgggatggtcgccgctggatgggctggaaggaccgctggggtcaggaggtgatctcaggcaatgaggaccctgagggagtggtgctgaaggaccttgggccccccatggttgcccgactggttcgcttctacccccgggctgaccgggtcatgagcgtctgtctgcgggtagagctctatggctgcctctggagggatggactcctgtcttacaccgcccctgtggggcagacaatgtatttatctgaggccgtgtacctcaacgactccacctatgacggacataccgtgggcggactgcagtatgggggtctgggccagctggcagatggtgtggtggggctggatgactttaggaagagtcaggagctgcgggtctggccaggctatgactatgtgggatggagcaaccacagcttctccagtggctatgtggagatggagtttgagtttgaccggctgagggccttccaggctatgcaggtccactgtaacaacatgcacacgctgggagcccgtctgcctggcggggtggaatgtcgcttccggcgtggccctgccatggcctgggagggggagcccatgcgccacaacctagggggcaacctgggggaccccagagcccgggctgtctcagtgccccttggcggccgtgtggctcgctttctgcagtgccgcttcctctttgcggggccctggttactcttcagcgaaatctccttcatctctgatgtggtgaacaattcctctccggcactgggaggcaccttcccgccagccccctggtggccgcctggcccacctcccaccaacttcagcagcttggagctggagcccagaggccagcagcccgtggccaaggccgaggggagcccgaccgccatcctcatcggctgcctggtggccatcatcctgctcctgctgctcatcattgccctcatgctctggcggctgcactggcgcaggctcctcagcaaggctgaacggagggtgttggaagaggagctgacggttcacctctctgtccctggggacactatcctcatcaacaaccgcccaggtcctagagagccacccccgtaccaggagccccggcctcgtgggaatccgccccactctgctccctgtgtccccaatggctctgcctacagtggggactatatggagcctgagaagccaggcgccccgcttctgcccccacctccccagaacagcgtcccccattatgccgaggctgacattgttaccctgcagggcgtcaccgggggcaacacctatgctgtgcctgcactgcccccaggggcagtcggggatgggccccccagagtggatttccctcgatctcgactccgcttcaaggagaagcttggcgagggccagtttggggaggtgcacctgtgtgaggtcgacagccctcaagatctggtcagtcttgatttcccccttaatgtgcgtaagggacaccctttgctggtagctgtcaagatcttacggccagatgccaccaagaatgccaggaatgatttcctgaaagaggtgaagatcatgtcgaggctcaaggacccaaacatcattcggctgctgggcgtgtgtgtgcaggacgaccccctctgcatgattactgactacatggagaacggcgacctcaaccagttcctcagtgcccaccagctggaggacaaggcagccgagggggcccctggggacgggcaggctgcgcaggggcccaccatcagctacccaatgctgctgcatgtggcagcccagatcgcctccggcatgcgctatctggccacactcaactttgtacatcgggacctggccacgcggaactgcctagttggggaaaatttcaccatcaaaatcgcagactttggcatgagccggaacctctatgctggggactattaccgtgtgcagggccgggcagtgctgcccatccgctggatggcctgggagtgcatcctcatggggaagttcacgactgcgagtgacgtgtgggcctttggtgtgaccctgtgggaggtgctgatgctctgtagggcccagccctttgggcagctcaccgacgagcaggtcatcgagaacgcgggggagttcttccgggaccagggccggcaggtgtacctgtcccggccgcctgcctgcccgcagggcctatatgagctgatgcttcggtgctggagccgggagtctgagcagcgaccacccttttcccagctgcatcggttcctggcagaggatgcactcaacacggtgtgaatcacacatccagctgcccctccctcagggagcgatccaggggaagccagtgacactaaaacaagaggacacaatggcacctctgcccttcccctcccgacagcccatcacctctaatagaggcagtgagactgcaggtgggctgggcccacccagggagctgatgccccttctccccttcctggacacactctcatgtccccttcctgttcttccttcctagaagcccctgtcgcccacccagctggtcctgtggatgggatcctctccaccctcctctagccatcccttggggaagggtggggagaaatataggatagacactggacatggcccattggagcacctgggccccactggacaacactgattcctggagaggtggctgcgcccccagcttctctctccctgtcacacactggaccccactggctgagaatctgggggtgaggaagacaagaaggagaggaaaatgtttccttgtgcctgctcctgtacttgtcctcagcttgggcttcttcctcctccatcacctgaaacactggacctgggggtagccccgccccagccctcagtcacccccacttcccacttgcagtcttgtagctagaacttctctaagcctatacgtttctgtggagtaaatattgggattggggggaaagagggagcaacggcccatagccttggggttggacatctctagtgtagctgccacattgatttttctataatcacttggggtttgtacatttttggggggagagacacagatttttacactaatatatggacctagcttgaggcaattttaatcccctgcactaggcaggtaataataaaggttgagttttccacaa

SEQ ID NO: 80080 - DNA, 2631 bp, Artificial Sequence
  derived and/or modified sequence
atgggccccgaggccctgagcagcctgctgctgctgctgctggtggccagcggcgacgccgacatgaagggccacttcgaccccgccaagtgcagatacgccctgggcatgcaggacagaaccatccccgacagcgacatcagcgccagcagcagctggagcgacagcaccgccgccagacacagcagactggagagcagcgacggcgacggcgcctggtgccccgccggcagcgtgttccccaaggaggaggagtacctgcaggtggacctgcagagactgcacctggtggccctggtgggcacccagggcagacacgccggcggcctgggcaaggagttcagcagaagctacagactgagatacagcagagacggcagaagatggatgggctggaaggacagatggggccaggaggtgatcagcggcaacgaggaccccgagggcgtggtgctgaaggacctgggcccccccatggtggccagactggtgagattctaccccagagccgacagagtgatgagcgtgtgcctgagagtggagctgtacggctgcctgtggagagacggcctgctgagctacaccgcccccgtgggccagaccatgtacctgagcgaggccgtgtacctgaacgacagcacctacgacggccacaccgtgggcggcctgcagtacggcggcctgggccagctggccgacggcgtggtgggcctggacgacttcagaaagagccaggagctgagagtgtggcccggctacgactacgtgggctggagcaaccacagcttcagcagcggctacgtggagatggagttcgagttcgacagactgagagccttccaggccatgcaggtgcactgcaacaacatgcacaccctgggcgccagactgcccggcggcgtggagtgcagattcagaagaggccccgccatggcctgggagggcgagcccatgagacacaacctgggcggcaacctgggcgaccccagagccagagccgtgagcgtgcccctgggcggcagagtggccagattcctgcagtgcagattcctgttcgccggcccctggctgctgttcagcgagatcagcttcatcagcgacgtggtgaacaacagcagccccgccctgggcggcaccttcccccccgccccctggtggccccccggccccccccccaccaacttcagcagcctggagctggagcccagaggccagcagcccgtggccaaggccgagggcagccccaccgccatcctgatcggctgcctggtggccatcatcctgctgctgctgctgatcatcgccctgatgctgtggagactgcactggagaagactgctgagcaaggccgagagaagagtgctggaggaggagctgaccgtgcacctgagcgtgcccggcgacaccatcctgatcaacaacagacccggccccagagagccccccccctaccaggagcccagacccagaggcaaccccccccacagcgccccctgcgtgcccaacggcagcgcctacagcggcgactacatggagcccgagaagcccggcgcccccctgctgcccccccccccccagaacagcgtgccccactacgccgaggccgacatcgtgaccctgcagggcgtgaccggcggcaacacctacgccgtgcccgccctgccccccggcgccgtgggcgacggcccccccagagtggacttccccagaagcagactgagattcaaggagaagctgggcgagggccagttcggcgaggtgcacctgtgcgaggtggacagcccccaggacctggtgagcctggacttccccctgaacgtgagaaagggccaccccctgctggtggccgtgaagatcctgagacccgacgccaccaagaacgccagaaacgacttcctgaaggaggtgaagatcatgagcagactgaaggaccccaacatcatcagactgctgggcgtgtgcgtgcaggacgaccccctgtgcatgatcaccgactacatggagaacggcgacctgaaccagttcctgagcgcccaccagctggaggacaaggccgccgagggcgcccccggcgacggccaggccgcccagggccccaccatcagctaccccatgctgctgcacgtggccgcccagatcgccagcggcatgagatacctggccaccctgaacttcgtgcacagagacctggccaccagaaactgcctggtgggcgagaacttcaccatcaagatcgccgacttcggcatgagcagaaacctgtacgccggcgactactacagagtgcagggcagagccgtgctgcccatcagatggatggcctgggagtgcatcctgatgggcaagttcaccaccgccagcgacgtgtgggccttcggcgtgaccctgtgggaggtgctgatgctgtgcagagcccagcccttcggccagctgaccgacgagcaggtgatcgagaacgccggcgagttcttcagagaccagggcagacaggtgtacctgagcagaccccccgcctgcccccagggcctgtacgagctgatgctgagatgctggagcagagagagcgagcagagaccccccttcagccagctgcacagattcctggccgaggacgccctgaacaccgtgtag

SEQ ID NO: 80081 - DNA, 591 bp, Artificial Sequence
  derived and/or modified sequence
atgccccacctggccagcctgttcaccgccagcagcagatgctgcccccaccccctgagacccgagggcagcggcgccatgggccccgaggccctgagcagcctgctgctgctgctgctggtggccagcggcgacgccgacatgaagggccacttcgaccccgccaagtgcagatacgccctgggcatgcaggacagaaccatccccgacagcgacatcagcgccagcagcagctggagcgacagcaccgccgccagacacagcagactggagagcagcgacggcgacggcgcctggtgccccgccggcagcgtgttccccaaggaggaggagtacctgcaggtggacctgcagagactgcacctggtggccctggtgggcacccagggcagacacgccggcggcctgggcaaggagttcagcagaagctacagactgagatacagcagagacggcagaagatggatgggctggaaggacagatggggccaggaggtgatcagcggcaacgaggaccccgagggcgtggtgctgaaggacctgggcccccccatggtggccagactggtgagattctaccccagagcctag

SEQ ID NO: 80082 - DNA, 2685 bp, Artificial Sequence
  derived and/or modified sequence
atgagcctgcccagatgctgcccccaccccctgagacccgagggcagcggcgccatgggccccgaggccctgagcagcctgctgctgctgctgctggtggccagcggcgacgccgacatgaagggccacttcgaccccgccaagtgcagatacgccctgggcatgcaggacagaaccatccccgacagcgacatcagcgccagcagcagctggagcgacagcaccgccgccagacacagcagactggagagcagcgacggcgacggcgcctggtgccccgccggcagcgtgttccccaaggaggaggagtacctgcaggtggacctgcagagactgcacctggtggccctggtgggcacccagggcagacacgccggcggcctgggcaaggagttcagcagaagctacagactgagatacagcagagacggcagaagatggatgggctggaaggacagatggggccaggaggtgatcagcggcaacgaggaccccgagggcgtggtgctgaaggacctgggcccccccatggtggccagactggtgagattctaccccagagccgacagagtgatgagcgtgtgcctgagagtggagctgtacggctgcctgtggagagacggcctgctgagctacaccgcccccgtgggccagaccatgtacctgagcgaggccgtgtacctgaacgacagcacctacgacggccacaccgtgggcggcctgcagtacggcggcctgggccagctggccgacggcgtggtgggcctggacgacttcagaaagagccaggagctgagagtgtggcccggctacgactacgtgggctggagcaaccacagcttcagcagcggctacgtggagatggagttcgagttcgacagactgagagccttccaggccatgcaggtgcactgcaacaacatgcacaccctgggcgccagactgcccggcggcgtggagtgcagattcagaagaggccccgccatggcctgggagggcgagcccatgagacacaacctgggcggcaacctgggcgaccccagagccagagccgtgagcgtgcccctgggcggcagagtggccagattcctgcagtgcagattcctgttcgccggcccctggctgctgttcagcgagatcagcttcatcagcgacgtggtgaacaacagcagccccgccctgggcggcaccttcccccccgccccctggtggccccccggccccccccccaccaacttcagcagcctggagctggagcccagaggccagcagcccgtggccaaggccgagggcagccccaccgccatcctgatcggctgcctggtggccatcatcctgctgctgctgctgatcatcgccctgatgctgtggagactgcactggagaagactgctgagcaaggccgagagaagagtgctggaggaggagctgaccgtgcacctgagcgtgcccggcgacaccatcctgatcaacaacagacccggccccagagagccccccccctaccaggagcccagacccagaggcaaccccccccacagcgccccctgcgtgcccaacggcagcgcctacagcggcgactacatggagcccgagaagcccggcgcccccctgctgcccccccccccccagaacagcgtgccccactacgccgaggccgacatcgtgaccctgcagggcgtgaccggcggcaacacctacgccgtgcccgccctgccccccggcgccgtgggcgacggcccccccagagtggacttccccagaagcagactgagattcaaggagaagctgggcgagggccagttcggcgaggtgcacctgtgcgaggtggacagcccccaggacctggtgagcctggacttccccctgaacgtgagaaagggccaccccctgctggtggccgtgaagatcctgagacccgacgccaccaagaacgccagaaacgacttcctgaaggaggtgaagatcatgagcagactgaaggaccccaacatcatcagactgctgggcgtgtgcgtgcaggacgaccccctgtgcatgatcaccgactacatggagaacggcgacctgaaccagttcctgagcgcccaccagctggaggacaaggccgccgagggcgcccccggcgacggccaggccgcccagggccccaccatcagctaccccatgctgctgcacgtggccgcccagatcgccagcggcatgagatacctggccaccctgaacttcgtgcacagagacctggccaccagaaactgcctggtgggcgagaacttcaccatcaagatcgccgacttcggcatgagcagaaacctgtacgccggcgactactacagagtgcagggcagagccgtgctgcccatcagatggatggcctgggagtgcatcctgatgggcaagttcaccaccgccagcgacgtgtgggccttcggcgtgaccctgtgggaggtgctgatgctgtgcagagcccagcccttcggccagctgaccgacgagcaggtgatcgagaacgccggcgagttcttcagagaccagggcagacaggtgtacctgagcagaccccccgcctgcccccagggcctgtacgagctgatgctgagatgctggagcagagagagcgagcagagaccccccttcagccagctgcacagattcctggccgaggacgccctgaacaccgtgtag

SEQ ID NO: 80083 - DNA, 2631 bp, Artificial Sequence
  derived and/or modified sequence
atgggacctgaggcgctctcctctctgcttcttctgctgttggttgcttccggcgatgcagatatgaagggccacttcgacccagctaagtgtaggtatgccttaggaatgcaggaccgtacaatcccggattccgacatttcagccagctccagctggagtgatagtacagctgcacgacactctagactagaatcctccgatggggatggggcgtggtgcccagccggcagtgtgttccctaaagaagaagaatacctgcaggtcgatcttcagcgacttcatctggtcgcacttgtgggaacacaggggaggcacgctggcggactggggaaagagttctccagatcatataggctgcgttatagcagggacgggagacggtggatgggttggaaggaccgatggggccaggaggtgatcagcgggaacgaggatcctgaaggagtagtgcttaaggatctgggccctccgatggtggccagactggttagattttatccacgtgccgacagggtgatgtcagtttgtctcagagtggagctgtatggatgtttatggagggatggcctactgagctatacagctcctgtgggccagaccatgtatctatctgaagccgtttatctgaacgacagcacttatgatggtcacacagtagggggcctacagtacggtggcttaggacagttggctgatggtgtggtgggcctcgatgacttcaggaagtcccaggagctgagggtgtggccgggatacgattatgtggggtggagtaatcacagtttctcttcaggctatgtggagatggagtttgagtttgatcggcttcgcgcctttcaggccatgcaggttcactgtaacaacatgcatactctcggcgccagattacccggaggcgtcgaatgccgatttagaaggggacctgccatggcttgggagggagaacctatgaggcacaatttggggggcaacctgggagacccaagagccagagccgtcagcgtgccactaggtggacgagtcgcaagatttctgcagtgtcggttccttttcgccgggccttggttattgttctccgagatatcttttatatctgatgtcgtaaacaactcatccccagccctgggcggcaccttcccccccgccccatggtggccacctggtccacctcccaccaactttagcagtttagagctcgaaccgcgggggcaacagccagtggccaaggcggaggggagccccacagccatcttgatcggatgccttgtggcgatcatactgctcctccttcttatcattgctttgatgctgtggcgcctccattggcgccggttgctgagtaaagccgaaagacgcgtgctggaggaagaactcaccgtgcacctgtccgtccccggagacacgatactgattaacaatagaccagggcctcgcgaaccgcccccatatcaggaaccccgcccccggggtaatcctccccattctgcaccgtgtgtgcctaatggctctgcttactccggagactacatggaacccgagaaacccggtgccccgttactgccaccccccccacaaaactcagtgcctcattatgccgaggcagatattgtgactttacaaggcgtcacaggcggcaatacctacgcggtccctgcccttcctcccggcgccgtgggagatggaccccccagggttgacttccccaggtcaagactcaggttcaaagaaaagctgggagagggccagtttggcgaggtgcacttgtgtgaggtagacagtccccaggacctggttagtctcgatttccccctgaacgttcgaaagggccatcctttgctggtggctgtaaagatccttcggccggacgcaacgaaaaacgcccggaacgatttcctgaaagaggtgaaaataatgagtcgcttaaaggatcccaacattatccgcctgctgggcgtctgcgtgcaggatgaccccttatgcatgataactgattacatggaaaacggggatctcaatcagtttctctctgcccatcagcttgaggataaggccgcagagggagccccaggcgatggacaggctgcacaaggaccgactattagctacccaatgttgttgcatgtagcggcgcaaatcgcctctggaatgaggtatctggccacactgaactttgtacatcgcgatttagccacaagaaactgcctagtcggggaaaatttcacaattaagattgcagattttgggatgagtcggaatttatacgccggagactattatcgagtacaaggccgcgcagtgctccctatccgctggatggcctgggagtgtattcttatgggcaaattcactaccgcctccgatgtctgggcgttcggtgtgacgctctgggaggtgctcatgttgtgcagggcacaaccatttggacagctaactgatgagcaggtcatcgaaaatgccggtgaattctttagggaccaaggaagacaggtgtacctgtctcgccctccagcatgcccccaaggactgtacgagctgatgctaagatgttggagtcgggagtccgaacagaggccaccattctcacagttacaccggttcctcgccgaggatgctctgaacacagtgtag

SEQ ID NO: 80084 - DNA, 2631 bp, Artificial Sequence
  derived and/or modified sequence
atgggcccagaagctctgtcatctctgctcctccttctgctagtggccagtggggatgccgacatgaaaggacattttgatcccgcgaagtgcagatatgcgctaggaatgcaggacagaacaattccagactccgatatctccgcctccagtagctggtctgactctactgcagccagacattctcgcctggaaagtagcgacggcgatggcgcatggtgtcctgcgggctctgtgtttcccaaagaagaggaatatctgcaggtggatctgcaacggttacacttggtcgcactcgtcggaacacaagggcggcatgcggggggtttgggaaaggagttcagccgttcatacagactgcggtacagccgcgacggaaggaggtggatgggctggaaagataggtggggacaggaagttatctccggtaacgaagatccggaaggagtcgtgctcaaagacttggggccgcctatggtcgcccggctcgtccgcttctacccccgggccgaccgggtcatgagcgtttgtctgcgcgtcgagttatacggttgtttgtggcgtgacggcctgctttcttatactgcccctgttgggcagaccatgtatctctctgaagctgtttatctgaacgactccacatatgatggacacactgtcggcggccttcaatacgggggcctcggccaactagctgacggcgtggtcggcttggacgatttcaggaagagtcaggagctgcgcgtttggccaggctacgattacgtgggctggtccaaccacagcttctcaagcggttacgtggagatggaattcgagtttgaccgcctccgcgccttccaggcgatgcaggtccactgtaacaatatgcatacattgggcgcacggctgcctggaggggtggaatgcaggtttaggcggggtccagcaatggcctgggaaggggaacccatgaggcacaatctcggcggcaatctcggggacccccgcgctagagctgtgtccgtgcccttgggcgggcgagttgcccgattcctccagtgtcgctttcttttcgccgggccatggttattgttcagcgaaattagcttcataagcgacgttgtgaacaatagctcaccggccctcggcggcacttttccacctgcaccttggtggccacctggtccccccccaacgaatttcagctccctggagctagagccccgcggccaacagcccgtcgccaaggctgaaggtagtccaaccgccattctcatagggtgcctggtcgctattattctgcttcttttgctgatcattgccttaatgttatggagattacactggcggcggttgctatccaaagcagaaagacgcgtcctcgaggaggagctgacggtgcacttgagtgttccgggtgatactatcttgattaataacagacccggcccccgagagcccccaccctatcaggagcctcggccaaggggcaatcctcctcattctgcaccttgcgtgcccaacggaagtgcttactctggagactacatggaacctgaaaaacctggggctcccctactgccaccgcccccccaaaacagtgtgcctcactatgcagaagcagacattgtgacattgcagggcgtgacaggcgggaacacctatgcggtgcctgcgctacctcctggggcagtcggagacggcccgcccagagtggactttcctagaagccggctaaggttcaaggagaagctcggagagggccagtttggagaggtgcacttatgtgaggttgacagtccgcaggatctcgtaagtctggacttcccccttaacgtaaggaaggggcaccccttgctggtcgcagttaagatcctgcgcccagacgccacaaaaaatgcccggaacgactttttgaaggaagtgaagattatgagcagactaaaagatcctaatattatccggctgctgggagtctgcgtacaagacgaccctttgtgtatgattacggattacatggagaacggcgatcttaaccagttcttatctgcgcaccaattggaggataaagccgccgaaggggcaccgggcgacggacaggcggctcaggggcccaccatttcataccccatgttactccatgtggcagcacagattgcctcgggcatgcggtacctcgcaacacttaactttgttcatcgtgacctcgctacacgaaattgcctggtgggcgagaatttcacgataaaaatcgcagattttggaatgtcccggaacctctacgccggcgactactacagagtgcagggccgcgcagtgttgccaattcgatggatggcttgggaatgcatcctcatgggaaaattcactaccgcttccgacgtttgggcctttggcgtgaccctttgggaagtgctgatgctgtgtcgggcccagccatttggtcaactcaccgatgagcaagtgatcgagaatgccggcgaatttttcagagatcagggcagacaggtatatctctcaaggcccccggcatgcccgcagggactctatgagctgatgctgcggtgttggagcagggagtctgagcaacgcccaccattcagccaattgcacaggttcctcgcagaagacgctttgaacacagtgtag

SEQ ID NO: 80085 - DNA, 2631 bp, Artificial Sequence
  derived and/or modified sequence
atgggaccagaggccctgtcctctctcttacttctactactcgtggcctcaggagacgcagatatgaagggtcatttcgaccccgctaagtgcaggtacgcattagggatgcaggacaggactattccagattcagatatctctgcctcatcctcctggtcagactcaaccgctgcgaggcattcgaggctggaaagcagcgatggcgacggggcttggtgtccagccggatctgttttcccaaaggaggaagagtaccttcaggttgatctgcagcggctccacttggttgctcttgtgggcacacagggtcgacatgctggcggcttgggaaaagagttcagccgttcctaccgccttcgatacagccgcgatgggcgcaggtggatggggtggaaggaccgctggggacaggaggttatctctggaaacgaagaccctgagggtgtggtgttgaaagaccttggtcctcctatggttgcccgcctggtgcggttctaccctagggctgaccgggtgatgtccgtctgcttacgggtcgaactatacgggtgtctgtggagagacggtctcctgagctacaccgcgcccgtcgggcagacaatgtacctcagtgaggctgtttatttgaatgactctacttacgatggtcacaccgtcggcggtctgcagtatgggggactcggacaactcgccgatggagttgtggggcttgacgacttcaggaagtcacaggagctaagggtctggcctgggtatgactacgtggggtggagcaatcattccttctccagtggttacgtggagatggagtttgagttcgacaggctccgcgcatttcaggccatgcaggtgcactgcaataatatgcacacactaggggctcgactgcccggaggggtggaatgtagatttcgaagagggccggctatggcttgggagggtgaaccaatgcgtcataacctgggtggcaacctgggtgatccacgtgcacgggccgtaagcgtgcctctcggtggccgcgtagccagatttctgcagtgcaggtttctgttcgccggcccctggttactgttcagtgagatctcattcatcagcgatgtagtcaacaacagctcccctgcccttggcggcacctttcccccagccccctggtggcccccaggaccccctcccacaaacttcagttccctagagcttgaaccccgcgggcaacaacccgtcgccaaagctgaagggtccccaaccgccattttgatagggtgcctggtggccattatactattgttattgctgatcatcgccttaatgctgtggaggctccattggagaaggctgctatcaaaggctgaacgcagggttttggaagaggaactgactgtgcacttgtccgtccctggggatactattctgattaataatcggcctggtccacgtgagccccctccgtaccaggagcctagaccgcgaggaaaccccccccacagtgcaccatgtgtgcccaacggcagtgcttacagtggagattatatggaacccgagaagcccggggcacccctgctccctccaccacctcagaattcagtgccgcactatgcggaagcagatatcgtaaccctccagggagtgaccgggggcaacacatatgcagtgcccgctctgccaccaggggccgttggagatggcccccctcgcgtggattttccacgctcccgacttcgtttcaaggaaaagctgggtgagggccagttcggagaggtgcacctgtgcgaggtggatagtccgcaagacctggtgtcgctggatttccccctgaatgtgcgcaaaggacaccccctcctagttgccgttaagatcttgcggcccgatgctactaagaacgcacgtaacgatttccttaaagaagtgaagatcatgtcaagacttaaagacccaaatataatccgcctcctaggcgtgtgcgttcaggacgatccactctgcatgatcaccgattacatggaaaatggagacctcaatcagtttctgagcgcacatcagcttgaggacaaagccgcagagggagcgcctggagatggacaggctgcccaaggtcccactatctcatacccaatgttattgcacgtcgccgcccagatcgccagtggtatgcgatacctggctacattgaactttgtgcaccgagatctggcgactaggaattgcctcgttggcgagaacttcaccatcaaaattgccgactttggcatgtctcgcaatctgtacgccggcgactactatcgcgtgcagggaagggctgtcctacccatccggtggatggcttgggaatgcattctgatgggaaagtttaccacagcctctgacgtttgggcttttggagtcactctctgggaggtgctcatgctgtgtcgcgctcagcccttcggtcagctaactgatgaacaggtaattgagaacgcaggcgagttcttccgggatcagggtagacaggtgtatctgagccgccctcccgcatgcccgcagggactgtatgaattaatgctccggtgttggtctcgggagagtgagcaacgccctcccttctcacagctgcacaggtttctcgccgaggatgccctcaatactgtgtag

SEQ ID NO: 80086 - DNA, 2631 bp, Artificial Sequence
  derived and/or modified sequence
atggggccggaagcattgagctccttacttctgctgctgctggtggccagtggagacgctgacatgaaagggcacttcgatcccgctaaatgtaggtatgcattggggatgcaggacagaacaattcccgactcagacatttcagctagttcctcctggagcgactccactgccgccagacacagccggcttgagtcatccgatggtgacggggcgtggtgtccagctgggtccgtttttcctaaggaagaagaatacctgcaggtggacttgcaacggttacacctggtcgcattggttgggactcagggaaggcatgcaggagggttaggaaaggagttttcaaggtcatatcggctcagatattctagagatggtcgcagatggatgggctggaaagatagatggggtcaggaggtgatctccggtaatgaggaccctgagggtgtggtcttgaaagatctcgggcctcctatggttgctcggctggtgcggttttatcctcgggccgatcgggtaatgtcagtgtgtctccgggttgagctctatggatgtctgtggcgggatggattactgtcctataccgcgccggtgggtcagaccatgtacctcagcgaggcagtttatcttaatgactcaacctacgacggccacaccgttggcggactgcagtatggagggttgggacagctggctgacggggttgtcgggttagacgatttccgcaagtcacaggaactccgcgtatggcccgggtacgactatgtcggctggtctaatcactctttctcatcgggttacgtcgaaatggaattcgaattcgaccggctgcgagccttccaggccatgcaggtccattgcaacaacatgcatactctgggcgccaggctccctggcggtgtggagtgtcgctttagacgggggcccgcaatggcctgggagggggaacccatgagacacaatctcggaggtaatttaggagaccctcgtgcaagggcggttagtgtgcctctgggcggtagagttgcccgctttctgcagtgcaggttcctgttcgcagggccttggttattgttctccgaaattagcttcatctctgatgtcgtgaataactccagtcctgctctgggcgggaccttccccccggctccctggtggccaccagggccgccgccaacaaacttcagcagcctcgaattggaacctaggggacaacaaccagtggctaaggcagagggaagccctacagccattctcatcggctgcctggtggcaattatcttgctcctcctgctgatcattgctctcatgctgtggcgcctgcattggaggcgtcttcttagcaaggctgaaagacgggtgctcgaagaggagttgacagtgcacttgtctgtgcccggggacacaattctcatcaataatagaccaggaccccgagaaccccctccttatcaggagccaagaccgagaggcaatccgccccattctgccccgtgcgtgcccaatggaagcgcctattccggcgattacatggaacccgagaaacctggagccccacttctgccacctcccccccagaatagcgtaccacactatgccgaggcagatattgtgacgctgcaaggcgtcactggaggcaacacttatgccgtgcccgcactgccccccggggctgtcggtgatggccccccccgtgtggattttcctaggagcaggctgaggttcaaggagaaactcggggagggccagtttggagaggttcacctatgcgaggtggacagtcctcaggatctagtaagcttggactttccattaaatgtgcgtaaaggacacccactgcttgtggccgtgaagatactcagacccgacgccaccaagaacgcacgaaatgatttcctgaaagaagtgaagatcatgtcccggttgaaggacccaaatataatcagactgctaggagtttgtgtccaggatgaccccttatgtatgatcaccgattacatggagaatggagaccttaatcagtttctgagcgcccaccagctggaggataaagcagcggagggggcccctggagatggacaggccgcacaggggcctactatctcttaccccatgctgctccacgtagccgcccagatagcctctgggatgcgatacctcgccactctcaattttgtgcaccgggatctggcaactaggaattgcctggtgggtgaaaacttcactattaagattgccgatttcgggatgagtaggaacctctacgcaggagactattacagagtgcaggggagggccgtgctgcccatcagatggatggcctgggaatgcattctaatggggaaatttacaacagcctctgatgtctgggccttcggagtgactctctgggaggtattgatgctttgtcgcgctcagcccttcggccagctgacggacgaacaggttattgaaaacgcaggggaattctttagggatcagggacgtcaagtatacctctcccggccccctgcctgcccccagggactttacgagcttatgcttagatgctggagccgagagagtgagcaaaggcccccgttttcccagcttcatagattcttagccgaggatgctctgaacacggtctag

SEQ ID NO: 80087 - DNA, 2631 bp, Artificial Sequence
  derived and/or modified sequence
atgggcccagaggcactgtcaagccttctgctcctcctcctcgtggcctcgggggatgcagacatgaaagggcatttcgaccctgcaaagtgtcgctacgcactgggcatgcaggaccggaccattcctgatagtgacattagtgcttcctcttcatggtcggattctaccgccgcccgccacagccgactagaaagtagcgacggagatggagcttggtgtcccgccggctctgtcttcccaaaggaagaagaatatttgcaggtcgatctccagcggctgcatctggtcgcacttgtggggacacagggcagacatgccggagggctgggtaaggagttttcaagaagctaccgcctccgctactcgcgggatggtcgccggtggatgggttggaaggatcgttggggccaggaggtaatctccggaaacgaggaccctgaaggggttgtcctcaaagatctcggccctcccatggtggctcgcctggtaagattctacccacgggccgaccgtgtgatgagcgtttgcctgagggtggaactctacggttgcctctggagagacggattgctgtcctacactgctcccgttggccagacaatgtacctgtcagaggctgtttacctgaacgattctacttatgatggccacacagtgggaggacttcagtacggagggctgggccagctggctgacggggtagttggacttgatgattttcgtaagtcccaggaactgagggtgtggccagggtacgactacgtgggctggagcaaccatagtttttctagtggatacgtggagatggagtttgaattcgaccggttgcgagccttccaggccatgcaggtgcactgcaataatatgcacaccctgggagcgagacttccagggggggtcgagtgtcgctttcgccggggaccggccatggcatgggaaggtgagcctatgcgccacaatctaggtggcaacctgggcgatcccagagcccgggctgtgtccgtgccgttaggtgggcgggtggccagatttctgcaatgccggttcctgtttgctggcccctggctgctgttcagcgagatcagctttatttctgatgtcgtgaacaatagctcccctgcactcggcgggacatttccccctgcaccctggtggcctcccggtcccccacccacgaatttcagctccctggagctggaacccagaggacagcaaccggtggccaaggctgaaggttcaccaactgcgatcctcatcggttgccttgtcgcgattattcttctactcttactgattatcgccctgatgctttggagactgcactggagaaggctcctcagcaaggcagagagacgtgtgttggaggaggaactcaccgttcacctgagtgttcccggcgacacaatcctgataaacaacagacccggccctcgggagcccccaccttaccaggaaccgcggccgcgaggcaatccaccccattccgcgccctgtgtacctaacgggtccgcttactcaggtgactatatggagccagaaaagcccggcgctcccttgctcccaccccctcctcagaacagcgtgccgcactatgccgaggccgacattgtaacattgcaaggggtcaccggaggcaacacatatgctgtgcctgcattgcctcctggagctgtgggcgatggacctccacgcgtcgactttcctcggtcaaggctccgatttaaagaaaaactcggtgaggggcagtttggcgaggtccacctatgtgaggtggacagcccgcaggacctggtatctttagactttccacttaatgttcgaaaaggccatcctctgttggttgccgtgaagattctaaggcctgatgccacaaagaatgctcgtaacgactttctgaaagaagtgaaaataatgtcgcgtctcaaagatcctaacatcatacgcctactaggggtgtgcgtgcaggacgaccccctgtgcatgatcactgattacatggagaacggcgatctgaaccagtttctcagtgcccatcaactagaggacaaggccgcagagggcgctccaggagacggccaggccgctcagggtccaacaatcagctatcccatgctgttgcatgttgcagcccagatcgcttccggtatgcgctatctggcgacactgaactttgtgcatcgagatctcgccactcgtaattgcctggtgggggagaactttaccattaagatcgcagatttcggaatgagccgcaatctctacgcaggggattattatcgcgttcagggaagggccgtactgcccatacggtggatggcttgggagtgtatcctcatggggaagttcactacggcttccgatgtgtgggccttcggggtcacattgtgggaggtactaatgctctgtagggcacagcctttcggacagctgaccgacgagcaggtgatagagaatgctggggagttcttcagagatcagggaaggcaggtgtatctgtccagaccccctgcatgtccacaggggttatatgagttgatgctgcgttgctggtccagggagagtgaacagcgtccacctttctctcagctgcaccgattcctggccgaagacgctctgaatactgtgtag

SEQ ID NO: 80088 - DNA, 2631 bp, Artificial Sequence
  derived and/or modified sequence
atgggccctgaagctcttagctccctgctgctgctgctgctggtagctagcggagacgctgacatgaaaggccactttgatcctgcgaagtgccgctatgcactggggatgcaggatcgcaccatccctgatagcgatatttctgcctccagttcctggagcgacagcaccgcggccagacattcacggctggagtcatccgatggcgatggagcttggtgcccagcaggaagcgtgtttccaaaggaagaagaatatttgcaggtggatctgcagcgcttgcacctcgtggctctagtcggcactcaaggcaggcatgccggaggcctcggcaaggagttctcgagatcttatagattgcgctatagccgcgatggcagaagatggatgggctggaaggacaggtgggggcaggaagtcatatccggtaatgaagatcctgaaggtgtggttttaaaggacctcggaccacctatggttgcccgtctcgtgcgtttctacccccgcgctgatcgggtaatgtcagtgtgtctgagagtcgagctctatggatgcctctggagagatggactgttatcgtatacagctcccgtcggacaaacaatgtacctctccgaagcagtttatctcaacgactcaacctatgacgggcataccgtcgggggtctgcaatacgggggcctcgggcagttggccgacggcgttgtgggcctcgacgacttccgaaaatcacaggagctcagggtctggccagggtatgactacgtgggatggtccaatcactccttttcatctgggtatgtggaaatggaatttgagtttgacaggcttcgggcctttcaagcaatgcaggtgcattgcaacaatatgcataccctcggggccagactcccggggggcgtggagtgcaggtttagacgcggacctgccatggcctgggagggagaacccatgaggcacaatctggggggaaacctgggagaccctagggcccgggcagtctccgtacctttgggtggccgcgttgcccgtttcctgcagtgccgctttctgttcgcaggtccgtggctcctcttctctgagatcagtttcatcagcgacgtggtgaacaacagctctcccgccttgggcggcacgtttcctcccgccccatggtggcccccagggcctccaccgaccaatttctcatccttggaattggaaccaaggggacagcaacctgtggctaaagctgagggcagtcccactgctattctgattggatgtctggtcgcgataattttattactactactgatcattgccctgatgctttggagattacactggagacgcctcctgtcaaaagccgaacgacgcgtcctcgaggaggaattaacggttcacctgtccgtacccggcgacaccatacttattaacaacaggcccggtcctagagagccgcccccttaccaggaacctagaccaagggggaatccccctcattccgccccctgcgtacccaatggtagcgcatatagcggcgattatatggaacctgaaaaacccggcgcaccactgctgcccccaccaccccagaactcggtgcctcattatgctgaagctgatatagtaacgttgcaaggcgtcactggtggcaacacctacgccgtgcctgccctccctccaggtgctgtcggggacggaccgcccagggttgatttcccgcgctcacggcttagattcaaggaaaaactaggagaaggccagttcggggaggtgcacctgtgtgaggttgactcaccacaagacttagtatctctagactttcccctgaacgtgcgcaagggccatcctctgcttgtcgcggtcaagatccttcgccctgacgccactaagaacgcccggaatgatttcctgaaagaggtcaaaataatgtctagactgaaggaccctaatataattcgacttctaggagtgtgtgtgcaggatgacccactgtgtatgatcacagattacatggagaatggggacctgaaccaattcctgtcagcgcaccagcttgaggacaaggctgctgagggggctcccggagatggacaagccgctcagggcccaactataagctatccgatgttgctgcatgtggccgcacaaattgcctccggcatgcgatatcttgctacccttaattttgtacatagagatctggcaaccaggaattgcctcgtcggcgagaactttaccatcaagattgcagattttggcatgagccgaaacctctatgccggggactattatcgggtccaggggagagccgtgctgcccatccgatggatggcatgggagtgtatcctcatgggaaagttcaccactgctagcgacgtgtgggcattcggcgttactctatgggaagttctgatgctctgtagagctcagcccttcggacagcttacagacgaacaagtgatcgagaacgcaggggagttctttcgagaccaaggtcggcaggtgtacctcagcaggcctcctgcgtgtcctcaaggcctgtacgaactgatgcttcgttgctggagcagagagagtgagcaacgaccccccttctcacagctccatcgctttctggcggaggacgcccttaacactgtgtag

SEQ ID NO: 80089 - DNA, 2631 bp, Artificial Sequence
  derived and/or modified sequence
atgggcccagaagctctgtccagtttgctgcttctgcttttggtcgcttccggagacgctgacatgaaagggcacttcgatcctgccaagtgcaggtatgcattgggtatgcaggaccgtacgatccccgactcggacattagcgcctctagctcttggtctgattcaaccgccgcccgccactcgcgcttagagtcatctgacggcgatggagcctggtgtccagccggttcggtttttcctaaggaagaagaatacttgcaggttgaccttcaacgcttgcacctcgttgccctggtgggtacgcaaggtaggcacgctggtggcttagggaaggaattctcaaggagctacaggctccgttactcacgcgatggtcgccggtggatgggctggaaagaccgttggggccaggaggtaatctctggaaatgaggatccggaaggtgttgtattaaaggacctggggcctcccatggtcgctagactagtgaggttctacccccgggccgatcgtgtcatgagcgtgtgcctgagggtggagttgtacggctgcctgtggagagatggactgctgtcgtatacagcccccgtggggcaaaccatgtacttgagcgaagccgtgtacctgaatgactcaacttatgatgggcataccgtcggagggctacagtatggagggctcgggcaacttgctgatggcgtggtggggctcgacgatttcaggaagagccaagaattgcgggtctggccgggatatgattatgtcggatggtccaatcatagcttttcttcaggttacgtcgagatggaattcgagtttgatcggcttagggcttttcaagccatgcaagtacattgtaataacatgcatacgctaggtgctaggctgcccgggggggtcgagtgcaggtttcggagaggccccgcgatggcctgggaaggagagcctatgcgccataacttgggcggaaatctcggagatcctagggcccgggccgtgagtgtgcctctcggaggacgggtcgccagattcctgcaatgccgcttcctgttcgccgggccttggctgttgttctctgagatctcattcatctctgacgtggtcaacaactcctcccccgccctgggaggtacattcccacccgcaccatggtggccccccggtcctccgccaaccaatttctcatcattggagttagagccgcggggccagcagccagttgctaaggccgagggatctcctacggccatcctgataggctgcctggttgctataatccttttactcctcttaataatcgcccttatgctttggaggctgcattggagaagactgctatcaaaggctgagcggagggtcctggaggaagaactgacagtgcatttaagcgttccaggcgacacaatattgattaacaatagaccaggtccccgggagcctcccccataccaggagccgcgacctagaggcaatccaccacatagtgccccatgcgttccaaacggcagcgcctattcaggtgactacatggaacccgagaaacctggcgcccctctgcttcctcctcctccccaaaattccgtgccccattatgctgaggcagacatcgttacgctccagggcgtgacgggcggcaatacatacgccgtcccggccctcccaccgggcgcggtcggggacggtcctccaagagtggacttccctagatcacggctgcgttttaaggaaaaactgggtgaaggtcaatttggagaagttcacctgtgtgaagttgattctccccaagacctggtttctttggacttcccgttaaatgtccgaaaggggcaccctctgctagtagcagtcaagattctgcgtccagatgccactaagaacgccaggaatgactttctgaaagaggtaaagatcatgagtagactaaaggaccctaatatcatccggctgttaggggtctgtgtgcaagacgatcccctctgcatgattactgactacatggagaatggcgatctgaatcagttcctctccgcccatcaactggaagataaggcagccgaaggggccccaggtgatgggcaagctgcccaggggcccaccatctcgtacccaatgttactgcacgtggccgcccagattgcctctgggatgcggtacctcgcaaccttaaattttgtgcatagagatcttgccacaaggaactgtctcgtgggagagaactttactatcaagattgccgacttcggcatgagcaggaatctttacgccggggattactacagagtgcagggtcgcgccgttcttcctatcaggtggatggcatgggaatgcatcctgatgggcaaattcactacagcttccgacgtttgggcattcggcgtgacactgtgggaggttcttatgttatgcagggctcagccttttggccagttaactgacgaacaggtgatcgaaaacgctggggagtttttccgggaccagggtcgacaagtctacctgtcccggcctcccgcatgcccgcaggggctttatgaattgatgctccgctgttggtccagagagtcagagcaacgtccccctttcagccagctgcaccggtttctggctgaggacgctttaaacacggtctag

SEQ ID NO: 80090 - DNA, 2631 bp, Artificial Sequence
  derived and/or modified sequence
atgggaccagaggctctttcctctcttctcctcctactgcttgtagccagtggagatgcagacatgaagggccactttgatccagccaagtgtcgatatgccctcggaatgcaagatagaacaattcctgattcggacatatctgccagcagcagctggagcgactctacggctgcgagacactctcggctggaatcaagcgatggagatggagcatggtgtcctgccgggtccgtttttcctaaggaggaagagtatctgcaggtggacctccagagactccatttggtagccttggtcgggacccaggggcgccacgctgggggccttggcaaagaattttctcggagttacaggttgcggtatagtcgtgacggacgaagatggatgggctggaaagatcgatggggccaagaggtgattagcggaaatgaggaccctgaaggagtcgtcctaaaagatctgggtccccccatggttgcgagacttgtgcgcttctatccgagagccgatcgtgtgatgagtgtttgccttagggtcgagctatatggctgcctttggagagatggtttgctgagttatacagcccccgtgggccagacgatgtacctttctgaggccgtgtatttaaatgactcgacttatgacgggcacaccgtgggcggactgcagtacggaggattggggcagctcgctgatggggtcgtgggcctcgacgacttccgaaaatctcaggagcttcgagtgtggcctggctacgattatgtcgggtggtctaatcactcgtttagttccggatatgtggaaatggagtttgagttcgatagactgcgggcttttcaggcgatgcaggtacattgcaacaatatgcatacgctgggtgccagactaccaggaggggtagagtgtaggttccgaagagggcctgccatggcctgggagggcgagccgatgagacataacttaggcgggaacttgggggatccccgtgcacgggccgtgagtgtgcctctcggcggcagggtggcgcgcttcctgcagtgccggttcctgtttgcaggtccttggctcttgttcagtgagattagcttcatatccgacgtcgtaaacaattcctcaccagcactgggtggtacctttccacccgctccttggtggccccctggcccaccccccacgaattttagcagtctggaattggaaccaagagggcagcagcctgttgccaaagctgagggctcaccgactgcgatcctcatcgggtgcttagtcgctataatcctcctgctgctgttgattatagcactgatgctgtggcgtttacactggaggcgattgctgagcaaagcagaacgccgggtgttggaggaggaactgaccgtgcatcttagcgtccctggcgacactatcctgattaacaatagaccaggcccccgggagcctcccccataccaggagcccagacctcgaggcaatcctccacactccgcgccatgtgtgcctaatggctctgcctactccggcgattacatggaacctgaaaaacccggtgccccactgctgcctccccccccccagaactccgtgcctcactacgccgaggccgacatcgtaactctgcagggcgtaacgggcggaaacacgtatgccgtgccagctctgccacccggcgcagtcggtgatggtcctccccgggtagacttcccacggagtcggttgcgcttcaaggaaaaactgggagaggggcagttcggtgaggtgcacctgtgcgaagttgacagccctcaagatttggtgtccttggatttccctctcaatgtcaggaaaggccacccgcttctcgtagccgtgaagatactgcggcccgacgccaccaaaaatgcccgcaacgattttctgaaggaggtcaaaataatgtcacgcctgaaggacccaaacatcatacgcctgttgggagtgtgcgtccaggatgaccctctctgcatgatcacagactacatggagaatggagacctgaaccagtttctcagcgcccatcagctggaggacaaggcagcggagggagctccaggggacgggcaggctgcacaagggccaaccatttcttaccccatgctactgcatgtagctgctcagatcgcgtctgggatgagatatttggctacactgaacttcgttcatcgcgatctggccacacggaactgccttgtaggagagaattttacgatcaagatcgccgatttcggcatgagtaggaacctgtatgccggcgattattatagggtccagggcagagcggtcctgcctatccgatggatggcttgggaatgtatccttatgggaaaatttactacagcaagcgatgtttgggcgttcggcgtcactctgtgggaagtgcttatgctgtgtagggctcagcctttcggtcagctgactgatgaacaggtcatcgagaacgcgggtgagttctttagagaccaaggacggcaggtctatctgagtcgcccccccgcatgccctcaaggcctttatgagctcatgctccgatgctggtcacgagagtcagaacaaaggccgcccttctcacaactacacaggtttttggccgaggatgctctgaacaccgtgtag

SEQ ID NO: 80091 - DNA, 2631 bp, Artificial Sequence
  derived and/or modified sequence
atgggccctgaagcgctctcatcgctcctgctgctcctgctagtggctagtggcgacgccgacatgaaaggacattttgacccagccaaatgccggtatgccctaggcatgcaagatagaactattcccgactctgacatcagtgcctcatcctcctggtccgacagcactgctgcacgtcatagtcgattggaaagttcagacggtgatggcgcctggtgccctgcaggcagcgtattccccaaagaggaggaatatctgcaggttgaccttcagcgcctccacctagttgcattggtgggcacacagggtcggcacgcagggggccttggtaaggagtttagtcgctcctacagactccgctactcacgggatggacggcggtggatgggctggaaagatagatggggtcaggaggtaatctctggcaacgaagaccctgagggagtcgtgcttaaggatctgggcccaccaatggtagcgcggttggttcggttctaccctcgggccgacagggtcatgtcagtatgtctgagggtggagctttacggttgcctatggcgagatggcctgttgtcatatacagcccccgtggggcaaacgatgtatctgtctgaggccgtgtatcttaacgattccacatacgatggccatacagtcggcggcctccagtacggtggcctgggacagcttgcagacggagtggtgggtctggacgactttcgtaagtctcaggagctccgtgtctggcctggttacgactatgtgggatggtcaaatcacagcttttccagcgggtacgtagaaatggaattcgagtttgacaggctaagagcctttcaggctatgcaggttcattgcaacaacatgcacacactcggcgccagactgcctgggggcgtcgaatgtaggttccgacgtgggccggctatggcttgggagggagagccaatgcgccacaacctcgggggcaacctgggtgaccctagagcacgagctgtgtccgtgccgctcggcgggcgcgtggctcgatttctacagtgcaggtttctttttgccgggccgtggctcctgttttccgagatctcttttatcagcgacgtggtgaataactcttcacctgccctgggggggacatttcccccagccccttggtggcccccaggtcctcctcctaccaattttagcagtctggaattggaacctagaggccaacagcccgtggctaaagccgaaggcagtcccactgcgatcctcatcgggtgtctggtcgctatcatactcctgctcttgcttatcatagctctcatgctatggcgattacattggagaaggctcttgagcaaggctgagcggcgcgtgttggaagaggagttgaccgtccatctgtcagttcctggggacactattctgatcaacaatcggccaggaccaagggagccaccaccataccaggaaccccggcctcgggggaatccaccgcactccgccccatgcgtgccgaatggtagcgcctattctggggattacatggagcctgaaaaacctggagcccctctgctaccaccaccgccacaaaacagcgtgccccactacgcggaggccgacatagtgaccctgcaaggcgtgaccggcggcaatacatacgcagttcctgccctccccccgggagcagttggcgacggacccccaagagttgacttcccacgttctagactgcgattcaaggaaaaactgggagaaggacaattcggtgaagtgcatctctgcgaggttgattcgccgcaggatctcgtgtcattagatttccccctgaacgtgagaaaaggtcatcccctgctggtggcggtcaagatcttgaggccagatgcaacaaagaacgcccggaacgacttcctgaaggaggtgaagataatgtcaaggctgaaggatccgaatattatacgcctgctgggggtgtgtgtgcaggatgaccctctgtgcatgattaccgactatatggagaatggcgatttgaatcaattcctctctgcgcatcagcttgaggataaggctgccgaaggggctcctggcgatggacaagctgcgcagggtcctaccatatcctacccaatgttgcttcatgtggccgcccagattgccagcggcatgaggtacctggccaccctcaacttcgtgcacagagatctagcaacgaggaactgtctggtaggggagaacttcacaataaagattgcagactttggaatgtctagaaatctgtacgcaggtgactactaccgcgtgcagggtcgggcagtgttacccatccggtggatggcttgggaatgtattttaatgggtaaatttacgacagcatcagacgtgtgggctttcggggttaccctatgggaggtcctgatgctgtgtcgagcacaacctttcggacagctgaccgatgagcaggtgattgagaatgctggcgagttctttagagatcagggccgtcaggtgtatctgtctaggcctccagcgtgtcctcaggggctgtacgagttgatgttacgctgttggtctcgggaatccgagcagagacctccattttcacagcttcataggttcctggctgaagatgccctgaacaccgtctag

SEQ ID NO: 80092 - DNA, 2631 bp, Artificial Sequence
  derived and/or modified sequence
atgggcccagaggccctatcgtcgctgttgctgctcttgctggtcgctagcggagatgcggacatgaagggccactttgatcccgctaaatgcagatacgctctcggtatgcaggaccgaaccatcccagattctgatatttcagcctccagcagttggagtgactctactgcggccagacattccaggctggaatcctccgacggcgatggagcctggtgccctgcaggctcagtcttcccaaaagaggaagaatatcttcaggtggacttgcagagactgcacttggtggctctcgtgggaacgcagggaagacacgcaggggggctgggaaaagagttttcaagatcctatcgcttgcgctacagccgggacggaaggaggtggatggggtggaaggatcggtgggggcaggaggtgatatctggtaacgaggatccagaaggcgttgtcttgaaggatctgggcccacccatggtcgcccgtctagtgcggttctatcctagggccgaccgggtcatgtcagtctgtctcagggttgaactctacggatgcctctggagagacggccttttatcttatactgcccccgtcgggcaaaccatgtatctgtccgaggccgtgtacctcaacgactcgacctacgacgggcacaccgtgggaggattacaatatgggggtctgggacagctggcagacggagtggttggtctagacgactttcggaaatctcaggagcttagggtctggcccggctacgactatgtcggctggagcaatcattcattttcaagcgggtacgtggaaatggaatttgagtttgatcgactgcgcgcctttcaggccatgcaagtgcactgcaacaacatgcacacgttaggtgcacgtctgccaggcggtgttgaatgccggtttaggagggggccagcaatggcctgggaaggcgaaccaatgcggcacaacctcggtggtaatctaggcgacccccgagcccgggcggtttcagtgccgttaggaggtagagtggccagatttctccagtgccggtttctgttcgctgggccctggctgctgttttctgagatctcattcatctctgacgttgtgaataactcttcccccgcactgggcgggacctttccccctgccccctggtggccccccggtccccctcccactaatttctcttcactcgaactggagcctcgtggccagcaacccgtcgcaaaggcagagggaagtccaacagctatcctaattggttgtctggtagcaatcattctgctcctccttctcataatagcacttatgctctggcgcctgcattggcgaagacttctgtcgaaagccgaacgcagggtgttggaagaagaactcactgtgcatctaagtgttcctggagacactatcctgatcaacaaccggcctggtccacgtgagccacctccctatcaggaaccacgtccaaggggcaatccaccgcattctgctccgtgcgtgcctaatggtagtgcttacagcggggactatatggagccagagaaacccggtgctccactgctgccaccacccccccagaattccgtcccccactacgctgaggccgatatagtcacccttcagggagttaccggcgggaacacctatgccgtacctgctctcccacctggggccgttggggatggacctcctcgcgtcgatttcccccgaagccggctacgctttaaggaaaagctgggggagggccaattcggcgaggtgcacctttgcgaggtggattcaccccaggatttggtgagcttggattttccactgaatgtgagaaaggggcaccctctgctggtggccgtgaaaattttacgacctgatgccacaaagaatgcccgtaacgactttctcaaggaggtcaaaatcatgtcccgccttaaagatccgaacatcatccgattactgggagtctgcgtacaggacgatcccctttgcatgatcactgattatatggaaaacggggatctcaatcaatttctgtccgcccaccagctggaggacaaggctgcagagggggcgcccggcgacggacaagcggcccaggggccaaccatcagttacccgatgcttttgcacgtcgcagcacaaattgcgagtggtatgcgctacctagcaaccttaaatttcgttcacagggacctggctacccgcaattgcctagtaggagaaaactttacaatcaaaatcgcagatttcggtatgtccaggaacttgtatgctggggactactatagggttcaggggcgagctgttttgcccattcggtggatggcctgggagtgcatattgatgggaaaatttactactgcaagtgatgtctgggccttcggggtcaccctgtgggaagtccttatgctctgtcgcgcgcaaccattcgggcagctcacagacgagcaggtgatcgagaatgcgggagaatttttcagggatcagggtagacaagtgtatctgtcacgcccccccgcgtgtccgcaagggctgtatgagctgatgttgcgttgttggtccagggaatcggagcagcgccccccgttctcacaactgcataggttcctcgctgaggacgcacttaataccgtgtag

SEQ ID NO: 80093 - DNA, 2631 bp, Artificial Sequence
  derived and/or modified sequence
atgggccctgaggccctgtcaagcctgctgctgctgctgctggtcgcctctggggacgcagatatgaagggacacttcgaccccgccaagtgtaggtacgctcttggtatgcaagataggactatccctgacagcgatatttcagcatcttcctcctggtccgattcaaccgcagccaggcacagcaggttggaaagttcggacggggacggcgcctggtgccctgccggaagcgtcttccctaaggaggaggagtaccttcaggtagatcttcaaaggctgcatcttgtggctctggtggggacccagggccggcacgctggggggttggggaaggagttttcacggagctatcgcctccggtactcaagagacgggcgtagatggatgggatggaaggaccgttggggtcaggaggtgatctctgggaatgaggaccccgagggagtcgtgctgaaagacctcggacctcctatggttgccagacttgttagattttacccgagggctgacagggtgatgtcggtctgcctcagagtcgaactgtatggatgcctttggagagatggcttgctctcttacacagcccccgtgggtcagacgatgtatctgtccgaggcggtctacctgaatgattccacctatgacggccacaccgtcggcggactgcagtacggtgggctcggacagctagcagatggggtggtggggctggacgactttaggaaatcccaggagctgcgtgtgtggcccgggtacgactacgtcggatggagtaaccattccttctcatccgggtatgtggagatggaatttgaattcgacagacttcgcgcctttcaggcaatgcaggtccattgcaacaacatgcacaccctcggcgcccgcctgcccgggggcgtcgaatgcaggtttcggcgtgggcctgcaatggcttgggaaggcgaacccatgcgccacaaccttggcggcaatctgggggacccaagggcccgtgctgtgtctgttcctctgggtggccgcgtcgccaggtttctgcagtgcagattcctctttgccggtccatggttgctcttctccgaaatctcatttatttcagatgtggttaataattcttcgccagcgctggggggaaccttccctccagcgccctggtggcctccaggaccacccccaacaaacttcagcagtctggaactcgaaccgcgaggacagcagcccgtcgccaaggccgagggttcccctaccgcaattctcatcggttgtttggttgccatcatcttactactgctcctgattattgcgcttatgctgtggcggctgcattggagaagactgctgagcaaggccgagcgccgggtgcttgaggaggagctaaccgtccacctgtcagtgcctggggacacaattctgattaacaataggccagggccacgggaacctcctccctaccaggagccaaggccccgtggaaacccaccccattccgctccttgcgtgccaaatggctcggcgtatagcggggattacatggagcctgagaaaccaggggctccactgctgcctccacccccccagaacagcgtccctcactacgccgaagcggatatcgtcacattgcagggggtgacaggtggtaacacttatgctgtgccagccctgcctcccggggctgtaggggacggaccccctcgagtggatttccctaggagcaggctgcgattcaaggagaaattaggcgaaggtcagttcggcgaggtgcacttgtgcgaggtggacagtcctcaggacctggtttcacttgacttccctctgaatgttcggaagggccaccctctgctggtcgcagtgaagatcctgaggcctgacgcaactaaaaacgcgcggaatgattttctgaaggaagtgaaaattatgagccgcctcaaggaccctaacattatcagactactcggagtctgcgtccaagacgacccactgtgcatgattacagattacatggagaatggggacctgaatcaattcctgagcgcacatcagcttgaggacaaggcggctgagggagctcccggagatggtcaggctgctcagggcccaacaattagctaccctatgctgctgcacgtcgccgcccagattgcctctggaatgaggtacttagcaactctgaattttgtccacagggatttggctacacgcaactgcctcgtgggagagaattttactataaagatcgccgattttggcatgagccgaaacctgtacgccggtgactactatcgggtccaggggcgagcggtcttgcctatacgctggatggcatgggagtgcatactgatggggaaattcactaccgctagcgatgtgtgggcctttggggttaccctctgggaggtcctgatgctttgtcgagcacaaccgtttgggcagctcactgatgaacaagttattgaaaacgccggggagttttttagggaccagggccgccaagtctatcttagccgccctccagcatgtcctcaggggttgtacgagctcatgctgaggtgttggtcacgggaatctgaacagaggcctcctttcagtcagctgcatcgctttcttgccgaggatgccctcaatacagtgtag

SEQ ID NO: 80094 - DNA, 2631 bp, Artificial Sequence
  derived and/or modified sequence
atgggtccagaggccctgtcatctctactgcttctcctgctcgtcgcctcgggagatgccgatatgaagggccactttgaccccgccaaatgccggtacgccctgggaatgcaggatcgcacaatccccgacagcgacatctcagcgtcatccagctggagcgactccacagctgcccgacatagtcggctcgaaagttcagacggagacggtgcctggtgtccagctggatcagtatttcccaaagaagaagagtacctgcaagtagaccttcagaggctgcatttagtcgccctggtcggaacccaaggcagacacgccggaggacttggaaaggaattctctcgtagctatagacttcggtatagcagggatgggcgaagatggatgggatggaaggaccgatggggtcaggaggtaataagtggaaacgaggaccccgaaggtgtggtgcttaaggatctcggaccaccaatggtggctaggttggtgcggttttatccaagagctgaccgtgtgatgagtgtgtgtcttagagtggagctttatggctgtctgtggcgggatgggctgctcagttacaccgcaccagtggggcaaaccatgtatttgagcgaggcagtgtatctgaacgattctacatatgacgggcataccgtcggggggctgcagtatggtggactaggtcagctagcagacggagtcgtgggactggacgacttcagaaagtctcaggagctcagagtctggccaggatatgactacgtggggtggtcaaatcatagcttttccagtggctatgtcgaaatggagttcgagtttgatagactgagggcttttcaggccatgcaggtacattgtaacaatatgcataccctcggggctagactacccggcggagtcgaatgtagattccgccggggaccagctatggcctgggagggtgaacctatgcgccacaatcttggcgggaatcttggcgaccctagagcacgtgccgtttcggtgcctctggggggtcgtgtcgcgaggtttcttcagtgcagatttctttttgccgggccctggcttcttttcagcgaaatcagctttatttctgacgttgtgaataactcatcccctgcactcgggggcactttcccacccgctccctggtggcctccgggaccacctccaacaaacttctcatcacttgaactggagcctcggggtcaacagcccgtcgctaaagctgaagggtctcctactgcaatactcatcggctgtcttgtggcaattatcctgctgctcttgttgatcattgcactgatgctgtggcgcctgcactggcggcgactactttctaaagctgagcgccgggtactcgaggaagaactgacagtgcacctctcagttcccggcgataccattctcatcaacaatcggcctggccccagagagcctcccccataccaagaacccaggcctagaggaaaccctccgcattctgccccctgcgtgccaaatggctcagcatattcaggagactacatggagccagaaaagccaggcgccccactcctgcccccacctcctcaaaattcagtgccgcactatgctgaagccgatattgtcaccttgcaaggtgtcacagggggcaacacttacgcagttcctgcgctgcccccgggcgcggtcggggacggcccaccccgagtggattttcctcggagtcggctgcgattcaaggagaaacttggggaaggacagtttggcgaggtgcatttgtgtgaagtggactcgccacaggatctggtgtcgttagacttccccctgaatgtcagaaagggacatccattactggtcgccgtaaagatcctccgaccagacgcaaccaagaacgccaggaacgatttccttaaagaagtgaagatcatgtcaaggctgaaagacccaaacataattcggttgttgggagtctgcgtgcaggatgaccctctgtgcatgattacagattacatggaaaacggggaccttaaccagtttctctcggcccaccagttagaggacaaagccgctgagggggcccccggcgatggacaggccgcacagggacccacaatctcatatcccatgctattacatgttgctgcacaaatcgcttccgggatgagatatcttgccacactgaatttcgtgcacagagacctggccaccaggaactgcctggtaggggagaattttacgattaaaatcgccgattttggaatgtcccgaaacctatacgcaggcgattattaccgagtccaggggagagccgtgttacctattaggtggatggcctgggaatgtatcctcatgggaaaattcactactgcatctgacgtttgggccttcggggttaccttgtgggaggtactgatgctctgccgggcccagcccttcggtcagctgacagatgagcaggtaatagagaacgccggcgagttttttagggatcaaggccggcaagtgtatctcagtagaccacccgcatgcccgcagggtctctacgagctcatgctcaggtgctggtctagagagtccgaacagcggcctccgttcagccagctacacaggtttctggccgaggatgccctcaataccgtctag

SEQ ID NO: 80095 - DNA, 2631 bp, Artificial Sequence
  derived and/or modified sequence
atgggacccgaggcgctgtcttcactgttgcttttgcttttggtggccagtggagacgccgacatgaagggacatttcgatcccgctaaatgtagatatgcgctgggtatgcaggatcgcaccatccctgattcagatatcagtgccagctctagctggagcgattccaccgctgcccgccacagtcgcctggagagtagcgatggcgatggcgcatggtgccctgccggctctgtgttccctaaggaggaggagtatctccaggtcgacttgcagaggctgcacctggtggcacttgtcgggactcaagggcggcacgccgggggtctaggtaaggaattttcccgtagctacagacttcggtactccagggacgggagacgatggatggggtggaaagaccgctggggacaagaagtcatttcaggaaatgaagaccctgaaggcgtggtactaaaagatctggggccccctatggtcgctcgcctggttagattttaccctagagccgatagggtcatgagcgtgtgcctgcgcgtagagttgtacgggtgcctctggcgagatggattactctcttataccgctccagtgggtcagactatgtacctttccgaagctgtctatctcaatgattctacatacgatggccatacagtgggcggcctgcaatacggaggactggggcaactggctgatggcgtcgtggggctggatgatttccgaaaatcgcaagaactgcgcgtgtggccaggatatgactacgttgggtggtccaatcattcattctcgtctgggtacgtcgagatggaatttgagttcgaccggctgagagccttccaagccatgcaggtccactgtaacaatatgcacactctgggggcccgtctccccggaggcgtcgagtgtaggtttcgccgcggaccagccatggcctgggagggggaacctatgagacacaatcttggaggaaacctgggcgaccctcgggcccgcgccgtgtctgtcccactcggcgggagggtggcccggtttctgcagtgccgctttctttttgctggcccatggttactgttttccgaaatcagttttatctccgacgtcgtaaacaattcgagcccagccctgggcggcacatttccacctgcaccatggtggccaccaggacctcctccgaccaactttagttcattagaactcgagcctagaggtcagcagcctgtcgctaaagccgaggggtcccccaccgcgatcctcatcgggtgcttggtggccatcatactcctcctgctcctcatcatcgccctcatgctgtggcggttgcattggcgccgcctgctgtccaaggctgagagacgggtactggaagaggagttgactgttcacctgtctgtgccaggcgacaccatcttaattaataatcgtcccggcccacgcgagcctcccccgtaccaggagccacgccctagaggaaaccctccccactcggctccctgcgtgccaaacgggtctgcatactcaggcgattacatggaaccagaaaaaccaggggctccactcttgccccctcctccacagaactccgtcccccattacgctgaagccgatatcgtgacactgcagggggtgaccggcggaaatacgtacgcggtgccagctcttccacctggtgccgtgggcgatggaccgccgcgcgtggactttccacgttccaggttaagatttaaagaaaaactgggtgagggacagttcggagaggtgcatttatgtgaagttgacagccctcaagacctcgtgagtctagatttccctctcaatgttcgcaagggccaccctcttttagtggccgtgaagattctgcgaccagatgcaactaagaacgcgaggaatgattttttgaaagaggtcaaaatcatgtcccggctgaaggatcccaatattatacgtctgctgggggtctgcgttcaggatgaccccctgtgcatgattacagattatatggagaacggggatttgaatcagttcctgtccgcccaccaacttgaggataaggccgcagagggggctcccggagatggtcaggccgcccagggcccgaccatcagctatcccatgctgctgcacgtcgccgcacaaatcgccagcggtatgagatacctggcgacactcaattttgttcacagagatctggccactagaaattgtcttgtgggtgaaaatttcaccattaagatcgccgactttggaatgtcccgaaacctgtacgctggggactactaccgcgtacagggtcgcgccgtgttgcccattcggtggatggcctgggagtgcattctgatgggcaagttcacgacagcctcagatgtgtgggctttcggtgtgactctctgggaagttctgatgctgtgtcgcgcccagccattcggccagctgacagatgagcaggtgatcgaaaacgctggggaatttttccgcgatcaggggcgacaggtgtacctgagcagaccacccgcttgtccccagggcctatatgaacttatgctccgatgttggtccagagagagcgaacaacggcctcccttctcccagttacaccgttttctggcggaagacgcccttaatacagtgtag

SEQ ID NO: 80096 - DNA, 2631 bp, Artificial Sequence
  derived and/or modified sequence
atgggaccagaggccctgtcctctctgcttctgctgcttctcgtggccagcggggatgctgatatgaaaggccacttcgatcctgctaaatgcaggtacgccctgggtatgcaggataggacgatccccgacagcgacatctccgcaagctcatcttggagcgacagcacagcggccaggcacagccgactggagtccagcgacggggatggggcctggtgcccagccggctctgttttccctaaagaggaagagtacctccaagttgatctgcagcgcctgcatctggtcgccctggtcggcacccaaggacgccacgctggcggcttaggcaaggagttttcaaggtcatataggttgcgctattctagagacgggcggaggtggatgggctggaaggacagatggggccaggaagtaatttccggtaacgaagaccctgagggcgtcgtgctaaaagatctcggacccccaatggtcgcaaggttagtaaggttctacccacgcgcagatcgcgtgatgagcgtttgtttacgcgtggagctgtacggctgtctctggagggacggattgctgagctataccgcgcccgtgggacagaccatgtacctgagcgaggccgtgtacttgaacgactctacctatgacggtcacacagtgggaggcctgcagtatggaggcttgggtcagctagcagatggggtcgtaggactggacgacttcaggaaatcccaggagctgagggtgtggccaggatatgactacgtgggctggagcaaccatagctttagctcaggctatgttgaaatggaattcgagtttgatcgtttgcgggcttttcaggcaatgcaggtgcattgcaataacatgcacacacttggagctagactcccgggcggagtagagtgtcgcttcagacgaggtccagcaatggcgtgggaaggcgagcccatgcggcataaccttggtggtaatctcggtgacccaagggcccgagctgtgtccgtacccctcgggggaagagttgccagattcttacagtgtagatttctttttgccggtccctggcttctttttagcgagattagctttattagcgacgttgtgaacaattcctctccagcgctgggcggtacgtttcctcccgcaccctggtggccgcccggacctccacctactaacttctcctctttggagctggagcctagagggcaacaacctgtcgcaaaggctgaggggagcccaactgctattttgatcggatgcctcgttgctatcatcttactccttctcctgatcatcgcactgatgctctggcgactgcactggcggaggcttttgtccaaggccgaacggagagtgctggaggaggaactgaccgtacacttgtcagtgccaggggatacgatcttgataaacaacaggcccggccctagagaacctccgccataccaggagccgcgaccccgaggcaatccccctcactcggccccctgtgtgcctaatggctcagcttatagcggcgactacatggaaccagaaaagccgggggcccccttgctgccacctccacctcaaaattcggttcctcactacgctgaagcagatattgtgactttgcagggagtgaccggagggaacacctacgctgttccagcactgcccccaggagcagttggagacggtccacctcgggtggattttcctcgatctcgattacggttcaaagagaagctcggcgaaggccagtttggcgaggtccacttatgcgaggttgattctccccaggacctggtctccctggacttccctctgaacgtcagaaagggacatcccctcctggtcgccgtgaaaatcctgaggccagacgctactaaaaacgctagaaacgacttcctgaaggaggtgaaaatcatgtcccgcctgaaggacccgaacattatacgcttgctcggagtgtgtgtgcaggacgaccccctctgtatgataactgactatatggagaatggcgacctgaatcagttcctttccgcacatcagctcgaggataaggcagcagagggcgctccaggtgatggccaggccgcccaaggcccaactattagttaccccatgctcctgcacgttgctgcccaaatcgccagcggcatgaggtaccttgctaccctcaactttgtgcatcgtgatctagcgactagaaactgtctggtgggtgaaaattttactatcaagattgcagacttcggtatgtctcgtaatctttatgcgggcgactactatagggtgcagggcagagctgtcttaccaattaggtggatggcgtgggagtgtattttaatggggaaattcactaccgcaagtgatgtgtgggcctttggagttaccctctgggaggtccttatgctgtgtcgtgctcagccattcggccagcttaccgacgaacaggtgatagaaaacgcaggagaatttttcagggatcagggcagacaagtctacttatcacgacctccggcgtgccctcaggggctgtacgagctgatgctgcgatgctggtccagggagagtgaacaaaggcccccctttagccaattgcatcggttcctagcagaggacgcactgaacaccgtgtag

SEQ ID NO: 80097 - DNA, 2631 bp, Artificial Sequence
  derived and/or modified sequence
atgggcccagaggccctgtcatctctgctgctgctcctgttggtagctagcggagatgccgacatgaaaggacacttcgaccctgccaagtgcaggtatgcgctgggtatgcaggatcgcactatccccgattcagacatatcagcctcctcgagctggagtgattccacagcggcacgtcattcacgcttggaatccagcgacggtgatggtgcctggtgtccggccggtagtgtcttccccaaggaggaggaatacctgcaggtggacctgcagaggttgcatctcgtcgcactggttggcacccaggggagacacgccgggggactcggcaaggaatttagtaggtcctaccgactgcgctattcccgggacgggaggaggtggatggggtggaaagatcgctggggacaggaagtcatatccggcaatgaggatcccgagggcgtcgtgctgaaggatcttggtcctcctatggtcgccaggctggtaaggttctaccctcgagctgatagggttatgtccgtgtgcctgcgcgtcgagttatatgggtgcctgtggagagatggcttgttatcgtacactgcccccgtcggccagacgatgtatctctcagaagcggtctacctgaatgattctacgtatgatgggcacaccgtgggcgggttgcagtacggaggcctgggccagcttgccgacggggttgtggggctggatgactttcgcaagtctcaggagttacgggtatggccaggctatgactatgtggggtggagcaatcactcctttagctccggctatgtggaaatggagttcgagtttgaccggctaagggcttttcaggccatgcaggtgcattgcaacaacatgcataccctgggggctcggctgcccgggggcgtggaatgcaggtttcgtcggggtccagctatggcctgggagggagaaccaatgcgtcacaacttaggaggtaatcttggagatccgcgggcccgagcggtctccgtcccactgggtgggcgcgtagccagatttctgcagtgccgctttcttttcgctggtccctggcttctgttttcagagatcagcttcatctcagatgtggtaaataactcaagtccagccttggggggaacattcccccccgccccatggtggccaccgggaccaccccccacgaacttctcgtcactggaactcgagccgcggggccagcagccagtcgctaaagccgagggaagcccgacagccatcttaatcggctgtttggtggccatcatcctgcttctgttgttaatcattgccctgatgctctggcgactccattggcgccgccttctgagcaaggctgagcgcagggtgttggaggaggagttaactgtgcacctgtctgtcccaggggacactatcctgattaataatcgcccaggtccaagagaaccacctccctatcaggaacccagaccccgcggtaaccccccccatagtgccccgtgcgtgcctaatggttctgcctactctggcgactatatggaacctgaaaaacccggcgccccactcttgccaccgccaccccaaaactccgtaccgcattatgctgaggctgatatcgtcaccctgcagggcgtcactgggggcaatacctacgctgtgcctgccctgccacccggcgccgtgggggacggcccccctcgagtggattttccgcgctcacggctgaggttcaaggaaaaattaggagaggggcagtttggagaggtgcacctttgcgaggtagattctccgcaggacttggtctctctggatttccccctcaacgtgcgcaaggggcatcccctgctggtagcagttaaaatactgaggcctgatgcaactaaaaacgctcgtaacgatttcctcaaagaagtcaagatcatgagcagactcaaggatcctaatatcattcggctgctgggcgtgtgcgtacaggacgaccccttatgtatgataaccgactatatggagaatggcgatttgaatcaattcctaagtgcacatcagcttgaagacaaagcggccgaaggcgcgcctggagacggtcaagccgcacagggacctaccatatcatatcccatgttactgcatgtagccgcccagatcgcttcaggcatgagatacctggcgaccctcaacttcgttcacagagatctagccaccagaaactgcctggtgggcgagaatttcactataaagattgctgatttcgggatgagcagaaatctctacgctggagactactatcgggttcaggggcgcgctgtgctgcctatcagatggatggcctgggaatgtatcctgatgggaaaattcaccacagcttcagatgtctgggcattcggggtgacactttgggaagttctgatgttgtgcagggcgcaacctttcggacaactgaccgacgaacaggttatagaaaacgccggcgaattcttcagggatcaaggtcggcaagtctatctgagccggcctccagcctgtccccagggcttgtacgaactcatgctcaggtgctggagtagggaaagcgaacaacgaccgcctttcagtcagttgcaccgtttcctggccgaagatgctctgaatacagtttag

SEQ ID NO: 80098 - DNA, 2631 bp, Artificial Sequence
  derived and/or modified sequence
atgggtcctgaggcactgagtagcttactactattgttgctggtggcttcaggggacgcagacatgaagggacactttgaccccgccaagtgccgttacgccctcggcatgcaggatcggacaattccggacagcgatatcagcgcttccagttcatggtcagactcaacagccgcacgccattccagactcgaaagtagtgatggtgatggggcatggtgcccagccggcagcgtgttcccaaaagaagaagagtatttgcaagtcgacctgcagcgcctgcacctcgtcgccctcgtggggacacagggccggcatgcagggggcctcggcaaggaattttcccgctcatataggctgaggtactcacgggacggacgcagatggatggggtggaaggataggtggggccaggaggtgatctctgggaatgaagatcccgaaggcgtcgtcctgaaggacctaggaccacccatggttgcccgcctggttagattttatcctcgggcagatcgggtgatgagtgtctgtctgcgcgttgaactgtacggctgtttgtggagggatggactcctctcttataccgcccccgtaggacagacgatgtatctgtctgaggccgtgtacctaaacgactccacttacgatggacacactgtaggcggcttgcaatacggcggacttgggcaacttgccgatggcgtggtggggttagatgatttcagaaaatcccaggagctccgcgtttggcccggttacgactacgtcgggtggagtaatcattctttttcaagcggttatgtggaaatggagtttgaatttgaccggcttagggccttccaagctatgcaagttcactgtaataacatgcacaccctcggagctaggctgcccgggggagtggaatgccgtttccgccgtgggccagcgatggcatgggaaggagagcccatgaggcataacttgggcgggaatctcggtgaccccagggctcgagccgtcagtgtccccctcggaggccgtgtggcccggttcctccagtgccgattcttgtttgctggaccatggctgctattttctgaaatctccttcatttccgatgtcgttaataattcctcacctgcactaggcggtacatttccaccagccccgtggtggcccccgggccccccaccaaccaacttcagttccctggagctcgaacctagaggccagcagcccgtggcgaaggccgaggggagccctaccgccattctaattggatgcttagttgccattatcctgctgctcctcttgatcatcgccctgatgctttggcggctgcactggagacggctactcagcaaagctgagcgtcgtgtcctggaggaagaactgacggtgcatttaagcgtcccgggggacacgatcctaataaataatagaccaggcccacgagagcctcccccatatcaggagccccggccacgaggcaatccacctcattctgcaccctgcgtgcctaacggctccgcctatagcggtgactatatggaacccgagaaaccaggagctccactcttgcccccccccccccaaaatagcgttccccactacgctgaagccgacatcgtcaccctgcagggagtcacgggcggaaatacttatgccgtgccggcgctgcccccaggagctgtgggcgacgggccccctagggtcgacttcccccggagccggttgaggttcaaggaaaagctaggggaaggccagtttggagaagtgcatttgtgtgaggtggactcccctcaggaccttgtatctcttgacttccctctgaatgtacggaaggggcatcccctgttagtagccgttaaaattctgagaccagacgccactaaaaacgcccggaatgattttctgaaagaagtcaaaattatgtcacggctgaaggacccaaatatcatcagacttttaggagtgtgcgtccaggacgacccactctgtatgattactgactacatggaaaacggtgatttgaaccagttcctgtccgcccatcagctcgaggacaaagcagctgagggcgcacccggagacgggcaggcagcgcagggacccacaattagctaccccatgctgcttcatgttgccgcacaaatcgcctctggtatgaggtacttggcaacactgaacttcgtccaccgcgatctcgccacgcgaaattgcttggtgggggaaaatttcactatcaaaattgctgacttcggtatgagccgcaacctctacgccggagactactaccgggtccaaggacgagcagttctgccaatacggtggatggcttgggagtgtatcttaatgggtaagtttactacagcgtctgatgtctgggcgttcggcgtcaccctatgggaggtgttgatgctttgcagagcgcagcctttcggccagctgacggacgagcaagttatcgagaatgcaggggagttttttagagatcagggccggcaggtctacctgtcgcgcccacctgcatgtccccaaggactatatgaactgatgcttaggtgctggagtcgggaatcagaacagaggcctcctttcagtcagttacatagattcttggctgaggacgccctgaacacagtctag

SEQ ID NO: 80099 - DNA, 2631 bp, Artificial Sequence
  derived and/or modified sequence
atgggtcctgaagccctgagtagtttgctgctgctgctgctggtggcaagcggcgacgctgatatgaaaggacactttgatccagccaaatgtcggtacgctctgggtatgcaggaccgaaccattcccgatagcgacatttccgccagttcatcgtggtcagattccacggctgccagacactcgagactggagtcatccgatggcgatggggcctggtgtcccgcgggttctgtgttcccaaaagaagaggagtacctgcaggttgatctccagcgactgcacctggtggccctggtcggtactcagggcaggcatgctggaggactgggcaaagagttcagcaggagctatcgccttagatatagtcgggacggaagaagatggatggggtggaaagacagatgggggcaggaggtaattagcgggaatgaagatccagagggagtagttctcaaagatctcgggccgcccatggtcgcccgcttggtcaggttttacccccgcgccgacagagtgatgtccgtatgtctgcgggtagaactgtacggatgcttatggcgcgatggactcctgtcgtacacggctccagtcggccagaccatgtatttatctgaggcggtctacttaaacgacagcacctacgacggccatacagtcggaggccttcagtacggaggcctcggtcagctcgcggacggagttgtaggtctggatgactttaggaaaagtcaggaactcagggtgtggcctggctatgattacgtcgggtggagcaatcatagtttttctagcggctatgtggagatggagttcgaattcgatcgtctgcgagcgttccaagccatgcaggtccattgcaacaacatgcataccctgggggccaggctgcctggcggcgtggagtgtagattcagacggggaccggctatggcgtgggagggtgaaccaatgaggcacaacctcggtgggaatctgggggacccaagggcacgggccgttagcgtgccattgggaggaagggtagcccggtttctgcaatgcagatttctgtttgccggcccttggctgttattcagcgaaatctcttttatcagcgacgtggtgaataactcgtcaccggcactgggcggaacattccctcccgcaccgtggtggccgccgggacctcctccgaccaacttttcatctttagaactggaacctcgtggacaacaacccgtcgcaaaggccgagggttctccaacagcaatacttattggctgtttggtcgccattatcttgcttctgctcttaatcatcgcactcatgctctggcggctgcattggcggaggctcctgtccaaagctgagcgccgggtgctcgaagaagagcttacagtgcatctgtccgtacctggcgacactatccttatcaataataggccgggaccacgggaaccgcctccctaccaggagccccgtcccaggggcaacccaccacactccgcaccgtgtgtacctaatggaagtgcttactccggtgactatatggagccagaaaaacccggtgcgcccttgcttcctccaccgcctcagaactcagtgccccattacgcagaggccgacatagtcacactccaaggtgtcaccggcgggaacacttacgccgtccccgccctccctcccggcgccgtgggcgacggccctccgcgcgtggactttccccgtagccgccttcggttcaaagagaagctaggcgaaggccagtttggggaggtgcacctgtgtgaggtcgacagtccgcaggacctggtgagccttgactttcctctgaacgtccgcaaaggccacccgctgctcgttgccgtcaaaattcttcggccggacgctactaaaaacgctaggaacgacttcctgaaagaagtcaaaatcatgagtcgcttaaaggacccaaacatcatcagactgctaggcgtgtgcgttcaggacgatccactctgcatgattactgactatatggagaatggagacctgaatcagttcctgtctgcccaccaactggaagataaagccgctgagggggcccccggagacggacaggccgcacagggccccaccataagctaccctatgcttctgcacgtagccgcccaaatcgcaagtgggatgagatacctcgccacccttaacttcgtccacagagatttggccacacgtaattgcttagttggcgaaaacttcactattaagatcgcggactttggcatgtctaggaacctgtatgctggcgattattatagggtgcagggcagagctgttttgccaatacgatggatggcatgggaatgcatactaatgggtaaatttactacagctagtgacgtctgggctttcggtgtcaccctttgggaggtcctgatgctttgtcgggctcagcctttcgggcagctgaccgacgagcaggtgattgagaatgccggcgagttttttcgtgatcaaggtaggcaagtatacctgtctcgccccccagcctgccctcaggggctctatgagctgatgctgcgatgttggagccgggaatccgaacagagaccgcccttctcccagctacatcgcttccttgctgaagatgctcttaacaccgtgtag

SEQ ID NO: 80100 - DNA, 591 bp, Artificial Sequence
  derived and/or modified sequence
atgcctcatttagcctcactcttcacggcatcttctcgttgttgtccccacccacttcgacccgagggtagcggcgcgatgggcccagaagcactgtctagcctgttgctgttgttgctggttgccagcggggacgccgacatgaagggacactttgaccctgccaagtgccggtacgccctcgggatgcaggacaggaccattcccgactctgacattagcgcgtcctcgtcctggagcgattctaccgccgcgcggcattctcggctcgagtcaagtgatggggacggcgcttggtgcccagctggcagtgtatttcctaaggaggaggagtatctgcaggtcgatctacagagactgcatctggttgccctggtcggtacacagggaagacacgccggcggtctgggcaaggaattcagtcgatcctaccgcttgaggtacagcagagatgggaggagatggatgggctggaaggacagatggggccaagaggtgatttcagggaacgaggacccagaaggcgttgtccttaaggacctggggcccccaatggtggcccggctggttcgcttctatccccgcgcctag

SEQ ID NO: 80101 - DNA, 2685 bp, Artificial Sequence
  derived and/or modified sequence
atgtcactgccacgatgctgtccgcacccgctgcggccagagggctccggggccatggggccagaggctctaagctcactgttgctacttctgctggtggctagcggcgacgccgacatgaaggggcattttgacccggctaaatgcagatatgctctggggatgcaggatcggactatcccagactctgacatcagtgccagtagctcctggagtgactcaactgcagctaggcatagtagactggagtcttccgacggcgacggtgcttggtgtccagcaggatcagtgttccccaaagaagaagaatacttgcaggtagacttgcagagacttcatctcgttgctcttgtgggtactcaggggaggcatgccgggggcctgggaaaggagttttctagatcctaccgcctgcgctatagcagagacggacgaaggtggatgggctggaaggataggtggggacaagaggtgattagtgggaacgaggatcctgaaggagtggtgctgaaggatctgggcccaccaatggtagctaggctcgtgcgcttttatccacgagctgatcgggtaatgtctgtgtgccttagggtggagttgtatggttgtctgtggcgcgacggcctgcttagctacactgcgcccgtgggccagactatgtatctttctgaagccgtctatttaaacgatagtacctacgatggccacaccgttggaggcctgcagtacgggggtttgggacagctggccgatggcgtggtgggacttgatgactttagaaagtctcaggagctgagggtgtggcccggctacgactacgtgggatggagtaaccatagctttagttccggttacgttgaaatggaatttgagtttgacagactgcgagcatttcaggctatgcaagtgcactgcaacaacatgcacacgctgggagcccgattacccgggggtgtggaatgccgctttaggcggggcccagccatggcttgggagggagaacctatgcgacataatctcgggggtaatcttggcgacccaagggccagggctgtttcggtcccacttggagggcgggtggcacgcttcttacagtgccggtttctttttgccggaccctggcttctgttctcagaaatctcctttatatcagatgtggtaaataattcaagccccgccctcgggggcactttcccacctgccccatggtggcctcccgggcctccccctactaatttttcctccctcgagctcgaacctaggggccagcagccggttgctaaagctgaagggtctcccacggccattcttatcggttgtctcgtagccatcatcttactcctgctcctaataatcgccttgatgctctggcgactgcactggagaagattacttagtaaagccgagagacgggtcttggaagaggagctgaccgtgcatctcagcgtgcccggtgacactatcctgatcaataacagacccgggccacgcgaaccacccccttaccaagagcctcgtcctcgcggcaaccctcctcacagcgccccttgcgtcccaaatgggtccgcttactcaggtgattacatggaacccgagaaacctggagcccccctgctgccacccccaccgcagaactcggtccctcactacgcagaggctgatatcgttactctgcagggggttaccggagggaatacatatgcagtgcctgccctccccccaggagcagtgggggatggacctcctcgcgtcgatttccctcggtctaggttgcgttttaaggaaaagcttggcgaaggacaattcggggaggtccacctctgtgaagtcgactcaccccaggacctggtgtctctcgactttcctctgaatgttcgcaagggtcatccgctcctggttgctgtgaagatactgcggcctgatgcgactaaaaatgccagaaatgacttcttgaaggaagttaagatcatgtctcgcttgaaggaccctaatatcatcagactcctgggcgtctgcgtgcaggatgacccactgtgcatgattacggattacatggaaaacggtgatctgaaccagttcctctctgcccaccaactcgaggataaggcagctgagggcgcccccggagacggacaagcagctcagggcccaacgattagctatccaatgctgctgcatgtggcagcccagatcgccagtgggatgcgatacttagccacactgaactttgttcacagggacctggcgacccgcaattgccttgtgggtgaaaatttcacaatcaagatcgcagacttcgggatgtctcgcaacttatacgctggagactactatcgcgtgcaaggaagagcagtgctgccaatccgatggatggcctgggagtgcattctgatggggaaattcactaccgccagtgatgtgtgggctttcggtgtgacactgtgggaagtcctgatgctgtgccgggcacagccttttgggcagctaactgacgagcaagtaatcgagaacgcgggggagttttttcgcgatcaaggacgtcaggtatatctgagccggccacccgcatgcccacagggtctgtatgagctaatgctcaggtgctggtcgagggaatctgagcagagaccgccattcagccagctccatagattcctggcggaggatgctctaaacaccgtgtag

SEQ ID NO: 80102 - DNA, 2685 bp, Artificial Sequence
  derived and/or modified sequence
atgtccttgccgaggtgctgcccgcaccctcttaggcccgaagggtctggggcaatgggacctgaagccctctccagcctgttgcttctgctcttggttgcctccggtgatgctgatatgaaggggcactttgatccggcaaagtgtcgatatgccctcggaatgcaggacagaaccattccagactctgacatttccgcctcctcttcctggagcgactctactgctgctcggcattctcgcctggaatccagtgacggcgatggcgcttggtgtcccgcaggttcggttttccctaaggaagaggaatacctacaggtagatctccagaggttacacctggtcgctctggttgggacgcaggggcgtcacgccggcggactgggcaaggaattttctcgatcttatcgactgcggtattctcgggatggaagacggtggatgggttggaaggacaggtgggggcaggaggtgataagcggaaatgaggatcctgaaggagtcgtcctgaaagacctcggcccgccaatggtggccaggcttgttagattctatcctagagcagatagggttatgtcggtgtgtctccgggttgagctgtatgggtgtctatggagagacggactgctgagctacactgcacccgttggccagacaatgtatttatctgaagcagtttatctgaacgacagcacttacgacggtcataccgtgggggggctgcagtacggcggccttgggcagctagcggatggggtggtcgggctggatgactttcgtaagtcccaagagctgagggtgtggcctggctacgattacgtaggatggtccaatcatagcttttcatccggatacgtggagatggagttcgagtttgaccggctgcgggcttttcaagcgatgcaggtccattgtaataacatgcacactctgggcgctcgacttcccggcggtgtggaatgtaggttcagacgcggccctgcgatggcctgggagggcgagcccatgcgccataatcttggcggcaatctgggagacccacgcgcacgggctgtcagtgtacctttggggggccgagtggcacgcttccttcagtgtagattcctctttgccgggccttggctgctattttctgagatctctttcatctctgacgtcgtgaataattcaagcccagcccttggcggaacgttcccccccgcgccctggtggccaccaggacccccgccaaccaacttcagttctctggagttggaaccacgcggccagcagcctgttgctaaggcggaggggtcaccaaccgcaatcctgatcggctgccttgtcgccatcatcctgcttctactgctcatcattgctttgatgctctggaggctccactggcgtagactcctttccaaagcagaacgtcgagtgttggaagaagagctaactgttcaccttagtgtccccggagacaccatattgatcaacaatcgacccgggccaagagaacctcctccctatcaggagccccgcccccggggcaatcccccccactctgccccatgcgttccaaacggctctgcttactcaggtgactacatggagccggagaaacctggggcgcccttattgcccccccctccccaaaacagtgtgcctcactacgcggaggccgatatcgtgaccctgcagggcgtgaccgggggaaatacctatgcagttccagcactgccacccggggccgtcggggacggccctccacgcgtcgacttcccacggagtaggcttcgattcaaagagaaacttggggaaggacaatttggagaagtgcacctgtgtgaggtcgattcaccacaagaccttgtatccctggacttccccctgaatgtgcgtaaggggcacccactgctcgtcgcagtgaaaatcctgcggccagacgctaccaaaaacgctcgaaatgacttcttgaaggaggtgaagattatgtccagactgaaggatccaaacataataaggctgcttggggtttgtgttcaggacgaccccctgtgcatgattacagactacatggagaacggagatcttaatcaatttctgtcagcccatcagttagaagacaaggcggctgaaggagccccaggcgatggtcaggctgcccagggaccgaccatttcataccccatgctccttcatgttgctgcacagattgcaagtggaatgcggtatctcgccacactcaatttcgttcacagggatctggctactaggaactgcctggttggcgagaacttcacaattaagatcgctgatttcggcatgtctcggaatctatacgcaggtgactactacagggtgcagggaagagccgtccttccaattcgctggatggcatgggagtgcatacttatggggaagtttacgactgccagtgacgtctgggcctttggcgtgacactgtgggaagtgctcatgttgtgcagagctcaaccattcggccaactgaccgatgagcaggtgatcgagaatgcaggcgagttcttccgcgatcagggccgccaggtgtacctgagccgacctccagcgtgcccccagggcttgtacgaactgatgctgaggtgctggagtagggagtctgagcaaagacccccattctcccagttacatcggttcctcgcagaggatgcactgaatacagtttag

SEQ ID NO: 80103 - DNA, 2685 bp, Artificial Sequence
  derived and/or modified sequence
atgtcactccctcggtgctgtcctcaccccctgaggccagaggggtccggagcaatgggccccgaagccctttccagtcttcttctgctgctgctggtggcctctggcgacgcagatatgaagggccattttgacccagccaagtgtcggtatgcgctggggatgcaggacaggacgatcccagactctgacattagcgcctcctcatcctggtctgactcaacagcagcccgacactctagactggagtctagcgacggtgacggagcttggtgcccggccggctcggtctttcccaaggaagaggaatacttgcaagtagaccttcagcgcctgcacctcgtcgccttagttggcacacaaggccgtcacgcgggtggtctggggaaagagttttcacgctcttatagactgaggtacagccgagacgggaggcgttggatgggatggaaagaccggtgggggcaggaggtcataagtgggaatgaggaccccgaaggagtcgtgttaaaggacctgggacctcccatggttgcacgactggttagattctacccaagagccgatagggtcatgagcgtctgcctcagggttgaactgtatgggtgtctgtggagagatggcttgttgtcctatacagctcccgtgggccaaaccatgtatttgtctgaagcagtctatttaaacgactcgacttacgacggccacaccgtgggaggcctccagtatgggggattaggtcaactggccgatggagtggtcggcctggacgatttccgcaagtcccaggagctgagagtgtggcccggctacgattacgttgggtggagcaaccacagcttctcatcaggatacgtcgaaatggaattcgaattcgatagactgcgcgcatttcaagcaatgcaggttcactgtaacaacatgcacaccctgggggctcgactgcccggcggagtggagtgtcgctttcgacggggaccggccatggcctgggaaggggaacccatgcgacacaacctggggggaaacttgggggacccaagagccagggccgtcagtgtgcctctgggcggcagagtcgccagattccttcagtgtaggttcctgtttgcgggcccatggctcctgttttccgaaattagcttcatctctgacgttgttaataactcctcccctgctttgggaggcactttcccacctgccccatggtggcctcccggccccccaccaactaactttagctccctcgagctcgaaccaagaggtcagcaacccgtcgctaaagccgagggttccccaacagctatcctcattggctgcctggtggccatcatccttctgttactgctgattattgccctgatgctgtggaggttacattggaggcggctgctatctaaggccgaaaggagggtgttggaagaggagctcactgtgcatctctcagtccccggtgatacaatcctgataaacaatcggcctggcccacgcgagcctcctccctaccaggagccacgcccgcgtgggaacccgccccactcggccccttgcgttccgaatggttcagcctactccggagactatatggaacccgaaaagcccggagccccattgctccccccacctccacagaactcggtgccccattacgccgaagccgacatcgttacccttcaaggagtgactggaggcaacacttacgcggtgcccgccctgccccctggggccgtgggagatggacccccaagggtagactttcccaggagtagactgaggttcaaagagaagctgggagaggggcagttcggggaggtgcacctgtgtgaggtagacagccctcaggatctcgtctctttggactttcccctgaacgtacggaagggccacccccttctggtggccgttaagatacttaggcccgatgctaccaagaatgcccgtaatgacttcctcaaggaggtgaaaattatgtccagacttaaagatccaaacatcatccggctgctgggcgtgtgcgtgcaggacgacccattatgtatgattaccgactacatggagaacggagacctgaatcaatttttatccgcccatcagctggaagacaaagcagccgaaggagctccaggggacggtcaggcagctcaaggaccgaccatttcctacccaatgttgcttcacgttgccgctcaaattgctagcgggatgagatacttagccaccctgaacttcgtccaccgggaccttgcgacccgcaattgcctggtgggcgaaaatttcacgatcaagatcgccgacttcggaatgtctaggaacctctatgccggggactactacagagttcaggggagagcagtgctacctattagatggatggcctgggagtgcatcttaatgggtaaattcactactgcttctgacgtctgggcattcggggtaaccctgtgggaggtgttaatgctgtgccgagctcagcccttcggccagctgaccgatgagcaggtaatagaaaatgctggcgaattctttagagatcaggggcggcaggtgtatctgagcagaccgccagcttgtccccagggcctgtatgagctcatgctaagatgctggagcagggagtcagagcagaggccgccctttagccagttacaccggtttcttgccgaagatgcccttaatacagtctag

SEQ ID NO: 80104 - DNA, 756 bp, Artificial Sequence
  derived and/or modified sequence
atgccccacctagcatctcttttcacggcgtctagccggtgctgtccccaccctcttagaccagaagggagtggtgccatgggccccgaggccttatccagcctgcttctcttactgctggtggcaagcggggacgcagacatgaaagggcacttcgacccagccaaatgtcgatacgctcttggaatgcaggacaggaccatcccagattccgacatcagcgcctcctcatcctggtcagattcaactgccgcccgacacagtcgcctcgagagctcggacggcgatggcgcatggtgcccagccggttctgttttcccaaaagaggaagagtacctccaggtggacctccagcgattacacctggtcgccttggtgggaacacaggggcgccacgccggaggtctggggaaggagttctcgcgaagttacaggctgcgttattctcgcgatgggagacgatggatgggttggaaggacaggtggggccaggaagtgattagtggtaacgaggacccagagggcgtcgtgctcaaagaccttggcccaccaatggtggctcgcttagttcggttttacccccgtgctgatcgggttatgagtgtatgtctgagagtagaactatatggctgcttgtggcgcggggagtggttgagctttctcggaatctgtttcctgtcaaggggactggagggcggcgaatgcggtgaatgggctagccggataccctcccccgccggcaagctgtcgctctag

SEQ ID NO: 80105 - DNA, 2685 bp, Artificial Sequence
  derived and/or modified sequence
atgtcccttcctcggtgttgcccccaccccttaagacccgaggggtcgggggctatggggccagaggccttatcttcacttctcctcttgctgctggtcgccagcggggacgcagatatgaagggacacttcgacccagcaaagtgtagatatgcgttgggtatgcaagaccggaccatccccgatagcgacatctccgcttctagctcttggtccgactcaactgccgctaggcactcacgccttgagagctcagacggggacggtgcctggtgccctgcggggtccgtatttcccaaggaagaagaatacctgcaagtggacctgcaacgcctgcatctcgtcgccctcgtcggtacgcagggtcggcacgcaggtggtttaggaaaagaatttagcagaagttacagactgaggtattcccgcgacggtaggagatggatggggtggaaggacagatggggccaggaagtcatttctggaaatgaagaccctgagggggtggtgctgaaagatctgggccccccaatggtggccaggctcgtgagattttaccctcgagccgatagagtgatgagcgtgtgtctcagagtcgagctttacgggtgcctgtggcgcgacgggctgctcagctacactgctcccgtagggcaaaccatgtacctctccgaggctgtgtatttgaatgattctacatacgacgggcacacggtcggaggtttacagtatgggggcctaggtcaactggccgatggtgttgttggactcgatgatttcaggaaaagtcaggagcttagagtctggcccggctatgactacgtaggctggagcaaccacagcttctcaagcgggtacgtggagatggaattcgagttcgaccgtctgagggcctttcaggccatgcaggtgcactgtaacaacatgcacacactgggcgcccggttgccagggggagtcgagtgtagattcaggcgtgggccagctatggcctgggaaggtgaaccaatgcgccacaacttggggggcaatctcggcgaccctagagctcgcgccgtatctgttccactggggggacgtgtggcccggttcttgcagtgccggtttctgtttgctgggccctggcttctgttctcggaaataagctttatcagcgacgtggttaacaattcttccccagccctgggaggtaccttcccacctgccccctggtggcctccaggacctcctcctaccaatttttcaagtctagagctggagcccagaggccagcaaccagttgcgaaggccgaaggctctccaaccgccatcttgattggttgtctggtggcaatcatcctgctactgctgttaatcatcgcccttatgctctggaggttgcattggcgtagacttttgtcaaaggcggagcgccgggtacttgaggaagaactcaccgtccacctaagcgtacccggggataccattttgatcaacaatagacctgggccccgagagccgcctccctaccaggaaccgcgaccaagggggaaccccccccactcagcaccttgcgtccccaacgggtcggcttattccggagattacatggaacccgaaaaaccaggcgcacccttgttgccaccgccacctcaaaacagtgtgccacactatgctgaggccgatattgtcaccctgcagggcgtgactggaggtaatacatacgccgttccagccctacctcccggggccgtgggggacggacctccccgggtggatttcccacgcagtagactgagatttaaagagaaactaggggaagggcaattcggggaagtacacctctgcgaagtggattccccccaggacctggtgtcactggattttcctttgaacgttaggaagggccaccctctgctcgtcgctgtgaagatactgaggccagatgcgactaaaaatgctaggaacgatttcttgaaggaggtgaaaatcatgagcaggctgaaggatcctaacatcatacgactgttgggggtttgcgtgcaggatgaccctttgtgcatgatcactgattatatggaaaatggcgatctcaatcagtttctttccgcccaccagctcgaagataaagcggctgagggcgcccccggagacggccaggccgctcaggggcccaccatcagctacccgatgctccttcacgtggccgcacaaatagccagcggcatgaggtacctcgcaacactgaacttcgtgcatcgggatctggctaccagaaactgtttggttggggaaaatttcactataaagatcgcagattttggcatgtccaggaacttgtacgcgggcgactactacagggtccagggaagggctgttctgcctattcggtggatggcttgggaatgcatactgatgggcaaattcacaaccgcgagtgacgtgtgggccttcggggtgacgctttgggaggtgcttatgttgtgtcgcgcccaaccatttggacagttgaccgacgaacaggtgattgagaacgccggcgaattctttcgggaccagggaagacaggtttacctatctcgcccacctgcttgcccgcagggactttacgagctgatgctgcgctgctggtccagggagtctgaacagcggcccccattcagccagctacatcgatttctcgctgaagacgccctgaacaccgtgtag

SEQ ID NO: 80106 - DNA, 756 bp, Artificial Sequence
  derived and/or modified sequence
atgccacatttggcgtccctgtttacagcctctagtcgttgttgtccacatcctcttcgtcctgaaggcagtggggctatggggccagaggcactcagctccctgcttctgctgctcctcgtagcaagtggggatgcggacatgaagggacacttcgatcctgcgaagtgtcgctatgccctcgggatgcaagatcgaacaatccccgattctgatatctctgcctctagttcttggagcgactctaccgccgcacgccacagccgcctggagagctctgacggagacggggcctggtgccccgcgggctccgtgttccccaaggaggaagaatacctccaggtggacctccagcgtctccatctcgtggccctcgtggggacgcagggaaggcatgcgggaggacttggcaaagaattcagcagaagctaccgactgcgatacagccgggacggacgccgatggatgggctggaaggatagatggggacaagaagtgatctcaggcaacgaagaccctgagggagtggttttgaaggacctaggccctcctatggtagcccggctcgttagattttatccgcgtgccgaccgtgtcatgtcagtgtgcctccgggtagagctgtatgggtgtctctggcgaggcgagtggctgtccttcctggggatatgtttcctgtccaggggcctggagggcggggaatgcggggagtgggcgtcacgcattccctcacctgcaggtaaactgagcctctag

SEQ ID NO: 80107 - DNA, 756 bp, Artificial Sequence
  derived and/or modified sequence
atgccacaccttgcatccttgttcactgcctcatcccgatgttgcccacaccccctgcggcccgaaggatctggagccatggggccagaagcactgtccagtctgcttctcctcttgctggtcgcctccggagacgccgatatgaaaggtcactttgaccctgccaaatgtcgctatgcccttggcatgcaggacagaactatcccagactccgacatctccgcttcttcgtcctggagcgattctaccgctgcgcggcattccaggctcgaatcgtccgatggggacggagcctggtgtccagccggaagcgtgtttcccaaagaggaagagtacctccaagtggacctgcaaaggctccacctggtggctctggtgggaactcaaggacgccatgcaggcggcttaggcaaggagttctctaggtcttacaggctgaggtatagcagagacggccgaaggtggatggggtggaaggatagatggggacaggaagtaatcagcggcaacgaagacccagagggtgttgtgctgaaagacctggggcctcctatggtggcgcggttagtccggttctatcctcgggcggaccgcgtgatgtcggtatgcctcagggtcgagctgtatgggtgcctctggcggggtgagtggctgtccttcctgggaatttgcttcctgagccgaggtcttgaaggaggagagtgcggtgaatgggcttcccgtatccccagccccgccggaaagctgtccctgtag

SEQ ID NO: 80108 - DNA, 756 bp, Artificial Sequence
  derived and/or modified sequence
atgcctcatctggcaagtctatttactgcatcttccagatgttgccctcaccctctccggccagagggaagtggcgcaatgggtcccgaagcgctctcctctctactcctcctgctccttgttgccagcggggatgcagatatgaagggccatttcgatcctgccaagtgtcggtacgcgttgggaatgcaagatcggaccattccagactcagatattagtgcaagctcatcatggagcgacagcacagccgcccgtcattctaggttagagtcatcggatggggatggggcatggtgccctgccggcagtgtattcccaaaggaggaggaatacctgcaggtagacctgcagcgcctacatctggtcgccctcgtgggcactcaaggtcggcatgctggcgggttagggaaggaattttcccgctcctatagactaaggtacagtagggatggaaggcggtggatgggttggaaggataggtggggtcaagaggtgatttctggaaatgaggatccagagggcgtcgtcctgaaggacctgggaccccctatggttgctagattggtgcgcttttacccaagagctgatcgggtaatgagcgtgtgcttgcgtgtggaactatatggttgcttatggcgcggtgaatggctgtcattcttgggcatctgctttttaagtcgcggactggaggggggggaatgtggcgaatgggcttctcgcatccctagccctgccggaaagttgagcctttag

SEQ ID NO: 80109 - DNA, 2685 bp, Artificial Sequence
  derived and/or modified sequence
atgtccctcccccgatgttgccctcatccactccggccagaaggctccggcgccatgggcccagaagcactgtcctcactactcctgctgcttcttgtggccagcggggatgctgacatgaagggtcactttgatcccgccaaatgtcgttacgcacttggcatgcaggaccggactattcccgacagtgatatctctgcctcatctagctggtctgattcaacggctgccaggcattctcggctggagtcatcagatggtgacggggcttggtgtcctgctggctccgttttccctaaagaagaagagtacttgcaagttgaccttcagcgcctgcacttggtggctcttgtgggcacccaaggcagacacgctgggggcctcggtaaggaattcagtcgcagctatcgcctgcgatacagccgtgatggcaggcgctggatggggtggaaggatagatggggtcaagaagtcatctcagggaacgaagaccctgagggcgtcgtccttaaagacctcggaccacccatggtggcccgcctcgtgcgcttctatcctcgcgctgaccgcgtgatgtcagtgtgccttcgtgttgagctgtacgggtgcctgtggcgggatggtttgttgtcttatactgcgcccgtgggtcagacaatgtatctgagcgaagcagtctacttgaatgatagcacatacgacggacacaccgtcggcgggctgcaatacggcgggctgggacagctggctgacggcgttgtcggactggatgactttaggaaatcccaggagctgcgagtctggcccggttacgactatgtgggatggtccaatcatagcttttcatctggttatgtggaaatggagtttgagttcgacaggctgcgagccttccaggctatgcaggttcactgcaacaatatgcataccctgggggctcgccttcctggaggcgtggaatgtcggttcaggaggggccctgctatggcttgggaaggggaaccaatgcggcacaatctcggcggcaatctgggagatcccagagcacgggccgtatcagtgcctcttggagggcgggtggcacgctttctgcagtgtcgctttctcttcgcaggcccctggctgctcttcagtgagatcagcttcattagcgacgtggtgaataactccagtcccgcccttggaggcactttcccacccgccccctggtggccccctgggcctccccctaccaacttttcatcactggagctcgagcctagggggcagcaaccagtcgcaaaggccgaagggtcacccactgcaatcctcatagggtgcttggtggccatcattctcctgcttcttctcataattgcgctgatgctctggaggctccattggaggcggcttctgagtaaagctgaaagacgggtcctcgaggaggagctgaccgtgcacctatctgtgccaggtgataccatcctcattaacaatcggcccgggcccagggagccacccccttaccaggagcccagacccagggggaatccacctcactcagcaccttgtgtgccaaatgggtcagcctactctggcgactatatggagcccgaaaagcccggcgctccacttctgccaccccccccacagaactctgtaccacattatgccgaagctgacattgtcacactgcaaggcgtgaccggtggaaatacatatgctgtcccagcccttcctccgggcgcagtgggtgacggaccaccccgcgttgatttcccccggtcccgacttcgctttaaggaaaagctgggggagggccaattcggagaggtgcacctgtgtgaagtggatagccctcaggacctggtgtcgttggattttcctcttaatgtcagaaaaggtcatccgttgctagttgcagttaaaatcctgaggcccgacgctacaaagaatgcaagaaacgatttcctcaaggaggtcaagatcatgtcaaggttgaaggaccccaacataatcaggctgctgggagtctgcgtgcaggatgatccactgtgcatgatcacggattacatggaaaatggtgacctgaatcagttcttgtcagctcatcagctggaggataaagcagctgagggtgctccaggtgatgggcaggctgcccagggccctactatctcctaccccatgcttctacacgtggctgctcagattgcatccggcatgaggtacctcgccacgctcaactttgtgcaccgggacctggctacccgaaactgcctggtgggcgagaactttactatcaaaatcgcagacttcgggatgtctaggaacctgtacgctggggactattaccgcgtgcaggggagagccgtccttcctatccgttggatggcatgggaatgtatcctaatggggaagttcaccactgcgtccgacgtttgggctttcggagtgaccctgtgggaagtgctgatgctatgcagagcccaaccattcgggcagctaacagatgaacaggtgattgaaaatgcaggagagtttttccgagaccagggccgacaggtgtacctttccaggccgcccgcctgtccccaaggactatacgaactgatgctacgttgttggtcgcgagagtccgaacagcggccaccatttagccagctgcatcgattccttgcagaggacgctctgaatacagtgtag

SEQ ID NO: 80110 - DNA, 2631 bp, Artificial Sequence
  derived and/or modified sequence
atgggccctgaggccctgagcagcctgctgctgctgctgctggtggccagcggagatgctgacatgaagggccactttgatcctgccaagtgccgctatgccctgggcatgcaggacaggaccatcccagacagcgacatcagcgccagcagctcctggagcgacagcacagctgcccggcacagccggctggagagcagtgatggagatggagcctggtgcccagctggcagcgtcttccccaaggaggaggagtacctgcaggtggacctgcagaggctgcacctggtggccctggtgggcacccagggcagacatgctgggggcctgggcaaggagttcagccgcagctaccgcctgcgctacagcagagatggaagacgctggatgggctggaaggaccgctggggccaggaggtgatctctggaaatgaagatcctgagggcgtggtgctgaaggacctgggcccccccatggtggcccggctggtgcgcttctaccccagggctgacagagtgatgtctgtgtgcctgcgggtggagctgtatggctgcctgtggagagatggcctgctgagctacacagcccctgtgggccagaccatgtacctgtctgaggccgtgtacctgaatgacagcacctatgatggccacacagtgggcggcctgcagtatggaggcctgggccagctggctgatggagtggtgggcctggatgacttcaggaagagccaggagctgcgggtgtggccaggctatgactatgtgggctggagcaaccacagcttcagcagcggctacgtggagatggagtttgaatttgaccggctgcgggccttccaggccatgcaggtgcactgcaacaacatgcacaccctgggcgcccggctgcccggcggcgtggagtgccgcttccggcggggccctgccatggcctgggagggggagcccatgaggcacaacctgggcggcaacctgggggacccccgggcccgggctgtgtctgtgcccctgggcggccgggtggcccgcttcctgcagtgccgcttcctgtttgctggcccctggctgctcttcagcgagatctccttcatcagtgatgtggtgaacaacagcagccctgccctgggcggcaccttccccccagccccctggtggcccccaggccccccacccaccaacttcagcagcctggagctggagccccggggccagcagcctgtggccaaggccgagggcagccccacagccatcctgattggctgcctggtggccatcatcctgctgctgctgctgatcatcgccctgatgctgtggaggctgcactggaggcggctgctgagcaaggccgagcggcgggtgctggaggaggagctgactgtgcacctgtctgtgcctggggacaccatcctgatcaacaaccggcccggcccccgggagcccccaccctaccaggagccccggccccggggcaaccccccccacagcgccccctgtgtgcccaacggcagcgcctacagcggggactacatggagcctgagaagccaggggcccccctgctgcccccaccaccccagaacagcgtgccccactatgcagaggccgacatcgtgaccctgcagggcgtgactggaggcaacacctatgctgtgcctgccctgcccccaggagctgtgggagatggccccccccgggtggacttccccaggagccggctgcgcttcaaggagaagctgggggagggccagtttggagaggtgcacctgtgtgaggtggacagcccccaggacctggtgtccctggacttccccctgaatgtgaggaagggccaccccctgctggtggccgtgaagatcctgcggccagatgccaccaagaatgccagaaatgacttcctgaaggaggtgaagatcatgagccggctgaaggaccccaacatcatccggctgctgggcgtgtgtgtgcaggatgaccccctgtgcatgatcacagactacatggagaatggagacctgaaccagttcctgagcgcccaccagctggaggacaaggctgctgagggcgcccctggagatggccaggccgcccagggccccaccatctcctaccccatgctgctgcacgtggccgcccagatcgccagcggcatgagatacctggccaccctgaactttgtgcaccgggacctggccaccaggaactgcctggtgggggagaacttcaccatcaagattgctgactttggcatgagcaggaacctgtatgctggggactactacagagtgcagggccgggctgtgctgcccatccgctggatggcctgggagtgcatcctgatgggcaagttcaccacagccagtgatgtgtgggccttcggcgtgaccctgtgggaggtgctgatgctgtgccgggcccagcccttcggccagctgacagatgagcaggtgattgaaaatgctggggagttcttccgggaccagggccggcaggtgtacctgagccggcccccagcctgcccccagggcctgtatgagctgatgctgcgctgctggagccgggagagcgagcagaggcctcccttcagccagctgcaccgcttcctggccgaggatgccctgaacacagtgtag

SEQ ID NO: 80111 - DNA, 591 bp, Artificial Sequence
  derived and/or modified sequence
atgccccacctggccagcctcttcaccgccagcagccgctgctgcccccaccccctgcggcctgagggcagcggggccatgggccctgaggccctgagcagcctgctgctgctgctgctggtggccagcggagatgctgacatgaagggccactttgatcctgccaagtgccgctatgccctgggcatgcaggacaggaccatcccagacagcgacatcagcgccagcagctcctggagcgacagcacagctgcccggcacagccggctggagagcagtgatggagatggagcctggtgcccagctggcagcgtcttccccaaggaggaggagtacctgcaggtggacctgcagaggctgcacctggtggccctggtgggcacccagggcagacatgctgggggcctgggcaaggagttcagccgcagctaccgcctgcgctacagcagagatggaagacgctggatgggctggaaggaccgctggggccaggaggtgatctctggaaatgaagatcctgagggcgtggtgctgaaggacctgggcccccccatggtggcccggctggtgcgcttctacccccgggcctag

SEQ ID NO: 80112 - DNA, 2685 bp, Artificial Sequence
  derived and/or modified sequence
atgagcctgccccgctgctgcccccaccccctgcggcctgagggcagcggggccatgggccctgaggccctgagcagcctgctgctgctgctgctggtggccagcggagatgctgacatgaagggccactttgatcctgccaagtgccgctatgccctgggcatgcaggacaggaccatcccagacagcgacatcagcgccagcagctcctggagcgacagcacagctgcccggcacagccggctggagagcagtgatggagatggagcctggtgcccagctggcagcgtcttccccaaggaggaggagtacctgcaggtggacctgcagaggctgcacctggtggccctggtgggcacccagggcagacatgctgggggcctgggcaaggagttcagccgcagctaccgcctgcgctacagcagagatggaagacgctggatgggctggaaggaccgctggggccaggaggtgatctctggaaatgaagatcctgagggcgtggtgctgaaggacctgggcccccccatggtggcccggctggtgcgcttctaccccagggctgacagagtgatgtctgtgtgcctgcgggtggagctgtatggctgcctgtggagagatggcctgctgagctacacagcccctgtgggccagaccatgtacctgtctgaggccgtgtacctgaatgacagcacctatgatggccacacagtgggcggcctgcagtatggaggcctgggccagctggctgatggagtggtgggcctggatgacttcaggaagagccaggagctgcgggtgtggccaggctatgactatgtgggctggagcaaccacagcttcagcagcggctacgtggagatggagtttgaatttgaccggctgcgggccttccaggccatgcaggtgcactgcaacaacatgcacaccctgggcgcccggctgcccggcggcgtggagtgccgcttccggcggggccctgccatggcctgggagggggagcccatgaggcacaacctgggcggcaacctgggggacccccgggcccgggctgtgtctgtgcccctgggcggccgggtggcccgcttcctgcagtgccgcttcctgtttgctggcccctggctgctcttcagcgagatctccttcatcagtgatgtggtgaacaacagcagccctgccctgggcggcaccttccccccagccccctggtggcccccaggccccccacccaccaacttcagcagcctggagctggagccccggggccagcagcctgtggccaaggccgagggcagccccacagccatcctgattggctgcctggtggccatcatcctgctgctgctgctgatcatcgccctgatgctgtggaggctgcactggaggcggctgctgagcaaggccgagcggcgggtgctggaggaggagctgactgtgcacctgtctgtgcctggggacaccatcctgatcaacaaccggcccggcccccgggagcccccaccctaccaggagccccggccccggggcaaccccccccacagcgccccctgtgtgcccaacggcagcgcctacagcggggactacatggagcctgagaagccaggggcccccctgctgcccccaccaccccagaacagcgtgccccactatgcagaggccgacatcgtgaccctgcagggcgtgactggaggcaacacctatgctgtgcctgccctgcccccaggagctgtgggagatggccccccccgggtggacttccccaggagccggctgcgcttcaaggagaagctgggggagggccagtttggagaggtgcacctgtgtgaggtggacagcccccaggacctggtgtccctggacttccccctgaatgtgaggaagggccaccccctgctggtggccgtgaagatcctgcggccagatgccaccaagaatgccagaaatgacttcctgaaggaggtgaagatcatgagccggctgaaggaccccaacatcatccggctgctgggcgtgtgtgtgcaggatgaccccctgtgcatgatcacagactacatggagaatggagacctgaaccagttcctgagcgcccaccagctggaggacaaggctgctgagggcgcccctggagatggccaggccgcccagggccccaccatctcctaccccatgctgctgcacgtggccgcccagatcgccagcggcatgagatacctggccaccctgaactttgtgcaccgggacctggccaccaggaactgcctggtgggggagaacttcaccatcaagattgctgactttggcatgagcaggaacctgtatgctggggactactacagagtgcagggccgggctgtgctgcccatccgctggatggcctgggagtgcatcctgatgggcaagttcaccacagccagtgatgtgtgggccttcggcgtgaccctgtgggaggtgctgatgctgtgccgggcccagcccttcggccagctgacagatgagcaggtgattgaaaatgctggggagttcttccgggaccagggccggcaggtgtacctgagccggcccccagcctgcccccagggcctgtatgagctgatgctgcgctgctggagccgggagagcgagcagaggcctcccttcagccagctgcaccgcttcctggccgaggatgccctgaacacagtgtag

SEQ ID NO: 80113 - DNA, 3832 bp, Artificial Sequence
  derived and/or modified sequence
ggctttaggaagttatttaactgatctctgccctagtttcttcatgtgttaaatatggatagtaatagtatctaccttatgaagtgactgtgaagataaaattatggattctgtttaagggtttaggccagtgtctggcacaggggaagcattctaaaaatatagctgatgctgttaaacaatgactgttgttgttgttttactgttattatccccaaagcggcccattctgtctgttgctgtcagctatgactcagtcccctgattaacttacgcaccacccattttatcccctgcagagatgctgcccccacccccttaggcccgagggatcaggagctatgggaccagaggccctgtcatctttactgctgctgctcttggtggcaagtggagatgctgacatgaagggacattttgatcctgccaagtgccgctatgccctgggcatgcaggaccggaccatcccagacagtgacatctctgcttccagctcctggtcagattccactgccgcccgccacagcaggttggagagcagtgacggggatggggcctggtgccccgcagggtcggtgtttcccaaggaggaggagtacttgcaggtggatctacaacgactgcacctggtggctctggtgggcacccagggacggcatgccgggggcctgggcaaggagttctcccggagctaccggctgcgttactcccgggatggtcgccgctggatgggctggaaggaccgctggggtcaggaggtgatctcaggcaatgaggaccctgagggagtggtgctgaaggaccttgggccccccatggttgcccgactggttcgcttctacccccgggctgaccgggtcatgagcgtctgtctgcgggtagagctctatggctgcctctggagggatggactcctgtcttacaccgcccctgtggggcagacaatgtatttatctgaggccgtgtacctcaacgactccacctatgacggacataccgtgggcggactgcagtatgggggtctgggccagctggcagatggtgtggtggggctggatgactttaggaagagtcaggagctgcgggtctggccaggctatgactatgtgggatggagcaaccacagcttctccagtggctatgtggagatggagtttgagtttgaccggctgagggccttccaggctatgcaggtccactgtaacaacatgcacacgctgggagcccgtctgcctggcggggtggaatgtcgcttccggcgtggccctgccatggcctgggagggggagcccatgcgccacaacctagggggcaacctgggggaccccagagcccgggctgtctcagtgccccttggcggccgtgtggctcgctttctgcagtgccgcttcctctttgcggggccctggttactcttcagcgaaatctccttcatctctgatgtggtgaacaattcctctccggcactgggaggcaccttcccgccagccccctggtggccgcctggcccacctcccaccaacttcagcagcttggagctggagcccagaggccagcagcccgtggccaaggccgaggggagcccgaccgccatcctcatcggctgcctggtggccatcatcctgctcctgctgctcatcattgccctcatgctctggcggctgcactggcgcaggctcctcagcaaggctgaacggagggtgttggaagaggagctgacggttcacctctctgtccctggggacactatcctcatcaacaaccgcccaggtcctagagagccacccccgtaccaggagccccggcctcgtgggaatccgccccactccgctccctgtgtccccaatggctctgcctacagtggggactatatggagcctgagaagccaggcgccccgcttctgcccccacctccccagaacagcgtcccccattatgccgaggctgacattgttaccctgcagggcgtcaccgggggcaacacctatgctgtgcctgcactgcccccaggggcagtcggggatgggccccccagagtggatttccctcgatctcgactccgcttcaaggagaagcttggcgagggccagtttggggaggtgcacctgtgtgaggtcgacagccctcaagatctggttagtcttgatttcccccttaatgtgcgtaagggacaccctttgctggtagctgtcaagatcttacggccagatgccaccaagaatgccaggaatgatttcctgaaagaggtgaagatcatgtcgaggctcaaggacccaaacatcattcggctgctgggcgtgtgtgtgcaggacgaccccctctgcatgattactgactacatggagaacggcgacctcaaccagttcctcagtgcccaccagctggaggacaaggcagccgagggggcccctggggacgggcaggctgcgcaggggcccaccatcagctacccaatgctgctgcatgtggcagcccagatcgcctccggcatgcgctatctggccacactcaactttgtacatcgggacctggccacgcggaactgcctagttggggaaaatttcaccatcaaaatcgcagactttggcatgagccggaacctctatgctggggactattaccgtgtgcagggccgggcagtgctgcccatccgctggatggcctgggagtgcatcctcatggggaagttcacgactgcgagtgacgtgtgggcctttggtgtgaccctgtgggaggtgctgatgctctgtagggcccagccctttgggcagctcaccgacgagcaggtcatcgagaacgcgggggagttcttccgggaccagggccggcaggtgtacctgtcccggccgcctgcctgcccgcagggcctatatgagctgatgcttcggtgctggagccgggagtctgagcagcgaccacccttttcccagctgcatcggttcctggcagaggatgcactcaacacggtgtgaatcacacatccagctgcccctccctcagggagcgatccaggggaagccagtgacactaaaacaagaggacacaatggcacctctgcccttcccctcccgacagcccatcacctctaatagaggcagtgagactgcaggtgggctgggcccacccagggagctgatgccccttctccccttcctggacacactctcatgtccccttcctgttcttccttcctagaagcccctgtcgcccacccagctggtcctgtggatgggatcctctccaccctcctctagccatcccttggggaagggtggggagaaatataggatagacactggacatggcccattggagcacctgggccccactggacaacactgattcctggagaggtggctgcgcccccagcttctctctccctgtcacacactggaccccactggctgagaatctgggggtgaggaggacaagaaggagaggaaaatgtttccttgtgcctgctcctgtacttgtcctcagcttgggcttcttcctcctccatcacctgaaacactggacctgggggtagccccgccccagccctcagtcacccccacttcccacttgcagtcttgtagctagaacttctctaagcctatacgtttctgtggagtaaatattgggattggggggaaagagggagcaacggcccatagccttggggttggacatctctagtgtagctgccacattgatttttctataatcacttggggtttgtacatttttggggggagagacacagatttttacactaatatatggacctagcttgaggcaattttaatcccctgcactaggcaggtaataataaaggttgagttttccacaa

SEQ ID NO: 80114 - DNA, 3783 bp, Artificial Sequence
  derived and/or modified sequence
agaagtaggaggggcgtcttcccctcgtgggccctgagcgggactgcagccagccccctggggcgccagctttggaggcccccgacagctgctctcgggagccgcctcccgacacccgagccccgccggcgcctcccgctcccggctcccggctcctggctccctccgcctcccccgcccctcgccccgccgccgaagaggccccgctcccgggtcggacgcctgggtctgccgggaagagcgatgagagagatgctgcccccacccccttaggcccgagggatcaggagctatgggaccagaggccctgtcatctttactgctgctgctcttggtggcaagtggagatgctgacatgaagggacattttgatcctgccaagtgccgctatgccctgggcatgcaggaccggaccatcccagacagtgacatctctgcttccagctcctggtcagattccactgccgcccgccacagcaggttggagagcagtgacggggatggggcctggtgccccgcagggtcggtgtttcccaaggaggaggagtacttgcaggtggatctacaacgactgcacctggtggctctggtgggcacccagggacggcatgccgggggcctgggcaaggagttctcccggagctaccggctgcgttactcccgggatggtcgccgctggatgggctggaaggaccgctggggtcaggaggtgatctcaggcaatgaggaccctgagggagtggtgctgaaggaccttgggccccccatggttgcccgactggttcgcttctacccccgggctgaccgggtcatgagcgtctgtctgcgggtagagctctatggctgcctctggagggatggactcctgtcttacaccgcccctgtggggcagacaatgtatttatctgaggccgtgtacctcaacgactccacctatgacggacataccgtgggcggactgcagtatgggggtctgggccagctggcagatggtgtggtggggctggatgactttaggaagagtcaggagctgcgggtctggccaggctatgactatgtgggatggagcaaccacagcttctccagtggctatgtggagatggagtttgagtttgaccggctgagggccttccaggctatgcaggtccactgtaacaacatgcacacgctgggagcccgtctgcctggcggggtggaatgtcgcttccggcgtggccctgccatggcctgggagggggagcccatgcgccacaacctagggggcaacctgggggaccccagagcccgggctgtctcagtgccccttggcggccgtgtggctcgctttctgcagtgccgcttcctctttgcggggccctggttactcttcagcgaaatctccttcatctctgatgtggtgaacaattcctctccggcactgggaggcaccttcccgccagccccctggtggccgcctggcccacctcccaccaacttcagcagcttggagctggagcccagaggccagcagcccgtggccaaggccgaggggagcccgaccgccatcctcatcggctgcctggtggccatcatcctgctcctgctgctcatcattgccctcatgctctggcggctgcactggcgcaggctcctcagcaaggctgaacggagggtgttggaagaggagctgacggttcacctctctgtccctggggacactatcctcatcaacaaccgcccaggtcctagagagccacccccgtaccaggagccccggcctcgtgggaatccgccccactccgctccctgtgtccccaatggctctgcctacagtggggactatatggagcctgagaagccaggcgccccgcttctgcccccacctccccagaacagcgtcccccattatgccgaggctgacattgttaccctgcagggcgtcaccgggggcaacacctatgctgtgcctgcactgcccccaggggcagtcggggatgggccccccagagtggatttccctcgatctcgactccgcttcaaggagaagcttggcgagggccagtttggggaggtgcacctgtgtgaggtcgacagccctcaagatctggttagtcttgatttcccccttaatgtgcgtaagggacaccctttgctggtagctgtcaagatcttacggccagatgccaccaagaatgccaggaatgatttcctgaaagaggtgaagatcatgtcgaggctcaaggacccaaacatcattcggctgctgggcgtgtgtgtgcaggacgaccccctctgcatgattactgactacatggagaacggcgacctcaaccagttcctcagtgcccaccagctggaggacaaggcagccgagggggcccctggggacgggcaggctgcgcaggggcccaccatcagctacccaatgctgctgcatgtggcagcccagatcgcctccggcatgcgctatctggccacactcaactttgtacatcgggacctggccacgcggaactgcctagttggggaaaatttcaccatcaaaatcgcagactttggcatgagccggaacctctatgctggggactattaccgtgtgcagggccgggcagtgctgcccatccgctggatggcctgggagtgcatcctcatggggaagttcacgactgcgagtgacgtgtgggcctttggtgtgaccctgtgggaggtgctgatgctctgtagggcccagccctttgggcagctcaccgacgagcaggtcatcgagaacgcgggggagttcttccgggaccagggccggcaggtgtacctgtcccggccgcctgcctgcccgcagggcctatatgagctgatgcttcggtgctggagccgggagtctgagcagcgaccacccttttcccagctgcatcggttcctggcagaggatgcactcaacacggtgtgaatcacacatccagctgcccctccctcagggagcgatccaggggaagccagtgacactaaaacaagaggacacaatggcacctctgcccttcccctcccgacagcccatcacctctaatagaggcagtgagactgcaggtgggctgggcccacccagggagctgatgccccttctccccttcctggacacactctcatgtccccttcctgttcttccttcctagaagcccctgtcgcccacccagctggtcctgtggatgggatcctctccaccctcctctagccatcccttggggaagggtggggagaaatataggatagacactggacatggcccattggagcacctgggccccactggacaacactgattcctggagaggtggctgcgcccccagcttctctctccctgtcacacactggaccccactggctgagaatctgggggtgaggaggacaagaaggagaggaaaatgtttccttgtgcctgctcctgtacttgtcctcagcttgggcttcttcctcctccatcacctgaaacactggacctgggggtagccccgccccagccctcagtcacccccacttcccacttgcagtcttgtagctagaacttctctaagcctatacgtttctgtggagtaaatattgggattggggggaaagagggagcaacggcccatagccttggggttggacatctctagtgtagctgccacattgatttttctataatcacttggggtttgtacatttttggggggagagacacagatttttacactaatatatggacctagcttgaggcaattttaatcccctgcactaggcaggtaataataaaggttgagttttccacaa

SEQ ID NO: 80115 - DNA, 3820 bp, Artificial Sequence
  derived and/or modified sequence
gtcttcccctcgtgggccctgagcgggactgcagccagccccctggggcgccagctttggaggcccccgacagctgctctcgggagccgcctcccgacacccgagccccgccggcgcctcccgctcccggctcccggctcctggctccctccgcctcccccgcccctcgccccgccgccgaagaggccccgctcccgggtcggacgcctgggtctgccgggaagagcgatgagaggtgtctgaaggtggctattcactgagcgatggggttggacttgaaggaatgccaagagatgctgcccccacccccttaggcccgagggatcaggagctatgggaccagaggccctgtcatctttactgctgctgctcttggtggcaagtggagatgctgacatgaagggacattttgatcctgccaagtgccgctatgccctgggcatgcaggaccggaccatcccagacagtgacatctctgcttccagctcctggtcagattccactgccgcccgccacagcaggttggagagcagtgacggggatggggcctggtgccccgcagggtcggtgtttcccaaggaggaggagtacttgcaggtggatctacaacgactgcacctggtggctctggtgggcacccagggacggcatgccgggggcctgggcaaggagttctcccggagctaccggctgcgttactcccgggatggtcgccgctggatgggctggaaggaccgctggggtcaggaggtgatctcaggcaatgaggaccctgagggagtggtgctgaaggaccttgggccccccatggttgcccgactggttcgcttctacccccgggctgaccgggtcatgagcgtctgtctgcgggtagagctctatggctgcctctggagggatggactcctgtcttacaccgcccctgtggggcagacaatgtatttatctgaggccgtgtacctcaacgactccacctatgacggacataccgtgggcggactgcagtatgggggtctgggccagctggcagatggtgtggtggggctggatgactttaggaagagtcaggagctgcgggtctggccaggctatgactatgtgggatggagcaaccacagcttctccagtggctatgtggagatggagtttgagtttgaccggctgagggccttccaggctatgcaggtccactgtaacaacatgcacacgctgggagcccgtctgcctggcggggtggaatgtcgcttccggcgtggccctgccatggcctgggagggggagcccatgcgccacaacctagggggcaacctgggggaccccagagcccgggctgtctcagtgccccttggcggccgtgtggctcgctttctgcagtgccgcttcctctttgcggggccctggttactcttcagcgaaatctccttcatctctgatgtggtgaacaattcctctccggcactgggaggcaccttcccgccagccccctggtggccgcctggcccacctcccaccaacttcagcagcttggagctggagcccagaggccagcagcccgtggccaaggccgaggggagcccgaccgccatcctcatcggctgcctggtggccatcatcctgctcctgctgctcatcattgccctcatgctctggcggctgcactggcgcaggctcctcagcaaggctgaacggagggtgttggaagaggagctgacggttcacctctctgtccctggggacactatcctcatcaacaaccgcccaggtcctagagagccacccccgtaccaggagccccggcctcgtgggaatccgccccactccgctccctgtgtccccaatggctctgcctacagtggggactatatggagcctgagaagccaggcgccccgcttctgcccccacctccccagaacagcgtcccccattatgccgaggctgacattgttaccctgcagggcgtcaccgggggcaacacctatgctgtgcctgcactgcccccaggggcagtcggggatgggccccccagagtggatttccctcgatctcgactccgcttcaaggagaagcttggcgagggccagtttggggaggtgcacctgtgtgaggtcgacagccctcaagatctggttagtcttgatttcccccttaatgtgcgtaagggacaccctttgctggtagctgtcaagatcttacggccagatgccaccaagaatgccaggaatgatttcctgaaagaggtgaagatcatgtcgaggctcaaggacccaaacatcattcggctgctgggcgtgtgtgtgcaggacgaccccctctgcatgattactgactacatggagaacggcgacctcaaccagttcctcagtgcccaccagctggaggacaaggcagccgagggggcccctggggacgggcaggctgcgcaggggcccaccatcagctacccaatgctgctgcatgtggcagcccagatcgcctccggcatgcgctatctggccacactcaactttgtacatcgggacctggccacgcggaactgcctagttggggaaaatttcaccatcaaaatcgcagactttggcatgagccggaacctctatgctggggactattaccgtgtgcagggccgggcagtgctgcccatccgctggatggcctgggagtgcatcctcatggggaagttcacgactgcgagtgacgtgtgggcctttggtgtgaccctgtgggaggtgctgatgctctgtagggcccagccctttgggcagctcaccgacgagcaggtcatcgagaacgcgggggagttcttccgggaccagggccggcaggtgtacctgtcccggccgcctgcctgcccgcagggcctatatgagctgatgcttcggtgctggagccgggagtctgagcagcgaccacccttttcccagctgcatcggttcctggcagaggatgcactcaacacggtgtgaatcacacatccagctgcccctccctcagggagcgatccaggggaagccagtgacactaaaacaagaggacacaatggcacctctgcccttcccctcccgacagcccatcacctctaatagaggcagtgagactgcaggtgggctgggcccacccagggagctgatgccccttctccccttcctggacacactctcatgtccccttcctgttcttccttcctagaagcccctgtcgcccacccagctggtcctgtggatgggatcctctccaccctcctctagccatcccttggggaagggtggggagaaatataggatagacactggacatggcccattggagcacctgggccccactggacaacactgattcctggagaggtggctgcgcccccagcttctctctccctgtcacacactggaccccactggctgagaatctgggggtgaggaggacaagaaggagaggaaaatgtttccttgtgcctgctcctgtacttgtcctcagcttgggcttcttcctcctccatcacctgaaacactggacctgggggtagccccgccccagccctcagtcacccccacttcccacttgcagtcttgtagctagaacttctctaagcctatacgtttctgtggagtaaatattgggattggggggaaagagggagcaacggcccatagccttggggttggacatctctagtgtagctgccacattgatttttctataatcacttggggtttgtacatttttggggggagagacacagatttttacactaatatatggacctagcttgaggcaattttaatcccctgcactaggcaggtaataataaaggttgagttttcc

SEQ ID NO: 80116 - DNA, 2631 bp, Artificial Sequence
  derived and/or modified sequence
atgggccccgaggccctgagcagcctgctgctgctgctgctggtggcatcgggagatgccgacatgaaaggccattttgacccggctaaatgtcgctatgcactgggcatgcaggacaggacaattccagattcagacatctcagcgagtagttcgtggtctgacagcactgcagcaagacatagccgactcgaatcctccgacggcgacggagcctggtgtccggcaggctcggtatttcctaaggaagaggagtatctgcaggtcgacctgcagagactgcatctggtcgccctggtaggcacccaaggaagacacgccggcgggctgggcaaggaattctctagatcctaccgactccgctattccagagacgggcggagatggatgggctggaaagaccggtgggggcaggaggtgataagtggcaacgaggacccagaaggtgtcgtgctaaaagatctcggacctccaatggtagctcgcctggtgcgattctaccctcgcgccgatagggtaatgtcagtatgcctgagggtggaactctacggatgcctttggcgtgatgggctgctctcctacaccgccccagtggggcagacaatgtatctgtcggaagcagtgtatctgaatgactctacctatgatggccacaccgtgggggggctgcagtatggaggcctagggcaattggcggatggcgtggtggggctggatgactttcggaaatcccaggagttgcgagtctggccagggtatgactacgtggggtggtctaatcactcattttccagtggctacgtcgagatggagtttgagttcgaccggctgcgtgcctttcaagcaatgcaagtccactgcaataatatgcacacgctcggcgctcggctgcctgggggagtcgaatgtcggttcaggcgaggccctgccatggcctgggaaggggaacctatgcggcacaaccttggcggcaatttaggcgacccccgcgcgcgcgccgtctccgtgcctctgggtggaagggttgcgaggttcctgcaatgtcggtttctgttcgcaggtccctggctgctcttctctgaaataagcttcatcagcgatgtggtcaacaacagcagccctgctttgggcgggacgtttccgcccgccccgtggtggcctcctggcccccccccaactaacttctcttccctggagcttgaaccgaggggacagcaaccagtggccaaggccgaaggcagtcccactgctatcttaatcggatgtctagtggctattattctgcttctgctgctcataatcgccctcatgttatggcgtctgcactggagaaggctgctgagcaaggcggaaaggcgagtacttgaggaggaactcaccgtgcacttgagcgtcccgggcgacaccattttgatcaataatcgacccggtcctagagagcccccaccttatcaggagccgaggcccaggggcaatcccccccatagcgctccctgcgtgcccaatggctcagcttatagtggggactacatggagccagaaaagccaggagctcccttgctgcccccccctccgcaaaacagcgtgccacactatgcagaggccgacatcgtgacgctgcagggcgttactgggggcaacacatatgcggtaccagccctgccccccggcgctgtgggagatggcccccccagagtggactttcccagatcaaggctacgcttcaaagaaaagctgggggaaggccagttcggggaggtgcacctctgcgaggtagatagcccccaggacctggtctctttagactttccactgaatgtacggaaaggccatcctcttcttgtggccgtgaaaatcttgagacccgatgctacaaaaaatgcccggaacgatttcctgaaggaagtaaaaataatgagcaggttaaaagaccctaacattatccgcctcctgggggtttgtgtgcaggacgaccctttatgtatgattacggactatatggaaaatggtgacttgaaccagttcctctcagcgcaccagttggaagataaggccgcagaaggcgcacccggagatggccaggccgcccaaggaccgactatttcctatcctatgctgcttcacgtcgcggcacagatcgcaagtggcatgcggtatcttgctactttaaacttcgttcaccgcgacctggccactcgcaattgtctggtgggcgagaatttcaccatcaagatcgctgatttcggaatgtctcgcaacctgtatgcgggagattactatagggtgcagggcagagcagtgttacccattcgatggatggcttgggagtgcatactgatgggcaaattcactacagctagcgacgtatgggcattcggcgttactctgtgggaagttctgatgctctgtcgggcacaaccctttggccagctgactgacgagcaagtgatagaaaacgccggggagttctttcgcgatcagggcagacaggtgtatttgtcccgccctccagcttgtccacagggattatatgagttgatgctgaggtgttggtcaagagagtccgaacagcgccctccttttagccaattgcacaggttcctcgcagaggatgccctgaacacagtgtag

SEQ ID NO: 80117 - DNA, 2631 bp, Artificial Sequence
  derived and/or modified sequence
atgggccccgaggccctgagcagcctgctgctgctgctgctggtggcttccggtgacgcggacatgaaaggacactttgatccggcaaagtgtcggtacgcactgggtatgcaggatcgtaccatccccgactcggatatatccgcctccagcagctggtccgacagtaccgccgcccgccatagtcgactggaatcaagcgatggggacggcgcttggtgcccagctggatccgtctttcccaaggaagaagagtatctgcaggttgatctccagcgtctacaccttgtcgccctcgtgggaacacagggccgtcacgctggaggcctgggcaaagaattcagtcgctcttaccgcctccggtattcccgagacggccgcagatggatgggatggaaagataggtggggacaggaggtaatctccgggaacgaagatcctgaaggtgtcgtactgaaagacctgggtcccccgatggtggcccgcttagtgaggttttatccgcgcgcggacagggtcatgtctgtgtgtctacgggtggaattgtacggatgtctttggagggacggcctgttgagttacaccgcacctgtcggccaaacaatgtacctgtcagaggcagtgtacctcaatgatagtacctacgacgggcatactgtaggtggcctccagtatggtggattaggccagctggcagatggcgtcgtaggtctggacgatttccgcaagtcacaagaactgagggtgtggccaggttacgattatgtgggctggtccaaccattcatttagcagcggttacgtggaaatggagtttgagttcgacagactcagagccttccaggctatgcaagtgcattgcaacaacatgcacaccctcggggctaggctgccagggggggtggagtgtcggtttcgtcgaggaccagctatggcatgggagggagaaccgatgagacataacctcggtggtaatctaggtgacccaagggccagggctgtttcggtgccgcttggtggcagggttgccaggtttttgcaatgtaggttcctgttcgccggaccttggctgctgttcagcgagatcagctttatcagcgatgttgtcaataacagtagtcctgccctgggaggcaccttcccacccgctccttggtggccaccggggcccccgcccacaaacttcagtagtttagaactggagcctcgcggacaacaaccggtggccaaagcggaagggtccccgacggccattctgattggatgtttggttgccattattctgcttttattgctcatcatcgccttaatgttgtggaggctccattggagacggttgctgagcaaagccgaaagaagggtcctcgaggaagaactgaccgtccacctcagcgttcccggggataccatcttaattaacaatcgcccggggccaagggagcctcctccataccaggagcctcgcccaaggggcaatccaccccattccgccccatgcgtgcccaacggtagtgcttactctggagactatatggaacctgagaaaccaggagccccccttctgccaccacccccccaaaacagcgtgcctcattacgccgaagcggatatagtgaccttacagggagtcaccggcggcaatacatacgccgttccagccttgcctccaggagctgtgggagacgggccaccaagagtcgacttccccagatccagactgcgtttcaaagaaaaactcggcgaaggccagtttggcgaggtgcatctctgtgaagttgacagcccacaagatctggtcagcctagactttccactgaatgtccgcaaagggcatcctctcctggtagccgtgaaaattcttcgccccgatgccaccaaaaacgccagaaacgattttctcaaggaggtcaaaattatgagccggctgaaggaccccaatatcatccggctacttggggtttgcgttcaggatgatccactttgcatgattacagactatatggaaaatggtgacctgaaccaattcctcagcgcccatcaactggaagacaaagccgcagagggagctcccggggatggacaggcagctcagggccccacaattagttaccccatgctgctgcacgtggcagcgcaaatcgcatccggaatgcgatatctggctacattaaactttgtccatcgggatctcgctacgaggaactgtcttgtcggagagaactttacaattaagatcgcagacttcggaatgtcccgaaatctctatgccggagactactaccgtgtccagggccgtgccgtgctccctatccgatggatggcttgggaatgcattttgatgggtaagttcaccacagcctcagacgtgtgggccttcggcgtaacgctgtgggaagttttaatgttatgtcgcgctcagccctttggccaactcactgacgaacaagtcattgaaaacgctggggagttctttcgggaccaaggcagacaggtgtatctgagccggcctcccgcctgcccccagggactttacgagcttatgcttaggtgctggagtcgagaatctgagcagcgacccccatttagtcaactgcacaggttcttggccgaggacgccctcaataccgtgtag

SEQ ID NO: 80118 - DNA, 2631 bp, Artificial Sequence
  derived and/or modified sequence
atgggccccgaggccctgagcagcctgctgctgctgctgctggtggcctcaggcgacgccgacatgaaaggccatttcgatccagctaagtgtaggtatgcgctaggtatgcaggacagaaccatccccgatagcgacatttctgcatcatccagctggtctgatagcaccgctgcacgacactcacggctcgagtcctctgacggtgacggtgcatggtgtccagccgggtctgtctttcccaaagaggaggaatatctgcaggtggacctgcagagacttcacctggtggccctggtgggaacacagggaagacatgccggcggtctggggaaagagttctcccggtcatatagactgcgctatagcagggatggtaggcggtggatgggctggaaggaccgttggggacaagaggtcatctcaggcaacgaagatccagagggcgtggtgcttaaggacttaggccctccaatggtggcccgcctagtcaggttttatccacgcgcggacagagtgatgtcagtttgcttgagagtggagttgtatggctgcctttggcgggacggcctcttgtcttacactgcccccgtagggcagaccatgtacttatcagaagcagtttacctcaatgatagcacctatgacgggcatacagtggggggccttcagtatggcggcctgggacagctggctgacggtgttgtgggccttgacgattttcgcaaatcacaggaactccgggtgtggcccggatatgactacgtgggctggtctaatcacagtttctcgagcggctacgtagaaatggagtttgaatttgaccgcttgcgtgcatttcaggcaatgcaggtgcattgcaacaatatgcacactctcggggccagactgcctggcggcgtcgaatgtcgtttcagaaggggacccgccatggcctgggaaggcgaacccatgcgccacaacctgggtgggaatctgggagaccctcgggctcgcgccgttagcgtgcccctgggcggaagagttgccagattcctgcagtgccgctttctctttgccggcccatggctgctgttcagtgaaatttctttcatatcagacgtggtcaataacagtagtcctgccttggggggaacttttcccccagccccgtggtggcccccgggcccaccccccacaaatttttccagtctcgagttggaacccaggggtcagcagccagtagcaaaggctgaagggtcaccaacggcaatcctgatcgggtgtcttgtcgctatcattctgctcttgttgttaatcatcgctctcatgttgtggcggttacactggcggcggctgctctctaaagcagagcgaagagtgctggaggaagagcttaccgtgcatttatccgttccaggcgacacaattctcatcaacaaccggcccgggccccgcgagccaccaccttaccaggagccgagacctcgagggaatcccccacacagcgcgccctgcgttccgaatgggtctgcctacagtggagattacatggagccagagaaacccggcgcacccctgctacctcctcctccgcaaaactccgtcccccactatgcagaagcagacatcgtgactttgcagggcgttacagggggcaacacttatgccgttccagccctgcccccgggggcggttggtgatggaccaccgcgcgtggactttccacgaagtcggctccgattcaaagagaaacttggtgagggccagttcggtgaggtgcacctttgtgaggtggacagcccccaagacctggtctctctggatttccctttgaatgttaggaaaggccatcccctattggtggccgtgaaaatcctccgtcccgacgcgacaaaaaacgccaggaacgattttctcaaggaggtcaagattatgtcaagactgaaagaccctaacattatccggctgctcggcgtttgcgtccaagacgatccactctgtatgataacagactatatggagaatggtgatctgaaccagttcctgtccgcacaccaactcgaggacaaagcagctgaaggcgctccaggggatgggcaggcagcccaagggcctacaatctcctatccaatgctgcttcatgttgcagcccagattgccagtggcatgagatacctggccacgctgaatttcgttcaccgcgacctagcaaccaggaattgtctggtgggagagaactttacgattaaaattgcggactttgggatgagtaggaacctctacgcaggggactattaccgggtacagggtagggcggtgttaccgataagatggatggcctgggagtgcatcctgatgggcaagttcacaactgcctctgacgtttgggcttttggagtcacgttatgggaggtcctcatgctgtgccgggcccagccatttggccagcttaccgatgagcaggttattgagaacgccggcgagtttttccgggatcaagggagacaggtatacctgtccaggcctccggcttgcccccaaggtctttatgaactgatgttgcgatgctggagcagggaaagtgaacagcggcccccgttctcccagctacatagatttctcgctgaggatgcgctaaacacagtgtag

SEQ ID NO: 80119 - DNA, 2631 bp, Artificial Sequence
  derived and/or modified sequence
atgggccccgaggccctgagcagcctgctgctgctgctgctggtggcgtctggcgacgcagatatgaagggtcacttcgatcctgcgaaatgcagatacgccttaggaatgcaggaccgaaccattcctgattcagatatttccgcaagctccagttggtccgattccactgccgcacgccactctagattagagagttccgacggcgatggggcgtggtgccccgctggctccgtgtttcctaaagaagaggaatatcttcaagtcgatctgcagaggctgcatctggtggcgctggtcgggactcagggcagacacgcaggcggtttaggaaaagagtttagtcggagctaccggctgcggtactcccgcgacggccggcgatggatgggctggaaagatcgatggggacaggaagtgatctcaggcaacgaggaccctgagggcgtcgtgctcaaagacctcggcccccccatggttgcacgactagtccgtttctaccctagggctgatcgcgtcatgtctgtctgtttgcgcgtggaactgtacggatgcttatggcgtgacgggctcctaagctacaccgcacccgttggccaaaccatgtatctgtccgaggcggtctatctcaatgacagcacatatgacggccatacagtcgggggtctgcaatacggaggtctgggacagttggccgacggcgtggtgggcctggatgactttcgaaaatcccaggaactgcgagtgtggccaggttatgactatgtgggatggtccaatcattctttcagcagcggctatgtggagatggagtttgagttcgacagactgagggccttccaggccatgcaggttcactgtaataatatgcacaccttgggagcaaggctaccgggcggggtggaatgcaggttcagacgtggccccgcgatggcttgggagggagaaccgatgaggcacaatttgggcgggaatctgggtgacccacgggcccgggcggtgagcgtccccttgggggggcgcgtggccagatttctccaatgccgtttccttttcgctggcccgtggctacttttctccgagatatctttcatttcagatgtggtgaacaactcatcgccagccctgggaggaacttttccccctgcaccctggtggcctcctggccctcctcccactaatttttcttccctcgagttggaaccgagggggcagcaacctgtcgcaaaagcagaaggatcaccgaccgcaattctaataggctgtcttgtcgccatcatcctgttgttgctgctcatcattgctctgatgctctggaggctccactggaggagactactctccaaggctgaacgaagagtgcttgaagaagagctgaccgtgcatcttagcgtgccaggggacactatcctgattaataaccgacctggccctcgtgagccgccgccctaccaggaacctcgtccacgcggcaatccaccccacagcgcaccttgcgtgccaaacggaagcgcctactcaggggattacatggaacccgagaagcctggagcccccctgttaccccctcctccacagaatagtgtgccccattacgctgaggctgacatcgtgaccctgcaaggggtcacaggcggtaacacgtatgcagttccagcccttcccccaggcgctgtgggagacggcccacctcgcgtggatttccctcgtagccgcctgcgcttcaaagaaaagttaggcgaggggcagttcggggaagtgcacctgtgtgaggtagactctccgcaggacctcgtcagtctggattttcccctcaacgtaagaaagggtcaccctttgctagtggctgtgaagattttacgacccgacgctactaagaacgctaggaatgacttcttgaaggaagtgaaaattatgagtcggttgaaggaccccaatataataagattattgggagtgtgcgtccaggacgacccactgtgcatgatcactgattatatggaaaatggagacctcaaccagtttctgtctgcacaccaactagaggacaaagctgccgaaggcgcaccaggggatggacaagctgctcagggaccgacaatctcctatcccatgctgttacacgtggccgcccaaatcgccagtgggatgcgatatctggccaccctgaatttcgttcacagggatctggccacacggaactgtctcgtaggcgaaaatttcaccatcaagattgctgacttcggaatgagtcgcaacctgtatgccggagattattatcgcgtgcagggcagggcagttctccctatccgttggatggcttgggagtgcattttaatgggtaagtttacaactgcatcggacgtttgggcctttggcgttacactctgggaagtcctgatgctgtgtcgcgctcagcccttcggacagctcaccgatgaacaagtgattgaaaacgccggtgaattcttccgcgaccaggggaggcaggtttacttatccaggcctcctgcctgtccccagggactctatgagttgatgctgcgatgctggtcccgcgaatcggagcagaggcctccattctcccaattgcaccgctttcttgccgaggatgccctgaataccgtgtag

SEQ ID NO: 80120 - DNA, 2631 bp, Artificial Sequence
  derived and/or modified sequence
atgggccccgaggccctgagcagcctgctgctgctgctgctggtggcttccggcgatgccgacatgaaaggacatttcgacccagctaaatgtcgatatgctctgggcatgcaggatagaacaattccggactcagacatcagcgcaagctctagctggtccgactcaaccgccgcacgccactcacgcctggagagctctgacggtgacggtgcctggtgcccggcagggtccgttttccccaaagaagaggagtatttacaggttgatctacaaaggctacatctagtcgctctggttggtacacagggccgacatgcgggcggtctggggaaggagttctcaaggtcatacaggttgcggtattcccgcgatggccgtaggtggatggggtggaaggaccggtgggggcaggaagtgatctccggaaatgaggatccggaaggcgtggtgctgaaagacctgggcccgcccatggttgcaagacttgttcggttctatcctcgcgctgacagggttatgagcgtgtgcctgagggtggaattatatggctgtttatggagagacgggctactgagctatacagctccagtaggtcagacaatgtacttgtcggaggccgtgtatctgaatgattcaacatacgatgggcataccgtcggcgggttacaatatggtggcctgggtcagttggccgacggcgttgtgggcctggacgatttccggaagtcccaggagcttcgcgtttggccgggctacgattatgtcgggtggtccaaccactctttcagcagcggctacgtggagatggagtttgaattcgatcgcctgagggcctttcaggcaatgcaggtacattgtaacaacatgcatactctgggtgcccgtcttccaggcggagttgaatgtcgctttcggagagggcccgcaatggcgtgggaaggggaacctatgcggcacaatctgggcggaaacctcggcgacccacgggcaagagccgtgtcagtgccactgggggggcgcgtcgcgcgcttcctccagtgcaggttcctttttgcaggcccttggctgttgttcagtgagatttcttttatatctgacgtggtgaataatagctcaccggccttgggcgggacatttccgcccgcaccgtggtggccacccggccctccacctaccaatttttctagcctggagttagagccgcggggtcaacagccagtggctaaggccgagggttcgcctacggccatactgatcgggtgcctggtggctatcattctgctgcttttattgatcattgcacttatgctgtggagattgcactggaggaggctgttatcgaaagcagagagacgggtgctcgaagaggaattgaccgttcacctcagcgtgccgggagacacaatcttgatcaataacagacctggccctcgggaaccacctccctaccaggagccacgcccaaggggaaatcctcctcattcggccccctgtgtccctaatggcagcgcatactctggagactacatggagcccgagaagcctggggcccctttgctaccccctcctcctcagaacagcgtgccccattacgcggaagccgacattgtcacgttgcagggagtcaccggaggcaacacatatgcggtgcctgccctgcctcccggtgcagtaggggacggcccacctcgagtcgacttccccagatctcgcctgcgcttcaaggaaaaactgggggaggggcagtttggtgaggttcacctgtgcgaggtggattcacctcaggacctggtttccctggatttccctctgaatgtgcgcaaagggcatcctttgcttgttgccgtaaaaatactgaggcctgacgctacgaaaaatgcccggaacgactttctgaaggaagtgaagatcatgtcccggctaaaggatcccaacatcatcaggcttctcggcgtatgtgtgcaggacgatcccttatgcatgattacagactatatggagaatggcgatcttaaccagttcctgtcagcccatcagctcgaggataaggccgctgaaggcgcccccggcgatgggcaggccgcccagggaccaactatctcctacccaatgctgctccacgtggccgcacagatcgcgagcggaatgaggtaccttgctaccctgaatttcgtgcacagggacttggccacaaggaactgccttgttggtgagaacttcaccataaagattgccgattttgggatgtctcgcaacctgtacgcaggtgattattaccgagtacagggcagggccgtcctgccaattcgatggatggcatgggagtgcatactaatggggaagttcactacggcctcagacgtctgggccttcggggtgactttgtgggaagtcttaatgctgtgtcgggcccagccgtttggacagctgaccgacgagcaggtgatagagaatgcaggagaatttttcagggatcaggggcgccaagtgtatttaagcaggccccccgcttgtccccagggtctctacgagctgatgctgcgctgctggtcgcgggagtccgagcaacggcctccattcagtcagttacacagattccttgcggaagatgctcttaacaccgtgtag

SEQ ID NO: 80121 - DNA, 2631 bp, Artificial Sequence
  derived and/or modified sequence
atgggccccgaggccctgagcagcctgctgctgctgctgctggtggcttcaggggacgccgatatgaagggacactttgatcctgctaagtgccggtatgccctggggatgcaggacagaacaattcccgactccgacatctccgcttcctctagttggtctgactccaccgccgctagacatagccggctcgaaagctctgatggtgatggggcttggtgtccagccgggagtgtctttcctaaggaagaggagtacctgcaggtggatttgcagcggctgcatcttgtggccctagtggggacacaggggcgccacgcaggcggacttggtaaggagttcagtcgtagctaccggttgagatactccagagatggtcgccgctggatgggatggaaggacaggtggggacaggaggtgattagcgggaacgaagatccagagggggtggtactgaaggacttgggaccccctatggttgcaagactcgtgagattctacccccgggcggaccgggtcatgagtgtatgccttcgggtagagctgtatgggtgcctgtggcgggacggcctactaagctacactgcacccgtgggacagacaatgtatctatccgaggccgtatatctcaatgacagcacgtacgatggacacaccgtgggcggccttcagtatggcgggctggggcagctggcagatggagtcgtggggctggatgacttccggaagtcccaggagcttagagtttggcccgggtatgattatgtcggttggtctaaccactcctttagctctggatacgttgagatggaattcgagtttgatagattgcgggccttccaggcaatgcaggtccactgtaacaatatgcacactttgggcgctcggctgcctggtggcgtggagtgtcggttcagacgagggcccgccatggcgtgggagggcgaaccaatgagacataatttgggtgggaaccttggtgatcctagagctcgggccgtttctgtgcccctcggggggcgagtcgctagattcttgcagtgtcgttttctctttgcagggccatggttgttgttctccgagatctcattcatcagtgatgtagtgaacaacagttcaccagccctgggtggcacttttcccccagccccctggtggcctccgggccccccccccaccaatttttcatctttggagctcgaacctcggggccagcagccagttgccaaggccgaaggcagtccaacagcaattttaatcgggtgtctggttgcaataatattactgctcttgttaataatcgcactgatgttatggaggctgcattggcggcgtctgcttagcaaggccgagagacgagtgctggaagaagagctgacggtacatctgtcagtccccggcgacactatactaatcaacaataggcctggaccacgggagccccccccctaccaggagccccgtccacgcggaaatccaccccactccgccccatgcgtccccaatggatcggcgtactccggagattatatggaacccgagaaacccggggcgccattactgcccccaccaccccagaatagtgttccacactacgccgaggctgatatagttacattgcagggtgtcacaggaggcaacacttacgctgtgccagccctgccccccggagcagttggcgacggccccccccgtgtcgactttccacgcagcagactccgatttaaggaaaagctcggcgagggacagttcggcgaggtgcatctgtgtgaggtcgactcccctcaggacctcgtgtcactggatttccctcttaatgtaagaaaagggcaccccctgctcgtggcagtgaaaatcttgcgccctgacgccactaaaaacgctagaaacgacttcctcaaggaggtgaagatcatgagtcgtctgaaagatccaaatattattcgcctgctaggggtatgcgtgcaagacgacccgctctgtatgatcaccgactacatggagaacggggacctcaaccagtttctctctgcccaccagttggaggacaaggcagccgagggggctccgggagacgggcaggctgctcaaggcccaacgatttcctatccaatgctcctacacgtggccgcccagattgcttcgggaatgcgctacctggctaccctcaattttgttcaccgtgacctggcaacccgcaactgtttggttggggagaacttcaccatcaagatcgccgatttcggaatgtctaggaacctatatgccggggactattacagagtccaggggagagcggtgctccccattaggtggatggcgtgggaatgcatactgatggggaagtttacaacagcaagcgacgtgtgggctttcggcgtgaccttgtgggaggtgctgatgctctgtagagcccagcccttcggccaactcactgacgagcaggtcatcgagaacgccggtgagttttttcgtgatcagggcagacaggtgtatctttcacgaccacctgcctgtcctcagggtctctacgagctgatgctgcgatgctggagtagggaatcagagcagagacctccgttctctcaactgcataggtttctcgcggaagacgccctcaacaccgtctag

SEQ ID NO: 80122 - DNA, 2631 bp, Artificial Sequence
  derived and/or modified sequence
atgggccccgaggccctgagcagcctgctgctgctgctgctggtggcatcaggagatgcagacatgaaggggcatttcgatccagccaaatgtagatatgcactggggatgcaggacagaacgatacctgactccgacatatctgcctcatcgagttggtctgactcaactgccgctaggcactcacgcctggaatcatccgatggcgacggtgcttggtgtccagctgggtctgtatttcctaaggaagaggagtacctgcaggtcgatttgcagcggctccatctcgtcgctcttgtgggaacccagggccgtcatgcagggggcctgggtaaggagttctctcgctcctacaggttgaggtactccagggatgggaggagatggatgggctggaaagacagatggggccaggaggtgatcagcggtaacgaagaccccgagggtgtggtcctcaaagatctcggaccaccgatggtcgctaggctggtgcggttttaccccagagcagatcgtgtgatgtcagtctgcttacgagtggagctctacggctgtttgtggagggacggtcttctcagctatacagctcccgtcggccagaccatgtatttgtcagaagcagtctacctgaatgacagcacatacgatggacacactgtcggaggcctgcaatacggtgggctgggccagcttgcagacggggtggtgggtctggacgatttccggaagagccaggagctgcgggtgtggcccggctacgattatgtcggctggagcaaccactccttttcctccggctatgtggaaatggaattcgagtttgatagactgagagcattccaggcaatgcaggtgcattgtaataatatgcacactctcggggctcggttaccagggggagtcgaatgtcggtttcgtcgaggccctgctatggcctgggaaggcgaaccaatgcggcataacctgggcggaaacctaggggacccaagggccagagccgtaagcgtaccgcttggcgggcgagtcgcccggttcctacagtgccggttcttgtttgccgggccctggctgcttttttccgagatttcttttatctccgatgtcgtgaacaattccagccctgccctagggggtacttttcctcccgcgccatggtggccgcccgggccccctcctacaaacttttcatctctggagttggagcctcgaggtcaacagccggttgccaaagcggagggatctccgaccgcaatcttaatcgggtgcctggtcgctataatactgctacttttgctgatcattgccctcatgctgtggcgtctgcactggcgccggttgctgtccaaagctgagcgaagagtcctcgaagaagagctgactgtgcacctgtctgtgccgggcgacacgatactaatcaacaacaggccaggcccacgtgagccacccccatatcaggaacccagaccaagaggaaacccaccccactctgccccatgtgtacccaacgggagcgcgtatagtggtgattacatggaacctgaaaaacctggcgcgccactgttgcctccacctcctcagaacagcgttccgcactatgccgaagccgacattgtgaccctgcaaggagttacaggagggaacacatatgcagtgcccgcacttccaccaggcgcagtgggcgatggacccccgcgtgtggattttccgagaagcagactcaggtttaaggagaagctaggagaaggtcagtttggagaagtccacctgtgcgaagttgatagtccccaagatctggtgagcttggactttcccttgaatgtgaggaaagggcatcctctgttggtggcagtcaagattttacggcccgatgccaccaagaacgcgcgcaacgacttcctgaaggaagttaagataatgagtcgccttaaagatccaaacattatcaggctgctcggcgtgtgtgttcaagacgacccactctgcatgattacagactatatggagaacggtgacctcaatcagttcctgtctgcacaccagttagaggataaggcagccgaaggggcacctggtgatggccaggccgctcagggtcccacaatcagctaccctatgctgttgcacgttgcagcacagattgcttcaggtatgcgataccttgcgactttgaacttcgttcatcgcgatcttgcaacaaggaactgtctagtgggagagaactttacaatcaaaatcgctgattttggaatgtccaggaacctctacgccggtgactattacagggtgcagggccgggcagtcttgccaatccgttggatggcttgggaatgtatattaatgggcaagtttacaactgcttctgacgtgtgggcgttcggggtaactctgtgggaggtcttgatgctgtgtcgtgcacagccctttggtcagctgactgatgagcaagtaatagaaaacgcgggcgagttctttagagaccaggggcgacaagtctacctatctcgcccacccgcatgtcctcagggtctgtacgagctgatgctgcgctgctggtcaagagagtctgagcagaggccacccttttcccagctgcataggtttctggcagaagatgccttaaacaccgtatag

SEQ ID NO: 80123 - DNA, 2631 bp, Artificial Sequence
  derived and/or modified sequence
atgggccccgaggccctgagcagcctgctgctgctgctgctggtggcttccggggatgcggacatgaagggacatttcgatcctgctaaatgcaggtacgctctcggcatgcaagacaggactattccagattcggatataagcgccagttcctcatggagcgattctacagccgcacgccattctcgcctggagtcgagtgacggagacggggcctggtgccccgcgggaagcgtgttccccaaggaggaagagtatctgcaggtcgacttgcaacggctgcatctggttgccttagtggggacacagggtaggcacgcaggcggcctgggaaaggaattctccaggtcgtacagattgaggtactcaagggatggccgcagatggatgggttggaaggacaggtggggccaagaggtaatctccggtaacgaagatccagagggtgtggtgctgaaagacctgggccctcccatggtcgcgcggctcgtgcggttctaccccagagcggacagggtgatgtctgtgtgcctgcgggtggaactgtacgggtgcctgtggcgcgatggcctgctctcttacacagcaccggtcgggcagacaatgtatttgtccgaagcagtctaccttaacgacagcacttacgacggacacaccgtggggggtctgcagtatggagggctcgggcagctagcagacggcgtggtcggcttagacgactttcgcaagagtcaggagctgagagtttggcccggctacgactacgtgggctggagcaaccacagttttagctcgggctacgtggagatggaattcgaattcgatagattgcgggcctttcaagctatgcaagtccattgcaataacatgcatactcttggggcccgtttgccagggggagtggaatgccggttcaggcgaggccccgccatggcatgggaaggagagccaatgagacataacttgggcggaaacctgggcgatccgcgcgcccgtgctgtctcagtgcctctagggggaagagtagcacggttcctgcaatgcagattcctcttcgccggtccctggttgctgttcagcgagatttcattcattagtgacgtggtcaataactcgagtcctgctctgggcggcacattccccccggctccctggtggccgccaggcccgccgcctacgaatttcagcagtctggaactggaaccgcgaggccagcagcctgtcgccaaggccgaaggttcaccaacggccatactaattggctgcttagtagcaatcatactattgcttctattaattattgcgctcatgctctggcgtctccattggcggaggctcttgtctaaagccgagagaagagttctcgaagaagaacttacagtgcacctgagtgttcccggggataccattctgatcaataatcggcctgggccgcgagagcccccaccgtatcaggaaccccggcctcgcggaaaccctccccattccgccccatgcgtcccaaacgggagcgcttacagcggagactacatggaaccagaaaaaccaggagctcctctccttccgccgccaccccaaaattccgtaccgcattatgccgaggccgacattgttaccctccagggcgtcactggaggaaatacttatgccgtgcccgccctgccccccggagccgtaggggatggcccaccaagggttgactttccaaggtccaggctgcgttttaaggaaaaactaggcgagggccagttcggagaagtccatctgtgcgaggtggatagcccgcaggatctggtctcactggactttcctttgaatgttcgcaaaggccatcctctcctggtcgctgttaaaatattgaggcccgacgctactaaaaatgccagaaacgacttcctgaaggaggttaagatcatgtccagacttaaagacccaaacatcattcgcctcctaggggtgtgcgttcaagacgatccattgtgcatgattaccgactacatggaaaatggcgatttgaatcagttcctctccgcacaccaactagaggacaaggctgccgaaggggcgcctggagatggccaggcagcccagggaccaacaattagttatccaatgcttttacatgtagcggcccagattgcctctggaatgcgctatctcgccaccttgaatttcgtgcacagggatctggcgacccggaactgtcttgtgggggaaaacttcacaatcaagatcgccgacttcgggatgtcgcgaaatctgtacgctggcgattactatcgcgtgcagggccgggccgtgctgccaatccgatggatggcctgggaatgcattttgatggggaaattcaccacggccagtgatgtatgggcattcggcgtcactctatgggaggttctaatgctgtgcagggcgcagccttttggccagctcacagacgagcaggtgatagagaatgctggcgaattctttcgggaccaggggcggcaagtgtatctcagccggccacccgcatgcccacagggcctgtatgagttgatgctgcggtgttggtcaagagagtcggagcagaggccaccattctcacagctgcatcgcttcctggcggaagatgccctcaataccgtttag

SEQ ID NO: 80124 - DNA, 2631 bp, Artificial Sequence
  derived and/or modified sequence
atgggccccgaggccctgagcagcctgctgctgctgctgctggtggcttcaggagatgcggatatgaaggggcactttgaccccgcaaaatgccgctacgcattgggtatgcaggatcgaactattcctgatagtgacatcagtgcctcgtcaagttggagcgactccaccgccgcaagacactcccgcctggagagctccgacggcgacggggcctggtgcccagcgggatccgtgttccctaaagaggaagaatatctgcaggtagacctacagcgactgcatctggtggcacttgtggggacgcagggaaggcacgcagggggcctcggcaaggagtttagtcggagttacagactgcggtattcgcgagacggcaggcggtggatggggtggaaggacagatggggacaggaagtcatctcgggcaacgaagatccggaaggggttgtgctgaaagatctgggaccacccatggtcgcaaggcttgtccggttttaccctcgagctgacagagttatgtccgtgtgcctgcgagtcgaactgtatggctgcctgtggcgggatggcctattatcttatacagctcccgtggggcagaccatgtatttaagtgaagctgtgtaccttaatgactcaacgtatgacggacacacggtcgggggactacaatacggcggactgggacagctcgctgacggggttgtgggccttgatgattttagaaagagccaggagttacgtgtgtggccaggatacgattatgtgggatggtccaaccatagcttctctagtggttatgtagaaatggaattcgagttcgaccggctcagagcattccaggcgatgcaggtccactgtaataacatgcacacattgggcgcccggctacctggcggtgtggagtgcaggttcaggagagggccagcaatggcttgggaaggcgagcccatgaggcacaacctgggcgggaacctgggtgaccccagagccagggcagtaagcgtaccacttgggggcagagtcgcacggttcctgcagtgtcgctttttgttcgcaggaccttggctgttgttctccgaaatatcatttattagtgatgtggtgaataatagctcccccgcactgggcggaaccttccctcctgccccatggtggcctccagggccccccccaacaaatttttcttcattagagttggagccacgggggcagcaacccgtggcaaaagccgagggcagtcctactgcaatcctcatcgggtgtttggtggcaatcatcttgctgttgttgcttattatcgccctgatgctttggagactgcattggcgacgtcttctgagcaaagctgagcgacgtgtgctcgaggaagagctgacagtgcatctctccgtcccaggagacaccattctcattaacaaccgccccgggccacgggaacctccgccctaccaggagcccagaccaaggggcaatccacctcactccgctccctgcgtacccaacggctccgcctacagtggggattacatggagccagagaagcccggagccccactcctacccccccccccgcagaatagcgtgcctcactatgccgaagccgatatcgtcaccctgcagggcgtgaccggaggcaacacctatgccgtaccagctttacccccgggtgccgtgggagacgggcctccaagggtggactttccccgatcccgactgcgattcaaagagaaattgggcgagggccaattcggggaggttcacctgtgtgaagtggactcaccccaggacctcgttagtctggatttccctctaaacgtccgcaaagggcatccgctgctggtcgcagtcaaaattctgcgtcctgatgccactaaaaatgctaggaatgacttccttaaggaggtgaagatcatgagccgactgaaagatcccaatattattcggctactgggggtctgtgtgcaggatgatccactctgcatgatcaccgactacatggagaatggtgatttgaatcagttcctctcggcccaccagctcgaagataaggctgcagagggggctccaggtgacggtcaagcagcacaaggtcctaccatcagctacccaatgctgctacacgtggccgcacagatcgcgtcaggcatgcgctatttggccacactcaatttcgtgcatagagatctggccaccagaaattgtctagtaggtgaaaacttcaccattaagattgcggatttcggaatgtccaggaacctatatgccggcgattattaccgagtgcagggtcgcgccgttctgcccattaggtggatggcttgggaatgtatccttatgggaaaatttaccacagcctctgacgtgtgggccttcggagtcacgttgtgggaagtgctgatgttgtgtagagctcagccgttcggccagctgaccgacgagcaggtgattgagaacgcaggtgagttcttccgcgaccagggccgtcaagtttatttgagcagacctccggcgtgcccccaaggtctgtatgaactgatgctgcggtgctggtcccgagagagcgagcagcgcccacctttctctcagctccatagattcttggcagaagacgctttgaatacagtttag

SEQ ID NO: 80125 - DNA, 2631 bp, Artificial Sequence
  derived and/or modified sequence
atgggccccgaggccctgagcagcctgctgctgctgctgctggtggccagtggtgatgctgatatgaaggggcacttcgatccagccaaatgcagatatgcgttgggtatgcaggaccgaactattcctgacagcgacatttctgctagctcgtcatggtcagactcaaccgcagcacggcactccaggctggagagctctgatggagatggcgcctggtgtcctgctggaagcgtttttcctaaggaagaggagtatctgcaggtggatctacagagactccacctcgtggcactggttggaacccaaggcaggcacgcaggtggcctcgggaaggaattcagtcgaagctaccgcctcaggtattcgagagatgggcgcagatggatgggttggaaagacagatggggacaggaagtcatctcaggcaatgaagaccctgagggcgtcgttctaaaagatctgggacctccaatggttgctagactggtgcgcttctaccctagggctgatcgcgtcatgagcgtttgcttgagagttgaactgtacgggtgcctttggcgcgacggactgctcagttatacagcaccggtgggacagactatgtacctatccgaagccgtgtatctcaacgacagtacctacgacggccacacagtcggggggctgcagtatgggggactcggacagcttgctgatggggttgtgggcctggatgattttcgcaaatcccaggagctacgcgtgtggccaggatatgactacgtgggttggtccaatcacagttttagcagtggttacgtggaaatggaattcgaattcgacaggttacgggccttccaagctatgcaggttcattgtaataacatgcataccctgggagcgaggctgccaggcggagtggaatgccgctttcgacgcggccccgccatggcctgggaaggtgagcctatgcggcataatttgggtgggaacctgggtgatcctagagcccgcgcagtatcagttccacttggggggagagtggcgcgcttcctgcagtgtcgctttttgttcgcaggtccctggctgctcttcagcgagatcagcttcatttccgacgtggtcaataattcttcacctgcccttggtggtacgtttccaccggcgccctggtggcccccaggtccgccgcctactaacttttcttctctggagcttgagccaagaggtcaacagcccgtggctaaagccgaaggatccccgactgcaattctcatcggctgcctggtggctattatcctccttttgttattgatcatcgcacttatgttgtggcggctgcattggcgacgacttctatctaaggctgaaagaagggtcctcgaggaggaactgaccgtgcatctctccgtacccggcgatacaatcctcatcaacaaccgtcccggcccccgagagccccctccataccaggaacctcgtccgaggggcaaccctccacactcagctccatgtgtacccaacggtagtgcatactctggtgactacatggagccagagaagcccggcgcacccttgcttccacccccccctcaaaattcagtcccgcactatgcggaggcagatattgttacgttgcagggcgtcaccggaggcaacacctatgcagtgcctgcgttacctcccggcgccgtgggcgacgggcctccccgggtggatttcccacggtctcgcctccggttcaaggagaagctcggcgagggacagtttggagaagtgcacctttgcgaagttgattcgccacaggatctcgttagtctcgatttccctctaaatgttcgaaaagggcatccactcctcgtggcggtgaaaattttgcgaccagatgctacaaaaaacgcacggaacgactttctgaaggaagtgaaaatcatgtctcggttaaaggatccaaacattatccgtctgctcggggtttgcgtccaagacgaccccctctgcatgattaccgactatatggagaatggcgatctaaaccagttcctcagtgcacatcagctggaggataaggccgcagaaggagccccgggcgatggtcaagccgctcagggaccaacgatcagttatccaatgctgttgcacgtcgctgcacaaatcgcgagcggaatgcggtacctagccactttgaacttcgtccacagggacctggcaacgaggaactgcctggtgggcgaaaatttcacaatcaagattgcagactttgggatgtctagaaatctctatgcaggggattactacagagtacagggcagggccgtgctgccgattcgctggatggcgtgggagtgcatcctgatgggtaagttcacaactgcaagtgacgtttgggccttcggcgtcactctgtgggaggttctgatgttgtgtcgcgctcagccatttgggcagctgacggacgagcaggtgattgaaaacgctggagaattcttcagggatcagggccgccaggtttatctgtctcgcccaccggcctgtccacagggcttgtacgaacttatgctgagatgctggtctcgcgaaagcgaacagagacccccattttcccagcttcaccgattcctcgccgaagatgcacttaacaccgtatag

SEQ ID NO: 80126 - DNA, 2631 bp, Artificial Sequence
  derived and/or modified sequence
atgggccccgaggccctgagcagcctgctgctgctgctgctggtggccagtggggatgctgatatgaagggacacttcgatccagccaagtgccgctatgctctagggatgcaggataggaccattccagactcagacatttccgcgtcttcctcttggtctgactcaaccgccgcccgacactctcgactggaatcctcggatggcgatggtgcatggtgtcctgcaggcagcgtcttccctaaggaggaagagtatctgcaggtcgatcttcaaagactgcacttggttgcgctggtcggaacacagggcaggcacgctggcgggctggggaaagaattttctaggagttatagactgcggtacagtagagacggccgccgctggatgggttggaaagacagatggggccaggaggtaatctccgggaacgaagatcccgagggggtggttctgaaggacttgggcccccccatggtagccagattggtccgcttttacccccgcgcggacagggtgatgtctgtttgcctgagagtcgagttgtacggatgtctttggagggatgggcttctgagctacactgccccagtaggacagacgatgtatctgagcgaagcggtgtatttgaacgactccacctacgatggtcacactgtagggggcttgcagtacggtggcctcgggcaactggccgatggagttgtcggcctggacgacttccgtaaaagtcaggaactgcgcgtgtggcctggatacgattacgtcggatggtccaaccatagcttctcatcagggtatgtggagatggaattcgaattcgatcggttaagggcattccaggctatgcaggttcactgtaacaacatgcatacactaggcgccaggttacccggcggtgtggagtgtagattccgacggggtccagctatggcctgggaaggagaacctatgcggcacaatctgggcggaaatctcggggacccacgagcccgggctgtgagcgtgccgctgggcggacgtgtggcccgttttctccagtgtcggtttcttttcgccggcccgtggctcctgttctcagaaatttcgtttatatcagatgtcgtgaataacagctctcccgccctgggcggaactttcccacctgcaccttggtggccaccgggccccccgccgactaacttttcctccctggagctggagcctcgtggacagcaacctgtcgcaaaagccgaggggtccccaactgccattctgatcgggtgcctggtcgctatcattctgttgttgcttcttattattgcactgatgttgtggaggctgcactggcgtagacttttgtccaaggcggagcgccgcgtcctcgaggaggaactgacagtgcatctttccgttcccggggacactatacttatcaacaatcggccagggcctcgcgagcccccaccctaccaagaaccaagaccaagaggtaaccccccccactcggcgccatgcgtgcctaacggatcagcctacagcggtgattacatggaacccgagaagcccggtgccccactgctgccacctcccccacagaactccgtgcctcattacgcagaagcagacatagtcacactccagggggtgacaggaggcaacacttatgccgtgccagctctccctccaggagccgtgggagacggcccccctcgggtggatttcccccgttctaggctgaggttcaaagaaaagctgggcgagggacagtttggggaagtgcacctgtgtgaagtcgactcacctcaggatctggtttctcttgactttccacttaacgtaaggaaaggccaccccctgcttgtggcagttaaaatcctgcgtcctgacgctacgaagaatgctcgcaatgacttcttgaaggaggtgaagatcatgagtcgcctgaaggatcctaacattattagactcttgggggtctgtgtacaggatgaccctctgtgcatgattaccgactacatggaaaatggggatctgaatcagtttctttctgcccaccagctcgaagacaaggccgccgaaggcgcgcctggggacggccaggccgcccaaggaccaactataagctatcccatgctgctgcacgtggccgcccagatcgcaagtggaatgagatacttggctacactgaattttgtgcaccgtgatcttgctacgagaaattgcctggtaggcgaaaacttcaccatcaagattgctgacttcggcatgtcacggaatctttacgcgggagattattacagagtacaggggcgggctgtgttgcctattcggtggatggcttgggagtgcatcctgatggggaagttcacgaccgcttctgacgtctgggccttcggtgtcaccctttgggaagtcctcatgctgtgcagagcccaaccctttggtcaactcactgatgagcaggtgattgaaaacgcgggggagttttttagagatcaggggcgtcaggtctacctcagccggccacctgcctgcccgcagggtctctacgagttgatgctgcgatgttggtccagggagtcagagcagcgaccccccttttcacagttgcatcgattcctggcagaggatgccctcaatactgtgtag

SEQ ID NO: 80127 - DNA, 2631 bp, Artificial Sequence
  derived and/or modified sequence
atgggccccgaggccctgagcagcctgctgctgctgctgctggtggcctcgggcgacgctgacatgaaagggcacttcgacccggcaaagtgtcgatacgcacttggcatgcaggaccggaccatccctgattcagatattagtgctagttcttcatggtccgattcaactgccgctcgtcacagcagacttgaatcttcggacggcgacggggcctggtgtcccgctggatccgtgttcccaaaggaggaagagtatctgcaggtcgacctgcaacgtttacacttggtggctctggtggggactcagggaaggcacgctggtgggctcggtaaagagttcagccggagctatcggctgcgatactctcgggatggcagaaggtggatgggttggaaggatcgatgggggcaggaggtgatttccggcaacgaagatcccgaaggagtggtattgaaagacctaggacccccaatggttgcacgtcttgttcggttttacccccgggctgatcgcgtgatgtccgtttgcttgcgagtggagttgtatggttgtctttggcgtgacggattgttgtcctataccgccccggtgggacaaacaatgtatctgtcggaggcagtgtacctcaacgactcgacgtacgacggccataccgtgggaggccttcagtacggcgggctgggacagcttgccgacggggtggtgggtctcgatgacttcaggaagtcccaggagttgagagtgtggccaggatatgactacgtggggtggagcaaccactcctttagtagcggatacgtggagatggagttcgagtttgacaggctgagggcctttcaggccatgcaggtgcactgcaacaatatgcatactttgggggctagattaccaggaggagtcgaatgtcggttcaggcgcgggccagcaatggcttgggagggggagcccatgcggcacaatctgggcgggaatttgggcgacccacgcgctcgtgcggtgagtgtgcctttagggggccgcgttgctagatttttacaatgtagatttctctttgctgggccctggcttctatttagcgagatatccttcataagcgatgtggtgaataattcctccccggcgctgggcggcactttcccgccggcgccctggtggccccctgggcctcctcctactaacttctcatcactggaacttgagcctcggggacagcaacctgttgctaaggcggagggaagccctactgccattctaattggctgtcttgtggcgatcatccttctcttactactgataatagccctgatgctatggcgcttgcattggcgccgattacttagcaaagccgagcgtcgtgtgctggaggaagagttgactgtgcatctatccgtacctggtgatacaatcttgattaacaataggcccggaccacgggagcccccgccttatcaggaacctaggcctcggggaaatcccccccatagcgctccctgcgtcccaaatggcagcgcatactctggtgactatatggaacccgaaaaaccaggggcaccactgctgccaccccctccccagaattcggtgcctcactatgcagaggcagatatcgttaccctgcaaggggtaaccggggggaacacatatgccgtgcccgccctcccaccgggcgcagtgggcgacgggcctcctcgtgttgactttccacgatcgcgattgaggtttaaggaaaaactaggggagggtcagttcggcgaggtccatctctgcgaggtcgattctccccaagacttggtttctttggattttcctttgaatgtcagaaaaggccatccacttcttgtcgcagttaagatcttgcgacccgatgctacgaagaatgctcgtaacgactttttgaaggaagtcaaaatcatgtcgcgactcaaagaccctaatatcattcgactgctgggcgtctgtgttcaggacgatcctctctgcatgattacggattacatggagaacggcgacctgaaccagttcttgtctgcgcaccagttagaggacaaggctgcagagggcgcaccaggtgacggccaggccgcacaaggccccaccattagttatcccatgctactgcacgtcgcagcccagatcgcctcaggcatgagatatttggccacactgaactttgtgcatcgtgatctcgctactagaaactgtctggtgggcgagaactttacaattaagatagcagacttcggcatgtcgcgaaacctttatgctggtgattactacagggtgcagggccgcgctgtactgccgattcggtggatggcttgggaatgtattctaatgggcaagtttacgacagcatccgatgtgtgggcattcggcgtcacgttgtgggaagtcctgatgctatgcagagcacagccgtttggccaactcacggatgagcaggtgatagaaaacgctggtgaattttttcgtgaccagggaaggcaggtttacctaagccgcccccctgcttgcccccagggcctgtatgagctgatgctgcgctgctggtctcgggagagtgaacaaaggcctccgtttagccaactccatcgctttctggctgaagacgctctgaacactgtctag

SEQ ID NO: 80128 - DNA, 2631 bp, Artificial Sequence
  derived and/or modified sequence
atgggccccgaggccctgagcagcctgctgctgctgctgctggtggccagcggcgacgccgatatgaaaggccacttcgatcccgctaaatgtaggtatgcactaggtatgcaagaccgcactattcccgacagtgacatctccgcctcttcctcatggtcagatagcaccgctgcaaggcactcccgcttggagtcatctgatggagatggagcctggtgccctgccggaagtgtgttcccaaaagaagaggagtacctgcaggttgacctgcagcgtctgcatcttgtggcactggttggtacacaagggaggcacgctgggggcctcggcaaggagttcagtaggagctaccgcctgcggtattcccgcgatggtagaagatggatgggatggaaagataggtggggtcaggaagtcatctccggaaatgaggacccagaaggagtggtgctcaaggatctgggtcctcccatggtcgcccgcctggtccgattctaccctcgagcagacagggtaatgtctgtgtgtctgcgggtggagctgtacggttgcttgtggagggatggactgttgtcctacactgccccagttggacaaacaatgtatcttagtgaggccgtctatctgaatgactctacatatgatggccacaccgtggggggtttgcagtacgggggcctggggcaactcgccgatggtgtcgtggggctggatgacttcagaaagagtcaagagctccgggtgtggccagggtatgattacgtcggatggtccaaccacagcttttctagtggctatgtagagatggaatttgagttcgatcgcctgagagccttccaagctatgcaggtgcattgcaacaacatgcacaccctcggagccagactacctggaggggtcgagtgcagattccggcgaggccccgcaatggcctgggaaggggagcccatgaggcataaccttgggggcaatctgggtgacccccgtgcacgtgcagtttcagtaccactgggtgggagggtggcaaggtttctgcagtgtaggtttctctttgctggtccctggttattgtttagcgaaatctcgtttatcagtgacgttgtgaataacagctctcctgcgttgggcggcactttccccccagctccatggtggccaccgggcccgccaccaacaaactttagtagtctcgagcttgagcccagagggcagcagcctgtcgccaaggccgagggcagccctactgccatcctgattggctgtttagtggcaatcatcctcctgctgctactgattattgcactcatgctgtggagactgcactggcgcagattgctaagtaaggctgaacggcgcgtcttggaggaagagcttaccgtgcacctaagtgtccccggcgatacaatcttgataaataatcgacctggcccccgtgaaccaccaccatatcaggaacccagaccccggggtaaccccccgcactctgccccttgtgtaccaaacggctcagcctattccggcgattacatggaacccgaaaagcctggggctcccctactgcctccaccaccacagaacagtgtccctcactacgcagaagccgacattgtgacactccagggagtgacagggggaaacacatatgccgttcccgcgctccctcctggggcggtgggggacggcccccctcgggtagattttcccaggtcccggctgcgctttaaagaaaagctgggcgagggccagtttggcgaagtccacctgtgcgaagtcgatagcccccaggacctggtttcactcgatttccctctgaacgtgaggaaggggcatccgctactcgtagctgtgaagatcctgcgcccagacgcgacaaaaaacgctcgcaacgatttcctgaaagaagtcaaaattatgagtcgtctcaaggatcctaatattatacggttgcttggggtttgtgtacaagacgatcctctttgcatgattactgactacatggagaacggcgacctcaatcagttcttgtcggcacatcagctggaggacaaagctgccgagggagcaccaggtgatgggcaggccgcacagggccccaccatctcttaccccatgctgctccacgtcgccgcacagatcgccagtggaatgcggtacctcgctaccttaaatttcgtccaccgggatcttgcaacgaggaactgtctggtgggcgaaaactttaccataaaaatagccgatttcggtatgtcccgcaacctttacgccggagattactatagggtacagggacgcgccgttctccccatcagatggatggcttgggagtgcatcttgatgggtaaatttactaccgcaagtgacgtctgggccttcggagtgactctatgggaggtcttaatgttatgccgcgcacaaccctttggccagctgacagacgaacaggtgatcgagaacgcaggcgagttctttcgggatcaaggccggcaagtgtatcttagccggcccccagcatgccctcaggggctgtatgaattgatgcttaggtgctggagccgagaaagcgagcagaggccccccttcagccagctccatcgctttcttgccgaagacgctttaaataccgtctag

SEQ ID NO: 80129 - DNA, 2631 bp, Artificial Sequence
  derived and/or modified sequence
atgggccccgaggccctgagcagcctgctgctgctgctgctggtggccagcggagatgctgacatgaagggtcacttcgacccggccaagtgtagatacgctctcggtatgcaagaccgaactatcccagactctgacatctcagcttcaagctcctggtcagacagtacagccgcccggcactccaggttggagagttcggacggcgacggcgcctggtgcccagccggtagtgttttcccgaaagaggaagagtatctgcaagtcgatctccagagactgcatctagtcgctctggtgggcacccagggacggcatgccggaggactgggcaaagagttcagccggagttatcggctgcgctacagccgggatgggagacgatggatgggatggaaagaccggtgggggcaagaagtgatcagcggtaatgaggatccagaaggggtggtcttaaaagacctgggacccccgatggttgcacgcctggtgcgcttttatcccagggccgaccgggtgatgtctgtttgcttgagggttgagctctatggatgtttgtggagggacggattgctatcctacacggcccccgtagggcagactatgtatctctctgaggcagtctacttaaatgattccacttatgacggacacactgtgggtggccttcagtatggagggctggggcagctcgccgatggcgtcgtggggcttgatgacttccggaaaagccaggagttaagagtgtggcccggctacgactacgttggctggagcaatcacagcttctccagcgggtatgtcgaaatggagtttgaattcgaccggttacgagccttccaagcaatgcaggttcactgcaacaacatgcacacgctgggcgctcgccttcccgggggcgtggagtgcagattcaggcgcggcccggctatggcctgggagggcgagccaatgcggcacaatcttggcggcaaccttggagaccccagggctagagccgtaagcgtcccattgggcggccgggtagctaggtttctacagtgccggtttttattcgctgggccatggctactctttagcgaaatttcctttatctcagatgtggtgaacaacagttcccccgccctgggtggaactttcccgcctgctccttggtggccaccggggccaccgcctacaaacttcagcagtctggagcttgagccccgaggccagcagccagttgctaaagcagaggggtctcccactgcgatcctgattgggtgtctcgtggccataattcttctgcttcttttaattatcgctttaatgctgtggcggctgcactggaggcggctcctgagtaaagcagagagacgagtgctggaggaggagttaacagtgcatctgagtgtaccaggcgacaccattttgattaacaaccggcccggaccacgtgagcccccaccctaccaggaaccaaggccgaggggaaatccccctcacagtgccccatgcgtccccaacggtagtgcctatagtggcgattatatggagcctgagaagcctggagcgcctctgcttcctccgcctcctcagaactccgttccccactatgctgaggccgatatcgtcactctccaaggtgtgaccggcggcaacacatacgcagttcccgctttaccgccgggagccgtgggggatggcccgccacgggtggacttcccaagaagcagactgcgatttaaggaaaagttaggcgaggggcaatttggcgaggtgcatctgtgcgaggtggattcaccacaggatctcgtcagtctggactttcctctcaacgtgcgcaaggggcaccccctgttggtggccgtcaaaattcttcgcccagacgctacgaagaatgccagaaatgactttctgaaggaggtcaagatcatgagccgtctcaaggaccccaacattattcggctgctcggcgtgtgcgtccaagacgaccccctctgtatgatcacagactacatggaaaacggtgatctaaatcagtttttatcagcccaccaactggaggacaaagctgcggagggagcgccaggagacggacaggccgctcagggacccaccatatcttaccctatgctcttacacgttgctgcccaaatcgcctcggggatgcgatacctggctactttaaactttgtacacagggatctggccacacgtaactgcctcgtgggcgaaaacttcacgataaagatagctgatttcggcatgtcgcgtaacttgtacgctggagactactaccgcgttcagggaagggccgtactgcccattcggtggatggcatgggagtgtatccttatgggaaaattcaccaccgccagtgatgtgtgggctttcggagttacactgtgggaggtcttgatgctgtgccgggcacaaccctttgggcaactcactgatgagcaggtgatcgagaatgccggcgagttcttcagggatcagggacgacaggtttatctcagccgcccacccgcctgtccccagggcttgtatgaactcatgctgcgatgctggtctcgggagagcgaacagcgaccccccttttctcaattacacaggttcttggccgaagacgccttaaacactgtgtag

SEQ ID NO: 80130 - DNA, 2631 bp, Artificial Sequence
  derived and/or modified sequence
atgggccccgaggccctgagcagcctgctgctgctgctgctggtggcctccggagatgccgatatgaaagggcattttgaccccgccaagtgtcggtacgctctgggtatgcaggatcgcactattccagactctgacatttcggccagttccagttggtctgattcaaccgccgcccgccattcaaggctcgagagcagcgacggagacggcgcgtggtgtcctgcaggttccgtctttcccaaggaagaggaatatttgcaggttgatcttcagagactgcacttggtggctttagtgggcacccagggtcggcacgcgggggggctcggtaaagagttctctcggtcctatagactgcggtacagcagggatggcagacggtggatggggtggaaggataggtggggccaggaggtgatctcaggaaacgaggatcccgaaggcgttgtgctcaaagaccttgggccaccgatggttgctaggttagtacgcttctatcctcgtgccgatagggtcatgagtgtttgtttgcgcgtggagctctacggttgcctatggagggatggcctgctctcctataccgccccagttggtcagactatgtacttgagcgaagccgtgtatctgaatgactccacctatgatggccacaccgtcggggggctgcagtacggaggcctgggccaactggcagatggggtggtggggctagatgattttagaaagagccaggaactgagggtctggcctgggtacgattatgtcgggtggagcaaccactctttttcaagtggatacgtagagatggagttcgaatttgatagactgcgagcctttcaggccatgcaggtccattgcaacaatatgcacaccttgggggcccgtctgccagggggcgttgaatgccggttccgtcggggtcccgccatggcttgggagggagaacctatgcggcacaatctaggaggcaacttgggtgacccccgagcaagagctgtgtctgtgccgcttgggggcagggttgcccgcttcctgcaatgtcgtttcctgtttgccggaccctggttgctgttttcagaaatttcatttatctccgacgttgtgaacaatagcagcccggcactgggcgggacattcccaccagccccctggtggccccccggaccgccaccgactaacttttcttccctagaattagagccacgggggcaacaacctgtagcgaaggcagaggggtcccctacagccatcctcattggctgtctagttgctattatcctgctgctgcttttgattattgccctgatgctttggcggctgcattggcggagactgttgagtaaagccgagcggagagtgctcgaggaagaactgacagtgcacctctctgttccaggagataccattctgattaataaccgacctggaccacgagagcctcctccataccaggagcctcgccccaggggaaatccccctcattcggctccctgcgtgcccaacggcagtgcctactcaggagactacatggaaccagaaaagcctggcgccccactgcttcccccaccacctcagaactcagtgccccactatgctgaggcggacattgtgacactgcaaggcgtgactggaggaaacacgtacgccgttccggccctgccccccggcgctgttggtgatggtccccctagagttgatttccccaggagtcgcctccgattcaaagagaagttaggcgagggccagtttggggaggtgcacctctgtgaagtggatagtccccaggacttggtgtccttggacttcccactcaatgtgagaaaagggcacccactgctcgttgcagttaaaattctgcgtccagatgctaccaagaatgcacgtaacgatttcctgaaggaggtgaagatcatgtcacggctgaaggatcctaatattatcaggctcctcggtgtctgcgtacaggacgacccactgtgtatgatcacagattacatggaaaacggagacctgaatcagtttctttccgcccaccaactcgaggacaaagccgccgaaggagcaccgggtgacggacaagctgcccagggccccactatttcctatcctatgctccttcatgtggccgcacagatcgcgtctgggatgaggtacttagccaccctgaatttcgtccatcgagatcttgcgacccgaaactgcctagttggcgagaacttcacaattaaaatcgccgactttggaatgtcccggaatctttacgccggggactattacagagtccaggggcgagccgtccttcccattaggtggatggcctgggagtgtatactgatgggaaagttcacaactgcctctgatgtttgggctttcggagtgaccctatgggaggtgctgatgttgtgtcgtgctcaaccattcgggcagctcacggacgagcaggtgattgaaaacgccggcgagttttttagagatcaggggcggcaggtgtatctcagccggccccctgcatgcccacaggggctttacgagctgatgctgcgatgctggtctcgggaatcagagcagcgtccgcctttctcacaactgcacagattcctagcagaggacgcgttgaacacagtatag

SEQ ID NO: 80131 - DNA, 2631 bp, Artificial Sequence
  derived and/or modified sequence
atgggccccgaggccctgagcagcctgctgctgctgctgctggtggccagcggggatgcagatatgaagggccactttgaccccgcaaagtgccgctacgcccttggcatgcaggacagaacaatcccagactccgatatcagcgcctccagctcatggagtgactcaacagctgccaggcactcacggttggagtcttcagatggagatggcgcctggtgccctgcgggaagtgtgtttcctaaggaggaggaatatctgcaagtggatctgcagcgtcttcacttggtggctctggtcggaacacaggggcgacatgccggaggacttggtaaagaattttccagaagctacaggctgaggtattcccgagacgggcgcagatggatgggttggaaggaccggtggggacaggaggtgatcagcggcaatgaagaccccgaaggcgtggtcctcaaagatctgggccctcccatggtcgcccgtctggtgagattttacccccgagccgatcgcgtgatgtcagtgtgccttcgcgtagaactgtacggctgcctgtggcgcgacggcctcttgagttacacagcgccagtgggccagaccatgtacctgagcgaggcggtttacctgaacgattctacctacgacggacatacggtcggggggctgcaatacgggggtctgggtcaactggccgacggggtggtgggtttagacgacttccgaaagagtcaggagctgcgtgtgtggcctggctacgactatgttggctggtctaatcattctttctctagcggctacgtggaaatggagtttgagtttgacaggctgagggcatttcaagcaatgcaagttcactgcaacaacatgcacacactgggtgcccggctgccggggggcgtggagtgtcgcttccggaggggtccagctatggcgtgggaaggtgagcctatgcgccacaatctgggagggaacctaggtgaccccagagccagagccgtgtctgtccctcttggtggtagagtggcgagatttttacagtgtaggttcctcttcgcaggtccctggctacttttcagcgagatcagtttcatctcggatgtggttaacaactcttcccctgctctggggggcactttccccccagcaccttggtggcctcccggaccacctccgaccaatttcagtagcctggagctcgaaccacgtgggcaacagcccgtcgcaaaagccgagggttctcctaccgcaatcctgatcggctgtctagttgcaatcatcctcctgctgctgctgattattgccctgatgctgtggcgcctccactggagacgtttgctttctaaggccgagagacgcgttctcgaggaagaactgactgttcacttgtcagttcctggagatacaatcttgatcaacaaccggcccgggccacgggaacctcccccttatcaggagccacgaccccggggtaatccgccacactcagccccgtgtgttcccaatggatccgcgtatagtggagactacatggagcccgaaaagccgggcgcccctctgctgcccccccccccacaaaatagtgtgccgcactacgcggaagccgacattgtgactttgcagggcgtgacgggtggcaacacctacgcagtgccggccttgccacccggggccgtgggggacggaccaccacgcgtcgactttccacgctcgagattgcgcttcaaagaaaaactgggcgaaggccagttcggcgaggtgcatctatgtgaggtggattctccacaggacctggtctcgttagacttcccactaaacgtgcggaaaggccatccactgctggtagcggtcaagatcctgcggcctgacgctaccaagaacgctcggaatgatttcctgaaggaggttaagataatgtctaggctgaaggatcccaatatcatacgcttattaggagtatgtgtacaggatgatcctttgtgtatgatcacggactatatggagaatggtgacctgaaccagttcctttccgcccaccagttggaagataaggctgcagagggagctcccggggatggacaggcagctcagggaccgacaatctcttacccaatgctgttgcatgtcgccgcgcaaatcgcttctgggatgcgttacttggctacgctgaacttcgtgcatagggacttggcaacacgaaattgccttgttggagaaaattttaccattaagatcgcagacttcggaatgtctcgaaacctgtacgctggcgactattacagggtgcaaggaagagccgtgctcccgatccggtggatggcctgggaatgtattctgatgggcaagttcaccactgcctcagacgtatgggcattcggggtcacgctctgggaggttctgatgctttgccgggcccagccattcggtcaactgaccgacgagcaagtaattgagaacgccggggagtttttcagggatcagggacgccaggtgtatttgagccgtccaccagcctgtccacagggcctttatgagctgatgctgagatgctggagcagggagtcagagcaaagaccaccattttcccaactccatcggtttctggcagaagatgccctgaataccgtgtag

SEQ ID NO: 80132 - DNA, 2631 bp, Artificial Sequence
  derived and/or modified sequence
atgggccccgaggccctgagcagcctgctgctgctgctgctggtggcaagcggcgatgctgatatgaaggggcactttgaccctgccaaatgtaggtacgcgctcggcatgcaagatcgcacgatacctgactccgatattagtgcctcgagctcttggtcagacagtacagcagcccgacattcccggctagaaagctcagatggcgacggggcctggtgtccagccggctccgtttttcccaaggaggaagagtatctccaggtcgacctacagcggttgcacctggtagccttggtaggtactcagggccgccatgctggcggcctgggaaaagaattcagcaggagctaccgcctccgttactcacgagacgggcgtcgctggatggggtggaaagacagatggggtcaagaagttattagtgggaatgaagatccggaaggtgtagtgctgaaggatctagggccccccatggtggcgcgattggtgcgattttacccgagagcagaccgggtgatgtctgtgtgcctccgcgtcgagctatacggctgcttatggcgcgatggactgctgtcctacactgccccagttgggcaaaccatgtacctgtctgaggccgtctatctaaatgattctacgtacgatggtcacaccgtcggcggactgcagtacgggggcctgggacagctggccgatggcgtggttggcctggatgattttcggaaaagtcaggagctgagagtttggccgggctacgactacgtgggatggtccaatcactcattctcatccgggtatgtggaaatggaattcgagttcgatcggttgcgcgcatttcaggccatgcaagtccattgcaacaacatgcacactttaggtgctcgactccctggcggcgtggaatgccgtttccgccggggcccggccatggcttgggagggcgagccgatgcggcacaacctaggcggaaacctcggagaccctcgggcacgtgccgtcagtgtcccactaggcggccgtgtggcccggtttctgcagtgccgcttcttgttcgccggcccctggctcctgttcagcgaaataagctttatatccgatgtagtaaataattcctctcccgctctgggcggtacattcccccccgctccctggtggcctccggggcccccacctactaacttctcatctctggaactggaacctcggggtcagcagccagtggcgaaggctgagggctcccccaccgccattctcatcggttgccttgtggctataatcctcctactgcttttgattatcgcgttgatgctgtggaggctgcactggcgaagacttctctccaaagcagaacgccgcgtcctggaggaagagttgacagtgcatctgagtgtgcctggcgacacaatactaataaataatcgtcctggtccccgcgagccccccccttaccaggagccccgtccacgggggaatccacctcattccgctccgtgcgtcccgaatggcagtgcctacagtggagactacatggaaccagagaaaccgggagctcctttactgccacctcccccccagaattctgtcccacactatgcagaggctgacatagttaccctacagggcgtgactggaggcaacacctacgcagttccagctcttccacccggcgcggtcggcgatggccctcctcgggtcgacttcccccggagtcgtctgcgatttaaggagaagctcggagaaggccaattcggagaggtacatctctgtgaggtggactcaccccaggacctggtgtccctggacttccctcttaatgtgagaaagggccatccactgctagtcgctgtgaagatactgcgccccgatgccaccaagaatgccagaaacgatttccttaaagaggtgaagattatgtcacgtttaaaggacccaaatattatcaggctgttaggcgtttgtgtgcaggatgatccactctgcatgataaccgactatatggaaaacggggacctgaatcagtttctgagcgcgcaccagctcgaagataaggccgccgagggcgcaccaggggacggacaggcggctcagggccctactattagctatcccatgttgttgcacgtggccgcccagattgcgtcaggcatgcgatacctcgccactttgaattttgtacatagggacctcgctactaggaactgtctggtgggtgaaaattttacaatcaagattgccgattttgggatgtcccgaaacctatacgccggcgattattacagagtacagggccgcgctgtcctcccaatccggtggatggcctgggagtgcatcttaatgggcaagttcacgaccgcctctgatgtgtgggcgttcggcgtcaccctctgggaggttctgatgctgtgccgagctcagccctttggccagttgaccgacgagcaagtgatagaaaacgctggggagttctttagggaccagggaaggcaggtgtacctcagcagaccccccgcctgtcctcagggactgtacgagttgatgctgcgctgctggtctagggagtcagagcagaggcctccattcagtcagctgcacagattcctggctgaggacgctttaaacactgtttag

SEQ ID NO: 80133 - DNA, 591 bp, Artificial Sequence
  derived and/or modified sequence
atgccccacctggccagcctgttcaccgccagcagccggtgctgcccccatccgttgcggcccgagggatcgggagcaatggggcctgaggccctctcatcgctgctgcttctgctactggtcgcctcaggtgatgcagatatgaagggccattttgaccctgccaaatgtaggtatgcgctgggaatgcaggatcgtacaatacccgactccgatatcagcgcgtcctcctcatggtccgattccaccgccgctcggcactctcgactggaaagcagtgatggtgatggagcctggtgtccagcgggcagcgtgttccccaaggaggaggagtaccttcaggtggacctgcagagactccatctggttgcactggtcggcactcagggcaggcacgcgggaggcctcggaaaagagtttagcagaagctaccgtctaagatactctcgggacggaagacggtggatgggctggaaggaccggtgggggcaggaggtgattagcggaaacgaagatccagagggagtggtccttaaagatcttggacctcccatggtcgcccggctggtgaggttctatccccgggcgtag

SEQ ID NO: 80134 - DNA, 2685 bp, Artificial Sequence
  derived and/or modified sequence
atgagcctgccccggtgctgcccccaccccctgcggcccgagggctccggagcaatgggcccagaggcgctgtccagcctgttactgctgctgttggtggccagcggtgatgccgacatgaaaggccacttcgaccccgctaaatgccgctacgcgctgggaatgcaggaccgtacaatacctgatagcgacatctccgcttccagttcctggtctgactcaaccgccgctcggcacagtcgcctcgaatcctctgacggggacggtgcatggtgcccagcaggtagcgtcttccccaaggaagaggagtatttacaggtcgatttacagaggctccacctggtggctcttgtcggcacccaggggcggcatgccgggggcctgggtaaggagttctctcggtcttacaggctacgttacagtcgggacgggcgcagatggatggggtggaaggacagatggggccaagaggtcatctcagggaatgaagatcccgagggagtcgtgctaaaggacctcggcccacctatggttgctcgccttgtcagattctacccccgggctgatagagtgatgagtgtgtgcctgcgtgtcgagttatacgggtgcctgtggcgcgatgggctcctgagctacaccgcacccgtgggtcaaaccatgtatttatcagaggcggtatatttaaatgacagcacatatgatggccatacggtgggaggcctccagtatggtggattgggccagctggcggatggcgtcgttggattggacgacttccgcaagtcccaggagctgcgagtttggccgggatatgattatgtggggtggtctaatcattcattttccagcgggtacgtcgagatggagtttgaatttgataggctgcgagcatttcaggctatgcaggtgcattgcaataatatgcacaccctgggcgcacggttgcctgggggtgtcgaatgcaggtttaggcgcggacccgccatggcgtgggagggcgagcctatgcgacacaatctaggtggaaaccttggcgaccctcgggccagagccgtgtctgtgccactgggcgggcgtgtggcacggtttctgcaatgtaggtttttgttcgctgggccctggctgctcttttccgaaatcagctttatatccgatgtcgtgaacaactcaagtccagcactcggaggcactttccctccagctccatggtggccacctggtccacctcctactaacttctcctctctggagctggagcctcggggccagcagccagttgccaaggcggaaggatccccaactgccatcttgataggctgtttggtcgccattatcctcctgcttcttctaattattgcccttatgctgtggcggctccattggagaagactgctatccaaagccgagcgcagggtgctggaggaagagctaactgtacaccttagcgtgccaggagataccatcctgatcaataatagaccaggcccacgggaaccccccccttaccaggagccgcgcccaagggggaacccgcctcactccgccccctgcgtccccaatggctctgcctactccggtgactacatggagcctgagaaaccaggtgccccccttctgcctcctcctccccagaacagcgtcccacattatgctgaggcagacatcgttacactccagggagttacaggggggaacacttatgctgttcccgccctgccccccggagccgtgggggatggaccccccagagtcgattttccacggtccaggctgcggttcaaggagaagctcggggagggccagttcggggaggtccacctgtgcgaggtcgactcaccccaagatctggtgtcccttgactttcccctgaatgtgagaaagggacatcctctgttggtggctgtgaaaatcctgcgcccggatgcaaccaaaaacgctaggaacgatttcttgaaggaggtcaagatcatgtctaggctgaaggatcccaacatcatccgtcttctgggggtatgcgtgcaggacgatcccttgtgtatgataacagattacatggagaatggcgacctaaaccaattcctctcagcacatcagctggaggataaagccgctgaaggggccccaggcgacggccaggccgcgcaggggccaacaatttcctaccccatgttgcttcacgtcgccgcccaaattgctagtggaatgaggtaccttgccactctgaacttcgttcatagggatttggccacaagaaactgtcttgttggtgagaactttacaataaaaatagctgacttcggaatgtcccggaatttgtacgcgggagactactaccgagtccaagggagggctgtgttgcccatccggtggatggcatgggaatgcatcctgatgggaaaatttactacagcaagtgacgtctgggcatttggcgtaacactgtgggaggttctgatgctctgccgggcacagcccttcggacagctcactgacgagcaggtcatcgagaacgctggcgagtttttcagagaccaagggagacaggtttatctgtctcgcccacccgcctgcccacaaggcctgtacgaacttatgctaagatgctggtcccgagagtcggaacaacgtccaccgttttctcagctccaccgctttttggcagaggacgccttaaacaccgtgtag

SEQ ID NO: 80135 - RNA, 2631 nt, Artificial Sequence
  derived and/or modified sequence
augggcccggaagccuugucaucucucuuacuguuacugcuaguggcgucaggggaugcagauaugaagggccauuucgauccagcuaaauguagguacgcacuaggaaugcaggaccgaacuaucccagacucugauauuuccgcauccaguucuugguccgacucuaccgccgcccgucacagccggcuugagaguagcgacggcgacggagccuggugcccggccggcucggucuuucccaaagaggaggaauauuugcaggucgaccuccagagauugcaccucgucgcccuuguggguacucagggccggcaugcgggaggauugggcaaggaguuuucucgaagcuaccgcuugagguacagucgcgauggcaggagguggaugggauggaaagaccgguggggucaagaggucauuucaggaaacgaggaucccgaaggggugguccuuaaagaccugggcccuccaaugguagcacggcucguucgauuuuacccaagagccgacagagugaugucuguaugcuugagagucgaauuauacgggugccuguggcgagacggucuccugucauacaccgcuccugugggucagacaauguaccuuagcgaggccguguaucugaaugauaguaccuacgauggacacacaguggguggccugcaguaugguggccuggggcaauuggcugacggugugguaggccuagaugauuuccgaaagucccaggagcugagaguuuggcccggauacgacuaugugggcuggucgaaccauucauucuccucaggguauguagagauggaguuugaguuugauagacuccgagcauuucaagccaugcagguccacuguaauaacaugcacacgcugggggcucgccuuccaggagggguggaaugucgauucagacggggcccagccauggcuugggaaggagaaccuaugaggcacaaucugggcggaaaccugggugauccaagagcacgugcagucuccguaccucugggcgguagggucgcuagguuccugcaguguagguuccuguuugcaggccccugguuacucuucucagaaaucucuuuuaucagcgauguggucaacaacuccaguccagcccuaggcggcacuuucccccccgcacccugguggccuccaggccccccccccacuaauuuuucaagccuggagcuggaaccccgaggccagcaacccguggcuaaggcggaaggaucaccaacugccauacuuaucggaugucugguugcuaucauucugcuccugcuguugauaauugcucugaugcuauggcggcuccauuggcgucgccugcuuuccaaagccgagaggcggguccucgaagaagaguuaacagugcaucucucagucccuggugacacgauucugaucaauaaccgcccugggccucgcgaaccaccccccuaccaggaacccagaccaagagguaauccgccccacagugcccccuguguacccaaugguagcgccuacuccggagacuauauggaacccgagaagccaggcgcuccucugcuacccccaccgccacagaacagcgugccccauuacgccgaggcugauauugucacccugcagggcguuacuggcggcaauacauaugcaguacccgcccuaccaccgggcgccguuggagacggacccccucggguggauuuuccccguucaagacuucgcuuuaaggagaagcugggggagggacaguuuggcgaagugcacuuaugcgagguggauucuccgcaggauuuaguuucccuggacuucccucuuaauguuagaaagggccacccccugcuaguugccgucaagauucugagacccgacgcuaccaaaaaugcucggaacgacuuucugaaggaggugaaaaucaugagcagacuaaaagaccccaacauaauaaggcuguugggggucugcguccaggacgacccacugugcaugaucaccgacuacauggaaaauggagauuugaaccaauuucuuagcgcccaucagcuugaggauaaggcugcggaaggagccccuggagauggacaggcggcccagggaccgacuaucucuuaccccaugcugcugcacguggcugcacaaauugcuagcgguaugagguaccuggccacccugaauuuuguccacagagaucuugccacaaggaacugcuuggucggggaaaauuuuaccaucaagauugcugacuucggcaugagcagaaacuuguacgcaggggacuacuaucguguucaaggcagggccguucugccuaucagauggauggcgugggaaugcauuuugaugggaaaguucaccacagcuuccgacgucugggccuucggagugaccuugugggaagugcugaugcuaugccgggcacagccauucggacaacugacagacgaacaggugaucgaaaaugccggggaauucuucagggaccagggcaggcaggucuauuugucgcggcccccagcgugcccccaggggcucuaugagcuuaugcuacggugcuggucccgggagagcgaacagcgaccgccuuuuagccagcuucaccguuuccuugccgaggacgcauuaaauacaguuuag

SEQ ID NO: 80136 - RNA, 2631 nt, Artificial Sequence
  derived and/or modified sequence
augggccccgaagcgcuauccagucugcuucuucuucugcuuguagccuccggggaugccgauaugaagggccacuuugacccggcgaagugucgguacgccuugggcaugcaagaccgcacaaucccagacucagacauuagugccagcucaaguugguccgauagcacugccgcaaggcacaguagacuugaaaguuccgacggcgauggcgcauggugccccgcuggaaguguguucccuaaggaagaggaauauuuacaagucgacuugcaaagauuacauuuagucgcauuggugggcacccaggguagacacgcuggcggccucggcaaggaauucucaagguccuaccggcuccgguauucuagggacgguagacguuggauggguuggaaagacagguggggacaggaggugauuagcggaaacgaagacccagagggugugguacugaaagaucucgguccaccuaugguggcacgacugguucguuucuauccuagggcugauagggugauguccguuugucugcgcgucgaacuguacgguugucuguggcgagauggucuccugucauauacggcgccagucgggcaaacaauguauuuauccgaagcaguguaucugaacgauucuaccuacgauggccacacgguaggaggccugcaguacggagggcugggacaguuggccgacgguguggugggccuggacgacuuccgcaagucacaagaacugagaguguggcccggauacgauuacgucgggugguccaaucacaguuuuucuuccggauauguagagauggaauucgaauuugaccgauugcgggcuuuccaggcgaugcaggugcauuguaauaacaugcacacacugggagcuaggcucccggggggaguggaauguagauuccgucgggggccugcaauggcuugggaaggagagcccaugagacacaaucuggguggaaaccugggggacccuagggcccgagcugucucaguccccuuggguggaagggucgccagauuccuccagugcagauucuuauucgccggcccguggcugcuguucucagagauaaguuuuauuucugauguggucaacaacucuucucccgccuuggggggcacauucccucccgcaccaugguggcccccaggaccaccuccgacaaauuucucuaguuuggagcuggagccgaggggucagcagccaguugcaaaagccgaggguuccccgacagcuaucuuaauuggcugccugguugcgaucauccugcuucugcugcugauuauagcccugaugcucuggcggcuccacuggaggagacugcugagcaaagcggagcggcgcguccucgaggaggaacugaccgugcaucuguccgugcccggagauaccauccucauuaacaauagaccuggaccaagagagccaccaccuuaucaggaaccucgaccgcgggguaaccccccacauuccgcuccuuguguuccuaacggcucugcauauuccggagacuauauggaacccgaaaagccuggcgccccccugcuuccaccucccccucagaacuccgugccacauuacgccgaggcugacauugucacacuccagggcgugacuggagguaacacuuacgccguuccagcucugccaccuggugccguuggagacgggccgccgcgcguggauuucccccguucuaggcugcgauucaaggaaaaacugggagagggccaauucggagaggugcaucugugugagguagauucuccccaggaccugguuucacuugauuuuccccuuaauguuagaaaaggccauccacuguuagucgcagugaagauucugcggccagacgcaacaaaaaacgcacggaacgauuuccugaaagaagucaaaauuaugucccggcugaaagauccgaauaucauaagacuccuugggguaugcguucaggacgacccacucuguaugaucaccgacuacauggagaacggagaccugaaucaauuuuuauccgcccaucaguuggaggacaaggccgccgaaggagcuccgggcgauggccaggccgcgcaggggccaaccaucucuuauccaauguuguugcacguugccgcucagaucgccucagggaugcgguaccuagcuacgcuaaauuucgugcaccgcgacuuagcaacuagaaauugcuuaguaggggaaaauuucacgauuaagauugcugauuuugggaugagccgcaauuuauacgccggagauuauuauagagugcagggacgcgcggugcuuccuauacguuggauggcuugggaaugcauccugauggguaaauuuacaacugcuagugacgugugggcguucggcgucaccuuaugggagguguuaauguugugccgggcucagccauuuggacaacuuacugacgaacaggucaucgaaaaugcuggugaguucuuccgagaccaaggaagacagguuuauuugaguagaccuccagcaugcccacagggacuguacgaguugaugcuuagaugcuggucacgugagagugagcagcgccccccuuuuagccaauugcaucgcuuucuagccgaggacgcccuuaauacggucuag

SEQ ID NO: 80137 - RNA, 2631 nt, Artificial Sequence
  derived and/or modified sequence
augggucccgaggcacuguccucacugcucuuacuuuugcuuguggcaucaggggacgcugauaugaaggggcauuucgacccugccaagugcagguaugcguuggggaugcaagaccguaccauacccgacucugacaucucggcuagcuccaguuggagugacucaaccgcagcccgacacucacgacuggagaguuccgauggcgauggcgcauggugccccgccgggucagucuuccccaaggaggaagaauaccugcaaguugaccugcagcgguuacauuugguagcacuagugggcacucagggccggcacgcuggcggacucggcaaagaauucucucgauccuaccgucugcgguacucucgcgacgggcguagauggaugggcuggaaggaccgguggggacaagaggugauuaguggcaacgaggauccagaaggcguuguccugaaagaucucggcccuccaaugguggcacgcuugguucgguucuauccacgcgccgauagggugaugaguguaugccugcgagucgaguuauacggaugccuguggagggauggccuucucagcuacacagcaccuguugggcagacaauguaccuguccgaggcgguuuaccugaacgauucuaccuaugauggacauacggugggaggccuucaauacggaggacucggacagcuggcugaugguguggucggccuggaugauuuccggaagucccaggaacuucgaguguggccagguuacgacuauguggguuggucuaaccacucuuuuagcucgggcuacgucgaaauggaguucgaguucgaucggcucagagccuuccaggcaaugcaggugcacugcaacaauaugcacacccuaggggcuagacuuccaggcggcgucgagugcagauuucgccgcgggccugccauggcaugggagggugagcccaugcggcacaaucuggguggcaaccuuggagauccacgagcucgggccguguccgugccccucggcggacgaguggcgcgguuccuccagugcagguucuuguuugcaggccccuggcugcuguucuccgagauuuccuuuaucuccgacguugugaacaauucaaguccugcuuugggagggaccuucccccccgcaccaugguggccgccaggaccccccccgacaaauuuuaguucauuggaacuggaaccucgcgggcagcagccaguggcaaaggccgaaggcagccccacagcgauucuaaucggaugucuggucgcaaucauccuccugcuucuccuuaucauugcccucauguuauggagacuccacuggcgaaggcuacuguccaaggcagagcgaagaguccuugaagaagaacuaacaguacaccugagcgugcccggugauacuauacucauaaacaaccgcccuggcccccgggaaccccccccuuaccaagaaccgcgcccucggggaaauccuccacacagcgcuccgugcgugccgaacggaagcgcuuacagcggcgacuacauggaaccagagaagccaggcgccccucugcugcccccccccccacagaacagcguuccgcacuacgccgaggccgacaucgucacccuccaaggggucaccggagguaacaccuacgcagucccagcacuacccccuggcgcagugggagauggaccuccacgagucgacuucccuagaucuagacugcgguucaaagaaaaacuuggcgaaggucaguuuggagaagugcaucuaugugaggucgacuccccccaggacuugguaucucucgacuucccccucaacguucggaaaggccacccccugcugguggcugucaagauccuacgucccgaugcaacuaagaacgcaagaaaugacuucuugaaggaaguaaagauaaugucccgacugaaggauccuaauaucaucaggcucuuaggcgucugcgugcaggacgacccacuguguaugauuaccgacuauauggaaaacggcgaccuuaaucaguuucugucagcccaccagcuugaggacaaagcggcugagggagcucccggagacggacaggcugcccaaggcccuacaaucuccuaccccaugcuacugcacguggccgcacagauugcgagcggaaugcguuaucuugcaacacuaaacuuuguucauagagaccuggcuacucggaacugccucguaggggaaaacuucacgauuaaaaucgccgauuuuggcaugucaagaaaccucuacgccggcgauuauuaccggguccaaggcagggcgguucuacccaucagauggauggcgugggaauguauucugaugggaaaguucaccacggccucagauguaugggccuuuggcgugacauuaugggagguguugaugcuuugccgggcucagccauuuggucaauugacugaugaacaggugauugaaaacgcuggggaguucuuccgagaccaaggaagacaaguguaucuaagcagaccuccugcaugcccgcagggccucuaugaacugauguuacgauguuggagcagagaguccgagcagcggccgccguuuagccagcuucaccgguuccuugcagaagacgcacugaauacugucuag

SEQ ID NO: 80138 - RNA, 2631 nt, Artificial Sequence
  derived and/or modified sequence
augggccccgaggcgcugucuucucugcuauuguugcugcuggucgcaucuggagacgcagacaugaaaggacauuucgauccugcuaagugccgguaugcccucggaaugcaggaucgcacuauaccggacucagacauuucugcaucauccaguuggucagauuccaccgcugcucgacauagcagacuggagagcagugauggagacggcgcuugguguccagcaggcucuguguucccuaaggaggaggaauacuuacaggucgaucuacaacgcuuacaccugguggcacuggucggaacacaaggacgacacgccggggggcucggcaaggaauucucccggucuuaucgccugcgguacucgcgugaugguagaagguggaugggcuggaaggauagguggggccaagaagugauaucuggcaacgaagauccagaaggcgugguacugaaagauuugggaccgccgaugguagcucgacuggugagauucuacccaagagccgaccguguuaugucaguuugccuccggguggagcuauacgggugccuguggagggacggucuauugagcuacaccgcucccguuggccagaccauguaccuuucagaggcagucuaucucaacgauuccaccuacgacggacacaccgucgguggccuccaguacggcggauugggacagcucgcggacggcguaguaggccuggacgacuuucggaaaucacaagagcuuagaguuuggcccggcuacgacuacgugggauggucaaaucauuccuucucaagcggcuacguggaaauggaguucgaguucgaccggcuacgagccuuccaggccaugcagguucacugcaacaacaugcacacacugggggcucguuuaccuggagguguugagugucgauucaggcguggucccgccauggcuugggagggagagcccaugagacacaaccuuggcgggaaccucggagauccccgugcccgggcagugagcgugccccugggcggacgcguggcucguuuccuucaauguagguuccuauucgccggaccguggcuguuauuuucagagaucucuuucauuucggauguggugaauaauuccagcccagcccuuggcgggacuuuucccccugccccuugguggccucccggccccccgccuaccaauuucucaucucuggaacuggagcccagaggacaacagcccguagcuaaagccgagggaagcccuaccgcaauacuuaucggcugccucguugcaaucauucucuugcuccugcugauuaucgcucuuaugcucuggagacugcacuggaggcgauugcugagcaaggcagagcggcgcguccuggaagaggaacuuacuguucaccuaagugucccuggcgauacaauccugauaaacaaccggccaggcccuagggagccuccaccuuaucaggaacccagaccacguggcaaucccccacauucugccccaugcguaccaaaugggucugccuauuccggcgacuauauggaaccagagaagccuggugcaccccugcugccuccgcccccacagaacagugugccccauuacgcugaagccgacaucgugacauugcagggggugacaggcggcaauaccuacgcuguuccugcacuuccucccggagccgugggagaugguccacccagagucgauuuuccucggucacgccugcgauucaaagagaagcuuggcgaaggacaguuuggagaagugcaccugugcgagguggacucaccccaagacuuagugucccuggauuuuccgcuuaaugugcgcaaagggcacccccugcucguggccgugaaaaucuugcggcccgaugccacuaagaaugcuagaaacgacuuccugaaggaaguuaagaucaugagucgacugaaggaccccaacauaaucaggcucuugggaguuugcgugcaagacgauccauuaugcaugaucacugauuauauggaaaauggcgaccugaaccaauuucugucugcccaccaacucgaagacaaagcagccgagggcgcucccggcgacggucaagccgcucagggaccaaccauuagcuacccuaugcuccuccacguggcagcgcagauugccagcggaaugcguuaccucgcaacccugaauuuuguucacagagaccucgcaacuagaaacugccuugugggagagaauuucaccauuaagauugcugauuucggaaugagccgcaacuuauaugcuggagauuacuaucgcguccaggggcgagccguauugcccaucagguggauggcaugggagugcaucuuaaugggcaaguucacuaccgccagcgaugugugggcuuucggagugacccuaugggaaguucuaauguugugucgagcacagccauuugggcaacugaccgacgagcaagugauugagaaugccggcgaguucuuccgagaccaggggcgccagguguaucuuagccgcccaccugccuguccccaggguuuauacgagcuaaugcucaggugcugguccagagagucagagcagcgcccucccuuuagucagcugcaucgguuucucgcugaggacgcacugaacacaguguag

SEQ ID NO: 80139 - RNA, 2631 nt, Artificial Sequence
  derived and/or modified sequence
augggcccggaggcccugucgagcuuauugcuucuccuguuaguggcgucuggugaugccgacaugaaaggucacuuugaucccgccaaaugccgguacgcucuggggaugcaggacagaaccaucccagauagcgauaucucagcuaguucgucuugguccgauucuacagcagcaagacauucccguuuggagucuagugacggggacggggccuggugcccagccggcagcguguucccgaaagaggaggaguaucuucaggucgaccuucagaggcugcaccugguugcucuggucggcacgcagggcaggcaugccggcggccuggggaaggaguucucccguucguaccgcuuaagauacagccgggaugggcguagguggaugggauggaaggaucgguggggucaggaggucaucucuggcaacgaagauccugagggaguuguccugaaggaucucggaccaccgauggucgcuagacucguucgcuuuuauccgagagcagacagagucauguccgugugucugagagucgaauuauacggaugcuuguggcgcgacggccuuuuaagcuauacagcuccggucggacagaccauguaccucagugaggcaguuuaccugaacgacagcacauaugacgggcauaccguagguggacuacaauaugggggguuaggacagcuggcagacggcguuguggggcucgaugauuucagaaagucccaggaguugcgcgucuggcccggauacgacuacgugggguggagcaaucacagcuuuagcagcggauacguagagauggaguuugaauuugaucgcuugagagcauuccaggcaaugcaggugcacuguaacaauaugcacacucugggagcccgccuaccgggugggguugaaugucguuuccgcaggggaccugcaauggcaugggagggugagcccaugcgucacaaccucggcgggaaccuuggagauccucgcgcccgcgccguuucaguuccacucggaggccguguugcucgauuucugcagugucgguuucucuucgccgggccuuggcugcuguucuccgagauauccuucauuucagauguggucaacaacucuucucccgcacucggaggcacauuccccccggccccaugguggccaccaggaccuccgcccacuaauuucucuucucuugagcuggagccaaggggccaacagcccguugcuaaagcagaggguagcccaacugccauacucauuggcuguuugguggccauuauccuguugcuccuucugauuauugcgcucaugcuguggcgacugcacuggcggaggcuucuuucaaaggcggaaaggcgcgugcuugaggaagaauuaacugugcaucucucgguccccggcgauacuauccugauuaauaaccgcccagguccacgggagccaccucccuaucaggaaccccgcccccggggcaaucccccacauuccgcccccugcgugcccaauggcucugcguacucuggagacuacauggagccagagaagccuggagccccgcucuugccccccccaccacagaauuccgugccacacuacgcagaagccgauaucgucacucuucagggcgugacuggagggaauacuuacgcuguuccggccuugccaccaggugccgucggagacggccccccuagaguagauuucccgagaucaagacugagauuuaaggaaaagcugggggagggacaguucggcgagguacaccugugugaaguggacucaccccaggaccuagucagccucgacuuuccacugaacguccgcaagggucaccccuuacucguggccgugaaaaucuugagacccgaugcuacaaagaacgccaggaacgauuuccucaaagagguuaagauuaugagccgacugaaagacccuaacauuauacgcuugcugggcguaugcgugcaagacgacccuuuguguaugauuacggauuauauggagaacggcgaucucaaccaguucuuguccgcgcaucagcuugaagacaaggccgcagaaggcgccccuggggauggucaggcagcccaggguccgacuaucuccuaucccaugcugcuacauguggccgcgcaaauagcuuccgggaugagauaucuggcaacccucaacuuugugcaucgugacuuggccacacggaauugccucgugggcgaaaauuuuaccauaaaaauugcagauuucggaauguccaggaaucuguacgcaggcgauuauuacaggguucaaggcagagcaguguuaccuauaagauggauggccugggaaugcauucucauggguaaguuuaccaccgcaagcgacguaugggcauucggcgugacacuuugggaggugcuaaugcuuugucgggcucagccguuuggacagcugaccgaugagcaagugauugagaacgccggcgaguucuuuagggaucaaggcaggcaaguguauuuaucuagaccaccugcuuguccucagggcuuguacgaguugaugcugagguguuggucccgggaguccgaacagaggcccccauuuucgcagcugcacagguuucuagccgaggaugccuugaauacuguuuag

SEQ ID NO: 80140 - RNA, 2631 nt, Artificial Sequence
  derived and/or modified sequence
augggccccgaagcacuaucaagccuuuuguugcuguugcugguggccuccggcgaugccgauaugaaagggcacuucgauccugccaaaugucgauacgcucuggggaugcaggaucgcaccauuccagacucagauaucagcgcaucaaguucuuggagugacucuacagcugcgcggcacaguagguuagaaagcagcgacggcgauggcgccugguguccagccggcagcguguuuccaaaggaggaggaguaccugcaagucgauuugcagcgacuccaucuaguugcacugguuggcacucagggaagacaugcgggcggauuagggaaggaguucuccagaucauacaggcuccgguauucucgugacggcagacgcuggaugggcuggaaggaucgcugggggcaggaagucauuaguggcaacgaagaccccgagggggugguguugaaagaccucggucccccaauggucgcuagacuuguacgguuuuacccacgagccgacaggguuaugagcgugugccuacgaguugagcucuaugggugucucuggcgggacggccuacugagcuauacugcuccgguagggcagaccauguaucuguccgaagcuguguauuuaaaugacuccacuuacgaugggcacaccgugggcggacugcaguacgguggccucggccagcuugcugacggcgugguggggcucgaugacuuccggaagucccaagagcuucgcguauggccuggcuaugauuacguggguuggagcaaccacuccuuuaguucuggcuaugucgagauggaguuugaauuugacaggcugcgugcauuccaagcuaugcaaguccauuguaacaauaugcacacgcucggggccagacugcccggaggaguggagugcagauucagacggggucccgccauggcgugggaaggugaaccaaugcgacacaaccugggcggcaaucugggcgauccacgcgcucgggccguauccguuccauugggugggagagucgcccgcuuucuucagugucgauuccuguucgcaggucccuggcuccuguuuagcgagauauccuuuaucuccgacgucguaaauaacuccagcccugcccucgggggaaccuucccucccgccccuugguggccaccgggcccucccccuacuaauuucucaagccucgaacuugaaccgcgaggccagcagccaguagcuaaggccgaaggcucgcccacagcuauucugaucgguugccugguggcuaucauucugcuucucuugcucaucauugcacucaugcuguggagacugcacuggcggagauugcuguccaaggcggaaagaagagugcuggaggaggaacuuacuguacaccuuagugugcccggagauacgauccuuaucaacaacagacccgggccuagggaaccccccccauaucaagagccacgcccucgcggcaauccuccccauucggccccuugcgugcccaacggcucggcuuauagcggcgacuauauggagcccgagaaaccgggagcuccuuuacuuccuccuccuccucagaacucaguuccccauuacgccgaagccgauaucgugacucugcaaggagucacuggaggcaauacguaugcugucccggcucugccaccaggugccguuggcgaugggccgccaaggguggauuucccccggagccgacucagauucaaggaaaaacugggggaaggacaguucggagagguccaccugugugagguagauucaccccaagaucuaguaucucuugacuuuccucucaacguucgcaaggggcacccacugcuuguugcugucaaaauuuugagaccugacgccaccaagaaugccagaaacgauuuccuaaaagaggucaaaaucaugucccgacuuaaggaucccaacaucaucagguugcugggagugugugugcaggacgacccgcuuuguaugaucacagacuacauggaaaauggggaccugaaucaguuucucuccgcacaccagcuggaggauaaggcugcagagggggccccgggugacgggcaagcugcucagggcccaacaauuagcuaccccaugcuguugcacguggccgcacagauugccagugguaugcgguaccuggcaacccuaaauuuuguacacagggaucucgcgacacguaacugccuggugggggagaauuuuaccaucaaaauugcggacuucggcaugucucgcaaucucuaugcaggugauuacuauagagugcaaggccgggccgugcucccaauucguuggauggcgugggaguguauucucaugggaaaauuuacaaccgcuagcgacgucugggcuuucggcgugacacuuugggaggugcugauguugugucgggcacaacccuucggccagcuaacagaugaacagguaauugagaacgccggugaguuuuuuagggaucaaggccggcagguguaccugucccgaccuccagcuuguccucagggccuuuacgaguuaaugcucaggugcuggucaagggaaucagagcagcgcccccccuuuucacaauugcacagauuucucgccgaggaugcacugaacacuguuuag

SEQ ID NO: 80141 - RNA, 2631 nt, Artificial Sequence
  derived and/or modified sequence
augggucccgaggccuugagcucccugcuccuacuguuguugguugcuaguggagacgccgauaugaaaggacacuuugaucccgcgaagugccgcuaugcucugggaaugcaggauaggacaauuccggacagugauauuagcgccucauccagcuggucagacaguaccgccgcccggcauuccagacuugaaagcuccgauggagacggugccuggugucccgccggaucuguuuuccccaaggaggaggaauaccuccagguggaccugcagcgacuucaccucguggcccugguaggcacacaggguaggcacgcagggggguuagggaaagaauuuuccagauccuauaggcuccgcuauucaagggauggacggcguuggaugggguggaaagaucgcuggggccaggaaguaauaagugguaacgaagacccggaaggcguuguccugaaagaccugggcccccccauggucgcgcgccuggugcgcuucuauccacgcgccgauagggugaugagcguuugccucagaguagagcuguacggcugccucuggcgcgauggacugcuguccuauaccgcacccgugggccagacuauguacuuguccgaggcaguguaucucaacgauaguacuuacgacggucacacgguaggaggucugcaguacggaggauugggacaguuggccgauggcguggugggucuggaugauuuuagaaaaucucaagaacugcggguuuggccuggguacgauuaugugggcugguccaaccauagcuucucuaguggguacguggaaauggaguuugaguuugacagacucagagcauuucaggcuaugcagguacauuguaauaauaugcauacacuaggggcccgguuaccuggaggcguagagugcagguuuagaagaggaccagcuauggccugggaaggcgaaccaaugaggcauaaucuggggggaaaccuuggugacccacgggcaagagcugucagugugccacuaggcggacgcguggcaagauucuuacaguguagguuucucuucgccggaccauggcuucuauucucggagaucagcuucauaucugaugugguuaacaauucuagcccggcccuagguggcaccuucccaccggcccccugguggccccccggaccaccucccaccaacuucagcucucuggaacuagaaccccguggccagcagccuguggcaaaagccgagggcagcccaaccgccauccugaucggaugccugguggcaauuauccuucuacuccucuuaaucaucgcacuuaugcucuggcgucugcacuggcggcgccugcugagcaaggcugaacgucgaguacucgaggaggagcugaccguccauuugucugugccuggagauacgauacucauuaauaauagacccggcccucgugagccacccccuuaucaggagccaaggccucgagggaauccaccccauuccgccccuuguguccccaauggcucugccuauucuggagauuauauggagccggagaagccgggagcaccacuguugccgccacccccucaaaauucugugccccacuacgcagaggcagauaucgucacucuucaaggagugacaggaggcaacacauaugcagucccagcucuuccccccggagcagugggagauggcccuccuaggguagauuuuccgcgaucccggcuaagguucaaagagaaguugggugagggacaguuuggugaaguacaucuaugcgagguggauucuccucaggauuuagugucccuggauuuuccucugaauguuaggaagggccacccgcugcucgucgcggucaagauucuacgcccggacgccacgaagaacgccaggaacgacuuccucaaagaagugaagaucaugucucgauugaaggacccaaauaucauccggcuccugggggugugcguucaggacgacccguuaugcaugauaaccgacuacauggaaaacggcgauuuaaaucaauuucugucagcccaccagcuggaggacaaggcagcagaaggcgcuccaggggauggucaggcagcccagggucccacuauuaguuacccaauguugcugcauguggcugcacagauugccagcgguaugagauaucuugcaacucuuaauuuugugcaccgggauuuagccacacgcaacugccuuguuggagagaauuucacaaucaaaauugccgauuuuggcaugucgcggaaucuguaugcgggugacuauuaucgcguacaagguagggcuguucucccgaucagguggauggcuugggagugcauuuuaauggguaaguucacgacagcuagcgaugugugggcauuuggggucacucucugggaagugcuuaugcugugucgcgcccagcccuucggccagcugacugaugaacagguuaucgaaaacgccggggaauucuuucgugaucagggaagacaggucuaccucucccggccgccugccuguccccagggccucuaugaguugaugcugcgcuguuggagucgugaaagcgagcagcguccucccuuuucccagcuacaccguuuucucgcugaagacgcucuuaacaccguguag

SEQ ID NO: 80142 - RNA, 2631 nt, Artificial Sequence
  derived and/or modified sequence
augggaccugaagcccucucaagucugcugcucuugcugcucguggcuuccggcgacgcagacaugaaaggccauuuugauccagcuaaguguagguaugcgcuuggcaugcaggaucgcacaaucccagauucagacaucucugcuagcuccagcuggucugacagcacugcugcgcggcacucuaggcuggaaucuucugauggcgacggcgccuggugcccugccggaagcgucuuuccuaaggaagaagaguaucuucaggucgaccuucagagacuucaccuuguggcccucguggguacucaagggcggcaugcggggggacuagggaaagaauuuucacgcuccuaucgacugcgcuacagcagagacggcagaagguggaugggcuggaaggauagaugggggcaagaagugaucucgggcaacgaagaucccgagggugugguucugaaagaccugggcccaccaaugguggcccggcucgugagauuuuacccuagagccgaucguguaaugucuguaugccuuaggguggagcucuacggaugucuauggcgggauggccugcucagcuauacugcccccgugggucagacgauguaccugucagaggccguguacuugaaugacagcacguacgauggacacaccgugggggggcuucaauauggaggucugggucaguuagcugauggugugguggggcucgaugauuuuaggaaaucucaagaacugcgaguauggccgggcuacgacuacgucggguggucuaaucacucuuucaguucuggcuacguggaaauggaguuugaauuugauaggcuccgugcuuuucaggccaugcaggugcacuguaauaacaugcacacacucggagcacgccugcccgggggcguggaguguagguuucgccgagguccggcaauggccugggagggggaacccaugcgccauaaccucggcggaaaucuuggcgaccccagagcacgcgccguuagugugccucucggcgguagggucgcacgguuccuacagugcagauuucuauucgcaggucccugguugcucuucucagaaaucucuuucauuucugacguggugaacaauucaucacccgcauuaggggggaccuucccaccugcacccugguggccccccggaccccccccuaccaauuucucgucccuagagcucgagccaagaggacagcaacccgucgccaaagccgaaggcagccccacagcaauccucauuggauguuuaguagcuaucauuuuacuccuccuguugaucauagcccuuaugcuuuggagauuacacuggcgccgcuuacuuagcaaggcggaacggcgcgugcucgaggaagaacucacugugcaucugagcgugccaggcgacacgauuuugauuaauaaucggccaggccccagggagcccccuccguaccaggagccccguccaagggggaaccccccccauucugcccccuguguuccuaaugguagcgccuacuccggugacuauauggaacccgagaagccaggggccccgcuccucccccccccaccacaaaacucaguuccacauuacgcagaagccgacauugucacccuacagggcgugacuggggggaauaccuacgcaguacccgcuuugccucccggggcggugggggauggaccaccgagagucgacuuuccccggagccgcuugcgcuucaaagaaaaauugggggaggggcaguucggcgaagugcaccugugcgaagucgauaguccccaggaccuagucucacuggacuuccccuugaacguacguaaagggcacccccuacuuguagcugucaaaaucuugcgaccagacgcgacuaagaaugccaggaacgacuuccuuaaggaggugaaaauaaugagccgauugaaagacccgaacauuauccggcugcuaggcguuuguguccaggaugacccguugugcaugauuacugacuauauggaaaacggagacuuaaaucaguuccugagugcgcaucaauuagaggacaaggcagccgagggagcaccaggcgacggacaagccgcucagggaccuaccaucaguuacccuaugcuguuacacguggccgcucagauugccagcgguaugcgcuaucuggccacuuuaaacuucgugcacagagacuuggcaacaaggaauugucuugucggcgagaauuucaccaucaagaucgccgauuuuggcaugagucgcaaccuauacgcaggcgacuauuauagaguacagggccgugccguauuaccuauccgcuggauggcuugggaaugcauucuaaugggaaaauucacgaccgcuagcgaugugugggcauucgggguuacguugugggagguguuaaugcuuugccgagcacagccguuuggccaguuaaccgacgagcaaguaauagagaacgcuggggaguucuuccgcgaucagggccgccaagucuaccucaguaggccaccagcaugcccucaggggcuguacgaguugaugcugagauguuggaguagagaaucggaacagcguccuccauuuagucaguuacaucgauuucuggcagaagacgcacucaacaccguguag

SEQ ID NO: 80143 - RNA, 2631 nt, Artificial Sequence
  derived and/or modified sequence
augggaccagaggcgcugucaagucugcuccuccuccuacuuguugccucuggugacgccgauaugaagggccacuucgauccugcaaagugccguuaugcgcucggaaugcaggauaggacuauuccagauuccgauauuucugcauccuccucguggucagauagcacagcagcccgucacucucgacuggagucuagcgauggcgacggugccugguguccggcugguaguguguuccccaaggaggaggaauauuuacagguggaccuucaaagacugcaccugguggcucucguaggcacccaggggcggcaugcagguggccugggcaaggaguuuucuagguccuauagacuuagguauucccgggauggaaggagauggauggguuggaaggauagauggggccaggagguuauuucugguaacgaagauccggagggggugguccucaaagaccucggaccaccuaugguggcgagguugguacgauucuaccccagagcagacagggugaugagugucugucugcggguugaacuauauggcugucuguggagagacggauugcucaguuauacagcuccugucggccagacaauguaucugucugaagcagucuaccugaacgauucaaccuacgauggccacaccguggguggucuccaauauggcggacugggacaacucgcugauggugugguuggguuggaugacuuuaggaagucccaggagcuccgcguguggcccggcuacgacuaugucggaugguccaaccauucuuuuagcuccggguacguugagauggaauucgaauuugaucgguuacgagccuuucaggcuaugcaaguccacuguaacaacaugcacacccucggagcaaggcugccuggaggagucgaaugccgauuuagacgcgggccagcuauggcuugggagggcgagccaaugcgccauaaccugggaggcaaucugggcgacccgagggcccgugcugugucuguuccucucgggggcaggguggcuagguuccugcagugucgauuucuguucgccggcccuuggcuguuguuuucugagauuucauucauuuccgacguggucaacaacagcagucccgcuuuaggcggcacuuucccuccagcaccaugguggcccccuggcccuccgccuacaaacuucagcagucucgaacuugaaccacguggacaacagcccguugcgaaagcagagggcagccccaccgcaaucuuaauaggcugccuggucgccaucauucugcuucucuugcucauuauugcccugaugcucuggaggcugcacuggcgccgccugcucuccaaggccgagagacgggugcucgaagaagaauuaacuguacacuuaucaguccccggcgauacaauccucauuaauaaucguccagguccucgcgaacccccccccuaucaggaaccuagaccccgugggaacccuccccacucugcccccuguguucccaacgguagugccuacucuggggauuacauggaaccugagaagccaggagccccccuucucccgcccccuccucagaacaguguaccacauuacgcagaggcugauaucgucacccugcagggagugaccggagggaauaccuaugcugugccugcacuccccccaggggcugugggcgacggcccaccuagaguggacuucccucgaucacguuuacgguucaaggaaaaacugggcgagggucaguucggcgagguccacuugugcgaagucgauagcccccaggaucuggugucucucgacuuuccucucaacguucggaagggacauccacucuuaguggcagugaagauuuugcgccccgacgccacaaaaaaugccaggaacgauuuccucaaagaagugaaaauaauguccaggcuaaaagacccuaauauuauccgccuacucggcguguguguccaggaugauccacuuuguaugauuaccgauuacauggagaacggggacuugaaccaguuucucucugcccaucagcuggaggacaaggcugccgagggagcucccggugacggccaagccgcgcaggggccuacaauaaguuacccuaugcuguugcacguagccgcccagauugcgagcgggaugagauaucuagcuacuuugaauuucgugcaccgagaucucgcuacacgaaauugccuggugggagaaaacuucacuauaaaaauugccgacuuuggcaugaguagaaaccuguaugcaggagacuacuacagggugcagggaagggccguccugccuaucagauggauggcaugggaauguauccuuauggguaaguucacgaccgcauccgauguuugggccuucggcgucacacugugggaagugcuuaugcugugcagggcccaaccauuuggccaacucacagacgaacaggugauugagaacgcuggggaguucuuuagagaucaaggacgccaaguguaucuguccagaccccccgcuuguccccaagggcuguacgaacuaauguugagguguugguccagggaaagcgagcaacgucccccauucucccagcugcauagguuucuagcagaggacgcccuuaauacaguauag

SEQ ID NO: 80144 - RNA, 2631 nt, Artificial Sequence
  derived and/or modified sequence
augggacccgaagcauuaagcucacuccuacuccugcugcuuguugcuuccggcgaugccgauaugaagggccacuucgacccugccaagugucgguaugcucugggaaugcaggaccgaacgauaccagauuccgauauaagugccucuucuagcuggucggauuccaccgccgcucgccauucucggcuugagucaagugauggcgauggggcuuggugccccgccggaagcguguuccccaaagaagaagaauacuugcaaguggacuugcagcgacugcauuuaguugcccugguggguacucagggaaggcacgcgggugggcuggguaaagaauuuucccggucuuaucgacugcgcuauagucgggauggaaggcgauggaugggcuggaaagacagauggggccaagaagugauaucaggaaacgaggacccugaaggaguugugcucaaggaccucggucccccuaugguggcgcggcuggugagauuuuacccacgcgccgacagggugaugucagugugucugagaguugaacuguacggcugucuuuggcgggacggacugcucucuuauacugcucccgugggccaaaccauguaucuuagugaagcgguguaccucaaugacaguaccuaugacggacauaccguggggggucuucaguacggcggacuggggcagcuggcugacgggguugucggccuggaugacuucagaaaaucacaggaguugaggguauggcccgguuacgacuacguuggcuggucgaaccacagcuuuagcagcggauacgucgagauggaauucgaauucgaccgacugagagccuuucaggcuaugcagguacacugcaauaacaugcauacccuaggagcucgacuuccaggaggaguggagugccgcuuuaggagaggucccgcuauggcaugggagggagagccaaugaggcacaaccuuggagggaaccucggugaccccagagcccgcgcugucagcguuccccugggcgggaggguggcgcgguuuuugcagugccgauuccucuuugcuggaccuuggcuguuguuuagcgaaauaaguuuuaucucggacgucgugaacaacucuucaccugcccuugggggaacguucccaccagccccuugguggccccccggaccucccccuacaaauuucagcagccuggagcuugagccucgcggacaacagccugucgcaaaagcggaaggaucaccaacagcaauccucauugggugcuuaguagcgauuauucuuuuacugcucuuaauuaucgcucugaugcuguggcggcuucauuggcggagacuacugucuaaggcagagcggaggguguuggaggaggagcucacuguucaccuuucuguaccuggagacacaauccugauaaacaauagacccggaccuagggagccuccccccuaucaggaacccaggccucgcgggaaucccccccauagcgcuccuugcguuccaaacggcagcgccuacagcggugauuacauggagccagaaaagccuggugcaccucugcugcccccccccccucagaacagcgucccacauuacgcugaagccgauaucgucacucuccagggcguuacaggcgguaauacuuacgccguucccgcccucccgccuggcgcagugggggauggccccccucgcguggacuuuccgcgcuccagacugcgguucaaagagaaguuaggggaaggccaguuuggggagguccauuugugcgaaguugacuccccacaggaccucgugucauuagauuuuccacugaaugucaggaaggggcacccccuccugguagcugugaaaauccugcggccugaugcaaccaagaacgcacggaacgauuuucucaaggaaguaaaaauaaugucccgacugaaggaucccaacauuauccgacugcuagggguguguguucaggaugauccucuuuguaugauuacugacuacauggaaaauggggaccuuaaccaguucuugucugcucaccagcuggaagauaaggcugcggaaggggccccaggcgacggccaggccgcucagggcccuacaaucuccuaucccaugcuucuccauguggccgcacagauugcuuccggcaugcguuacuuagcuacccuuaauuuuguucauagagaucuugccacucggaauugucugguaggugaaaacuuuaccauuaaaaucgcagauuucggaaugucuagaaaucuuuaugcaggggacuauuacaggguucaggggcgggcaguuuugccaauucgauggauggccugggagugcauucugaugggaaaguuuaccacagcuucugacgugugggcauuuggggugacucugugggagguucugaugcuuugccgagcucagccuuucggacagcugacagaugagcaggucauugagaacgccggugaauucuuucgcgaccaaggacggcagguguaccugaguaggccuccugccuguccacaggggcucuacgaguugaugcugagaugcuggagccgagaguccgagcagcggccaccauuuagccagcuucauagauuucuggccgaagaugcccucaacaccguuuag

SEQ ID NO: 80145 - RNA, 2631 nt, Artificial Sequence
  derived and/or modified sequence
augggacccgaggcauuguccagucugcugcugcuucuccugguggcgucuggagacgccgacaugaaagggcacuuugacccagccaagugcagguaugcguugggcaugcaagaccggaccauuccugauucugacauuuccgccucuuccuccuggucagauagcacagcagcuaggcacagccguuuggagaguuccgauggggauggggcuuggugcccagccggauccguguucccaaaagaagaagaguaucugcaggucgaccuccaaagguuacauuuagucgcccuuguaggcacacaggguagacacgcuggagggcuuggcaaagaguucucccguucauaccgguuaagguauagccgagauggccgcagauggaugggcuggaaagacagauggggccaagaaguaaucucagggaaugaggaccccgagggcguaguucuuaaggaucucggaccuccaaugguugcacgacugguacgauucuacccccgcgccgauagggugaugagugucugcuuacguguugaguuauacggcugccuguggcgagacggucuucucucguauacagcuccggucggccaaaccauguaccuuagcgaggcuguguaccucaaugacucaacguacgaugggcacacggucggggggcuucaguacgggggccugggacaacuggcagacgguguaguuggccucgacgauuuccggaaaucccaggagcugagggucuggccgggcuaugacuauguggguuggucaaaucauagcuuuagcucugguuacguggaaauggaauuugaguuugauagauuacgggccuuucaggccaugcagguacauugcaacaauaugcauaccuugggggcuagacugccuggaggcgucgaaugccgcuuuagacgggguccugccauggcaugggaaggugaaccgaugcggcacaaucuuggugggaacuuaggggacccccgggcuagagccguuagugucccacuuggcggccgcguugcacgguuucugcaaugcagauuuuuguuugccgggccguggcugcuuuuuagugaaaucucuuucaucuccgacguggucaauaauucaucaccugcccuaggcggcaccuucccuccugcucccugguggcccccugggccgccacccacaaacuuuucuucccuugaacuugagccucggggacaacaacccguugccaaggcugaggggucccccacagcuauucugauuggcugccucguugcgaucauacuauugcuucugcugauuauugcucugaugcucuggaggcuucauuggagaagacugcugucaaaagcugaacgcagaguacuggaggaagagcugacgguccaucuaagcgugccgggagauaccauacugauaaacaaccgcccagggccccgugaaccgccuccguaccaggaacccaggccgcgcgggaacccaccccacuccgcucccugugugccaaacgggucagcauacuccggagacuacauggagcccgagaagcccggcgccccgcugcuucccccacccccccagaacagugucccucauuacgcagaagccgacaucgugacccuacagggcgugaccggagguaacaccuacgcagugccugcuuuacccccaggggccgucggcgacgggccuccucgcguggauuuuccuagaagccgauuacgguuuaaagagaagcugggugagggccaauuuggagagguacauuugugcgaaguagacucuccacaagauuuggugucucucgacuuuccacuaaacguucguaagggacauccuuugcuuguugccgucaagauccugagaccggacgcaacuaaaaacgcuaggaaugacuuccuuaaggagguuaagauaaugucucggcuuaaggacccaaauaucauuagguuacucgguguuugcguucaggacgauccgcuauguaugaucacagacuacauggagaacggcgaccuaaaccaguuucucucagcacaccagcuggaggacaaggccgccgagggagcaccuggagauggacaggccgcccagggacccacgaucucuuacccaaugcucuugcaugucgccgcacagauugcgagcggcaugagauaucucgcaacucucaauuucgugcaccgagaccuggccacucguaacugccuggugggcgaaaacuucacaauuaagaucgccgacuucgggaugagcagaaaucuguaugccggagacuauuaccgcgugcaggggagagccguucucccuauccgcuggauggccugggaauguaucuugaugggcaaauuuacuacagcaucagaugugugggccuuuggugugacauuaugggaaguguugaugcuguguagggcgcaacccuuuggccaguuaacagaugaacaggugaucgagaacgcuggugaguucuucagggaccagggaaggcaggucuaccuuucucgcccgccugcuuguccacaaggccuguaugagcuuauguugcgcugcuggucgagggagucggagcagaggccuccuuuuucucagcuacacagauuucuggcagaggacgcccugaacaccguguag

SEQ ID NO: 80146 - RNA, 2631 nt, Artificial Sequence
  derived and/or modified sequence
augggaccggaggcccuuucaucccuccuacugcugcuucuuguggccucaggcgaugcugauaugaagggccacuuugacccggcaaaaugccgauacgcauuagguaugcaggaucgcaccauucccgacucagauauuucggccucuaguucguggucggauaguacagccgcccggcauucccggcuugaaaguuccgacggcgacggagcauggugccccgccgggagcguauuuccaaaggaggaagaauaucuccaggucgaccugcaacggcugcaccugguugcauuggucggaacacagggccgucacgcaggcggguuaggcaaggaguucaguagaucguauaggcuccgcuacagccgggacgguagacgcuggaugggauggaaggaccgguggggucaggaagucauuagcgguaacgaggauccagaaggugucgugcugaaagacuuaggcccgccuauggucgcccgacucguaagguucuauccucgggcggaccgggugaugaguguuugccugcgggucgagcuguauggaugcuuauggagagauggccuguugucauacaccgccccaguaggccagaccauguaccuaucagaagccguguaccucaacgacuccacauaugaugggcacaccguuggaggucugcaauauggagguuugggacaguuggcugacggagucguaggacuggaugacuucagaaagucucaggaguuacguguuuggccaggcuacgacuacguuggguggagcaaccacucauucucuaguggauaugucgaaauggaguuugaguucgaccgacucagggcguuucaggcuaugcagguucauuguaacaauaugcacacgcuaggcgcccgccuaccuggagggguugagugcagguuccggagagguccagcgauggccugggagggggaacccaugaggcauaaccugggaggcaaucugggagauccgagggcgcgggccguuuccgugccgcugggcgggagaguggcucgcuuccuccaaugccgguuccuauucgccggaccguggcuucucuuuucugagauuuccuucauaagugacguagucaauaauucuucaccagcacuaggaggaacauuuccaccagccccuugguggccaccuggcccgccaccaacaaacuuuagcaguuuggagcuggagccccguggacagcaacccgucgcuaaggcugagggauccccaacagccaucuugauugggugccugguagcuauuauccugcuccuucugcucaucauugcucucaugcucuggcggcugcacuggcgcaggcugcucagcaaagcagaacgucgggugcuugaggaggaacuuacugugcaucuguccgugccuggcgacacaauuuugauuaauaaucggccuggcccgcgcgaaccaccuccuuaccaggaaccucggccaagaggaaacccuccccacucggcccccugcguucccaauggcagcgcguauaguggugacuauauggaacccgagaaaccuggagcucccuuacuaccuccucccccucagaacagcgucccgcauuacgccgaggcugauauugugacucugcagggagugaccggggggaacaccuaugcagugccagcgcuccccccaggagcgguaggagauggacccccaagaguggauuucccccggagcaggcugcgcuuuaaggagaagcugggugagggacaguucggugaggugcaucugugcgaaguggacagcccucaggauuuggugucauuagauuucccucugaaugugagaaagggccacccccugcuuguugccgucaagauucugcgucccgacgcuaccaagaacgccagaaacgacuuccucaaggaggucaaaauuaugaguaggcuuaaggauccaaauaucauacggcugcuggggguguguguacaagaugacccccuuugcaugaucaccgacuauauggagaauggcgaucugaaccaauuccugucagcccaucagcuugaggacaaggcugcugagggggccccgggcgacggacaggcugcgcagggacccaccaucuccuauccuaugcuucuccauguggcugcccagaucgccucugggaugagguaccuugcuacccucaauuuuguucacagggaucucgcuacgagaaauugucuggugggugagaauuuuacgauuaagaucgcugacuucggaaugagccgcaaccuguacgcaggcgauuacuaucgcguccagggaagagcagugcuacccauaagguggauggcuugggaguguauccugauggggaaauuuacuacagcuagcgacguuugggcauucggcguuacucugugggaaguacucaugcuuugccgcgcccagccuuucggucaacugacggacgagcaggucauugagaacgccggugaauuuuuuagagaccaagguagacaaguguaucucucgaggcccccagccugcccucagggucuguacgaacugaugcuccgaugcuggucgagagagagugaacagaggccuccguuuucucagcugcauagguucuuagccgaggacgcacuuaauacuguguag

SEQ ID NO: 80147 - RNA, 2631 nt, Artificial Sequence
  derived and/or modified sequence
augggucccgaggcccugagcucuuugcugcugcugcuguuagucgcuagcggggacgccgacaugaaaggccacuuugaucccgcuaaguguagauaugcccuggggaugcaggaccguaccaucccagacucugauaucuccgccagcaguucuuggucugauagcacggcagcucgccauucgaggcuugaauccagcgacggugauggagccuggugcccggccggguccguuuuccccaaggaggaagaguaccuccagguggaucuccagcgacuccaccuuguggcccuggugggcacgcagggaaggcaugcaggcggucuuggcaaagaauuuaguaggucguauagguugcgauauuccagggauggccgaagauggaugggcuggaaagacagguggggacaggaagucaucagcggcaacgaggaccccgagggugucgugcugaaggaucuuggucccccaaugguggcuagacugguccgcuucuauccaagggccgacagagugaugagcguaugucuucguguugaauuguacggcugucuguggcgcgacggccugcugucauacacagccccggugggacaaacaauguaucugagugaggccguauaccuaaaugauagcaccuacgacgggcauaccgugggcggucugcaguacggaggucuuggucagcuagcggacggggucguggggcuggaugacuuccggaagucccaggagcuacgaguguggccuggguaugauuacgucggcuggucuaaucacucguuuagcucuggcuacguagaaauggaguuugaauucgaccgacugcgugcauuccaagcuaugcagguacacugcaauaacaugcacacauugggcgcaaggcucccuggcgggguggagugucgcuuucgccgggggcccgcuauggcgugggagggugagccaaugagacauaaucugggcggcaaucuuggagacccacgcgcacgcgccguaagcguaccccuuggcggaaggguggcuagguuucugcaaugucgguuccuuuucgcgggcccuuggcucuuauuuuccgagauuaguuucauuucugauguugucaacaauagcaguccugcuuuagggggaacuuuccccccugcuccuugguggccuccaggaccccccccuaccaauuuuucaucacuggagcuggagccgaggggacagcaaccaguagcuaaggcagaaggaucucccaccgcuauauugaucgggugucugguugcaaucauucugcuguuacugcugauuaucgcccucauguuauggcgccuucauuggcgacggcuccucagcaaagcagagagaaggguguuagaagaggagcucacgguccaccuaagcguacccggugacaccauccugauuaauaaccgaccgggaccgcgggaaccuccuccguaccaggagccucggccccgaggcaaccccccccauucugcaccgugcguuccaaacggcucagcauacuccggugacuauauggaaccugagaagccgggcgcacccuuacuuccuccuccuccccagaauagugugccccacuacgcugaggcugauauuguaacacuccagggugugaccggcgguaacacuuacgcuguuccggcgcugcccccaggcgcugugggugaugguccgcccagaguggauuuuccucguagucguuugagguucaaagaaaagcugggugaaggacaguucggcgaagugcaucucugcgaaguagacagcccucaggauuuagucucccuggauuuuccucugaacguacggaaagggcauccacuacugguagccgugaaaauacucagaccugacgcgacuaagaaugcgcgcaaugacuuucugaaggaagugaagaucaugucaagacucaaggacccaaauauuauaagacugcugggggucuguguccaagacgacccacuauguaugaucaccgacuauauggaaaauggugaccugaaucaguuccugucugcacaucagcuagaggacaaggcagcagagggagcaccaggggacggccaagccgcccaggggccaaccaucaguuacccuaugcugcuccacguggccgcgcagauagcauccgguaugagauaucuggcuacucugaauuuuguacaucgcgaucuggccaccaggaauugccuagugggugaaaauuuuaccaucaagaucgcagauuucggcaugagccggaaccuuuacgcaggcgauuacuaccgcguccagggcagagcagugcucccaauaagguggauggccugggaauguauccuuauggguaaauuuaccacugcuucagacgucugggcuuucgguguaacucugugggagguauuaaugcuauguagggcccaacccuuuggccaauugaccgacgagcagguaaucgagaacgccggagaauucuuuagagaucagggcaggcaaguauaccugucucgcccaccagcuugcccccaaggucuauaugaacugaugcugcgcugcuggagucgggagagcgagcagcgccccccauucucucagcuccacagauuucuggcagaagacgcacucaauacuguuuag

SEQ ID NO: 80148 - RNA, 2631 nt, Artificial Sequence
  derived and/or modified sequence
auggggcccgaggcgcugucgucucugcugcuguugcuuuuggucgccucuggugacgcugauaugaagggacauuucgacccugcaaaaugccgguacgcccuggguaugcaggacaggacaauacccgacagcgacaucucugcuagcucaagcuggucugauaguacugcugcucgccacagccgguuggagaguucugauggcgacggagcuuggugcccggccggaucuguguuuccuaaggaagaggaguaccugcaggucgaccuccagagacuucacuuaguggccuugguaggaacacaaggccggcacgccggagguuugggaaaagaguuuucgcgaagcuaucguuugagguauucaagggauggaaggcgauggauggguuggaaagaccgcuggggccaagaggugauuuccggcaacgaagacccagaaggaguugugcucaaagacuuggguccaccaauggucgcucggcuugugagauucuaucccagggccgaccgagugaugagcguuugccugaggguugagcucuacggcugucucuggagagaugggcugcugagcuacacugcucccguggggcagacuauguauuuaucugaggccguguaccugaaugacaguaccuacgauggccauacaguggguggcuuacaguacgggggauuagggcagcucgccgauggaguggucggccuugacgacuuccgaaagagccaggaacuacgcgucuggcccggcuaugauuaugucggauggucuaaccacucuuuuucuuccgguuauguagagauggaauucgaauucgaccgacugcgcgcauuucaggcaaugcaagugcauuguaacaacaugcauacccuuggcgcacgauugccagguggcguagagugccgcuucagacggggaccggcgauggcuugggaaggagagccaaugcgccauaaucugggaggaaaucuaggcgacccaagggcgcgcgcagucuccgucccgcuggguggcagagucgcgcgcuucuuacagugccguuuccucuucgccggcccguggcuccuguuuagugagauaagcuucauuucugaugucguuaacaauuccucgccugcccucgguggcacauuuccuccagccccuugguggccccccggacccccuccuacgaauuucagcucucucgagcuugagccacgcggccagcaacccguggccaaggcugagggcucuccuacugccauccuuauuggaugucuggucgcaauuauucugcuguugcuucucaucaucgcccuuaugcuguggagacuacauuggcgcagacuguugucaaaagccgagagacgcguucuagaggaagaauuaacuguacauuuaagcgugccuggagacaccauucugauuaacaacagacccggucccagagagccaccacccuaccaggaaccaagaccaaggggcaaucccccccacucugcuccaugugucccaaacgguagcgcauacucgggcgacuacauggagccugagaaacccggggcgccacugcuccccccucccccacagaacucugugccccauuaugcagaggcugacauugucacccuacaagggguuacaggugggaacaccuaugccgugcccgcucuccccccaggggcggucggcgaugguccuccuagggucgacuucccacggagcaggcucagauucaaagaaaagcucggggagggccaguucggggagguccauuugugugagguugacucuccucaggaucuggucucucuggacuuuccacugaacguccgcaagggccaucccuuguuaguggcuguaaagauucugaggccugacgcaacuaaaaacgccaggaaugauuuccucaaggaggucaagaucaugucccgacuuaaggauccuaacauuauuaggcuuuugggugugugcguucaagacgacccucuguguaugaucacagauuauauggaaaacggcgauuuaaaccaauuucuuucagcccaucaacucgaagacaaggccgcugagggggcccccggcgacggucaggcugcccagggaccuaccaucuccuaucccauguuguugcacguugcugcucagauugcgucugguaugcgauaccucgcuacucugaauuuuguccaucgugacuuggcuacucggaauugucuggucggggaaaacuucaccaucaagauagcagauuuuggcauguccagaaaccuguaugccggagauuacuacagagugcaggggcgagcaguucuuccuauccgcuggauggcgugggaguguauccugaugggcaaguucaccaccgcgagcgauguuugggccuuuggagugacauuaugggaaguucuuaugcucugucgcgcccagccuuuuggacagcugaccgacgagcaagugauugagaaugcuggcgaguucuuuagagaccaggggcggcagguguauuuaucucggccucccgccuguccacaaggauuauacgagcugaugcugcguugcuggucgagagagucagaacaaagaccgccauuuagucaacugcauagauuucuagcugaggaugcgcuaaacacgguuuag

SEQ ID NO: 80149 - RNA, 2631 nt, Artificial Sequence
  derived and/or modified sequence
auggggccugaagcccucaguucacugcucuuacuguugcugguggcaagcggagaugcugauaugaagggccacuuugauccagcuaagugucgguaugcacugggaaugcaggaucgcacgaucccagacucagacaucuccgcaaguagcucuuggagcgauuccaccgcugcucgccacucccgacucgagaguuccgauggcgacggggcuuggugcccugcugggucugucuuuccaaaagaggaggaauaccuucaaguugaucugcagcgucuucaucugguugcccucgucggaacacaggggagacacgcgggggggcucgggaaggaauucucuagguccuauagacugagguacagcagagacggccggagauggaugggauggaaagaccgcuggggucaagaagugauuagugguaacgaagaucccgaggggguugugcucaaagaucucggcccaccuaugguggcuagacucguuagauuuuauccucgagccgauagagugaugucuguguguuuaagaguugagcuguauggaugucuuuggcgcgacggucuuuugaguuacacugcccccguuggucaaacuauguaucugagcgaggcugucuaucucaaugacuccacauaugacgggcacacugucgggggccugcaguacggcggcuuaggacaacuagcugacggcguaguggggcucgacgacuucagaaagagccaagaauugaggguguggcccggguacgauuacguaggcuggucuaaccacaguuuuagcucagguuacgucgagauggaguuugaguuugacagacugcgcgccuuucaagccaugcaggugcauugcaacaauaugcauacccucggugcacgauugccuggcgguguggagugucgguuucguaggggaccugccauggcaugggaaggagaacccaugcggcauaaucucggagggaaccugggggauccucgagcccgcgcuguaagcguaccucucggaggacggguggccagauucuugcagugcagauucuuguucgccggacccuggcuacuguuuuccgaaaucucuuucauaucugacguggucaacaauucuucucccgccuugggcgguacuuuucccccugcuccaugguggccucccggcccgcccccuaccaacuucuccaguuuggagcucgagccacggggacagcagccgguggccaaagccgaaggaagcccgacagccauccugaucggcugccugguggccaucauucuguugcugcugcuuaucauugcacugauguuguggcgccugcacuggcggcgccugcucaguaaggccgagcgucgagugcucgaggaggagcugacagugcaccugucagugcccggcgacacuaucuugaucaacaaucgccccggucccagggaacccccaccuuaucaggaaccuagacccagaggcaauccaccucauagugcgcccugugucccaaauggcucugccuauuccggagacuacauggagccugaaaaaccaggggcuccacugcugccccccccaccacaaaauucuguuccccacuaugcugaagcagacaucgucacuuugcaaggcgucacaggcgggaacaccuacgccgucccggcccucccgccaggagccgugggcgaugggccaccacggguggauuucccucggagcaggcucagauuuaaggagaaauugggcgaaggacaguucggcgagguccaucuaugcgagguggacucaccucaagaucugguuagucuggauuucccucucaacguacgcaaaggacacccucugcugguagccgucaaaauccucagaccugaugcgaccaagaaugccagaaacgacuuccucaaggagguaaagauaaugucacggcugaaagaucccaacaucauaagacugcucggcgucuguguccaagacgauccgcugugcaugauuacagacuauauggagaacggagaucuuaaucaguuccugagcgcccaccagcuugaagacaaggcugccgaaggugcacccggugacggccaggccgcacaggggccgacaaucuccuacccaaugcugcuucacguggccgcacaaaucgcuucugggaugagauaccuggcaacgcugaauuucgugcacagggaucuggcuacuagaaauugccuugugggugaaaacuucacaauuaagaucgccgacuuuggaaugucucggaaccuuuaugcgggcgauuacuaucgaguucagggacgcgcggugcuuccuauccgguggauggcaugggagugcauuuugauggggaaguuuacuacagcuagugaugugugggcuuucggugucacuuugugggagguuuugaugcucuguagagcccaaccauucggacaacuuaccgacgaacaaguaauagagaaugcaggagaauucuuuagggaccaggggcggcagguguaucugucucggccccccgccugcccgcaaggucucuaugaacuaauguugaggugcugguccagggaguccgagcaacggcccccuuuuagucagcuccaucguuuucuggccgaggacgccuugaauaccguuuag

SEQ ID NO: 80150 - RNA, 2631 nt, Artificial Sequence
  derived and/or modified sequence
auggggccugaggcucucucgucucugcugcugcugcuguugguggcaucuggcgacgcagacaugaaaggacauuucgaccccgcgaaaugccguuacgcucuuggcaugcaggaucggacaaucccugauagugauauuucggccagcuccucuuggucugacaguacugccgcuagacacucucgacuugagucuuccgauggggacggugccuggugccccgccgguucuguguuuccuaaggaggaagaguaccugcagguggacuugcagagacugcaccuuguugcacugguaggcacccaagggaggcaugccggaggccuuggcaaggaguuuucaagaucuuauagacuucgguacagucgcgacggcagacgguggaugggguggaaagaucgguggggccaggaggucaucucugguaacgaagaucccgaaggcgucgugcucaaggaucucggcccaccgaugguggcacggcuugugagauuuuacccccgggcagauagagucaugagugucuguuugcgaguagaacucuauggaugucuguggcgggacggauuacucaguuacacagcgcccgucggccagaccauguaucugucugaggccgucuauuuaaaugauucuacauaugacggacauacugugggggggcugcaauaugggggguuggggcagcucgcugauggcgugguggggcuggacgauuucagaaagucucaggagcugagaguguggccuggauacgauuacguggguuggucaaaucacagcuuuaguagcggcuauguugaaauggaguucgaauucgacagguugagggcuuuccaggcuaugcaggugcauugcaauaauaugcauacacugggcgcuagauugcccggcggcguggaguguagguuucgccggggucccgcaauggcuugggaaggggagccaaugagacauaaucucggcggaaauuugggagaucccagggcuagagccgugucugugcccuugggugguagaguugcacgguuucuccaaugucguuuccucuucgcuggaccauggcugcuguuuucagaaaucucauucauaucggauguugucaacaacaguucuccugcucuuggggggaccuucccuccagcccccugguggccgccaggcccuccaccuacaaauuuuagcucccuggaguuggaacccagaggccagcaaccuguggccaaggccgaaggcuccccgaccgcuauccugauuggcugccuaguagcaauuauucugcugcuccuguugaucaucgcuuugaugcuguggagacugcacuggcgucgccuccuaagcaaggcagagaggcguguauuagaggaggaauugaccguacaccuuucagucccaggggacacuauccugaucaacaaccgcccuggcccgagagagccuccuccuuaucaagagccacguccgagagggaauccaccgcauucagcacccugcgucccaaaugguagcgccuacucaggagacuacauggaaccagagaagccaggggcaccccuccucccuccgccaccacagaauucagugccucauuaugcagaggcagauaucguuacacugcagggagugaccggcggcaacaccuacgcaguacccgcgcucccaccgggugcagugggcgacggccccccucgcguggacuucccaaggagucggcuaagguuuaaagagaaguugggcgaaggccaguucggagagguccaucugugcgagguggacucuccccaggaccuggugucauuggacuucccucuaaauguuaggaaagggcacccucuacucguagccgucaaaauccuucguccagacgcaacuaaaaaugcaagaaaugauuuuuuaaaagaggucaagaucauguccaggcucaaagauccuaacaucauucggcuucuggggguuugcguacaggacgacccucuuugcaugauaaccgacuauauggagaacggagaccugaaucaguuccugucugcucaccagcuugaagauaaggcugcugagggugcuccaggagacggacaagccgcccagggucccacaauuagcuauccaauguuacuucacgucgccgcucagauagcgucugggaugagauauuuggcaacccuuaauuuugugcacagagaucuugcuacaagaaauugccuggugggugagaacuucacuauuaagaucgccgauuucgggaugagucgcaaucucuacgccggcgacuacuaucgaguacaaggcagggcgguccugcccauaagauggauggcaugggaguguauccugauggggaaauuuaccaccgcuuccgaugugugggcuuucggggugacacugugggaagugcuuauguuguguagagcccaaccauucgggcaguugacugacgagcaggucaucgagaaugcgggugaauucuucagagaccagggccgacagguguaucucucaaggcccccggcuuguccccagggcuuauaugaauugaugcuuaggugcuggaguagagaguccgagcagaggcccccguuuagccagcugcaccgcuuccuggccgaagaugcgcugaauacaguauag

SEQ ID NO: 80151 - RNA, 2631 nt, Artificial Sequence
  derived and/or modified sequence
auggguccggaggcacugucgucccugcuccugcuucucuugguggccagcggcgacgcugacaugaagggccauuuugauccagccaagugucgguaugcacuaggaaugcaggaccgcacuaucccggauagugauauuuccgcuucaucaaguuggucagacuccacagccgcucggcacucaagacuugagucuagugacggggauggggcaugguguccugccggaucaguguuucccaaggaggaggaguaucugcagguugaucugcagcgguugcaucucguggcucuuguagggacacaaggcagacaugcugggggccuuggcaaggaauucucacgauccuaucgacugcgcuacucaagagacggcagacgcuggaugggcuggaaggauagguggggacaggaagucaucaguggaaacgaggauccagagggugugguucucaaggaucucgggccacccauggucgcuaggcucgugcgauucuauccgagagcugauagggugaugucugucugccugagaguagaacuguacgguugucuguggcgugacggcuuacuuuccuauacggccccugugggacaaacgauguaucucagugaagccguguaucuuaaugacaguacuuaugacggacacacagucgggggacuccaguacggcggccugggccagcuugccgacgggguagugggccucgacgauuuccggaagucccaggagcugcggguguggccuggcuaugauuacgucggcuggagcaaucauuccuuuagcagcgguuaugucgaaauggaauucgaguuugaucgguugagggccuuccaggcaaugcagguacacugcaacaacaugcacacuuuaggugcuagauuaccaggaggcguugaaugccgguucaggcgcgguccugccauggcgugggagggggagccaaugcgccauaaccuuggcggaaauuugggcgacccuagagcucgagccgugucuguccccuugggcggacgcguggcucgauuucugcagugccgauuccucuuugccggaccuuggcuucucuuuucugaaauuuccuucauuucugauguggucaacaacucuucaccugcucucggcgggaccuuccccccagcacccugguggccacccggaccccccccuaccaacuucucuagucuggaguuagagccucggggucagcaacccgucgcuaaggccgaaggguccccgacagcuauucucaucggcugucugguagccaucauucuccuucugcuccugauaauagcuuugaugcuguggcgccuucauuggagaagacuccuguccaaagcggagcgucguguccuggaagaagaacucacuguacaucuuagcgugccuggggauacaauccuaaucaauaacagaccuggcccuagagaaccaccccccuaccaggagccccguccccgcgguaaucccccucauagcgcccccugcguucccaaugguagcgcauacagcggagauuacauggagccagagaaaccaggugcuccucuccugccuccuccaccacaaaauuccguuccacacuaugcagaagcagauaucguuacccugcagggcgugacagggggcaauacuuaugccguucccgccuugccaccuggagcagugggggauggaccacccaggguggacuuuccuagaucucgucuuagauuuaaagaaaaacucggugaaggccaguuuggcgaaguucaccuuugugaagucgacagcccccaggaucuggucagccuggauuucccacucaacgugaggaaagggcacccccucuugguggccgugaagauccugcggccagaugccacuaaaaaugcgcgaaaugauuuucuuaaggagguaaagauuaugagcagacugaaggauccaaauaucauuaggcugcugggcguaugcgugcaggaugaccccuugugcaugauuacagacuauauggagaacggcgaucugaaccaauuccuguccgcucaucagcuggaggacaaggcugccgaaggagcgccgggugacgggcaagccgcucaagggcccacgaucagcuaucccaugcuacuucacguagcugcccagaucgcgaguggcaugcgcuaccucgcaaccuugaacuuuguccauagggacuuggccacccggaauugccuggucggagagaacuucacgauuaagauugccgauuucggaaugucccgcaacuuguacgccggggauuauuaucgcguucagggcagggccgugcugccaauuagauggauggccugggaguguauccugaugggaaaguuuaccacugccucugaugucugggcauuuggggugacgcugugggaaguucuaaugcuuugucgggcacagccauucggccaacugacagacgagcaggucaucgaaaacgccggggaauucuucagggaccaggggagacagguguaccugagcagacccccugccuguccacaagggcucuaugagcugauguugcgcugcuggagcagggaaucggaacagcgcccacccuucucccagcugcaccgcuuucucgccgaggacgcgcuuaacacaguauag

SEQ ID NO: 80152 - RNA, 591 nt, Artificial Sequence
  derived and/or modified sequence
augccacaccucgcaucacucuucaccgcaagcucgagaugcuguccccauccacucagaccagaggguagcggagccaugggaccugaagccuuaagcucccugcuucucuugcuguuagucgcuagcggugacgccgacaugaaaggucacuuugacccagcuaagugucguuacgcccuagguaugcaagacagaaccaucccugauuccgacaucagcgcuuccaguaguuggagcgacagcacggccgcacggcacagccggcuggagaguagcgauggcgacggagccuggugcccggcugggucgguguucccuaaagaagaagaauaccuacagguggaccugcaacggcugcaccuggucgcucugguggggacacagggucgucacgcugggggccuaggcaaagaauuuucgcguuccuacaggcugagauacucccgcgacgguagaagauggauggguuggaaagacagguggggccaagaagucaucucuggcaacgaggacccagagggaguugugcugaaagaucucgggcccccgauggucgcaagacugguaagguucuacccccgcgcauag

SEQ ID NO: 80153 - RNA, 2685 nt, Artificial Sequence
  derived and/or modified sequence
auguccuugccucgcugcuguccccauccccuccggccagaggguucuggagccaugggaccugaggcacucagcagccuacugcucuuguuauugguggcgaguggagaugccgacaugaaaggucacuucgacccagccaagugcagguacgcucuuggcaugcaggaucgcacgauucccgacucugauauuucugcuucauccuccuggagcgacucaacugcggccagacauuccagacucgaaagcucagauggugacggggcgugguguccagccggcagcguauucccaaaggaggaagaguaccugcaaguugauuugcagcgccuucacuugguggcccuuguagguacccaggguagacaugccggagggcuugguaaagaauuuuccagaucuuacagacugcgcuacagccgggauggcagaagauggaugggcuggaaagaccgguggggacaggaagugauuuccggaaaugaggauccagaggguguagugcuaaaagaccucggaccuccaaugguggcucggcuugugagguucuacccucgcgcugaccggguuaugagugugugccugcgcgucgagcuuuauggcugccuguggagagaugguuuauugucuuacacugcucccguuggccaaaccauguacuuaucggaagcaguguacuuaaaugauuccacguaugacggacauacagucgggggcuugcaauauggggggcugggacagcuggccgauggcguagugggguuggacgacuuucggaaaucucaggagcugagaguuuggccuggguaugacuauguuggcuggagcaaccauucauuuagcucuggguacgucgaaauggaauuugaguuugaccgccucagagcuuuccaggccaugcaggugcacugcaacaacaugcacacucucggcgcgcgccuuccagggggagucgaauguagauuucgccgggguccggccauggcuugggaaggcgagcccaugcgacacaaccugggcggcaauuuaggugauccacgggcucgggccguuagugugccuuuggggggucguguggcccgcuuccuucaauguagguuccucuuugcuggccccuggcugcuguucagcgagaucuccuuuauuucagacguagucaauaacagcucaccagcuuugggaggcacauucccccccgcaccuugguggccuccagguccccccccuaccaauuucuccagcuuggaauuggaaccccggggccagcagcccguggcuaaggcugaggguucaccgacagcaauucugaucggaugucuuguggccauaauuuugcugcuauugcugaucauagcacucaugcuguggcgccugcacuggcgccgacugcuuucuaaagcugagcgaagaguucucgaggaagaauuaacgguacauuuauccgugccuggcgacaccauucucaucaacaauagaccaggacccagagaaccuccacccuaccaagaaccaaggccacgcggaaaccccccgcauucggcuccgugcguccccaauggauccgcuuacuccggagacuauauggagccugagaaaccaggcgcaccacuccuacccccccccccccagaacucugucccacacuacgcagaggcagacaucgugacgcugcagggugucacuggugguaacacauacgccguucccgcauugccgccuggagcugugggggauggaccacccaggguggauuucccucgaagucggcuucgguucaaagagaagcugggggagggacaguuuggcgagguccaucugugcgaaguggauucaccucaggacuugguuucuuuggauuucccacugaacguuaggaaagggcacccacugcugguggcuguaaaaauucugagacccgaugcaacuaagaaugcucguaacgauuucuugaaagaaguuaagaucaugucucgauuaaaggacccuaauauuauucgacuucuuggcgucugcguucaggaugaccccuuaugcaugauaaccgacuacauggagaauggcgaucugaaccaauuucugagugcucaucagcuggaggauaaggcagccgagggugcgccaggagauggccaagccgcacagggaccgaccaucuccuacccuauguugcuacacguagccgcccagaucgcguccgggaugagauacuuggcuacacugaacuuugugcauagggaccuugccacacguaauugccuuguuggggagaauuucaccaucaagauagccgacuuugggaugucuagaaaucuguacgcuggcgauuauuaccggguccagggccgcgccgugcucccaauccgguggauggcuugggaauguauacugaugggaaaauuuaccacagccuccgacguaugggcuuuuggugugacacugugggaagucuugaugcuaugcagagcacaaccuuuuggccaauugacggaugaacaggugauugagaacgccggagaauuuuuuagagaucaggggcgccaggucuaucuuucccguccgcccgcaugcccacaagggcuguaugaacugaugcuccggugcuggucuagagaaagcgaacagagaccccccuucagccagcugcacagauuccuggccgaggacgcucugaacacgguuuag

SEQ ID NO: 80154 - RNA, 2685 nt, Artificial Sequence
  derived and/or modified sequence
augucauugcccagauguugcccucauccacuuagacccgagggguccggagccauggggccagaagcccucaguagccucuugcuuuugcuccuuguggccucaggcgacgcugauaugaaaggccauuuugacccagcuaaaugucgcuacgcucugggaaugcaggaccggacgauaccagacuccgacaucucugcuucaucuucuuggagcgauuccacugcagcccgccacucacgccuggaaucaagugacggagauggggcuuggugcccggccgguagcguauucccaaaggaagaagaguaccuccagguggaccuccagaggcugcaucugguggcucuggucggcacccaaggacgacacgcuggaggauugggaaaggaguucuccaggagcuaccgcuuacgguacagucgggauggacgucgguggauggguuggaaggaccgcuggggacaggaaguaaucuccgggaaugaggaucccgagggcgucguguugaaagaucuggggccgcccauggucgcccgcuuaguccgguucuacccacgggcggaucgcguaauguccguaugccuuaggguugagcuguacggcugucuauggcgcgacggacucuuaaguuacaccgcgccugugggccagacuauguaucucagcgaggcuguguacuugaacgauucaacauacgacggacacaccgucggaggguugcaguauggggguuuaggccagcuggccgacggugucguaggacucgacgacuuccgcaagucacaggaguuacgcguguggcccggcuacgacuacgucggcuggucuaaccauuccuuuucaaguggguauguggagauggaguuugaauucgaucgguugagggcguuucaggcuaugcaagugcacugcaauaacaugcauacacugggggcucgguuaccagggggaguggagugcagguuccggcgcgguccagcaauggcuugggaaggcgagccuaugaggcacaaccucggagggaaucucggggauccucgggcucgggccgugucugugccuuugggggggcggguagcucguuuccugcagugcagguuucucuuugcuggcccguggcuccucuuuuccgaaauuagcuuuaucucagacguugugaacaauaguuccccugcacuggguggaacuuuccccccugcucccugguggccucccgguccgccucccaccaauuucucuucccuggagcuggagccccggggucaacagcccguggccaaagccgagggcucccccaccgcuauacucaucggcugccucgucgcaaucauucugcugcugcugcucaucaucgcccucauguuauggagauugcauuggagacggcuccugucgaaagcggagaggcggguccucgaagaagaacuuacggugcaccugagugugcccggggacacaauacuuauuaauaaccgaccaggcccaagagagccacccccauaccaggagccccguccgagaggaaacccuccgcauagcgccccaugcgugccaaacggaucggccuacagcggagacuacauggaaccugagaagccgggugcaccacugcugccaccaccaccucagaacagcguuccacauuaugcagaagcagauauuguaacauuacaagguguuaccgggggcaacaccuacgcagucccagcucuuccccccggcgccguuggagaugguccuccgagaguggauuucccucggucuagacugagguuuaaggagaagcucggagaagggcaguucggagaagugcaccugugugagguugauucuccccaggaucugguaucccucgacuuuccacuaaaugugagaaagggccacccucugcuuguugcaguuaagauccuaaggccagaugcuacaaaaaacgcaagaaaugauuuccuuaaagaagugaagauuauguccagguuaaaggaccccaauauuauccgacugcuaggcguguguguucaggacgacccccuguguaugaucaccgauuacauggaaaacggagaucucaaccaguuucuuagcgcacaucaacuggaagauaaggcugcagaaggggccccuggagacggacaggcggcccagggcccuacaaucucauacccaaugcuccuucacguggccgcccagaucgcuagugguaugcguuaccuggcaacacuaaacuucguucauagagaucuagccacccgaaacugucugguuggagaaaauuucacuauaaaaaucgccgauuuuggaaugagccguaaccuauaugcuggggauuauuaccgcgugcagggucgcgcuguucugccaauuagguggauggcgugggaauguauccugaugggcaaauuuacuacugcuagugaugucugggccuuuggagucacucuaugggaaguccuaaugcugugucgagcccagccuuucggacagcugacugaugaacaaguuauagaaaacgccggcgaauucuuucgagaucagggacggcagguguaucuguccaggccccccgccugcccacaggggcuguacgaauuaaugcugagguguuggucccgagagagugaacagcggccgcccuucagucaauuacaccgauuccuagccgaagaugcacugaacacaguauag

SEQ ID NO: 80155 - RNA, 2685 nt, Artificial Sequence
  derived and/or modified sequence
augucccucccuaggugcugcccccauccacuucgcccugagggaagcggcgccaugggcccagaagcucugucuagccuguugcuguugcuccugguggccuccggagacgccgacaugaaaggccacuucgacccugccaaaugucgcuacgcacucggcaugcaagacagaacuauccccgauagugauauuucagcuuccagcaguuggucugauucuacugcugccagacacucgagauuggaaagcagcgacggcgauggggcauggugcccugcagggagcgucuuccccaaagaggaggaauaccugcaggucgacuugcagcgccuccauuugguggcucuuguggggacccagggacggcacgccgggggccuugguaaagaauucucucgcuccuacagacugagauacucacgugauggacgccgauggaugggauggaaagacaggugggggcaggaagucauuagcggaaacgaagauccugaaggggucguauugaaagaucuagggcccccuaugguggcucggcuggugagguucuauccaagagccgauagagucaugagcgugugccugagaguugagcucuacggaugcuuguggcgagacggacuucugagcuacaccgcccccgucgggcaaacgauguaccucagcgaggcaguguacuuaaacgacagcaccuaugaugggcacacaguggguggacugcaguaugggggucugggccagcucgcggauggcguggugggcuuagaugacuuccggaaaagccaggaguuacggguuuggccaggguaugauuaugugggcuggucuaaucacaguuucucauccggauauguagagauggaguucgaguucgacagacugagggcuuuccaggccaugcaaguucauugcaauaacaugcacacuuugggagcacggcugcccgggggaguggaaugccgauuuaggcggggcccagcuauggcuugggagggagagccuaugaggcacaaucuggggggaaaucugggcgauccgcgggcuagagcuguguccgugccauugggaggacggguggcucguuuccugcagugucguuuccucuucgcugguccaugguugcuguuuucagaaauaucauuuauuuccgauguagugaauaacucaucccccgcacuuggaggaaccuuuccuccugcgccuugguggccgcccgguccucccccuacgaauuuuaguagucuggaguuggagccaaggggccagcaaccgguugcuaaagcugaaggcucuccaaccgccauccugauaggaugccuaguugcaauuauauuacuucuguuguugauaauugcccucaugcuguggagacugcacuggagacguuuacugagcaaagccgagcggagaguuuuagaggaagagcugaccgugcauuuaucagugccaggugacacaaucuuaaucaauaaucgcccuggcccccgcgaaccuccacccuaccaggaaccccgaccacgcggaaacccaccucauucagcaccaugugugccuaacggcagugccuacucaggggauuauauggagccagaaaaaccuggugcuccacuccugccuccacccccccaaaacucugucccccacuacgcagaggccgacaucgucacacuucagggcgugaccgggggaaacacauaugcgguucccgcucugccuccuggugcagugggagauggaccacccagaguugacuuuccacgcagucgccugcguuuuaaggagaaauugggagaaggccaauuuggugagguucacuuaugugaaguggauuccccacaggauuugguaagccuggauuucccucuaaacgucagaaagggucauccacuucuggucgcggucaaaauucuccgcccagacgccaccaaaaacgcaagaaaugauuuccucaaagaaguaaagauaauguccagacugaaagacccuaacaucauucgacuccugggcgugugugugcaggaugacccccugugcaugauuacugauuauauggaaaauggcgauuugaaucaauuccucucugcgcaucaacuugaggacaaggcagccgaaggcgcccccggagauggacaggccgcccaggggccuacuaucucuuaucccaugcugcuccaugucgcagcgcaaauagccucagggaugcgcuaccucgcaacucugaauuuugugcaccgagaucuggcuacgaggaacugucuggugggagagaacuucaccaucaaaauagcggauuucggcaugucuaggaacuuguaugcuggggacuacuaucgggugcaagggagggcuguucugccuauucgguggauggcaugggagugcauacucaugggaaaauuuacgaccgcuucugaugugugggcguucggggucacauuaugggaggucuuaauguugugccgagcccagccauucggccaacuuacagaugagcaggucauugagaaugccggcgaauuuuuucgggaucaggggcgucaaguguaucugucucggccccccgccugcccccaggggcucuacgaacugaugcucaggugcuggucacgggaguccgagcagcggccaccauucucacagcuucaucgcuucuuagcagaagacgcucugaauaccguguag

SEQ ID NO: 80156 - RNA, 756 nt, Artificial Sequence
  derived and/or modified sequence
augccacauuuagcaagucuauucacagcuucuucgagguguugcccucauccucucagaccggagggaucaggugcuaugggcccggaagcuuuaucuucuuugcuacuuuugcugcuuguugccucaggagacgccgauaugaaagggcauuuugauccagccaaguguagauacgccuuagggaugcaggaucguaccauccccgauucggauauaucugcuucgucaucuugguccgacagcaccgccgcccgccacuccagguuggaauccucugauggagauggcgcuuggugccccgccggcuccgucuuuccaaaggaagaggaguaucugcagguggauuugcagagacugcaccuggucgcacuggucggaacacaggggagacacgcugguggacuggguaaagaguucucaagaaguuaccgucuucgauauucccgagauggucgccgcuggaugggcuggaaagaucggugggggcaggaaguuaucagugggaaugaagauccugagggaguuguccugaaggaucugggacccccuaugguggcucgacuagugagguucuaucccagagcggaucgggucauguccguaugucuucgaguugagcuguacggauguuuguggcggggggaauggcuaagcuuccugggaaucugcuuucucagccgcgggcuggaaggaggagaauguggcgagugggcaagucggaucccaaguccugcaggcaagcuuucucucuag

SEQ ID NO: 80157 - RNA, 2685 nt, Artificial Sequence
  derived and/or modified sequence
augucauugccacguugcuguccgcaccccuuaaggccagaagguaguggcgccaugggaccugaagcccucagcucucuacuccuacuguuguugguggcaagcggagaugcugauaugaaagggcacuuugauccugccaaaugccgguaugcucuuggaaugcaggaccguacuauaccugacagugacaucagugcuuccagcuccugguccgauuccacugccgcucgucauucacggcuggagaguucagauggugacggcgcauggugcccagccggauccgucuuuccgaaagaagaggaguauuuacaggucgaccuucagcgccugcaccucguugcgcuggucgguacgcaggguagacacgcugggggacuugguaaagaauuuagccgcucuuacagacuaagauauucacgggauggcaggcgguggaugggguggaaagaucgcuggggacaggaagugauuuccgguaacgaagauccugaaggcguugugcugaaagauuuagggccccccauggucgcgagacucguaagguucuauccccgcgcugaccggguuaugagcguuugccugcgaguggaguuguaugguugcuuguggcgugacggcuugcugaguuauacugcacccgugggacagacaauguacuuaagugaggcgguguacuugaacgacuccacauacgauggacacaccguuggcggcuugcaauacggcggccugggucaguuagccgauggugugguugggcuugaugauuuccggaaaagccaggagcucagaguuuggcccggcuacgauuauguugguugguccaaucauuccuuuuccuccggcuauguugagauggaguuugaguuugaccggcugagagcauuucaagccaugcagguacauuguaacaauaugcacacacugggugcccgcuugcccggugguguugagugccgguuccggaggggcccugccauggcuugggagggagaacccaugagacacaaucugggcgguaaccucggcgacccuagggcucgugccgucagugucccccucggcggaagggucgcccgguuuuugcagugcagauucuuauuugcugggcccuggcuccuguuuagcgaaauuucuuuuaucagcgacgucguuaauaacuccuccccagccuugggggggacuuucccaccugcuccgugguggcccccuggaccaccucccacgaacuuuagcucccuggaacuggaaccgagaggccaacaacccgucgcgaaggccgaagguuccccuacggccauucucauaggcugccuggucgcaaucauucuccuucugcugcuuauuaucgcucuuaugcucuggcgccuucauuggaggagguugcucagcaaggcugagagaagggugcucgaagaggaguugacuguccacuugucaguuccgggcgauaccaucuugauuaauaaccggccugggccaagggagccuccaccguaccaggagccacguccucggggcaauccaccacacucagcccccugugugcccaauggaagugcauacucaggcgauuacauggagccugaaaagccuggagcgccccugcugccuccccccccucaaaacagugugccgcacuaugcagaagcugauauugugacccugcagggggugaccgguggaaauacauaugcuguuccugcccugccuccaggcgccgucggggacgggccacccaggguugacuuuccaagaucccgguugcgguucaaagagaaacugggcgagggacaguucggagaagugcaucucugugaagucgacaguccccaggaccuuguaucucuggacuucccacuaaacguccgcaaggggcacccauuacugguggccgugaagauccugcgacccgacgcuaccaagaaugcacggaacgacuuccugaaagagguuaaaaucaugagcagacuuaaagacccaaauauuauucgccugcugggcgugugcguccaagacgacccucugugcaugauuacagacuauauggagaacggcgaucugaaucaguuccucucugcccaucagcuggaggauaaggcugcagagggggcccccggagacggacaggccgcacagggccccaccauuucauauccgauguugcuacauguggccgcucaaauugcuuccggcaugcgauacuuggcgacacuaaauuucgugcauagggauuuggccacccgaaauugccuaguuggcgaaaacuuuacaauuaagaucgccgauuucgguaugucccggaaccuguacgcaggcgauuacuaccgugugcagggccgugcagugcuccccauuagauggauggccugggaauguauccugaugggcaaguucacgaccgcaucugauguuugggcuuuugggguuaccuuaugggagguacugaugcugugcagagcucaaccguucggccaacugacagaugaacagguaaucgagaacgcaggggaguucuuuagagaucagggccgacaaguuuaccucuccaggccucccgcuugcccucagggacuuuaugaacucaugcugagguguuggucuagagagucugagcaacgcccgcccuuuagccagcugcaucgauuccuggcagaagacgcacucaauaccguuuag

SEQ ID NO: 80158 - RNA, 756 nt, Artificial Sequence
  derived and/or modified sequence
augccccauuuggcuagucucuuuaccgccucuagucggugcuguccucauccucucagaccagagggauccggggccaugggacccgaggcccuaucuagcuugcugcuucuacuacuggucgcgucuggggacgccgauaugaagggccacuuugauccagccaagugcagguacgcacuggguaugcaggaccguaccauaccugacucagauauaagugcaucgagcuccuggucggacagcacugcugcgcgacacucuagacuggaauccucugacggcgacggugccugguguccugcugguagcguguuuccuaaagaagaagaguacuugcagguggaucugcaacgacuccaucugguggcccugguugguacccaagggcgccaugccggcggacugggcaaggaguucucucggaguuauagacugcguuacaguagagacggacgacgauggaugggauggaaagaucgauggggacaggaggugaucucuggaaaugaggacccagaaggcguggucuugaaggauuugggcccucccaugguggccagauuaguaagauucuacccacgagcagaucgggugaugagcgugugucuuagaguggagcuauacggaugccucuggcgcggggaguggcuguccuuucuggggaucuguuucuuaucgaggggucucgaaggcggcgaaugcggggaaugggcaagccgcauuccuagucccgccggcaaacugucccuguag

SEQ ID NO: 80159 - RNA, 756 nt, Artificial Sequence
  derived and/or modified sequence
augccccaucuggccucccuguucaccgcauccucgagaugcuguccucacccccuuagaccagaaggcuccggcgcaauggggcccgaggcauuauccagccuauuacuguugcuacucguugccucuggcgaugcugacaugaagggucacuuugacccagcuaagugccgcuacgcucuggggaugcaggaccguacaauucccgacucagauauuuccgcuagcuccucauggagugacagcacagcugcccgucauucuaggcucgaguccucagacggcgauggggcguggugucccgccgggagcguguuucccaaagaagaagaauauuuacagguggaccuucagcgccuccaucugguggcccuaguuggaacccaaggccgccaugccgggggacucggaaaggaguuuucaagaagcuacagacuccgcuauagccgcgaugggagacgcuggaugggauggaaggaccgauggggacaggaagugaucucugggaacgaggacccugaaggagugguuuugaaagauuugggcccuccaaugguggcuagacuggugcgcuuuuacccccgcgccgaccgugugaugagcguaugcuugagaguggaauuguauggauguuuguggaggggcgaguggcuguccuucuuagggauuugcuuucugagccgcggucuggaggguggagaauguggcgaaugggcuagucgcaucccuucgccugcugggaaacucucacuuuag

SEQ ID NO: 80160 - RNA, 756 nt, Artificial Sequence
  derived and/or modified sequence
augccccaccucgccucucuguucaccgccuccagucguuguugcccucacccgcugagaccagaaggcaguggugccaugggaccagaagcccucaguucccugcuucugcuccuacuuguugcuucaggcgaugccgacaugaaaggacacuuugaccccgccaagugccgauacgcacuaggcaugcaggaccgcacuauuccggacucugauauauccgcgucuagcucuuggagcgauucuacagcggcucgccauagucgacuggagaguagcgauggugacggggcuuggugcccugccggaagcguuuuuccuaaggaggaagaguacuuacagguugaccuucagcgccugcacuugguugcauugguaggaacucaaggacgucacgccggaggacucggcaaggaguucaguaggagcuaccgauugcgguacagccgcgacggacgccguuggaugggcuggaaggacagguggggccaggaagugaucucaggcaacgaagacccugaaggaguuguccucaaagacuuggggccuccaauggucgcgagacucguucgauucuauccccgagcggaccgugugauguccguguguuuaagaguggaacuguacggcugccuguggaggggcgaauggcuaagcuucuugggaauauguuuuuugucuagggggcuugaaggcggggaaugcggugagugggcuucucgcauaccaucuccggcugggaaguugaguuuguag

SEQ ID NO: 80161 - RNA, 2685 nt, Artificial Sequence
  derived and/or modified sequence
augucguugcccagguguugcccccauccauuacgaccugaggguuccggugcaaugggaccagaagcauugaguagucugcugcuuuuacugcugguggcaucuggggaugcggauaugaaaggccacuucgauccggccaaaugucgguaugcccuggggaugcaggaccguaccauuccagacagcgauaucagugcaucuagcagcuggucugacagcacugcagcgcggcauagucgacuggagagcucagacggagacggugcuuggugcccugccggcagcgucuucccaaaagaagaggaguaucuucagguagaccuucagcggcugcaccucguagcacucguggggacucagggccggcacgcuggcggccucggcaaagaguuuaguagaucuuaccgccugagguauagcagagauggccggagguggaugggcuggaaagaccgcugggggcaggaagugauuucugggaaugaagauccugagggaguugugcuuaaagaccuggguccacccaugguagccagacuugugagguuuuacccaagagcagaccgggugaugagcgucugccuacguguugagcuguaugggugccuguggagggacggucugcugaguuauacugcacccgugggccagacgauguacuuaucugaagccguuuaucuuaaugacaguacauacgauggucauaccgugggcggcuugcaguacggaggucugggacaacucgccgacggcgucgugggucucgaugacuuucgcaaaagucaagaguugaggguguggccuggguacgacuauguuggauggucuaaccacaguuuuucuagcgguuauguggagauggaauuugaguuugaccgcuuacgagccuuucaagcaaugcaggugcacuguaacaacaugcauacucucggggcccgacucccaggagggguggagugucguuuccgcagagggcccgcuauggccugggaaggggagcccaugcggcacaaucucggcggcaaccugggggauccuagggcccgggcuguguccgucccucuaggugggagagucgcaagguuccuucagugucgguuucuuuucgcaggaccuuggcuguuguucuccgagauaagcuucauuuccgauguggugaauaauucguccccugcccucggcggcacauuuccaccugccccaugguggccuccggguccacccccaaccaacuucagcagccuggagcucgaaccuaggggucagcagcccgucgccaaagcugagggcaguccuaccgcuauucugauagguugucucguugcuaucauuuugcugcuacugcugauaaucgcucucaugcucuggagacugcacuggaggaggcuucucucuaaggcugaaaggcgaguccuggaggaagaacugacgguccacuugucugugcccggggacacuauucugauuaauaauaggccuggaccaagagaacccccaccauaccaagaaccccguccuaggggcaaucccccucauucagcaccgugcgucccaaacggcucugccuauagcggugauuacauggaaccggagaagcccggcgccccccugcucccaccacccccccagaacagugucccgcauuaugcagaagcggauauaguuacucuucagggugugaccggugguaacacguaugcugugccagcacucccaccaggggccgugggugacggccccccucggguggacuuuccucggucccgucuacgcuucaaagaaaaguugggugaaggucaguuuggcgaaguccaccuuugugaagucgauucuccacaggaccuuguuagccucgauuucccccuaaacgugcgaaaaggccacccccuguuggucgccgugaaaauucuuaggcccgaugcgaccaagaacgcaaggaaugauuuccugaaagaaguuaagaucaugagccgguuaaaggaccccaauaucaucaggcuacuuggaguuugcgugcaggaugauccccuuuguaugaucaccgacuacauggaaaauggcgaccucaaccaguuucugucagcacaucagcucgaagauaaagcugcugaaggggcccccggggacggccaagccgcccagggacccacuauuucauauccuaugcuguuacacguagcagcucagauugcaucggggaugcgauaccuggcuacauugaauuucgugcacagggaucuugcaacccggaacugucuggugggugaaaauuucacuauaaagauugcugacuucgguaugucucggaaccuguaugccggcgacuauuaccgagugcagggucgugcugugcugccaauaagauggauggccugggagugcauucucaugggaaaguuuacaaccgcaucugaugugugggcauuuggcguaacacuuugggaagugcugaugcucuguagggcccagccguuugggcagcugaccgaugagcagguuaucgaaaacgcuggagaguucuuucgggaccagggcaggcagguguaucugucgcgucccccagcauguccccagggacucuaugaacucauguugaggugcuggagucgggagagcgagcagcgaccgccuuuuagccaacugcauagauuccuugccgaggacgcccugaauaccguguag

SEQ ID NO: 80162 - RNA, 2631 nt, Artificial Sequence
  derived and/or modified sequence
augggaccugaggcacugucgucccuucuccuucuauuacuggucgccucuggagaugcugauaugaagggucacuuugacccagcuaagugccgauaugcccugggcaugcaggaucggacuaucccugauucggacauaagcgcaucuucuagcugguccgacuccacagcugcuagacauucgagacuagagucuucugauggugauggcgccuggugucccgccgguagcguguucccaaaggaagaagaauaccuccaagucgacuugcaaagauuacaccuugucgcccuggucggaacccaaggaaggcaugcuggcggucucgguaaagaguuuucuagaucuuacagauuaagguacuccagagacggacgucgauggaugggauggaaagacagauggggacaggaaguuaucuccggcaaugaagacccagaaggcguuguucugaaagacuugggucccccaauggucgcucgguuaguacguuuuuacccccgggcggaucguguuaugagcguuugucuucggguggagcuauacgggugccuuuggcgcgauggcuuacuuucauauacagcgcccguggggcagacaauguaccuauccgaagcuguuuaccucaacgacucaacguacgacggacauacggucgggggccuccaguacggcggccuugggcaauuggccgauggcguggucggucucgacgacuuucgcaaaucccaagaacugcgcguuuggccaggauaugacuauguaggcuggucuaaccacuccuuuucaucagguuauguggagauggaguucgaguucgauagacugagagcauuucaagcaaugcaaguucauugcaacaauaugcacacucugggugcccgccuuccaggaggcguagaaugucgauucagacgggguccagcuauggccugggaaggagagccaaugcgacacaacuuaggcggcaauuugggggacccgagagcacgggccgugagugugccacucgguggaagaguugccagauuucugcaguguagguuuuuguucgcugguccauggcuccuguucuccgaaauaucuuucaucagugacgugguaaacaacuccucuccagcucuuggagguaccuuucccccugcuccuugguggcccccgggcccuccuccaacaaacuuuucaucacuggaauuggaaccgcgaggucagcaaccaguugcaaaagcugaaggaucacccaccgcuauccugauugggugcuuaguugccauuauucugcuccuguuacugaucauagcccugaugcuguggcgccuucacuggagaagacuccuuagcaaagccgagcggcgugugcucgaagaagaacucaccguucaucucucagucccgggugauaccauucuuauuaacaacagacccggcccuagagaaccaccuccauaccaagaaccacgaccucgggggaacccgccucauucagcgccauguguaccuaacgguagugcuuacagcggagauuauauggaacccgagaaaccaggggccccuuugcucccaccuccaccccagaacagcguuccucauuaugcagaggcagauauagugacacuucaaggugugacuggcggaaacacauaugccgugcccgccuuaccacccggcgcaguaggagacggcccuccaaggguggauuucccucgcuccagacucagguucaaggaaaaguugggugagggucaguucggcgaaguccaucuuugugaagucgacuccccucaggaccuugucuccuuggacuucccucugaaugugaggaaagggcacccacuccucguagcagucaaaauucucagacccgacgccacuaaaaaugcacggaaugacuuuuugaaagaagugaaaauuaugucaagacucaaagacccaaacaucauuagacuucugggagugugcguccaggaugacccccugugcaugaucacagauuacauggagaauggagacuugaaucaguuucuguccgcccaucagcuggaagacaaagccgcagaaggagcgcccggagauggacaggcagcgcagggcccaacgaucucuuaccccaugcuuuugcacguggcugcucagauugccagcggcaugcguuaucucgcaacccucaacuucgugcacagagaccuugcuacuaggaauugucuagugggggaaaauuuuacuaucaaaaucgcagacuuuggaaugucaaggaaccuguacgccggugauuacuaucgaguucaaggaagagccguucuuccaauuagguggauggcuugggaauguauccucaugggcaaguucacuaccgcuagugacgugugggcguucgggguuacucucugggagguucucauguugugucgggcccagccauuuggccaacuuacagacgaacaagugaucgagaacgcuggggaauucuuccgagaucagggcaggcagguuuacuuaucucggccccccgcauguccccagggauuguacgaacugaugcugagaugcuggucaagagaauccgaacagcgaccccccuuuucccagcuacauagguuucuggcagaggaugcauugaauaccguguag

SEQ ID NO: 80163 - RNA, 2631 nt, Artificial Sequence
  derived and/or modified sequence
augggacccgaagcacugucuucccuccuacugcuuuuguuaguagcuuccggcgacgcagacaugaagggucauuucgacccagccaaaugcagguacgccuugggcaugcaggaucgcacgaucccagauagcgacauuucagcaaguagcagcuggucugauuccacagccgcccgacacucgagacuggagucgucagacggcgauggagcuuggugcccagcuggauccguguuuccaaaagaggaagaguaccuucaagucgaccugcaacgauugcaccugguggcucucguugggacccaaggcagacaugcuggcggacuagguaaggaauuuucacgaaguuauagacugagguauagucgggauggcagacgguggaugggauggaaagaucgguggggccaggaagugaucuccgguaacgaagacccugaaggaguggucuugaaggaccugggcccaccuaugguggcccggcuugucagauucuauccaagagcggacagggugaugagcgugugccuacgagucgagcucuauggcugucuuuggcgagacggacuucuaagcuauacugcgccugucggacagaccauguaucuaucggaggcaguuuaucucaacgauaguacauaugauggucauaccguggguggauugcaauacggcgguuugggacaguuggccgacggcgugguaggucuagaugacuucagaaaaagccaagaguuacgcguuuggcccggcuaugauuauguugguuggucaaaucacagcuucucaucaggguacguggagauggaguucgaguuugauaggcuccgcgcuuuccaggccaugcaggugcacugcaauaacaugcauacucuuggggcccgacugccagggggcguggaaugcagguuuagacgcggucccgccauggccugggagggcgaaccuaugcggcauaaccugggcggcaauuugggcgauccucgggcccgggcuguaagugugccccuaggaggacguguggcucgguuucugcagugccgguuucuuuuugcuggcccuuggcuccucuucuccgaaaucucuuucaucuccgaugucgucaauaacuccuccccagcccucggagguacguuuccacccgcaccuugguggccccccggcccaccccccacaaacuucaguaguuuggaacucgaaccgagaggccaacagccuguagcaaaggccgagggcaguccuacagcuauucugaucgggugucuuguugccaucaucuugcucuugcugcugauuauugcuuugaugcucuggcgccugcacuggaggagacuucugagcaaagcagaaaggagagugcucgaggaggaauugaccgugcaccucagugugccaggugacacuauccugauaaacaaccguccuggccccagagagcccccgcccuaccaggaaccacgaccuagaggcaacccaccccacuccgcaccauguguccccaauggcucugcguacucuggcgacuauauggaaccugagaagcccggcgccccuuuguuaccccccccaccacagaauucugucccgcauuacgcagaggccgacauugugacccuucagggaguuaccggugggaacaccuaugccguaccagccuuaccaccaggagccguuggggacgggccgccucguguggacuuccccagaagccgacugcguuucaaagaaaaacuuggcgaaggacaguuuggcgaagugcaucuuugugaaguugauagcccgcaagaccuggugagccuugacuucccccuuaacguucggaaaggucacccucuccuggucgccgugaaaauuuuacgccccgaugccacaaaaaacgccagaaacgauuuccuaaaagaagugaaaauaauguccagacugaaagaccccaauaucauccgauuguugggugugugugugcaggaugacccuuuguguaugauuaccgauuauauggagaauggcgaucugaaucaguuucuuuccgcccaucagcuggaggacaaagcggccgaaggagccccgggagaugggcaagcugcucagggcccaacaauuucauauccgaugcuacugcauguagcggcccaaauugccucuggcaugagguaucuagcaacacugaacuucguucaucgggaucuggccaccagaaauugucucgugggugagaacuucacuaucaaaaucgcagacuucggaauguccagaaacuuauaugcaggagauuacuacagagugcaaggaagagcgguucugccgauaagauggauggcaugggaguguauacucaugggaaaauuuacuacugcuagcgacgugugggcuuuuggaguuacccugugggagguauuaaugcucugucgcgcucagccuuuugggcagcucaccgacgagcaaguuaucgagaacgcuggagaauuuuuuagagaccagggcagacaggucuauuuaucacguccacccgccuguccucagggccuguacgagcucaugcuccgcuguuggucgagggaaagcgaacagaggccaccauuuucccaacugcacagauuccucgccgaggacgcgcugaacacuguuuag

SEQ ID NO: 80164 - RNA, 2631 nt, Artificial Sequence
  derived and/or modified sequence
augggaccugaggcccucaguucucuccugcugcuucugcugguugccucaggugacgccgauaugaaaggccauuuugaucccgccaaauguagguacgcauuggggaugcaagaccgaacaaucccugauucugauauuucugccaguagcucuuggagugacagcacugcugcccgccacagucggcuggagucuucagauggugacggcgccuggugccccgcagguagcguguuuccaaaggaagaggaauaccugcaaguugaucugcagaggcuacaucuuguugcacucguggggacccagggacgucacgcaggcggacuaggaaaggaguuuucucgcagcuauaggcugcgguauaguagggacggcagacgauggaugggcuggaaagauaggugggggcaggaagugauuucggggaacgaggauccugaaggcguggugcuaaaagaucugggaccuccuaugguggcuagacugguucgguucuauccaagagccgaccgggugaugucagugugucuucgcguagagcuguauggaugucuguggagagauggguuacucucauauacagcuccugucggucagacgauguaucucucagaggcuguguacuugaacgacucaaccuacgacggccacaccguuggaggcuuacaauauggcggucugggacagcuggccgacggcguggucggacuugaugacuuuaggaagagccaggagcugcguguuuggcccggauacgauuacguaggauggagcaaccauucauucagcaguggcuauguugagauggaauuugaguucgaucgucuuagagcauuucaagcgaugcagguccacuguaauaacaugcauacccuuggcgcgcgcuuaccaggagggguugaaugucgauuuagacgcgguccugcaauggccugggaaggugagccaaugcggcauaauuugggggguaacuugggcgacccucgggcucgcgcaguaagcguuccgcuggguggcaggguagcccgguucuugcagugcagguuccuguuugcuggucccuggcuccuauucagugaaaucucuuucaucucagauguggucaauaacucuagccccgcucuugguggcacauuuccuccagcuccaugguggcccccgggcccccccccuacuaacuucucauccuuagagcucgaaccucgcgggcagcagccaguggcaaaggccgaaggcagccccacagcgauucuaaucggaugucuggucgcaaucauccuccugcuucuccuuaucauugcccucauguuauggagacuccacuggcgaaggcuacuguccaaggcagagcgaagaguccuugaagaagaacuaacaguacaccugagcgugcccggugauacuauacucauaaacaaccgcccuggcccccgggaaccccccccuuaccaagaaccgcgcccucggggaaauccuccacacagcgcuccgugcgugccuaacggcucugcuuauucaggcgacuacauggaacccgaaaagccaggcgccccccuccuacccccaccaccgcaaaacucugucccccacuacgccgaggccgacauugugacguuacagggugugaccggaggcaauaccuaugccguuccagccuugccaccaggggccgugggagacgggccacccaggguggacuuuccucgcucuagacugcgcuuuaaggagaagcugggagaaggucaauucggagaaguccaccucugcgaaguggacagcccucaggaucuggucagucuggauuuuccccucaacgugagaaagggccacccacugcuggucgcuguaaaaauacugcgcccugaugcuacaaaaaacgcccggaacgacuuccugaaagaaguaaagaucaugucccgccugaaagacccaaauaucauccgacucuuaggcguguguguccaggacgacccuuuaugcaugaucacagauuauauggaaaacggcgacuugaaccaguuuuuguccgcacaucaguuagaagauaaggcugcugaaggcgcccccggcgauggacaggcugcacaagggccuacuauaucguauccuauguuacuacacguggccgcucagaucgccuccggaaugcgguaucuggcuaccuugaauuuuguucaucgggaccuggcaacucggaacugccuuguuggagaaaauuuuacuauaaaaauugcugacuucgggaugucacggaaccucuacgcuggagauuacuauagaguucagggccgcgcaguccugcccauucgcuggauggcuugggagugcauucugaugggaaaguuuacaacagcgucagacguuugggccuuuggcgugacacucugggagguguuaaugcuguguagagcccagccuuuuggccagcugacggaugagcaagucaucgaaaaugcuggagaauuuuuccgagaucaaggacgccagguauaucuaucaaggccgccagccuguccacagggacuguaugagcuuaugcuccgguguugguccagagagucugagcaacguccuccuuuuucccagcuacaccgcuuucucgccgaagacgcccuaaauaccguauag

SEQ ID NO: 80165 - RNA, 2631 nt, Artificial Sequence
  derived and/or modified sequence
auggggccggaagcuuuguccucucuacugcucuuacuacucguggcgucuggugaugccgacaugaagggacauuuugacccugcaaaauguagauaugcccugggaaugcaggaccgaacgauuccagacucugauaucucagcguccagcucuuggucugauuccacugccgcgcgacauagucgcuuggaaagcucagacggggacggcgcauggugccccgccggaucagucuuuccaaaggaggaagaguaucugcagguagaccuucaacgccuucauuuaguggccuuaguggggacucaaggaaggcacgcaggaggucuaggcaaggaauuuaguagaucauacagguugagguacucccgggauggucgacgauggauggguuggaaagaucgauggggccaggaagugauuuccggcaacgaggaucccgaagguguggugcugaaagauuugggacccccuauggucgcccgcuuagugagguucuacccacgagccgaucgggugaugucugucugcuugcgcguggaguuguauggauguuuauggcgggauggucuccuuucuuacacggcccccgugggacagacuauguacuugagcgaggcaguauaccugaacgauaguacauacgacggccauacaguaggcggacugcaauaugggggcuugggccaacuggcggauggcguagucggacuggacgacuuuagaaaaucccaggaacuccggguuuggccgggauacgauuacgugggauggagcaaucauuccuucaguucugguuacguugaaauggaauucgaguucgacagacucagagccuuccaagcgaugcaggugcacugcaauaacaugcacacacuuggggcaagacuaccaggcggcguggaauguagauuccgaagagguccggcaauggccugggaaggggaacccaugagacacaaucucggaggaaaucuuggggauccuagagcgcgggcugugagcgucccucugggcggccgcguggcacgcuuucugcagugucgguuuuuguucgcuggucccuggcuccuguuuagugaaauuucuuuuauaagugauguggugaacaauagcagcccugcucuuggcggcacauuuccuccugcacccugguggcccccagguccccccccuaccaacuuuucuagucuugagcuagagccgagaggucagcagccaguggcaaaggcagaaggaagccccacagccaucuuaaucgggugccucgucgccauuauuuuguugcuucuccugauuauugccuugaugcucuggcgccuacacuggaggaggcuucuguccaaagcugagcgacgcgugcuagaggaagaacucacagugcaucuuagcgugcccggcgacacaauccugaucaauaaucguccaggcccacgcgaaccaccgccguaccaggaaccccguccucgagggaacccaccucauagcgcuccaugcgugcccaauggcagugcuuacucaggggauuauauggagcccgaaaagccaggggccccccugcuuccgcccccgccucaaaacucagucccccauuaugcagaggccgauaucgugacauuacagggcgucaccggugggaauacguaugcggugcccgcguuaccuccgggggcagugggcgauggaccgccaagaguggacuuuccuaggucaagguugcgauucaaagagaagcucggagaaggucaauucggcgaagugcaccugugugaaguagauuccccccaggauuuggugagucucgauuucccacugaacgucaggaaggggcacccauuacugguugcugugaagauacugagaccugacgccacuaagaaugcucgcaaugacuuuuugaaagagguaaaaaucaugucuaggcuaaaagaccccaacaucauccgacuccucgguguguguguacaagaugauccccucugcaugauuaccgacuauauggaaaacggcgaccucaaccaauuucugagugcucaccagcuggaggauaaggcugcugagggggcaccaggggacggucaagcugcucaaggcccuacgaucagcuauccaaugcuuuuacacguugccgcccagauugcaaguggaaugagauaccuggcaacccuaaacuuugugcaccgcgacuuggcuaccagaaacugccuggugggagaaaacuuuaccaucaagaucgcugacuucgguaugucuaggaauuuguaugccggcgacuacuacagagugcaggguagggcuguccuuccgaucagauggauggccugggaguguauuuugaugggcaaauucaccacggcuagugacguaugggccuuuggcgucacguuaugggagguccugaugcuuugcagagcccagcccuuuggacaguuaaccgaugagcaaguaauagaaaaugcuggcgaguucuuucgagaccagggccggcagguguaucugagucggccgcccgccugcccucaaggccuguacgaguuaaugcugagauguuggucgagggaaucagagcaacgccccccuuucucccagcuccaucgcuuccucgcagaagacgcacugaauacaguguag

SEQ ID NO: 80166 - RNA, 2631 nt, Artificial Sequence
  derived and/or modified sequence
augggccccgaagcccugucuucuuugcucuugcucuuguugguugcgucaggcgaugcagauaugaaaggucauuucgauccagcuaagugcagauacgcccuggguaugcaagacagaacaauccccgacagcgauauaagugccucaaguucuuggucggauaguacugccgcaaggcacagccgguuagagucauccgacggcgauggugcauggugcccagccggcagcguguuuccaaaagaagaggaauaucuucaaguugaccugcagcgccugcaucuaguggcucuugucggaacucagggccgccaugcgggcggucucggaaaggaguuuaguagaucauauaggcugagauauagccgagaugggagaagauggaugggguggaaagaucgcuggggacaggaagugaucucuggcaaugaggauccagagggugucgugcuaaaagauuuaggcccgccuaugguagcaaggcugguccgauuuuacccuagggcugaucggguuaugagugucugcuugcggguggaacuguacgggugucuguggcgagauggacuguuguccuacacugcuccuguaggacagaccauguaccugucugaagcagucuaucucaaugacagcaccuacgacggccauacaguuggcggccugcaguacgggggacucggacaacuggcggacggcgucgucggacucgacgauuucaggaaaucucaagagcuuaggguguggccugguuacgacuacguuggcugguccaaucauuccuuuucuucuggcuacguggagauggaauuugaauuugacagacugcgcgcuuuccaagcgaugcaaguccauugcaauaacaugcacacgcucggagcuagacucccgggaggcguugaaugucguuuccgcaggggaccugcaauggcaugggagggugagcccaugcgucacaaccucggcgggaaccuuggagauccucgcgcccgcgccguuucaguuccacucggaggccguguugcucgauuucugcagugucgguuucucuucgccgggccuuggcugcuguucuccgagauauccuucauuucagauguggucaacaacucuucucccgcacucggaggcacauuccccccggccccaugguggccaccaggaccuccgcccacuaauuucucuucucuugagcuggagccuagaggccagcagcccgucgccaaggcugaaggaucucccaccgcaauauugauagggugcuugguggccauuauccugcuauugcuguugauuaucgcccuuauguuauggagacuucauuggcgccgacuguugagcaaagccgagcggcguguucucgaggaagagcugaccguccaccuguccgucccuggagacacaauucuaauuaacaacaggccuggcccccgcgaacccccacccuaccaggagccccgaccaagaggcaaucccccucacuccgccccuugcgugccaaauggcucagcauauucaggagacuacauggagccagaaaaacccggggcaccuuugcuaccaccacccccacagaauuccgugccgcauuacgccgaagcggauauaguuacucuacagggggucacaggcggaaacacuuaugcuguccccgcccucccccccggagcuguaggagaugggccgccacggguagauuucccuagaagcagacugagauucaaagaaaagcuaggugagggacaguuuggcgaggugcacuuaugugaaguugauucaccacaggaccuagugucucuggauuuuccacuuaauguuagaaaaggccauccccucuugguugccguuaagauucugagaccagacgcaaccaagaacgccaggaaugauuuucuaaaagaggugaaaauuaugagccggcucaaagacccaaauauaaucagacugcuuggcguuugcguacaggacgauccucuuugcaugaucacugacuacauggagaauggagauuugaaccaauuccucagugcccaccagcuggaagacaaagccgcugagggcgccccaggcgauggucaggccgcacaggguccaaccaucagcuacccaaugcugcugcacguggcugcccagaucgcaucuggaaugagguaucuggcgacccuuaacuuugugcaccgugaucuggcgacaagaaauugccuuguuggagagaacuuuacaauuaaaauugccgauuuuggaaugucucguaaucucuaugcuggggacuacuaccgaguucagggaagagcagugcugccuauuagauggauggcaugggaauguauucucauggggaaguucacaacagcgucugacguaugggcauuuggagucacacugugggaggugcugaugcucugccgugcgcaaccuuucggccaacugacugaugaacaagugaucgagaaugcaggggaauuuuuucgggaucaggggagacaggucuaucugagucggccucccgccuguccucagggccuuuacgaacucaugcuaagaugcuggagcagagaauccgagcaacggccuccauucucacagcuucauagguucuuagccgaagaugcuuugaacacugucuag

SEQ ID NO: 80167 - RNA, 2631 nt, Artificial Sequence
  derived and/or modified sequence
augggcccagaagcacucucaucccuauuacugcuguuguugguggccuccggagaugccgacaugaagggucacuuugauccugcuaaaugucgcuacgcucucgguaugcaggaccgaacuauuccggacucagauaucucagcgucaaguagcuggucagauagcacggcagcccgccauucccgccuggaaucuucugacggcgauggcgcuuggugcccugcaggcagcguguuccccaaagaggaagaauaucuacagguggaucuccagcgucuucaucuugucgcucugguugggacucagggcagacacgccggagggcugggcaaagaauucucacggaguuaccgccuaagguauagccgggauggcaggagauggaugggguggaaagacagauggggacaggaagugauaagcggcaacgaagacccagaaggugucguccugaaggacuuaggcccuccaaugguugcuagguuaguccgauuuuauccucgcgccgaccgcguuaugagcgugugucucagaguggagcuauaugguugcuuauggagagauggccucuuaucauauacugcucccgugggccagaccauguaucuaagugaggcaguuuaccuaaaugauaguacauacgauggucauaccgugggcggccuucaguacggaggcuugggccaacuggcagacgguguagugggucuggaugauuuccgaaaaagucaggagcugcgcguguggccuggauaugauuaugucggauggagcaaucacucauucagcagcggauacguggagauggaauuugaauuugacaggcuccgggcauuccaagcuaugcaagugcauugcaacaacaugcauacacugggcgcuaggcuaccagggggggucgaaugcagauuuagaagaggucccgcaauggcaugggaaggagaacccaugcgucauaacuuggggggcaaucugggcgauccacgcgcuagagccguuuccgugccgcugggcggacgcguugccagauuucuccaaugccgguuuuuguucgcgggcccauggcuacuguucagcgaaauuaguuucaucucagauguggucaauaacucuagcccagcccugggagguacauuucccccugccccuugguggccaccaggaccgccaccaaccaauuuuagcucuuuggaauuggagccccgcggccagcagccuguugcaaaagcggaaggauccccuaccgccauacugaucggcugccugguagccaucauccuccugcugcugcugauaauagcacuuaugcucuggcgauugcauuggcgcagauugcuaucuaaagcugaaaggcgaguacuagaagaggagcugaccgugcaccuguccgugcccggagacacaauccugaucaauaauagaccuggcccaagagaaccuccccccuaccaagagccucgcccuagagguaauccgccccacucugcacccuguguuccgaaugguuccgccuauagcggggauuauauggaaccugagaagccaggagccccucuccugccccccccaccucagaacuccguuccccauuaugcugaagcugauaucgugacccuucagggggugacuggcgggaauacuuaugccguaccagcucugcccccaggcgccguuggagauggaccuccaagaguggauuucccgaggucuagauugagauuuaaagagaaacucggagagggacaguuuggcgaagugcaucugugugaaguugacaguccccaggacuuggucucucucgacuucccucuuaacguacggaaaggucauccacugcuuguagccguuaagauucugcguccagacgccacaaaaaaugccaggaaugacuuccuaaaggagguaaaaaucaugucuaggcugaaggacccaaacaucaucagacugcugggagugugugugcaagacgacccucugugcaugauuaccgauuacauggaaaacggcgaccugaaucaauuucugucagcacaccaacucgaagauaaagccgccgaaggugcuccaggcgacggccaggccgcucagggccccacuauuucuuacccuaugcuuuuacauguggcagcccaaaucgcaagcggcaugcgcuacuuggcaacccucaacuuuguacaccgagauuuagcuacucgcaacugucuggucggggaaaauuuuaccaucaaaauugcagauuuuggaauguccagaaaccucuaugcuggcgacuacuaccgaguccagggccgcgcaguuuuacccauccgguggauggccugggaauguauacugaugggcaaauuuacgaccgcaucugaugucugggccuucgguguaacuuugugggagguccugaugcugugucgcgcccagccuuuuggccaauugaccgaugaacaggugauagagaaugccggcgaauuuuuuagagaucagggaaggcagguauacuugucucggcccccagccuguccccagggcuuguacgaguuaaugcuucgauguuggagucgcgaaagugaacagagaccgcccuuuucacaguugcaucgguuucuugcugaggaugcccuuaauaccgucuag

SEQ ID NO: 80168 - RNA, 2631 nt, Artificial Sequence
  derived and/or modified sequence
auggggccugaggcccugaguucucugcugcugcuucucuugguugcaucaggagaugcugauaugaaaggccauuucgacccugcuaaauguagauaugcccucggaaugcaagaccguacgauucccgauucugauauuucugcuucuagcucaugguccgacaguacagcggcgcgacacucccgacuugagucuuccgauggcgacggcgcguggugcccugcagggucgguguuuccuaaggaagaagaguaccugcagguugaccuccaaagacuccaucugguggcgcuggucggcacccaaggcagacacgcugggggucugggaaaggaauuuucccgaagcuauagacugagauacagcagagacgggagacgcuggaugggguggaaagacagauggggucaggaggugauuagcgguaacgaggauccugagggugucgugcucaaagaucucggcccaccaaugguggcaagacucguucgguucuauccaagagccgaucgcguaaugagcguguguuugcgaguggagcucuacggaugucucuggagggaugguuugcugaguuacacugcucccguuggacaaacuauguacuuguccgaggcaguguaucucaacgauaguacuuacgacggucacacgguaggaggucugcaguacggaggauugggacaguuggccgauggcguggugggucuggaugauuuuagaaaaucucaagaacugcggguuuggccuggguacgauuaugugggcugguccaaccauagcuucucuaguggguacguggaaauggaguuugaguuugacagacucagagcauuucaggcuaugcagguacauuguaauaauaugcauacacuaggggcccgguuaccuggaggcguggaaugcagauucaggcggggacccgcaauggccugggaaggagagcccaugaggcauaaucugggaggaaaucugggugauccacgcgcuagggccgugucaguccccuugggaggccgcguggccagauuccugcaguguagauuccuauucgccggcccuuggcuucuuuucagugaaauuucuuucaucuccgaugucgucaauaacucaaguccugcucucggaggcaccuuuccccccgccccuugguggccgccagggccccccccuacuaacuucucuucucuggaacuggaaccacggggacaacagccaguugcuaaagccgaaggaucacccaccgcuauucuuauugguugccuugucgcaauuauucuacuucuccuccuaauuaucgcacugaugcuuuggcggcugcacuggcgucggcugcugagcaaggcugagcgacgugugcuagaagaggaacugacugugcaucugucagugccaggagacacaauuuugaucaauaauagacccgggccaagagaaccuccacccuaucaggaaccaagacccagggguaaucccccucacagcgcgccuuguguuccuaacgggucagcauacuccggagacuacauggaaccugagaagccaggagcccccuugcugccuccuccuccccaaaacucagugccucauuaugccgaagccgauauuguaacccugcagggcgucaccgguggaaacacauacgccguccccgcucuaccaccgggcgccguaggcgauggacccccgagagucgauuucccucguucacgacugcguuucaaagagaagcugggagagggccaguuuggcgaaguacauuugugcgaaguggauuccccccaggaccugguuagccucgauuuuccacuaaaugugcggaaggggcacccacugcuggucgcugugaagauucucagaccagaugcuacaaaaaaugcccggaacgauuuucugaaagaggucaagauaaugagccgccugaaagacccaaacauaauuaggcuucuuggcgugugcguucaggacgacccccuguguaugaucacagacuacauggaaaacggagaccugaaccaguuucuaucagcucaccagcuagaggacaaggcagcugaaggagcaccuggcgauggacaggcagcccagggcccuaccauuagcuacccuaugcuucugcauguagcagcucagauagcaagugguaugagauacuuagcaacguugaacuucgugcaccgagaccuggcuacaagaaacugucuggugggagagaauuucaccauuaagauagcugacuucggaaugucaaggaaucuguacgcaggagacuacuaccgagugcagggcagggcuguacugccaauuagauggauggcuugggagugcauucuuaugggcaaguuuaccacagcaagcgaugugugggcuuucggcgugacucugugggaggugcucaugcuuugcagagcucaaccauucggucagcugacggaugagcaaguuaucgaaaacgcuggcgaguucuucagggaucagggccgccaagucuaccucucccggccaccugccuguccacagggacuauacgagcugaugcuccguuguuggucucgagaauccgaacagcgcccacccuucucucaacuucaucgcuuucuggcugaagaugccuuaaauaccguguag

SEQ ID NO: 80169 - RNA, 2631 nt, Artificial Sequence
  derived and/or modified sequence
augggcccugaggcucugagcagcuugcugcugcugcuucugguugcuucuggagacgccgauaugaaagggcauuucgacccugccaaaugccguuaugcacuagguaugcaagacagaaccauuccagacuccgacauuagcgcaaguucuagcuggucugacagcacugcugcccggcacagccgccucgaauccagcgauggggauggggccuggugucccgcuggaucaguuuuccccaaagaagaagaauaccugcaaguugaccuacagcgccuccaucucguggcacuggucggcacacaagguaggcaugccggcggacugggcaaggaauucagccggucuuaucgacuuagguacuccagagaugggagaagauggauggguuggaaagacagauggggacaggagguuauuucugggaacgaagaucccgagggugugguauugaaggaccuggggccuccaaugguugcuaggcugguucguuucuacccgagggcggauagggugaugagugugugcuuaagggucgaacuguacggaugccuuuggcgcgauggucuccugagcuauaccgcuccagugggacagacaauguaccuaagcgaggcuguuuaccugaaugauagcacuuacgauggccauacagugggaggacuccaguauggcggacuaggccaacucgcugacggugucguaggacuugaugauuuucggaaaucucaggagcugcguguuuggccaggcuaugacuaugugggauggaguaaucacaguuuuucuagcggcuaugucgagauggaguucgaauucgacagacuuagggcuuuucaggcuaugcaggugcacuguaauaauaugcacacacugggcgcaagauugccagggggagucgaaugccgguuccgaaggggcccagccauggcuugggaaggugagccaaugagacauaaucuuggcggcaaucugggagacccgagggccagagcagugagcguuccacuuggaggaagagucgccagguuucuucagugccgauuucuguuugcaggcccauggcuccuuuuuagugagaucuccuucauauccgacgucgugaauaauucgucccccgcccucggagggaccuuuccaccugccccaugguggccaccaggcccuccaccaacaaauuucagcaguuuagaacuugaaccucgaggacagcagcccguugcaaaagcugaggguucccccaccgcuauacugaucgguugucucguugcaauaauccuucugcuacuacucaucauugcccugaugcucuggcgacuucacuggcggcggcuguugaguaaagcugagagacgagugcuugaggaagaacugaccgugcaccuguccguucccggcgauaccauacuuauuaacaaccggccugggccucgcgagcccccacccuaccaggaaccuagacccaggggaaauccuccacacucugcacccugcguacccaacggaucugccuauucuggagacuauauggaaccagagaaacccggugccccguugcuucccccuccuccgcagaauagcgugccccacuaugcugaagccgauauagugacucugcaaggcgucaccggcgguaacacguacgccgugccagcucucccucccggugcagugggggauggacccccuaggguugacuuuccucguagcaggcugcgguuuaaggagaaacuaggugagggccaauuuggagaagugcacuuaugugaagucgacuccccucaggaccucguuucccucgauuucccguugaaugugaggaaaggccauccucugcucguugccgucaagauuuuacgcccagacgccaccaaaaaugcucguaaugacuuccugaaagaggugaaaauuaugucccggcucaaagaccccaacaucauccgacuguuggggguuuguguacaagacgacccacucuguaugaucacugauuacauggagaauggcgaccuuaaccaguuuuuaucagcgcaccaacuugaagauaaagccgccgaaggggcaccaggggacggucaggcugcccaaggccccacuauaucguauccuaugcugcuccacgucgccgcacagaucgcgucaggaaugagguaccuugccacccucaacuuuguacauagagacuuggcaacgcggaauugccuggugggggagaacuuuacaauuaaaaucgccgauuucggaaugagcagaaaccuguaugcuggagacuauuaccggguucaggggagagccgugcugcccauuagguggauggcuugggaguguaucuuaauggggaaauuuaccacagcaagcgacgucugggcuuucggagugacccugugggagguuuuaaugcugugucgggcccagccuuuuggccagcugaccgacgaacagguuauugagaaugcgggagaguuuuuccgggaucaaggucgccaaguguaucugagucgcccccccgcuugcccacagggacuuuaugagcuuaugcugagauguuggaguagagaaagcgagcagagaccaccuuuuagucagcuccacagguucuuagcagaagacgcauugaauacaguuuag

SEQ ID NO: 80170 - RNA, 2631 nt, Artificial Sequence
  derived and/or modified sequence
augggucccgaggcucuuagcagucuacugcugcugcugcucguagcaucaggugaugccgacaugaaagggcauuuugaucccgccaaaugccguuacgcacugggcaugcaggaccgcacuauucccgacagugauauuagcgcuucaagcucauggucagauagcacagccgcccggcauucaagacuggagucaucugauggagacggggccuggugccccgccgguucagucuuuccuaaggaggaagaauauuugcagguagaucuccagcgccuccacuuggucgcuuuaguagggacacagggaagacaugcaggaggccuuggcaaggaguucucccguuccuaucgcuuaagauacagucgagauggucgcagauggaugggauggaaggaucgcuggggucaagaaguaauuucuggcaacgaggacccagaaggaguuguguugaaagaccugggcccccccaugguugcuagacuggugcgguuuuauccgagggcugaucgcgugaugucaguuugccugcgcguggaacucuaugguugccuuuggcgcgacggacuccugaguuacaccgcuccugugggucagacaauguaucucagcgaagcuguauacuuaaaugauaguacuuacgacggccacacagucggcggcuugcaguauggcggcuugggacagcuggcggacggaguaguaggucuggaugauuuucggaaaucacaagagcuccgcguguggcccggcuacgauuauguaggcuggucuaaucauuccuucagcucugguuacguugagauggaauuugaguuugaucgacuccgcgcguuucaggcuaugcagguccauugcaacaauaugcacacacugggugcucgucuuccuggagguguagaauguagguuuaggcggggccccgcaauggccugggagggugagccuaugaggcacaaucucgggggaaauuugggagaucccagagcaagggcaguauccgugccucuaggagggcgggucgcccgguuucuacaaugucgauuccucuucgcaggccccuggcuccuguuuucugaaauuuccuuuauuagugaugucguuaacaauucuuccccagcucuuggagggacuuucccccccgcccccugguggccaccaggcccaccacccaccaauuucucuagccuugaguuagagcccagagggcagcagcccguggcuaaagcagaagggaguccuaccgcaauuuuaaucggguguuuagucgcuaucaucuugcugcuguuacucaucaucgcauuaauguuauggagacuccauuggagaagguuacugucuaaagccgagagacggguccucgaggaagagcucaccguucacuuaucaguuccaggagacacaauucuuaucaacaaccggccaggcccaagggagccaccaccuuaucaggagccaagaccacgggguaauccuccucauuccgcgcccugcgugccuaaugggagcgcuuauaguggcgacuacauggaaccugaaaagccaggagcaccacugcugccuccacccccccaaaacucugugccacauuacgccgaggccgacaucgugacacugcagggagugacaggugggaauaccuacgcgguuccagcucuacccccaggcgcaguuggcgauggaccaccgcgaguagacuucccucgaucccgccucagauucaaagaaaaguugggagaaggccaauucggagagguucacuuaugcgagguugacuccccacaggaccucgucucgcucgacuuuccauuaaaugugcguaaaggacaucccuugcuugucgccguuaaaauucugcgccccgacgcuaccaaaaacgcccggaacgacuuuuuaaaagaggugaaaauuaugagccgguugaaggaccccaauaucauacgccuacugggcguauguguccaagacgauccucuguguaugauuaccgacuacauggagaauggcgaccugaaccaguuucucagcgcucaccaguuagaagauaaggcggccgaaggagccccaggagauggacaggcugcccagggcccaacuauaaguuauccgaugcuccuucacguagcagcccaaauugcgagcgggaugcgcuauuuagcgacgcugaacuuuguacauagggauuuggcgacucgaaacugccuaguuggggagaauuuuacaauuaagauugcugacuucggaaugagcagaaaucucuaugcuggagacuauuacagggugcagggcagagcaguuuugccuauuagauggauggcaugggaauguauuuuaaugggcaaguuuacaaccgcuagugauguaugggcauuuggcgucacuuugugggaggugcugauguugugccgagcccagccuuuuggucagcuaacagaugagcagguaauugagaaugcaggagaguuuuuuagagaucaaggacgccaggucuauuuauccaggccacccgccugcccucaaggucuguacgaacugauguugagauguuggucacgggaauccgagcagcguccuccuuucucacagcuacaccgcuuucuugccgaggaugcacuaaauacuguguag

SEQ ID NO: 80171 - RNA, 2631 nt, Artificial Sequence
  derived and/or modified sequence
augggucccgaagcccuguccucgcuacugcugcugcuacuugucgccagcggagacgccgauaugaaggggcauuuugaccccgcaaagugucguuaugcacucggaaugcaggaccggacgauccccgauagcgacauaucagccuccucaucguggagcgacucaaccgccgccaggcacucgcgacucgaaaguucugauggagacggcgcaugguguccagccggcucggucuuucccaaagaagaggaauaucuccaaguggaccuccagcgcuuacaucucguugcacucgucgguacucagggaagacacgcagguggguuggggaaggaauuuucacgguccuacagacugagguauucucgggauggaagaagguggaugggcuggaaagaucgauggggccaggagguaaucagcggcaaugaggaccccgaagggguggugcuuaaggaucugggucccccaaugguggcuaggcucguaagauuuuacccucgggcugaccguguuaugagugucugccugcgagucgagcuuuacggaugucuauggagggacgggcuguuaagcuauacugcuccgguuggccagacaauguaucuuagugaggcaguguaccuaaaugauucaacauaugacgggcacacggucggaggauuacaauaugguggacugggucagcuggccgacgguguuguugggcucgacgauuuuaggaagagccaagaacuaaggguguggccuggcuacgauuacgugggguggagcaaucauucuuucaguaguggcuacguggagauggaauuugaguucgauagguuaagggcauuccaagcgaugcagguacauugcaacaacaugcacacccugggugcacgacugccugggggcgucgagugucgcuuucggcguggaccagcaauggcaugggaaggagaaccaaugagacauaaccuuggcgguaacuuaggugacccaagagcucgugcaguuucaguuccucugggggggcggguggcucguuuccuacaaugucgauuuuuguuugccggcccaugguugcuuuuuucugagauuucuuuuaucucugacgucgugaauaacucuuccccagcucuggggggaaccuucccuccugcccccugguggccaccgggccccccaccaaccaauuuuaguagucuggaguuagagccccgaggccaacagccuguagccaaggcggaggggagcccuacggccauucugauuggaugucuugucgcaauuaucuuguuacuccugcuuauaauugcucugaugcucuggagacugcacuggcggcggcuuuugucgaaggcagagaggagagugcucgaagaggaacuuaccgugcacuuaucagucccuggagauacgauucucaucaacaacaggccaggaccacgagaaccaccaccuuaucaagaaccccgcccucgcgguaaucccccacacucagcgccuuguguccccaaugguagcgccuauucaggagacuacauggaacccgaaaaaccaggcgcgccccugcucccacccccuccucagaacuccgucccacacuacgcugaggcugacaucgucacacuucagggcgugacaggaggcaacacauacgcagucccagcccucccuccgggcgccgucggggacggacccccuagagucgacuucccgcgcaguagacucagauuuaaagaaaaacucggagaaggccaguucggcgagguccacuuaugugaagucgauagcccacaagaccuggugucccuugacuucccacuuaacgucaggaaggggcauccucugcucguagccgugaaaauacugaggccagaugccaccaaaaacgcacguaacgauuuucugaaagaaguuaagauaaugucccgacuaaaggauccuaacaucauccgacugcugggggugugcguucaggacgauccucuuugcaugaucacugacuauauggaaaauggugacuugaaucaguucuugucugcccaccaacuggaggauaaagcugccgaaggggcaccuggagaugggcaagcagcacagggaccgacaauuaguuauccuaugcugcuucacguugccgcgcagaucgccucaggcaugcgcuacuuggcaacacucaauuuugugcaccgggaucuggcuacccggaauugucuagugggggaaaauuuuaccauuaagaucgcggacuucgguaugucaaggaaucuguacgccggagacuacuacagaguucagggacgagccguucuuccuauaagauggauggccugggaauguauacugaugggaaaguucacuacagccagcgacguaugggcauuugguguuacacugugggaaguucuaaugcuauguagagcucagccuuucgggcaguugaccgacgaacaagugaucgagaacgccggggaguucuuccgcgaccagggaagacagguguaccucucucguccacccgccugcccccagggucucuaugagcucaugcuacgcugcuggucaagagaauccgagcaacgaccccccuuuucccaguuacauagauuucucgccgaagacgcuuugaauacuguguag

SEQ ID NO: 80172 - RNA, 2631 nt, Artificial Sequence
  derived and/or modified sequence
augggacccgaggcacugucuuccuuacugcucuuauugcuuguagccucaggcgaugcggacaugaaaggacacuuugacccggccaagugccgguaugcgcuaggaaugcaagaucggaccauccccgauucagacaucucagcaagcucuucauggucagauaguacugcagcuaggcacucucguuuggagagcucugacggagacggcgcauggugcccggcaggaagcguguucccuaaggaggaggaauauuuacaaguggacuuacaaaggcugcaucuggucgcccugguuggaacucaggguagacacgcagggggcuuaggaaaagaguuuucucggucauauagacugcgcuauagcagagacggcagaagguggaugggcuggaaagaccgcugggggcaggaagugauuagcgguaaugaggaucccgaggguguggugcugaaggaccugggaccucccaugguggcaaggcugguucgguuuuauccaagggcugauagaguaaugagcgucugucuucguguagaguuguauggaugucuuuggcgcgacggacuguuaagcuauaccgcaccagugggucagacaauguaucuuuccgaggcgguauaccucaacgauucaaccuacgacggccauaccgugggaggcuuacaauacggcggacuggggcagcuggccgaugggguggugggauuggacgacuuuagaaaaagccaagaacuccgagucuggccuggcuacgauuauguugguuggagcaaucauucuuucucaaguggguauguugagauggaauucgaguucgacagauuaagggccuuccaggcuaugcaggugcacuguaauaauaugcauacucugggcgcccgccugccuggcggaguugagugcagguuuagacgaggcccagcaauggcuugggaaggcgagcccaugagacacaauuuaggggggaacuuaggggaucccagggcccgggccgugucagucccacuaggcgggcguguggccagauuccugcaguguagguuucuauuugccggaccauggcuucucuuuuccgaaaucucuuuuauuagugacguagugaacaauaguucuccggcccucgguggcacuuucccaccugccccgugguggccucccggcccaccaccaacgaacuuuuccucauuggaacuggagccccggggacagcagccuguggccaaggcugagggcaguccuaccgcuauccucaucgggugucuuguugccaucauauugcuuuuguugcugaucaucgcacuuaugcuguggagauugcacuggcgaagacuucugucuaaggccgaaagacguguucuggaagaagagcugacuguacaccuguccguacccggcgacaccauacugaucaacaaccguccuggaccuagagaaccaccccccuaccaggaaccaagaccuagagggaauccaccacacagcgcgccuuguguccccaaugguuccgccuauagcggcgauuauauggagccagagaagccaggcgccccucugcugcccccgcccccacagaacuccgucccucacuacgcugaggcagacauugugacacugcagggagugaccgggggaaacacauacgccgugccagcacucccccccggugcgguuggcgacggacccccucgcgucgauuuuccacgcucuaggcugagauuuaaagagaagcugggcgaaggccaauucggugaagugcaccucugugaaguugauucgccucaggauuuggucagucuggacuucccccuaaacgugcguaaaggucacccucuuuuagucgccgugaaaauucugaggcccgacgcaacgaaaaaugcuaggaaugauuuucuaaaagaggugaagaucaugucucgccuuaaagauccgaauauuaucagacugcugggggucugcguucaagaugauccguuguguaugauuacugacuauauggaaaauggggauuuaaaccaauuucugucugcccaccagcuggaggacaaagcugcagagggcgcuccgggagauggucaagcagcccagggaccgacuauaaguuacccaaugcuccuccauguugccgcacaaauugcuucggggaugagguaucuggcuacacuaaauuucguccaucgugaucuugccacacgcaauugccuagucggagaaaauuucacuauuaaaaucgcugauuucggcaugucuaggaaucuguaugccggggacuacuaucgagugcaaggccgagcgguccugccaauccguuggauggcgugggagugcauucucauggggaaguucacuaccgcaagcgaugugugggcuuucggcgucacccuuugggaagugcucauguugugucgcgcucaaccauuuggccaguugacugaugagcaagugaucgaaaacgccggagaguuuuuucgcgaucagggucggcaaguguaccucagucggccuccggccugcccucagggucucuacgaacugaugcucagauguuggucccgugagucagagcagagaccuccguucucccagcugcacagauuucucgcagaggaugcauuaaacaccguguag

SEQ ID NO: 80173 - RNA, 2631 nt, Artificial Sequence
  derived and/or modified sequence
augggcccggaggccuuaagcucucugcuucuccuuuuacucguugcgucuggggaugcugacaugaaaggccauuuugaccccgcuaaaugcagauaugcucugggcaugcaggaccggaccauucccgacucugacauaagcgcuucaaguucuuggucugauuccaccgcugcucggcauuccagacuggagagcucggacggagauggcgccuggugcccggcugguagcguguuuccaaaggaagaagaguaccuucaggucgaccuucagcgacugcacuuaguggcacucguagggacucaggggagacacgccgggggguugggcaaagaguucagucgcaguuacaggcugagauauucucgcgacgguagaagauggaugggauggaaggacagauggggccaggaggucauuucaggaaacgaagacccagagggaguggugcuuaaggauuugggcccaccaaugguggcuagauuggugagauucuacccaagggcagaccgcgugaugagugugugccucagaguggaacucuacgguugccuuuggagggacgggcuguuaagcuacacagccccggugggacagaccauguaccuaucagaagccguguaccucaacgacuccacauaugaugggcacaccguuggaggucugcaauauggagguuugggacaguuggcugacggagucguaggacuggaugacuucagaaagucucaggaguuacguguuuggccaggcuacgacuacguuggguggagcaaccacucauucucuaguggauaugucgaaauggaguuugaguucgaccgacucagggcguuucaggcuaugcagguucauuguaacaauaugcacacgcuaggcgcccgccuaccuggagggguugagugccgguuccgacgagggcccgcuauggcuugggagggggaaccuaugaggcacaauuuggguggcaaccucggcgaucccagagcgagggcaguuagcgugccucuaggaggcagaguggcuagguuccuacagugucguuuccuguuugcugguccaugguugcuuuuuuccgaaaucucuuuuauuuccgacgucguaaacaauucuucaccagcucuaggagggacuuuuccuccagccccuugguggcccccaggcccgcccccuaccaacuucaguucacucgagcuggagccacgcggucagcagcccguggcuaaggcugaagguucacccacugccauucuuaucggaugccucgucgccaucauucugcugcuguuauugauuaucgccuuaaugcucuggaggcuccauuggcgccgauuauuauccaaggcugaacgccggguucuggaagaggaauuaacuguccaccuauccguuccuggcgacacgauucuaauaaauaaucgacccgguccccgagaaccacccccuuaucaggagccacguccgcgcggcaaccccccgcacuccgcucccuguguuccaaacgguagcgcguacagcggagacuacauggaaccggagaagcccggcgcaccuuugcucccgccccccccccaaaauucuguaccccacuaugcugaagccgacauuguaacacugcaaggggugacuggcgguaacacguacgccgucccggcgcuaccgccuggcgcagugggagacggucccccucgcguggacuuuccccgcucccggcuucgcuuuaaggaaaaacuuggugaaggccaguucggagaaguucauuuaugugaagucgauucgccacaagaccugguaucgcucgacuuuccacucaaugugaggaaaggccacccccuccucgucgcagugaagauucuucgacccgaugcuacuaaaaaugcacggaacgauuuucuuaaagaagucaagaucaugucgagauugaaggauccuaacauuauccgccugcugggaguguguguccaggaugauccucuguguaugauuacugacuauauggaaaacggugacuugaaccaguuuuugucugcccaccaacuggaagauaaggcugccgagggagcuccaggcgauggacaggccgcucaggggccaacaauuaguuaccccaugcuucuucacguggcggcccaaaucgcuaguggaaugagauacuuagccacccucaauuucguccauagggaccuggcuacucgcaacugccucgugggagagaauuucacaauuaagaucgcugauuucggaaugagucggaaccuguaugcgggagauuacuauagggugcaaggcagagcagugcugccgauuagguggauggcaugggaguguaucuugaugggcaaguuuacaacagcgucugaugucugggccuucggcgugacacucugggagguacugaugcuuugccgcgcccagccuuucggucaacugacggacgagcaggucauugagaacgccggugaauuuuuuagagaccaagguagacaaguguaucucucgaggcccccagccugcccucagggucuguacgaacugaugcuccgaugcuggucgagagagagugaacagaggccuccguuuucucagcugcauagguucuuagccgaggacgcacuuaauacuguguag

SEQ ID NO: 80174 - RNA, 2631 nt, Artificial Sequence
  derived and/or modified sequence
augggacccgaggcucugucuucacuccugcuguugcuccucguugccuccggggacgcugauaugaaaggacacuucgauccagcuaaaugccguuaugcccuggggaugcaagaccggacuaucccugauucugauauaagcgccuccucuagcuggucugacucuaccgcagcuaggcauucucgacuugaauccagcgauggggauggcgcauggugccccgcagguucuguauuccccaaagaagaagaauaucuccaagucgacuuacagaggcugcaccugguagcucucguagggacacaaggccggcaugcgggagggcugggaaaggaauuuaguagaagcuaccgccugcgcuauagucgcgauggccgcagauggaugggcuggaaggauagauggggacaggaagugaucagcgguaaugaagaucccgaaggaguaguauugaaggaucuggguccccccaugguggcuaggcuaguccguuuuuauccucgggccgaucggguuaugaguguuugcuuacgcguugagcuauauggcugccuuuggcgagacgggcuguugagcuacacugcgcccgugggucagaccauguauuugucugaggcuguauaccugaacgauagcacauaugacgggcacacuguuggaggacuucaguauggcggacuggggcagcucgcugacggcguugugggucuggaugauuuucggaagucccaggagcuucgggucuggccuggauaugacuacguuggcuggucuaaccacucauucuccucaggauacguggaaauggaauuugaguucgaucgcuugagggcauuucaggcuaugcaggugcauuguaauaauaugcauacacuuggagcccgcuuaccagguggggucgagugucgauuucggcgcggacccgccauggccugggagggggaaccuaugagacacaaucugggcgguaaccugggcgacccuagagcucgagccguauccgugccccugggcggccgcgucgccagauuccugcagugccgcuucuuauucgcugggccguggcugcuuuuuucugagaucucguucaucagugacguaguuaauaacagcucacccgcguugggcggaaccuucccccccgcuccaugguggccuccaggcccaccaccaacuaacuucucuagccuugaacucgagcccagaggccagcagcccguugcaaaggccgaagggucuccuacagccauccugauagguugucucgucgccauuauccugcugcugcuguugaucauagcucugauguuguggagauugcauuggcggagacucuuguccaaggcggagcgaagaguccuggaggaggaacuuacaguacaccugucaguccccggcgauacuauucuuaucaacaauagaccugguccccgagagccccccccauaucaagagccccgcccacgcggcaaccccccccauucggccccuugcguccccaauggcagugccuacucaggagacuauauggaaccugaaaaacccggagccccacuccugccuccaccaccacagaacagcgugccgcauuaugcugaagcagauauugugacccuccaaggagugaccggcggaaacacuuaugcuguaccagcgcugcccccaggagcggugggugacgggccccccaggguugacuuuccaagguccaggcuacgguucaaggaaaaauugggagaagggcaguucggugaagugcaucuaugcgagguggacucgccccaagaccuugugucccucgauuucccgcuuaacguccgaaaaggccacccucuuuugguugcagugaagauccuccgcccugaugccacuaagaacgcacgcaacgacuuccugaaagaagugaaaaucaugagccgacuuaaagaccccaauauuauaagacugcuuggcguuugugugcaggacgauccacugugcaugauuacugauuacauggagaauggagaccuaaaccaguuccugucugcacaucaacuggaagacaaagccgccgaaggagcgccuggggauggacaagccgcgcagggccccacuauaaguuacccaauguugcuccauguugccgcacagaucgcauccggaaugcgguaucucgcuacgcucaacuucgugcaccgagaucuugccacacguaacugucucguuggcgaaaauuucacgaucaagauugccgacuuugggaugucacggaaccucuaugccggugacuauuacaggguacagggacgagccguauuaccaaucagauggauggcuugggagugcauccucaugggcaaguucaccaccgccucugacguuugggccuuuggcgugaccuuaugggagguguugauguuguguagagcccaacccuucggccaacuuacagacgaacaagugauugagaaugccggagaguuuuuucgggaucaaggucgacagguguauuugagucggccaccagccugcccgcaggggcuguaugaacuuaugcuccgguguuggucccgugagucagagcagagaccaccauucagccaauuacacagauuccucgccgaggacgcuuuaaauaccguguag

SEQ ID NO: 80175 - RNA, 2631 nt, Artificial Sequence
  derived and/or modified sequence
auggggcccgaagcacuaucuucgcuccuccugcuucugcugguagccuccggugacgcggauaugaaggggcacuuugacccugccaagugucguuacgcucuggguaugcaagaccgcacuaucccugacucagacauuagcgcuucaucuaguuggucagauuccacggcugcucggcauucccgucucgaauccagugauggcgacggcgccugguguccagccggcucaguguuccccaaggaagaggaauaucugcagguggaccuccaaaggcuacaucugguugcucuggugggaacucagggacgucaugcgggggggcucgggaaggaauuuucuagaagcuauagacucagguacucucgugauggcagacgcuggaugggauggaaagaucgcugggggcaagaaguuauaucugguaaugaagaucccgaaggcguuguguugaaagauuuaggcccaccaaugguggcucgacuggugcguuuuuacccucgcgccgaucggguuauguccgucuguuuacgaguggaacuguauggcugccuguggagagauggcuugcugucauacacugcuccagugggacaaacaauguaucugagugaagcgguguaucucaaugauucaacauacgaugggcauacaguagggggcuuacaguacgguggccugggacagcuggcugacggaguaguaggauuggacgauuucagaaaaagucaggaacugagaguguggccuggcuacgacuaugugggauggucuaaccauagcuucaguucuggguauguggagauggaauuugaguuugaucgucugagagcauuucaggcaaugcagguucacuguaacaauaugcauacccugggagcacgccuccccggcgguguugagugucgauucagaagaggacccgccauggcaugggaaggcgaacccaugcgacacaaucugggcggcaauuugggagacccaagggccagagcaguaucugucccucuuggaggccggguugcuagguuccuucaaugucgcuuccuauucgcugggccauggcuccuguuuagcgagaucucguuuaucuccgauguggugaacaacaguagcccagcucuaggcgguaccuucccccccgcuccuugguggccuccgggccccccccccacaaacuucucauccuuagaacuggagccacgcggccagcaacccguggccaaggcugagggcucuccuacugccauccuuauuggaugucuggucgcaauuauucugcuguugcuucucaucaucgcccuuaugcuguggagacuacauuggcgcagacuguugucaaaagccgagagacgcguucuagaggaagaauuaacuguacauuuaagcgugccuggagacaccauucugauuaacaacagacccggucccagagagccaccacccuaccaggaaccaagaccaaggggcaaucccccccacucugcuccaugugucccuaacggauccgccuauuccggggauuacauggaaccagagaagcccggugccccacugcugccgccccccccccagaacucaguuccccauuacgcagaagccgauaucguuacccuccagggagugacugggggaaauacauacgcagugccggcucugccuccgggcgcaguaggggacggcccacccagaguagacuucccucggucucguuugagauucaaagaaaaacucggugaaggacaauucggcgaagugcaucucugugaaguagacagcccucaagaucuuguuucucuugacuuuccacugaauguucguaagggccauccccuccugguugccgugaagauucuuagaccugacgccaccaagaacgcacguaaugauuuuuugaaagaagugaaaaucaugagcagacugaaggaccccaauaucauccggcugcugggggucugugugcaggaugacccccucuguaugauuacugacuacauggagaacggcgaccuuaaucaguuuuugucagcccaccaacucgaggauaaagcagccgaaggugccccaggggauggacaggccgcucaaggucccaccaucuccuacccaaugcuucugcauguggccgcccaaauagcuucugggaugagauaccuggcuacuuugaauuuugugcauagggaccucgcaacuagaaauugccuggucggugaaaauuucacuauuaagauugcugauuucgguaugagcagaaacuuauacgccggugauuacuauagaguacagggacgugcgguucugccaauuagguggauggcgugggaauguauccucaugggaaaguuuaccacagcuuccgacgugugggcguucgguguuacucucugggaaguccugaugcuauguagagcccagcccuuuggacaacucacagaugaacagguuaucgaaaaugcuggcgaguucuuccgcgaucagggucgucagguguauuuaagccgaccccccgcaugcccccagggacuuuacgaguugaugcuaagguguuggucuagagaauccgaacagcgcccacccuuuucccaguuacaucgcuuucucgccgaggaugcucuuaacacuguguag

SEQ ID NO: 80176 - RNA, 2631 nt, Artificial Sequence
  derived and/or modified sequence
augggacccgaggcccuguccagcuugcuuuugcuccugcuuguggccucaggagacgccgauaugaagggccauuuugacccugccaaaugccgcuaugcauuaggaaugcaggacaggacuauccccgauucugacaucucagcgagcuccagcuggucugauucuacggcugcaagacacucucgccucgaauccucagacggagauggagccuggugcccugcuggcagcguauucccaaaggaagaagaauaccuucaaguggacuuacagcgcuugcaucucguggcacucguuggaacacaggggagacacgcgggggggcucgggaaggaauucucuagguccuauagacugagguacagcagagacggccggagauggaugggauggaaagaccgcuggggucaagaagugauuagugguaacgaagaucccgaggggguugugcucaaagaucucggcccaccuaugguggcuagacucguuagauuuuauccucgagccgauagagugaugucuguguguuuaagaguugagcuguauggaugucuuuggcgcgacggucuuuugaguuacacugcccccguuggucaaacgauguaccucucugaagcaguguaucugaacgauucuacguacgaugggcauacgguugggggccuacaguaugguggacugggacagcuugccgauggcgugguuggauuggaugauuuuagaaagucucaggagcuccgcguguggccugguuacgauuaugucgguuggagcaaucauucauuuucuuccggcuauguggagauggaguuugaauucgauagacuaagagcauuucaagcuaugcagguucauugcaacaauaugcacacacugggagcccgacugcccggggggguugaaugccgauuucgaagagggccagcuauggcuugggaaggggagcccaugagacauaaccugggaggaaauuugggggauccucgggcaagagcggucaguguuccucugggaggacggguggccagauuccuucagugcagauucuuauucgcagggccauggcuucuguuuagcgagauuucguuuaucuccgacguagucaacaacucaucaccggcacuggguggaacuuucccuccugccccaugguggccucccggaccuccacccacaaacuuuucaucucuggaacuagaaccuagggggcagcaaccugucgcaaaagccgagggcuccccuacugcaauucuuaucgguugcuugguagccaucauccuucugcucuuguugauaauugcccucauguuguggcggcuacauuggagacgguuguuaagcaaggcugagcguagaguccuugaggaggaacugacgguucauuugagcguacccggggauacaauucugaucaauaaccggccuggaccacgcgagcccccucccuaccaggaaccccggccccgcggaaauccaccccauuccgcgccaugcgugcccaacggaucagcuuacuccggagacuacauggagccagagaaaccaggcgcuccucuucugcccccaccuccucaaaauuccgugccacauuaugccgaggcugacauugucacauugcagggcguaacuggcgggaacacuuacgcagucccggcccugccaccuggugcagucggagaugguccuccccggguggauuucccucggagccggcuccgcuuuaaagaaaaacugggagagggucaguuuggagaaguacaccugugugaggucgacucuccccaagaucuugugucuuuggacuuuccacucaauguaagaaaagggcacccacugcuaguggcaguaaaaauccugaggccugacgcuacuaaaaacgcuaggaacgacuuucuaaaagaagugaagauaaugucaagacuuaaggacccaaacaucauuagauuacugggcguuuguguucaggaugauccucuauguaugaucacagacuacauggaaaauggcgaccugaaucaguuccucucugcgcaccaauuagaggacaaggcugccgaaggggcucccggagauggccaggccgcucagggaccaaccaucucuuauccuaugcuacuacacguagccgcacagauugccagcggaaugagauauuuagcaacacugaacuucguacaccgggaccuugccacucgaaauugcuuggugggagagaacuucacaaucaaaauagccgauuuuggaaugucccgaaaucuauacgcgggcgauuacuaucggguacagggaagagccgugcuaccgauuagauggauggcgugggaauguauucuaaugggaaaguuuacaacugcuagcgacgugugggccuucggggucacucugugggagguacugaugcuuugucgagcacagccauucggccagcugaccgacgagcaagucauugaaaaugcaggcgaauuuuuccgagaccaagguagacagguguacuugagcagacccccagcuugcccucagggccucuacgaauuaauguugagaugcugguccagagagucugaacaacgcccaccuuucucccaauugcacagauuuuuggcugaggacgcauugaauaccguauag

SEQ ID NO: 80177 - RNA, 2631 nt, Artificial Sequence
  derived and/or modified sequence
auggggcccgaggcgcucucaucucuuuuacuccugcuccuggucgccuccggugaugcugauaugaaaggacacuucgauccggccaaguguagauacgcccuggguaugcaagacagaacaaucccagacucugauauuagcgcaaguuccucuuggagcgacaguaccgccgcuagacauucuaggcucgaauccagugacggcgauggggcguggugccccgccggcagcguguucccuaaggaggaagaauaucuccaaguagaccuucaacggcuccaucuggucgcauuaguggguacacagggcagacaugccggaggccuggguaaggaauuuaguaggucuuaucgacuccgguacagcagagacggacgaagauggaugggauggaaagacagguggggccaggaggugaucagcgggaaugaggauccugagggcgugguguugaaggaucuggggccgcccaugguggcucggcuggugcgguucuauccgagagcugauagagucaugagugugugcuugagaguggaguuauauggauguuuguggagggacggacuucugucauacacagcuccuguugggcagacuauguaccuguccgaggcagucuaccuuaacgauucaacauaugacggacacacaguaggcggguuacaguacggagggcuuggccagcuugcagauggagugguaggacuugacgacuuucgcaaaagucaggaguugcgcguguggccagguuaugauuaugugggauggucaaaccacaguuuuucuagcggcuacgucgagauggaguuugaguuugauaggcuucgagccuuucaggcuaugcaagugcauuguaacaauaugcacacccugggagcaagauugccaggaggaguugagugucgcuuccgaagaggccccgcaauggcuugggagggugaacccaugagacauaaccuggguggcaauuugggagauccucgugcccgggcagucucugucccucugggcgguaggguggcacgcuucuuacagugucgguucuuguucgccggccccugguugcuguucucggagauuucauuuauaagcgacguggucaacaacagcuccccagcguugggcggaaccuuuccgccggcuccgugguggccuccaggacccccucccacaaacuuuagcagucuggaauuggaaccucggggucagcagccuguugccaaagccgaggguucacccaccgcuauccugaucggauguuugguugccaucauuuuacuguugcuuuugauuauugcccugaugcuauggagacuccauuggaggcgccuccucucgaaggcagaacgacgggugcuggaagaagagcugaccgugcacuuaaguguaccuggcgauacaauccuuauaaacaaccgcccugggccucgggagccucccccuuaccaagaaccaagaccuagaggcaauccuccacacucugcucccugcguacccaacggcucagccuacagcggagacuauauggaaccugagaaaccuggcgcaccccugcugcccccucccccccaaaacucgguaccacacuacgcggaagccgauaucgucacacuucaaggaguaacgggaggaaauaccuaugcuguacccgcuuugccacccggcgcugucggcgaugggccaccacggguugauuuuccaagguccaggcuuagguuuaaggaaaaauuaggcgaggggcaguuuggggagguccaucugugugagguugacaguccacaagaccuuguuucucuagacuuuccccugaacguuagaaaaggucauccgcuuuuggucgccgugaagauucuaaggccagacgcuaccaagaaugcccggaacgauuuccucaaagaagugaagaucaugucacgccuuaaagauccgaacauuaucagauugcugggcguaugugugcaggaugacccauugugcaugauuacugauuacauggaaaacggagaccugaaccaguuucugucagcgcaucagcucgaagauaaggccgcagagggggcaccuggagauggccaagcagcucaaggaccgacuaucucguauccgaugcugcugcacgucgcugcucaaauagccaguggaaugagguaccuggcuacacuaaauuuugugcacagggaucuggcgacgagaaauugucuggugggagaaaacuucacaauaaagaucgcugauuucgggaugucucgcaauuuauacgccggggauuauuaccgcguacagggccgugcuguucugccuauuagguggauggccugggaaugcauacuaaugggaaaguuuacuacugcaucagacgucugggcauuuggcguaacgcuaugggagguucuuauguugugucgcgcccagccauuuggucaacuuacagacgaacaggugaucgaaaacgcaggagaguuuuucagagaucaagguaggcaaguguaucuuaguaggccaccggccuguccucaaggacuauacgagcugaugcugcguuguuggucacgggaaucugagcagcgcccaccuuucagccaacugcaccgcuuccuugccgaagacgcucugaauaccguauag

SEQ ID NO: 80178 - RNA, 2631 nt, Artificial Sequence
  derived and/or modified sequence
auggguccugaagcccuaucuucccugcuccuucugcuucugguggcuaguggugacgccgacaugaaaggacauuuugauccagccaaauguagguaugcguuagguaugcaagacagaacuauacccgacuccgauaucucagcaucuucaucuuggagcgauaguaccgcugcccgccauagucgucucgagucaucugacggggauggugcuuggugccccgcggguucuguguuuccuaaggaggaagaauaucuccaaguggaucuucaacguuugcacuuaguggcacuuguugggacacagggcagacaugcugggggcuugggcaaagaauuuucuaggucuuauagguugagguauucuagagauggcaggcgguggaugggguggaaggaucgguggggacaggaagugaucagcgggaaugaggacccagaaggaguggugcuaaaggaccuaggacccccuaugguggcucggcucguuagauucuauccaagagcagauagagugaugucggugugccugcgcguugagcuguauggcuguuuauggcgggauggguugcucucguauaccgccccagugggucaaacuauguaucugagugaggcaguauaucuuaacgacagcacauaugauggucacacagucggcggccuucaauauggcgggcucggacagcuggccgacggaguggugggccuggaugacuuucguaaaucccaggagcuaagaguauggccgggauacgauuacgucggguggucuaaucauagcuucucguccggauaugucgaaauggaauuugaauucgaucgucugagagcuuuucaagcaaugcaaguccauugcaauaacaugcacacccuuggagcucgccucccaggcggagucgaguguagauucagacggggaccugcaauggcaugggagggggaaccaaugcgacauaaccucggcgguaaucugggcgauccacgggcucgcgcugugucuguuccgcucggcggacguguagcucgcuuucuucaaugcagguuccuauuugcuggcccuuggcuccuguuuagugaaauuaguuuuauauccgacgugguaaacaacagcagcccagcacugggcggcacguuuccuccagcuccuugguggccaccggggccuccccccacuaacuuuucuagccuggaacuggagccaagaggucagcaaccggucgccaaagcugaaggcagccccaccgcuauucuaauugggugccuggucgcuaucauacuacucuugcuucugauaauugcccugauguuguggagauugcauuggcgccggcuguugagcaaggcagaacggcggguucuggaggaagaacugacaguacaccucagugucccaggcgacaccauccuuaucaacaaucggccaggaccuagagagccacccccauaucaagaaccacguccucgaggaaaccccccacacucagcuccauguguucccaacggcucggccuauagcggagauuacauggaaccagagaagccaggugccccacuucuuccccccccaccccaaaacucaguaccccacuaugccgaagcggauaucgugacucuucagggugugacaggcggcaauaccuacgcugugccugccuugccuccuggugcaguaggugacggaccuccccgcguggauuuuccucgcucucgguugagguuuaaagagaaguuaggcgagggccaguucggcgagguucaucuuugcgaagucgacucaccccaagacuugguuucccucgacuuuccucugaacgugagaaaagggcauccccugcuuguggcuguaaagauacuaaggccugacgcaacaaagaacgccaggaaugauuucuuaaaagaggugaagaucaugucccgacugaaagacccaaauaucauccggcuccugggagugugugugcaggaugacccgcuguguaugaucaccgacuauauggaaaauggagaccucaaccaguuccuguccgcucaucaauuggaagauaaagccgcugagggcgcuccaggcgauggccaggcugcgcaaggucccaccauuuccuauccuauguuacuacaugucgcugcucagauugcuaguggcaugcgauaccuggcuacgcuuaacuuugugcacagagaucuagcgacgcguaacugccucgugggcgaaaacuucacuaucaaaauagccgauuuuggaaugucacgcaacuuauacgccggcgacuacuacagggugcaagggagagcaguccuuccaauuagguggauggcaugggaguguaucuuaauggggaaauuuacaacagccagcgauguuugggcuuuuggagucacacuuugggagguucuuaugcugugucgcgcucagccauucggacagcuuaccgacgaacaggucaucgagaaugcaggggaauuuuuuagagaucaaggcaggcaagucuaccuuucaagaccacccgcuugcccccaaggauuauacgaacucaugcuucgcuguuggucuagggagagcgaacagagaccgccauuuucccaacugcaccgguuucuggcugaagaugccuugaauacagucuag

SEQ ID NO: 80179 - RNA, 591 nt, Artificial Sequence
  derived and/or modified sequence
augccucauuuagccagcuuauuuacugccuccuccagaugcugcccgcauccacugagaccugaagguucaggggccaugggucccgaagcccugucaagucugcugcuguugcuccugguugccucuggugaugcagauaugaaaggccacuucgauccugcaaaaugucgauacgccuugggaaugcaagaccguaccauucccgacucagacauuuccgcguccagcucauggagugacucaacugccgcacggcacucucgauuagagucuucugauggagauggggccuggugcccagccggcagcguguuccccaaggaagaggaauaccuucaaguggaucuacagcgucugcaccugguggcccucguuggcacacagggacgccaugcagguggauugggcaaggaguuuucucggucauaccgucuaagauauucccgcgaugguagaagauggauggguuggaaggauagauggggacaggaagugaucagcggaaaugaggacccugaaggaguaguucugaaggauuugggaccaccuaugguagcucguuuggugcgcuucuaccccagggccuag

SEQ ID NO: 80180 - RNA, 2685 nt, Artificial Sequence
  derived and/or modified sequence
augucuuugccucgcugcuguccacauccacugcgaccggaaggaagcggugccaugggccccgaagcccucuccucccugcucuuauuacuccuugucgcauccggggacgcugacaugaaaggucauuuugaccccgccaagugccgauaugcccugggaaugcaggaucguaccaucccugacagcgacauuucagcuucuuccucauggagugauaguaccgccgccagacacagucgccucgagucuucugacggugauggggccuggugcccggcaggaucagucuuuccgaaagaagaggaauauuuacagguggaucuccaaagacugcaucugguugcacucguagggacccaaggacggcacgcagguggacuggguaaggaguucagcagguccuauaggcuucgcuacucaagggacggccgccgguggaugggcuggaaggauagguggggucaagaggugauaucugggaacgaagaucccgagggagucguauugaaggaccugggaccaccuaugguagcucgacugguacguuucuacccgagagcagauagagugaugucggucugccucagagucgaauuguauggcugucuguggagagacgggcugcugucauacaccgcaccuguggggcaaacaauguaccuaagcgaagccgucuacuugaacgauucaacauaugauggucauaccgugggaggucugcaauacggaggauuaggacaacuggcagauggcguggucggccuggacgauuuccggaaaucucaggagcugcgcguguggccggguuacgacuaugugggcuggagcaaccacagcuuuuccaguggcuauguggaaauggaauucgaauucgauaggcugagggcuuuccaggcaaugcagguacauugcaacaauaugcacacacugggcgcucggcucccuggaggcguggaaugcagauuuagacguggccccgcaauggcuugggaaggggaaccuaugagacauaaccugggagguaacuugggcgacccucgugccagggcugugucuguuccacuaggcggaaggguugcacgauuccugcagugccgcuucuuguucgccggacccuggcugcuguuuagcgaaauuaguuuuaucagcgaugugguuaauaacucaucaccagcuuugggagguacuuucccuccagcaccaugguggccaccagggccaccacccacuaacuuuuccucgcucgaauuggaaccccgaggucagcagccuguugcuaaagcugaaggaucaccuacugccaucuuaaucggcugccugguugccauuauccuguuguuacuguuaauuauugcucucauguuauggcggcugcauuggcggcgccuguuguccaaagcugagcgccggguccucgaagaagagcugaccguucaccugagcguuccaggagacacaauucucauuaauaaccgcccagguccccgagagccucccccguaucaggagccaaggccuagaggcaauccaccacauagcgcaccuugugugccuaauggaagugcguacuccggcgacuauauggagcccgagaagccuggcgcaccacugcugcccccuccuccccaaaauagugugccacauuaugcugaggcugacauugugacccuccaaggugugacggggggcaauacauacgccguaccugcuuugccgcccggugccguaggagauggaccgccacgaguggacuucccaagaagcaggcugagauuuaaagagaaacuuggugagggccaguuuggcgagguccaucugugcgaaguggauucaccucaggacuugguuucuuuggauuucccacugaacguuaggaaagggcacccacugcugguggcuguaaaaauucugagacccgaugcaacuaagaaugcucguaacgauuucuugaaagaaguuaagaucaugucucgauuaaaggacccuaauauuauucgacuucuuggcgucugcguucaggaugaccccuuaugcaugauaaccgacuacauggagaauggcgaucugaaccaauuucugagugcucaucagcuggaggacaaggcugcagagggggcaccaggcgauggucaggcagcucaaggaccuacuaucagcuauccgauguuguuacauguugcugcucagauagcgaguggaaugcgguauuuggcaacacugaacuucgugcaccgcgaucucgccacaagaaacugucucgucggagagaauuuuacuaucaaaauagccgauuucggaaugucuaggaaccuuuaugccggcgauuauuaucggguucaggggcgcgcuguccuuccaauccgguggauggccugggaaugcaucuuaauggguaaguuuaccacagccuccgacguaugggcuuuuggugugacacugugggaagucuugaugcuaugcagagcacaaccuuuuggccaauugacggaugaacaggugauugagaacgccggagaauuuuuuagagaucaggggcgccaggucuaucuuucccguccgcccgcaugcccacaagggcuguaugaacugaugcuccggugcuggucuagagaaagcgaacagagaccccccuucagccagcugcacagauuccuggccgaggacgcucugaacacgguuuag

SEQ ID NO: 80181 - RNA, 2685 nt, Artificial Sequence
  derived and/or modified sequence
augagucugccccgcuguuguccccauccgcuucgucccgaaggcaguggugcgaugggcccagaagcucucucaucuuugcuccuacucuugcucguggccucuggcgaugccgauaugaagggacauuucgauccggcuaaaugucgauacgcccucggcaugcaagauagaaccauccccgacucugacaucucugcuaguucauccugguccgacuccacugcugcucggcauuccaggcuggaauccucagauggcgacggcgcauggugucccgccgggaguguguuuccuaaagaggaagaguaccuucaggucgaucuucagcggcuccaucucguugcauuaguggguacucagggcagacacgcuggugggcuggguaaggaguuuagucgaagcuaucggcugagauauucacgugauggacggcgauggaugggauggaaggacaggugggggcaagaaguaauuucuggcaaugaagaccccgaaggaguuguacucaaggaccuagggccaccaaugguggcucggcuugugcgguuuuaccccagagccgaccgcguaaugagcgugugucuacgcguagaguuguauggcugccuuuggagagaugggcuacugagcuauacggcaccugucggccagacaauguaucuauccgaggcagucuaccucaacgauagcacuuaugauggucacacagugggaggcuugcaauacggcggacugggucagcuggcagaugguguaguggggcuggaugacuuuaggaagucacaagagcuaagaguguggccaggguacgacuacguugguuggaguaaccacaguuuuucaucuggauacguggagauggaguucgaauuugaucgacugagagcauuccaggcgaugcaaguacauuguaacaauaugcauacuuuaggagcccgguugccugguggcguggaauguagauucagaagaggaccagccauggcgugggagggcgagccuaugaggcacaaucucggcggcaacuugggugauccaagggcaagagccguaaguguuccgcucggcgguagaguugcccgcuuucugcaguguagauuccucuuugccggaccuuggcuguuguuuagcgagaucuccuucauuucugacguagugaacaacucaucccccgccuugggggggacguuuccacccgcucccugguggcccccaggacccccacccacaaacuuuagcucucuggaacuggagcccagagggcagcaacccgucgcuaaagcagaaggcagucccacugcaauccucaucgguugcuugguagcuaucauucuguuacugcuccucauuaucgcgcugaugcuauggcguuuacauuggaggagacugcuuucaaaggcugagcguagagucuuggaagaagaguugacuguacaucuguccguuccgggagacacaauacugauuaacaaucgccccggaccuagggaaccuccgcccuaucaagaaccucguccucgcggaaacccgccacacagcgcuccaugcguucccaacggcucugcauacucaggagacuacauggaacccgaaaaaccaggcgccccgcugcuccccccaccuccccaaaacagugugccacacuaugccgaagcggauaucgugacucugcagggggucaccggugggaacacauaugcgguccccgcccugcccccaggugccgucggcgacggccccccccgcguagacuuuccacggucacggcuuagauucaaagaaaaacuaggcgagggccaguucggagaggugcaccugugugagguugauuccccccaggaccuugucucguuggacuuuccacucaacgucagaaaaggacaucccuugcucgucgcgguuaagauccuccguccagacgccaccaagaaugcccgcaacgacuuuuugaaggaagugaagaucaugucuagguugaaagauccaaacaucauaagacugcugggagugugcguccaagacgacccucuguguaugauaacugauuacauggagaacggugacuuaaaucaguuuuuauccgcccaucaauuagaagauaaagcagcugaaggcgcuccuggugacggacaggcagcccaaggaccuaccauuagcuauccaaugcuucuacacguggcagcucaaaucgcaucaggcaugcgauaucuggccacacugaacuucguccauagagaccucgccacaaggaacugccucgugggggagaacuucacaauuaagauugccgacuuugggaugucuaggaaucuguaugcuggugacuacuauaggguucaggguagggcugugcuaccaauccgcuggauggccugggaguguauccucauggguaaguucacuacugccuccgacgugugggcuuucggcguuaccuuaugggaggugcugaugcuuugucgcgcucagccuuucggacagcucacagacgaacagguaauagaaaaugcuggcgaauuuuuucgcgaccaaggccgccaggucuaccucuccagacccccugcuuguccacaaggccucuacgaauugaugcugcgauguuggagucgggaauccgagcagcgcccgcccuucucccagcuccauagauuccuggcagaagacgcguugaacacugucuag

SEQ ID NO: 80182 - RNA, 2685 nt, Artificial Sequence
  derived and/or modified sequence
augucccugccccgauguugcccgcauccguugcguccugaaggaaguggcgcaauggggccugaagcacuuagcucccuccuuuuacuucuccucguagcuucuggcgaugccgacaugaagggucacuucgauccagcaaaaugccguuacgcuuugggcaugcaggauaggacaaucccugauucggauauuagcgcuucaaguucuugguccgauagcacagcugcaagacacagcagacucgagucgagcgauggugauggagccuggugucccgccggaaguguuuucccaaaagaagaagaguaccuccagguggacuugcaaagacugcauuugguggcucucguggguacucaggggagacaugcaggcggauugggcaaggaguucuccagaagcuauagacuuagauacucccgggaugggagaagauggauggguuggaaggacagauggggccaggaagugauaagcgguaacgaggaccccgagggaguugucuugaaggaucuggggcccccaauggucgcccgccuggugcguuuuuauccacgagcugaucgaguuaugucagugugucugagagucgaacucuauggcuguuuauggagggacggauugcucucauauacugcaccaguaggccagaccauguaccucagugaggcaguguauuugaaugacucaacuuacgacggacauacaguggggggauugcaauacggaggacuagggcaauuagcggacggggucguagggcuggacgacuuccggaagagucaggaguuacgaguguggcccggauacgacuacguuggauggagcaaccacuccuucagcaguggauauguggaaauggaguucgaguucgacaggcugagagcuuuucaggccaugcagguccacuguaacaauaugcauacucugggggcuaggcucccagguggagucgagugcagauucagaagagguccagcaauggccugggagggagagccaaugcgccacaaccuggguggaaaccucggagauccuagggcacgcgcugugucugucccccuaggaggucgaguugcgcguuuucugcagugucgguuccuguucgccggacccuggcugcuguuuucugaaauuagcuuuauaucugacgugguaaacaacucuucgcccgcacuaggaggcacauuuccaccugcgccuugguggccgcccgguccucccccuacgaauuuuaguagucuggaguuggagccaaggggccagcaaccgguugcuaaagcugaaggcucuccaaccgccauccugauaggaugccuaguugcaauuauauuacuucuguuguugauaauugcccucaugcuguggagacugcacuggagacguuuacugagcaaagccgagcggagaguuuuagaggaagagcugaccgugcauuuaucagugccaggugacacaaucuuaaucaauaaucgcccuggcccccgcgaaccuccaccauaccaggaaccuaggccaagaggcaacccuccgcauucugcacccugcgugccaaacggauccgccuacuccggugacuauauggaaccagagaagccuggugccccucuccugccuccuccuccucagaauucaguaccccacuacgcagaagccgauauagugacccuacagggugugacaggagggaauaccuaugcuguuccagcucuuccaccuggcgcuguuggagacggcccgcccaggguagauuucccccggagcagguuaagauucaaagagaaacucggugaagggcaauucggcgaggugcaucugugugaagucgacuccccacaagaucugguuagucuugauuuuccgcugaauguucguaaggggcacccacuauuaguggcugugaagauccugcgucccgacgcaacaaaaaacgcaaggaacgauuuuuugaaggaggucaaaaucauguccagacucaaagacccaaauaucauacgccuguuaggaguuugugugcaagacgacccucucuguaugauuacagauuauauggaaaauggcgaccugaaccaguuuuugucagcucaccagcuugaagacaaagccgcugagggugccccaggcgauggacaggcugcccaaggacccaccauauccuaucccaugcugcugcauguggcggcccagauugccagcgguaugcgauacuuggcuacacuuaauuucguccauagggaccucgcuacaaggaauugucugguuggagaaaauuucacgauuaaaauugcagauuucggaaugagucggaaucucuacgcuggugacuauuauagaguucaaggacgagcugugcucccuauacgguggauggcaugggaguguauucuaaugggcaaauuuacaacugccuccgacgugugggcauuugggguuacucuaugggaagugcucauguugugucgugcucagccuuucggacagcugacggaugagcagguuaucgagaaugcgggugaguuuuucagagaccagggaagacaaguauaucugucacguccacccgccugcccacaaggacuguacgagcuuaugcugcgcugcuggucucgugaaucggaacagcggcccccguucucccaauugcauagauuccuugcugaagaugcacugaauaccguguag

SEQ ID NO: 80183 - RNA, 756 nt, Artificial Sequence
  derived and/or modified sequence
augccccaucuagccucucucuucacugcuucguccagguguugcccccaucccuugcgaccugaaggaucuggggcuauggggccugaggcccuuucaucauugcugcugcuccuucugguugccucuggagaugcugauaugaagggacauuucgacccugcaaaauguagauaugcacugggaaugcaagacaggaccauacccgauagcgacaucuccgccuccucaaguuggucagauucgaccgccgccagacauucacgacucgagucaagcgacggagacggcgcuuggugcccagcgggcucaguguucccuaaagaggaggaguauuuacagguggaccuacaacguuuacaucuggucgcccucgugggcacucagggccgacacgcuggcggcuuggguaaagaguucucacggucauaccgguugagauauuccagggauggcaggcguuggaugggauggaaagauagaugggggcaggaagugaucucggguaaugaagauccugaaggagugguuuuaaaagauuuaggcccaccaauggucgcaagguuggugagguuuuacccacgggcugaucgggugaugagcgucuguuugagaguggaacuguauggcugucuguggcggggagaauggcugucauuucuaggaauuugcuuccuguccagaggacuugagggcggagaguguggagagugggccucucggauacccaguccggcagggaaacuaagucuguag

SEQ ID NO: 80184 - RNA, 2685 nt, Artificial Sequence
  derived and/or modified sequence
augucucuccccagauguugcccccacccccugaggccagagggcuccggagccaugggaccugaagcccuuucgucgcugcugcugcuucuccuuguggccaguggagacgccgauaugaaagggcacuucgauccugcuaaaugccguuacgcacugggcaugcaagacagaacgauccccgacucggacaucucugcaucgucuaguuggucugauucaacagcugcuagacacucacgccuggaaucuuccgauggcgauggcgcuuggugcccagcuggaagcguuuuuccaaaggaagaggaguauuuacaggucgaccuucagcgccugcaccucguugcgcuggucgguacgcaggguagacacgcugggggacuugguaaagaauuuagccgcucuuacagacuaagauauucacgggauggcaggcgguggaugggguggaaagaucgcuggggacaggaagugauuuccgguaacgaagauccugaaggcguugugcugaaagauuuagggccccccauggucgcgagacucguaagguucuauccccgcgcugaccggguuaugagcguuugccugcgaguggaguuguauggaugccuuuggagggaugggcugcugucuuacaccgcacccgugggucagaccauguauuuaucugaagcgguguaucugaaugacuccacauacgacggucauacuguggguggcuugcaguacgggggacucggacaacucgcggaugggguggucggauuggacgauuuucgaaaaucccaagaacuuagagucuggccuggcuacgauuacgugggaugguccaaucacucuuucucaucgggguaugucgagauggaauucgaauuugaccggcuucgcgcuuuccaagccaugcaggugcauuguaauaauaugcacacacuaggggcccggcugccagguggaguggaguguagguuucggcgggguccagcuauggcaugggagggagagcccaugaggcacaacuuggguggcaaucugggcgauccaagagcacgcgcagugucaguuccacucggcggcagaguagcgcguuuucugcaguguagguuccucuucgccgggcccuggcuguuguuuucugaaaucucuuucauaucagauguuguuaacaauuccuccccugcucuaggaggcacuuucccgcccgcuccuugguggccacccgguccccccccuaccaacuucucuucacuugagcuagagccacgcggacagcaaccagucgcuaaagcagaaggaagccccaccgcuauacucauuggcugcuugguugcuauaauacuucugcuccuccucauuauagcgcugauguuguggcggcugcacuggcggaggcugcugagcaaggcugaacgacggguucuggaagaggaacucacugugcaucuuaguguccccggcgauacuauacuaauaaauaauaggccaggcccucgcgagccaccaccguaucaggagccccgcccaagagguaauccgccacauuccgcccccugugugccuaacgggucggccuacucgggugacuauauggaaccagagaagccaggagcucccuuacugcccccacccccgcagaacucagugccacacuaugccgaagcagacaucguaacacuccagggcgugacaggcggcaacaccuaugccguuccugcccuccccccgggcgcagucggugauggccccccacggguugauuucccaaggagcagauugagauuuaaggaaaaacugggagagggccaauucggggaagugcaucugugugaggucgacagcccccaggaccuugucaguuuggauuuuccucugaaugugaggaagggccauccccuccuugucgcugucaaaauuuugagaccagaugccaccaaaaacgccagaaacgacuuccuuaaagaagugaagauuaugucccgguuaaaggaucccaauaucauuagacuacucggcguuugcgugcaggacgauccauuguguaugauuaccgacuacauggaaaauggugaucugaaccaguuccucagcgcacaucaguuagaggacaaggcugcugagggagccccaggagacgggcaggcggcacaggggccaacaaucagcuauccuauguuacugcacgucgcagcacaaaucgcaucagggaugagauauuuggccacucugaacuuuguccauagggaucuugcaacccguaauugccucgugggcgagaacuuuaccauaaaaaucgccgacuuuggaaugucacggaaucuauaugcuggagauuauuaccgaguacagggucgggcagucuugccgauucgguggauggccugggaaugcauucuuauggguaaauucacaacugccuccgacgucugggcuuuuggagugacacucugggagguguugauguuaugucgcgcccaacccuuuggccaauugacagaugagcagguuauugaaaaugcaggcgaauucuucagagaucagggaagacagguguaccucucaagaccgccggcgugcccccaaggccucuacgagcuuaugcugagaugcugguccagggaaucagagcaacggcccccuuucucgcagcuucacagguucuuagcggaggaugcucugaacaccguauag

SEQ ID NO: 80185 - RNA, 756 nt, Artificial Sequence
  derived and/or modified sequence
augccacauuuagccagccuguucacagcuagcucucgaugcuguccucauccucucaggcccgaaggcuccggcgcgauggggcccgaagcacuguccagccuucugcuccugcuccuuguggcuucuggagacgcagacaugaaaggacacuucgauccagccaaaugcagauacgcuuugggcaugcaagacagaacaauucccgauuccgacauuucugcuucaagcagcuggagcgacucuacugccgcgagacacagcagguuggaaaguuccgacggcgauggcgcauggugcccugcuggcuccguguuucccaaagaggaagaguacuugcaggucgacuuacagaggcuacaucuggucgcauuggucgguacacaaggcaggcacgcuggcggguuggggaaggaauuuucacggucuuaccggcugcgguacucucgagauggucggagauggaugggauggaaagaucgguggggacaggaagucauaagcgggaaugaggauccggagggcguugucuuaaaggacuugggcccgccuaugguggcccgacuggugagauucuacccacgcgcugacagagugaugagugucugccuuagaguggaauuguacggauguuuauggagaggggagugguuauccuuucuaggcauuuguuuccuuucccggggucuagaaggcggcgaauguggcgagugggcaucacggauuccuucacccgcuggaaaguugucccuguag

SEQ ID NO: 80186 - RNA, 756 nt, Artificial Sequence
  derived and/or modified sequence
augccccauuuggccagccuguuuacugcuucaagccgauguugcccacacccgcugaggccugagggauccggcgcuaugggaccagaagcccucucuagcuugcugcuccuucugcucguugcauccggugacgcagacaugaaaggucauuucgaucccgcgaaauguagguacgcuuuggggaugcaagaccgcacuauccccgacagugauauuuccgccaguucguccuggucugacagcaccgcugcgaggcacucccgacuagaaucuuccgauggagauggugcguggugcccagcugguucgguauucccaaaggaggaggaauacuugcagguugaccugcagcgacuccacuuaguugcacucgugggcacccaaggcagacacgcugggggauugggcaaggaguuuucacggucauaccgguugagauacagccgagacggacgacgguggaugggauggaaggauaggugggggcaggagguaauaucagggaaugaagauccugagggggugguucugaaggacuuggguccucccaugguggccagacuggugcgcuucuauccacgggccgaucgggucaugucagugugccugcgaguugagcuuuacgggugucuguggcgcggggaauggcuuucuuuccuggggaucuguuucuuaucaagagggcuugagggcggagaguguggcgagugggcuucuagaauucccucaccagccgguaaauugucacuguag

SEQ ID NO: 80187 - RNA, 756 nt, Artificial Sequence
  derived and/or modified sequence
augccacaccucgccucccucuuuaccgcguccucacgaugcugcccacacccucuuagacccgaaggauccggcgcaauggggccugaagcccuuuccucacuuuuacuucugcuucugguugccucuggugacgcugauaugaaaggacacuuugauccugccaagugucgcuaugcucugggaaugcaggaccgaaccauaccugacucugauaucagugccuccucuagcuggagcgacucaaccgcagcgcggcacucuaggcuugaguccucagacggugacggcgcuuggugccccgcuggcucgguauuuccaaaggaagaggaguaccuccaaguggaccuccagagauuacaucuuguggcucuugugggcacucaagggcgucacgcaggugguuugggcaaagaauuuuccagaucauauaggcuucgauacaguagagaugguaggcgauggaugggguggaaggacagguggggacaggaagugaucagugguaacgaggacccagagggcguggugcuuaaggaucugggaccgccaaugguggcuagacuggugcgguuuuauccgagggccgaucgggugauguccguguguuuaagaguggaacuguacggcugccuguggaggggcgaauggcuaagcuucuugggaauauguuuuuugucuagggggcuugaaggcggggaaugcggugagugggcuucucgcauaccaucuccggcugggaaguugaguuuguag

SEQ ID NO: 80188 - RNA, 2685 nt, Artificial Sequence
  derived and/or modified sequence
augucccuaccacggugcugcccacacccccuuagacccgaagguucaggugcuaugggccccgaagcccugucuucccuacuauugcugcuccuuguggcaucuggcgaugcggacaugaagggccacuuugaucccgcaaagugccgcuacgcgcucggaaugcaggacaggacuauaccagauuccgacauaucagcuucuuccucuuggucagauaguacugccgcucggcauagccggcuugaauccagcgacggcgacggggcguggugccccgcugguucuguguuuccaaaggaggaggaguauuuacagguggaccuucaacgccugcacuugguugcucuuguagggacccagggaagacacgccggggggcucgggaaggaauucaguaggucuuauaggcuccgauacagucgugaugguagacgguggaugggcuggaaagacagauggggucaggaggucauaaguggcaaugaagauccagaggguguaguccugaaagaccuaggcccuccgaugguggcucguuuggugagauucuauccccgugccgauagagugauguccgugugccuucgagucgaacucuaugggugccucuggagggacggacuccuuagcuauacggcucccguaggacagacaauguaccugucagaggcugucuaccugaacgauaguaccuaugacggacacacugucggcggccugcaguaugggggucucgggcaauuagcagacgggguggucggauuggacgauuuuaggaagucucaagaacuuagaguuuggcccgguuacgauuaugugggguggucuaaucauagcuucagcucuggauauguugaaauggaauucgaauuugaccgguugagggcuuuucaggccaugcaaguccacugcaacaauaugcacacucuuggagcuaggcugccuggagguguggagugucguuuccgccgcgguccugccauggcuugggaaggagaacccaugagacauaaccugggcggaaaccugggugacccaagggccagagcugucagcgugccgcugggagguaggguugcuagguuuuuacaaugucgauuccuuuucgccggccccuggcuucuguucucagaaauuuccuuuaucagcgacgugguuaauaauagcagucccgcccuaggcgguaccuuccccccggccccaugguggccccccgggccaccccccacaaauuuuucaagccuugagcuggagccaagaggucaacaacccguugccaaggcugaagggucaccaacugcuauucugauuggcugucuuguugcuauuauccugcugcuuuuacucauaauugcucuuaugcuguggcgauuacacuggcgcagacuccugucaaaagccgagagaagagugcucgaggaggaacuuacagugcaccugucugucccaggagacaccaucuugaucaauaaccgcccuggaccaagagaaccaccucccuaucaagaaccccgaccuagaggaaacccaccccauagcgcccccugcgucccuaauggcagcgcguacucaggggauuacauggaacccgagaagccaggcgcuccuuuacuaccccccccgccucaaaauuccgugccucacuacgcugaagcugacaucgugacauugcagggcgugaccggagguaacacuuacgccgugccugcucugccccccggagcaguaggugacggucccccuagaguggacuuuccaaggagccgccugagauuuaaagaaaaacugggugagggacaguuuggcgaaguccaccuuugugaagucgauucuccacaggaccuuguuagccucgauuucccccuaaacgugcgaaaaggccacccccuguuggucgccgugaaaauucuuaggcccgaugcgaccaagaacgcaaggaaugauuuccugaaagaaguuaagaucaugagccgguuaaaggaccccaauaucaucaggcuacuuggaguuugcgugcaggaugauccccuuuguaugaucaccgacuacauggaaaauggcgaccucaaccaguuucugucagcacaucagcucgaagacaaagccgccgaaggcgcccccggcgacggacaagcggcccagggcccuacaaucucauauccgaugcuguugcauguugcggcgcaaauugcuucuggcaugagauaccuggcgacucucaauuucguacacagagaccuggcuacaagaaacugccucguuggcgaaaauuuuacaauuaagauagcagacuucgggaugucuagaaacuuguaugccggcgacuauuacagaguacaaggccgugccguucugccaauuagauggauggccugggaaugcauacugauggguaaguuuacaacagcgagcgacgugugggccuucggugugacucuuugggaaguccuuaugcugugccgcgcccagcccuuuggucagcugacagacgaacaaguuaucgaaaacgcaggcgaauucuuuagagaccagggccgucagguuuaccuuagcagaccaccagccuguccucaaggacuguacgaguugauguugcgauguuggucaagggagucugagcagcgcccacccuuuucacagcugcaucgauucuuagccgaggaugcuuugaacaccguuuag

SEQ ID NO: 80189 - protein, 1516 aa, Artificial Sequence
  derived and/or modified sequence
MAANVGSMFQYWKRFDLQQLQRELDATATVLANRQDESEQSRKRLIEQSREFKKNTPEDLRKQVAPLLKSFQGEIDALSKRSKEAEAAFLNVYKRLIDVPDPVPALDLGQQLQLKVQRLHDIETENQKLRETLEEYNKEFAEVKNQEVTIKALKEKIREYEQTLKNQAETIALEKEQKLQNDFAEKERKLQETQMSTTSKLEEAEHKVQSLQTALEKTRTELFDLKTKYDEETTAKADEIEMIMTDLERANQRAEVAQREAETLREQLSSANHSLQLASQIQKAPDVEQAIEVLTRSSLEVELAAKEREIAQLVEDVQRLQASLTKLRENSASQISQLEQQLSAKNSTLKQLEEKLKGQADYEEVKKELNILKSMEFAPSEGAGTQDAAKPLEVLLLEKNRSLQSENAALRISNSDLSGSARRKGKDQPESRRPGSLPAPPPSQLPRNPGEQASNTNGTHQFSPAGLSQDFFSSSLASPSLPLASTGKFALNSLLQRQLMQSFYSKAMQEAGSTSMIFSTGPYSTNSISSQSPLQQSPDVNGMAPSPSQSESAGSVSEGEEMDTAEIARQVKEQLIKHNIGQRIFGHYVLGLSQGSVSEILARPKPWNKLTVRGKEPFHKMKQFLSDEQNILALRSIQGRQRENPGQSLNRLFQEVPKRRNGSEGNITTRIRASETGSDEAIKSILEQAKRELQVQKTAEPAQPSSASGSGNSDDAIRSILQQARREMEAQQAALDPALKQAPLSQSDITILTPKLLSTSPMPTVSSYPPLAISLKKPSAAPEAGASALPNPPALKKEAQDAPGLDPQGAADCAQGVLRQVKNEVGRSGAWKDHWWSAVQPERRNAASSEEAKAEETGGGKEKGSGGSGGGSQPRAERSQLQGPSSSEYWKEWPSAESPYSQSSELSLTGASRSETPQNSPLPSSPIVPMSKPTKPSVPPLTPEQYEVYMYQEVDTIELTRQVKEKLAKNGICQRIFGEKVLGLSQGSVSDMLSRPKPWSKLTQKGREPFIRMQLWLNGELGQGVLPVQGQQQGPVLHSVTSLQDPLQQGCVSSESTPKTSASCSPAPESPMSSSESVKSLTELVQQPCPPIEASKDSKPPEPSDPPASDSQPTTPLPLSGHSALSIQELVAMSPELDTYGITKRVKEVLTDNNLGQRLFGETILGLTQGSVSDLLARPKPWHKLSLKGREPFVRMQLWLNDPNNVEKLMDMKRMEKKAYMKRRHSSVSDSQPCEPPSVGTEYSQGASPQPQHQLKKPRVVLAPEEKEALKRAYQQKPYPSPKTIEDLATQLNLKTSTVINWFHNYRSRIRRELFIEEIQAGSQGQAGASDSPSARSGRAAPSSEGDSCDGVEATEGPGSADTEEPKSQGEAEREEVPRPAEQTEPPPSGTPGPDDARDDDHEGGPVEGPGPLPSPASATATAAPAAPEDAATSAAAAPGEGPAAPSSAPPPSNSSSSSAPRRPSSLQSLFGLPEAAGARDSRDNPLRKKKAANLNSIIHRLEKAASREEPIEWEF

SEQ ID NO: 80190 - DNA, 13762 bp, Artificial Sequence
  derived and/or modified sequence
ccgtctcaatatgtctcaagatggcggccaatgtgggatcgatgtttcaatattggaagcgctttgatttacagcagctgcagagagaactcgatgccaccgcaacggtattggcgaaccggcaggatgaaagtgagcagtccagaaagcggcttatcgaacagagccgggagttcaagaagaacactccagaggatttgcgcaagcaggtagcgccgctgctgaagagtttccaaggagagattgatgcactgagtaaaagaagcaaggaagctgaagcagctttcttgaatgtctacaaaagattgattgacgtcccagatcccgtaccagctttggatctcggacagcaactccagctcaaagtgcagcgcctgcacgatattgaaacagagaaccagaaacttagggaaactctggaagaatacaacaaggaatttgctgaagtgaaaaatcaagaggttacgataaaagcacttaaagagaaaatccgagaatatgaacagacactgaagaaccaagccgaaaccatagctcttgagaaggaacagaagttacagaatgactttgcagaaaaggagagaaagctgcaggagacacagatgtccaccacctcaaagctggaggaagctgagcataaggttcagagcctacaaacagccctggaaaaaactcgaacagaattatttgacctgaaaaccaaatacgatgaagaaactactgcaaaggccgacgagattgaaatgatcatgacggaccttgaaagggcaaaccagagggcagaggtggctcagagagaggcggagaccttaagggaacagctctcatcggccaatcactccctccagctggcctcacagatccagaaggcaccagacgtggagcaggccatagaggtgctgacccgctccagcctagaagttgagttggccgccaaggagcgggagatcgcacagctggtggaggacgtgcagagactccaggccagcctcaccaagctgcgggagaattcggccagccagatctcacagcttgagcagcagctgagcgccaaaaacagcacactcaaacaactggaagaaaaactcaaaggccaggctgactatgaagaggtgaagaaagagctgaacattctgaagtccatggagtttgcaccgtccgagggcgctgggacacaggatgcggccaagcccctggaggtgctgttgctggagaagaaccgctcgctgcagtccgagaacgccgcgctgcgcatctccaacagcgacctgagcgggtcagccaggaggaaagggaaagaccagcctgaaagtcggcgcccgggatctttgccggccccccctccttctcagttgccccgcaacccgggggagcaggcttccaatactaatggtacacaccagttctcaccagcggggttaagtcaagactttttcagctcatccctggcaagccccagcctacccctggcttctacaggaaaatttgcactaaactctcttctccagcggcagctaatgcagtccttctactccaaggctatgcaggaagccggaagcacaagcatgattttttcaacaggtccatacagcacaaactccatatcttcccaaagtccattacaacaaagcccagatgtcaatggcatggccccatcccccagccagtcagaaagtgctgggagcgtctccgagggcgaggagatggacactgcagaaatcgcccggcaggtcaaagagcagctgattaagcacaatatcggacaacgtattttcggacattatgtgttgggactgtctcaagggtccgtgagcgagattctggcccggcccaagccatggaataaactgactgttcgtggcaaggagccatttcacaagatgaaacagttcctctccgatgagcagaacatcctggccctccgtagcatccaaggcagacaaagagagaatccaggccagagcctgaacagactatttcaggaagtaccgaaacgaagaaatgggtctgaaggtaacatcaccacccggatccgagcctcggagactggctctgatgaagccatcaagtccatcctagagcaagccaagagggagctccaagtgcagaaaactgcagagccggcccagccttcctccgcatccggcagcgggaactctgatgacgccatccgctccatcctgcagcaagcccgccgggagatggaggcccagcaggctgccctcgaccctgccttaaagcaggcaccactgtcccagagtgacatcaccatcctcacccccaagcttctgtccacctcgcccatgcccaccgtgtccagctacccacctctcgccatctccctgaagaagccctccgcagctcctgaggccggtgcctctgctctgccgaaccccccggccctcaaaaaggaggcccaggacgcccccgggctggacccccagggagcagccgattgtgcacaaggggtcctgagacaggtgaaaaatgaggtgggccgcagcggtgcctggaaggaccactggtggagcgcggtgcagccggagagaagaaatgccgcctcctccgaggaggccaaggccgaagaaacgggcggcgggaaagagaagggcagcggtggcagcggaggtggcagccagcctcgggccgagcgcagtcagctccagggaccctcgtcgtcagagtactggaaggagtggcccagcgctgagtccccatactcccagagctcagagctgagtctgaccggggccagccgcagcgagacaccacagaacagccccctgccatcctccccgatcgtgcccatgtccaagcccaccaagccctcggtccccccgctgacccccgagcagtacgaggtctacatgtaccaggaggtggacaccatcgagctcacccggcaggttaaggaaaagctggccaagaacggcatctgccagagaatcttcggggagaaggtgctgggcctgtcccagggcagcgtcagcgacatgctgtcccgaccgaagccatggagcaagctgacgcagaaaggccgagaacccttcatccggatgcagctctggctgaacggcgagctaggccagggtgttctacccgtccagggccagcagcaagggccagtcctccactccgtgacatcgctccaggacccgctgcagcagggctgtgtgagctcagaaagcactccaaagacctccgccagctgcagccctgcccctgagtccccgatgagttccagtgagtcggtgaagagcctgaccgagctggtccagcagccctgtccccccatcgaggcgagcaaggacagcaagccaccagagcccagtgacccgccagcatccgactcccagcccacaaccccgctgcctctctccggacactcggccctcagcatccaagaattagtagccatgtccccggagctggacacctacggcataaccaagcgggtgaaggaggtgctgacggacaacaacctcggccagcgcttatttggggagaccatcttagggctcacccaaggctctgtctctgacctccttgcccgccccaaaccctggcataagctcagtctgaaaggacgagagcccttcgtccggatgcagctgtggctgaacgaccccaacaatgtggagaagctgatggacatgaaacggatggagaagaaagcctacatgaagcggcggcacagctcagtcagtgacagccagccctgcgaaccgccctctgtcggcaccgagtacagccagggcgccagcccccagccccagcaccagctgaagaaaccccgggtggtgctggctccggaggagaaggaggcgctgaaacgagcgtatcagcaaaagccatacccgtcaccaaaaaccatcgaagacctcgccacccagctcaacctgaaaaccagcaccgtcatcaactggttccacaactacaggtctcggatccgcagagaactgttcattgaggaaattcaggccgggagtcagggccaggcgggcgccagcgactcaccctcggcccgcagcggccgggcggcgcccagctcggagggcgacagctgcgacggcgtggaggccactgagggcccaggcagcgccgacaccgaggagcccaagtctcagggagaggccgagcgggaggaggtgccgcggccggcggagcagacggagccgccgccctcggggaccccgggcccggacgacgcccgcgacgacgaccacgagggaggccccgtggaaggcccggggcccctgcccagccccgcctccgcgaccgccaccgccgcgcccgcggcccccgaggacgccgctacctcagccgccgccgcgccgggggagggccccgcggccccgagctccgcgccgccgcccagcaacagcagcagcagcagcgccccccgcaggcccagctcgctgcagagccttttcggcctccccgaggccgcgggcgcccgggactcgcgcgacaaccccctgcgcaagaagaaggccgcgaacttgaacagcatcatccaccgcctggagaaggccgccagccgggaggaacctatcgaatgggagttctgaggggccgcggccctggggcgggcagccaggctgggccgcaagggcctggacggggtcggacggggcaggcgctgcggacaccgtggcctgggcttggcccgcggcctgcaccgaccccgggccggacctgagcccgcagcccagaccccctccacggtccgcggcctgcaccgacccgaggcccagatccaaggccgcggcccagacccactctgcggcccgggccgaccctgcggcctccaccaaccccgcggcccagacccagcccgcggcctggacccctggaccgctttgcgcacttaccgccctgcgggccacagggcaaaatcgccataggccaaggtgcatatagaaaacaaaggagcattaagcccaatctatgtcgtgttttcaaggaagaaaacggaaatgtgtggtcgagcttttttgtaccctgaagtgttttttttattgccctaagtgatttccacaggttctggaataactcttacagctttgccttgtgtcctcctgttccgtgtgggctttaaaagaaaaaaaatcaaacccacatattaaaagggggctttttatctgccatctaatggcttcagagcgataatacactattatcttcttaaaccaggaaaaaataaaagggggggtgggatttttcagaaaaattaaaaaagaaagtttttgtagctgttcagttgccactaagagattgcacagtcaaaacgactctaaacacactagtttggattcctaaatattttcaagaaaagaatcttctcgtttgaaactttgaattaaaataaaacacatttactccacatattttttaacaaaaagaaaacgtcacatcaggaaactctgattttgtggtagctgacatagtgttttcttgtacgtgaatagaatcctgacatgtagtgcacattgatgtatagctttaactgaccctgggttttgcagaccagggtttgtttaatacactccattctaggccaaatcaggacaaaaaaaagaaaaaaaaagaaaaaaaaaaaagaaaagatccgaatctaggtattttataatctgctttttaacctctaaccgcagagcacgctgatcagacctcatatcttggaggtttaggagacaagttagaactgtagcatgtacctgttaattttgtttaatttatggtgtctcaatctgtctgtgcgtctgcacgtgtgcaagcattgaaagaaaggagagagtagtccgggcgagcacagcaggcagttccagggccagacgggcccatccccaagtagatagcagtctacggatctctctctggcacagaaggcacctcacctcacaccactctcctggatacctgatgaactgagccctcccaggggaagacactccccaggcctgggcagggcttacacgcgcactctctctcttctttccctttttcttcccaccgcaagcactgatgaccctgttgaactcgtgggaaacttcctttctctgcaggagagagaacgtggcattctgggctccccactcccatccctgtagaaatggcccaaactcacaccaaaacgtggatgctcttcaacttccaaacctaccatttgcccttctttcatttcgcctcttagttctttttatgcacagttttagggcagtctaagtacaaactgaaagtctaacttgtctctgattcctcccttgtctatgtgtatatgcgtgagaatagaggcgggtgagagtgtgcgtgcgtgtgcgtgtgtgcaattttatacgtctgtgtattttcttaagtacctgtgcacacgtagagtgcattactgccacctttttcaataagctgttttatcagttacggcttctacaagtttgctaatttagacttctttattgccatatctttaaactaacaatagatgatttcggtatatatatatatttttttttgcttatttataggtgctgtattttattatctgattgttaggaagggatgaaaggggcaaatattctttagagggatagactgccggcagtattgggtataatttacaagatgtagttgtcatactgtatattactgattgaaaactttttgaccgtattgtgtatcattgaaacctttgtcttaggtcaacatctttggatgacattttaatggtgcattcattatttcttaagtttaattaatattacttttttttttatttggggggtgggagggagttataattttaaaggtatgctctggctgttccacctccgtgtgcttgttaattaacttgtaggactttgactgtaagatgtgaaaccacgtttcttgcatgatgttttagagattatttcatttacagtcttttaacctgcagctgcagcacttagttcacgttttcacaaatttcaagagtcactacactaaagacaatgccttttcatgaataagaagttttcagaaggctctagggggctgggaggcaggctgttcgtttgtcttttgttgggggtatcatttctgaacttgaaatccagttcagggagaagagaattcaaaattagaggagcttaaggggacacgggtcaacatctagctcgattcaggtgcattgagaagagtgagttcacatcggtgacccttaggacagtgagtggcagagccctgacgactgtggtgtcctctccacaaaaccctcaagggacttttgtcatcatgtgtgatgaatctttaaatatcgtctaattttcataagaatgaaaagaagttaacaggaaatagtaggctagggtttagttttaaaggcatgactgttatttacaaaggtgttaaatctgaggaaattgacaaatacagatttgtccattctagtggccaaacagtaacagtctaaaatgcagtcattttgaccctcccaagcaatttagtcatatgtgttgttttctcttttctgtttttacttcttagatttttaactaggttactgttggttcccattctgtcttttttgccagacttacatctggtgccagatacaatcagttggttaaattttgcttgcagttctgtgtattttttttcctctattatttatttttttaaaaaaaatagagatcctaaccttagatctttgatgtgaagctagcactgtctgtaatacttctaagagctgccactaaaataatacagcaatccgtggccaggggagcaccccctcctggttgggcccctcagttggagtctaagggttaatctctcatcttgctaagcagtattcaagtgccttgaacagtgtcccctcggcatggctccccttcagcaggctggcattccaagcagtggcccccgcaggcagccgacccccttcctcttcacgctctatgagtttaaaaagctgatttgtacctctcccctgggggaaacggttccatataaaacactaacacttaattacaagctccattatgccattttaaatggcttctttttgttaattggaggcattgttcataacttaaggcttttgccattaacttagctggctaagcagaggctcggggtaaaatcagtgtttgcatttagcctcttgacccggagttccggcccaagctcccttgtgatagccgagatggcaggtgtgtgagttctgtcctagacctgtgcccaactcacttccaccccagaggagtcttctgtcctcctccccaacccccgagctccctggtaacctcctcttgaacttctgtatcagtgaagacatctgtggtttctgctcaccagacctctctttagaaagggttatcagagccatggagcttagctcaattggattcttctagacgatcttaggaggcatcttggcatgaggcagcttctaagcgtctcctgggacaggattggggtgacagcccagggatgcatgcatgggagaactctctgagaaatgccaggatcgtggctcacagggacccaccatcaaaacctgctactttgtgcaagtaattgaggcaaaagataccagtcgacagcctccctggggtagatcccttgtacctccaaagtacaaatacctccctgctcagtttccttcctgtcgccatctttgttttcttcccattgaaaaaccatcctgtctgatgtggacgttcaggtctgctggttggcggtccgggcccagagtgcagcagagctctgggttaaatattcctttctggccaccgcccaagcccaggtggccagctctcataccccatctccctccttggccagggccagcatcaggcgtgcagctcatgaccagtttacacaggctgcaaagagatcgctgtgggcctcggctgactactttaagattatgccacagccaggccctaaaaagagaggggaacaggagtccccaggtgagctctctgacgggcaggtgccttcccgactaaggttggactggatgactttgttcctcctgcatgcatgtcctttgatgcaagggtgatcaatgaactctgttgacattctatgcaatgtttttcattcctctgattttagcaaagcaaatcttactgaaaaatagcagagccaggggaacagacgcatgtccttctgggagtcacacaaaagcagagagattttgaactgaggggcgacagcctttgccttaaatgcagtatgacaggcgcttcttggcagaccagtaaaaacaaaagcccatagaccttactcatcccaaggccgacaagccagctgtacagggcgagatgtagcaacacggggcatgagcggtgggcgtgctgggctatttgctgtggtactttaggctggaggtttggctcctgtgctgccggtggggggccctgtccctccccagatgtcctccctcttcttcacactcctcattgtcccttctacctcactaacctgtcttctccatctgatgtcacccagaaccacaccccacagaactgtgaggcacgtgggctggagagagcagaaaagctgccagcgcagcagacacgaacatccctctgcctggtgggccggctttgtgtgtctctccttttgtgagcgcaacacggacaaacagctgtgctctgcaaggcacacggatgtttcccttccacctgttcccaaagctccagcagctgtttcttttgcaggcagggcgtggtctcggggctccgagggtcttgtctttggtccgccttcctttctgtccagtcctgctcagctgttaagatccatcatggccattatccttgtcccggactgccccaaagttcccagctggctttggggaacactgtagctcttgggtgtctcttgtctctggcatggttttagcgtcactgcgaacactcctttgcaaacatcaaacatctcaaagacggaaaaggatagatggcttcctccagcctacacgccccgtccacagtggcatcaccctcttatcccaaaagaatatgccagttcccatccagcaccgaagaaaatcagctcctggggctggtggttggaggtgggtctgtccactgtgggggccaaagtgttcccctgctggagacagtttgcaagtaagaacctaaggatggggacagcatcctgtgcttgggcattgaccagccaaagctcacatttagaaagccctcagtgcttctgtggtttcacctgggcatcgacgacattagggaagcctttgtgaccacaagggcagggcttgtgccctgagtggcgaggtggtgacctgaggccagtgtgatgtggttggatctcagcgtgtactgaatgccagtctggccggcacactcgaacgctaagagaatggtccaatttgatgatcttatttctatttcgatcaggttttgactttttgtagatgaaaactaccagggaaaaggggaagcaggtacccaataaagtttagaaagatccagtctgtgaaacccttagagatgggctgaaagttaagtccaccaacccttgggcttaatcaggacggaagaggagggggtgtggggggcagagcgtaaaacaagccccagccctactcccggccccccagcccagtcttcccaatcccagaggccccggcggcctgtgctcctcaccaccctggtcaggggaatagaaggaaatgcaatttccgcctgtctgcccgacttccaaaaactgcctcctcctgcccaggcctctcccaccaccaccttccctccaaagataaccgtgtccatgccatccgtggcatcatctcgagttttcatttttggatgaagtgacatttagctttaacaagacatttccaaagcgcctagtctcctccaaaatgctaactttaaaagttgggcattgtaggcgaaaaatcccaaaaaaaaaaaaagacaaaaaaaaaaggctggcgagagaaagacatttggctatgcataaatgtgcacttcccccatgcccccgttcttaaactcttaagatgcctttgagttgcttttcatgaatccttttagtttacccgataatgttaagaaagcattagtctacgttactgtaatttctgtagtgtttacgctttaatttctaccacaaaatatgctatatgctatgtatcaagctttctgtaatcagaaagaaaaggtgccttatatcccaatgtcacggctacatccctatggaaattaatcagaagcacagtgtgtacggaagcattgggacttctgctggtgaaacaagagaccattcagcaagacacattgaagtggcacggagctgcttttgttttataattcttttttccccccttttccttcttcttttttattattttattattttttttgtactttgctttaaacggaaagcacttaaatagatgactatgtgtaaaagctctgtgcaattgaaatcatttttcttcattttaaaaaaataacgtattgcacaccaaatgaactcaaagtaagctttagaccaggacgattcaggttatgaatgagtttgttcactgtagttccgtttgttcatgaaccgaagggaaaacaggcctccccgactccctccagtctcccagcctgcctcttggtgaccactgtgctgggcgtgcagggcccgcgggctctggccggagccgctggcctgacgaggcaggatagggagtatccgtgattcagaagctgagacccttccccagtgtctgaggccacagccatcccttccagcacttaatcttgtcttgttgaaatggactgactgctactgacctgccggcgtgcgtgagggtgattataaaaggatgtttccttgagaaaaaaaaaattatttctatcctcttctatttattattaggttaatcatttaagtacttatcaggagtgtattgttattttgtgttttgttgtcataaatgctttttgctgtcactctagtggttactatcctctgccttcctctcctcccctactcccccagagaaccaaggcgtctgggggattgactggggggcagagggggtttccccagcaaaatcaaacacctgtctccagagtagccactcaaaaactggtggtctctatgtgtctaactttttaaatgagagtgtttatgaacaaaaaaatttaccaacgtgtgagggagttgctgagttgaagaatgctcgcttgaggagcttcagaggaatcttagcaaagccaagttcagttccccaaagcctcctagagcctctggtaagacttctgggttcatgaagtttcggcgagccgtggtcagagagggcgcggtggcctggccaagactttacctccaagcgagagagtgatttcttgcaaggcccgcatgggttgatacgttttggttggttttttgttgttgtttttcttgcgtacaaagttggtcaaaaccatctttcaaagcaacagtgttttgtagtaccaggctgtggcttgagggctcacctaggagatcataggcagagggcccctttcccctataggtggttcaacgtggaggaaggttgggtgtggagattgcttgctgtggccccaagctcagccagcaggacacccagttgttgccaatcaggtgtgaaggtgaggcgccctgccttgatcccatgggcccagcagaaggaaacttaccccaggccaaggcaagggccctgctcaccccaaggtaggctgggaagagcatctctttccatatcatcacctccccttctccaagattgccgggggccctgattttgttctctctttgaaagaaaccctccaccgaaacaatggtccccatctccccagaagcctttttttttttcatttttctctaattagtctatgcatttctctctctcaaaccatcttctgcctcttcccttgagaaaacgggcatctcacgtacccccatctgagacctcttggaaaaaaaaaatcccgtgtattctggagatgtgagaattcacccaaaattcttaaaacattggagaatagcttgttataaaataaaagtgggggtaaaaagaaggtggttttccccacatccctttgcattgaataagagacctagttctttgcgtttgtgcaataactctttgctgcttgccttgagagcgggtagcaccacgctcctgtccagactactaacagcacaagacgcactcacagggtggcggaatcttccggaaaactctctataagctcagctccccccaccccacccccactctagcgttttgtcacgtcttacattttagcagtattttatattttctgtaacgcaccaagtcttagatctttctagagcttgtttgttcatcctcacaatcacagatttttttctccaatcctcacagagacccaattgaccaaaaaagaaaaaaggaaaaaaaaaaagtcgtcttttttttttttttttgtacaaatcgctttgagatgcctctggtgtgttgctgtgtgacatctctctggtaacattttatttcttgctatttgtttttctacattaagagtcaaagttgacctggctggcgtgggggtgggggaggcacccgtcggccccttggtgttgtccctctgtctttggttagccatacgatgtttgttctcagcactgtacaacggtccctatataatacggagaagcaatatcactgtatgagactcacaccatgtattattattcactagcaccctaggtgtgataattgaagtaaatatcttttatacaaacacaa

SEQ ID NO: 80191 - DNA, 4551 bp, Artificial Sequence
  derived and/or modified sequence
atggccgccaacgtgggcagcatgttccagtactggaagagattcgacctgcagcagctgcagagagagctggacgccaccgccaccgtgctggccaacagacaggacgagagcgagcagagcagaaagagactgatcgagcagagcagagagttcaagaagaacacccccgaggacctgagaaagcaggtggcccccctgctgaagagcttccagggcgagatcgacgccctgagcaagagaagcaaggaggccgaggccgccttcctgaacgtgtacaagagactgatcgacgtgcccgaccccgtgcccgccctggacctgggccagcagctgcagctgaaggtgcagagactgcacgacatcgagaccgagaaccagaagctgagagagaccctggaggagtacaacaaggagttcgccgaggtgaagaaccaggaggtgaccatcaaggccctgaaggagaagatcagagagtacgagcagaccctgaagaaccaggccgagaccatcgccctggagaaggagcagaagctgcagaacgacttcgccgagaaggagagaaagctgcaggagacccagatgagcaccaccagcaagctggaggaggccgagcacaaggtgcagagcctgcagaccgccctggagaagaccagaaccgagctgttcgacctgaagaccaagtacgacgaggagaccaccgccaaggccgacgagatcgagatgatcatgaccgacctggagagagccaaccagagagccgaggtggcccagagagaggccgagaccctgagagagcagctgagcagcgccaaccacagcctgcagctggccagccagatccagaaggcccccgacgtggagcaggccatcgaggtgctgaccagaagcagcctggaggtggagctggccgccaaggagagagagatcgcccagctggtggaggacgtgcagagactgcaggccagcctgaccaagctgagagagaacagcgccagccagatcagccagctggagcagcagctgagcgccaagaacagcaccctgaagcagctggaggagaagctgaagggccaggccgactacgaggaggtgaagaaggagctgaacatcctgaagagcatggagttcgcccccagcgagggcgccggcacccaggacgccgccaagcccctggaggtgctgctgctggagaagaacagaagcctgcagagcgagaacgccgccctgagaatcagcaacagcgacctgagcggcagcgccagaagaaagggcaaggaccagcccgagagcagaagacccggcagcctgcccgcccccccccccagccagctgcccagaaaccccggcgagcaggccagcaacaccaacggcacccaccagttcagccccgccggcctgagccaggacttcttcagcagcagcctggccagccccagcctgcccctggccagcaccggcaagttcgccctgaacagcctgctgcagagacagctgatgcagagcttctacagcaaggccatgcaggaggccggcagcaccagcatgatcttcagcaccggcccctacagcaccaacagcatcagcagccagagccccctgcagcagagccccgacgtgaacggcatggcccccagccccagccagagcgagagcgccggcagcgtgagcgagggcgaggagatggacaccgccgagatcgccagacaggtgaaggagcagctgatcaagcacaacatcggccagagaatcttcggccactacgtgctgggcctgagccagggcagcgtgagcgagatcctggccagacccaagccctggaacaagctgaccgtgagaggcaaggagcccttccacaagatgaagcagttcctgagcgacgagcagaacatcctggccctgagaagcatccagggcagacagagagagaaccccggccagagcctgaacagactgttccaggaggtgcccaagagaagaaacggcagcgagggcaacatcaccaccagaatcagagccagcgagaccggcagcgacgaggccatcaagagcatcctggagcaggccaagagagagctgcaggtgcagaagaccgccgagcccgcccagcccagcagcgccagcggcagcggcaacagcgacgacgccatcagaagcatcctgcagcaggccagaagagagatggaggcccagcaggccgccctggaccccgccctgaagcaggcccccctgagccagagcgacatcaccatcctgacccccaagctgctgagcaccagccccatgcccaccgtgagcagctacccccccctggccatcagcctgaagaagcccagcgccgcccccgaggccggcgccagcgccctgcccaacccccccgccctgaagaaggaggcccaggacgcccccggcctggacccccagggcgccgccgactgcgcccagggcgtgctgagacaggtgaagaacgaggtgggcagaagcggcgcctggaaggaccactggtggagcgccgtgcagcccgagagaagaaacgccgccagcagcgaggaggccaaggccgaggagaccggcggcggcaaggagaagggcagcggcggcagcggcggcggcagccagcccagagccgagagaagccagctgcagggccccagcagcagcgagtactggaaggagtggcccagcgccgagagcccctacagccagagcagcgagctgagcctgaccggcgccagcagaagcgagaccccccagaacagccccctgcccagcagccccatcgtgcccatgagcaagcccaccaagcccagcgtgccccccctgacccccgagcagtacgaggtgtacatgtaccaggaggtggacaccatcgagctgaccagacaggtgaaggagaagctggccaagaacggcatctgccagagaatcttcggcgagaaggtgctgggcctgagccagggcagcgtgagcgacatgctgagcagacccaagccctggagcaagctgacccagaagggcagagagcccttcatcagaatgcagctgtggctgaacggcgagctgggccagggcgtgctgcccgtgcagggccagcagcagggccccgtgctgcacagcgtgaccagcctgcaggaccccctgcagcagggctgcgtgagcagcgagagcacccccaagaccagcgccagctgcagccccgcccccgagagccccatgagcagcagcgagagcgtgaagagcctgaccgagctggtgcagcagccctgcccccccatcgaggccagcaaggacagcaagccccccgagcccagcgacccccccgccagcgacagccagcccaccacccccctgcccctgagcggccacagcgccctgagcatccaggagctggtggccatgagccccgagctggacacctacggcatcaccaagagagtgaaggaggtgctgaccgacaacaacctgggccagagactgttcggcgagaccatcctgggcctgacccagggcagcgtgagcgacctgctggccagacccaagccctggcacaagctgagcctgaagggcagagagcccttcgtgagaatgcagctgtggctgaacgaccccaacaacgtggagaagctgatggacatgaagagaatggagaagaaggcctacatgaagagaagacacagcagcgtgagcgacagccagccctgcgagccccccagcgtgggcaccgagtacagccagggcgccagcccccagccccagcaccagctgaagaagcccagagtggtgctggcccccgaggagaaggaggccctgaagagagcctaccagcagaagccctaccccagccccaagaccatcgaggacctggccacccagctgaacctgaagaccagcaccgtgatcaactggttccacaactacagaagcagaatcagaagagagctgttcatcgaggagatccaggccggcagccagggccaggccggcgccagcgacagccccagcgccagaagcggcagagccgcccccagcagcgagggcgacagctgcgacggcgtggaggccaccgagggccccggcagcgccgacaccgaggagcccaagagccagggcgaggccgagagagaggaggtgcccagacccgccgagcagaccgagcccccccccagcggcacccccggccccgacgacgccagagacgacgaccacgagggcggccccgtggagggccccggccccctgcccagccccgccagcgccaccgccaccgccgcccccgccgcccccgaggacgccgccaccagcgccgccgccgcccccggcgagggccccgccgcccccagcagcgcccccccccccagcaacagcagcagcagcagcgcccccagaagacccagcagcctgcagagcctgttcggcctgcccgaggccgccggcgccagagacagcagagacaaccccctgagaaagaagaaggccgccaacctgaacagcatcatccacagactggagaaggccgccagcagagaggagcccatcgagtgggagttctag

SEQ ID NO: 80192 - DNA, 4551 bp, Artificial Sequence
  derived and/or modified sequence
atggctgccaatgtaggaagtatgttccaatactggaaaaggtttgacctccagcaacttcagcgggagttggacgcaactgctaccgtgctggcaaaccgccaggatgagagcgagcagagccgcaagcgattgatcgaacaatcacgggagtttaagaagaatacgccggaggacctgcggaagcaggtggcccctctgctgaagagctttcagggcgagatcgacgcactgagcaagagatctaaagaagcggaagccgcttttctgaacgtctacaagagactcatagacgtccccgaccctgttccggctttggaccttggtcaacagctgcagctgaaggtgcagcgcctgcacgatattgagacggagaatcaaaaactccgtgaaacactagaggagtacaacaaagaattcgcagaggtgaagaaccaggaggtgactattaaagctcttaaggaaaagattagagaatacgagcaaacattgaaaaatcaagctgagaccatcgctctggagaaggaacagaagctccaaaatgattttgccgagaaggagcggaagctgcaggaaactcagatgagcactacgagtaagctggaagaggccgagcataaagtgcagtccctgcaaacagctctggagaaaaccaggacagagctgttcgatctgaaaacaaagtatgatgaagaaaccaccgccaaagctgacgagattgagatgatcatgacagacctggagcgcgccaatcagcgggcagaggtcgcccagcgggaagccgaaactcttagggaacagctttccagcgcaaatcatagtctccaactggcatctcagatccagaaggctcctgacgtcgagcaagcaattgaggtgctgacaagatccagtctggaggtagagctggctgccaaagagcgggaaatcgcccaactagtggaggacgttcagagactgcaggctagtttgaccaagcttcgcgaaaactctgctagccaaatctcgcagctggagcagcagctatccgccaaaaattcaaccctgaagcagctcgaagagaagctcaagggacaagccgattacgaagaggtgaaaaaagagctgaacatcctgaagtcaatggaatttgcccctagcgaaggggccggaacccaggacgcagctaagcccttggaagtgctgctgttggaaaagaatcgaagcctgcagtcagaaaacgcggcactccggatatcaaactccgatctgagtgggtccgcccgtcgtaagggaaaggatcaacccgagtcccgcaggcctggatctctgcctgcacccccaccgagccaactacccagaaatccgggtgaacaggcttcaaatactaacggcactcatcagttctcacccgctggcctgagccaggatttcttctcctctagccttgcttcccctagcctcccactggcttcaacagggaagtttgctctgaacagcctgctccagcggcaactgatgcagtccttctatagcaaagcgatgcaggaggccggctctactagtatgattttctccacagggccttatagtaccaacagcattagcagccaatcacccctgcaacagtcacctgacgttaatgggatggccccctctccgagccaatccgagagcgctgggagtgtgagcgaaggagaggagatggatactgcagaaatagcgcgacaggtgaaggaacaactcatcaaacacaacatcggacagcgcattttcggccattatgtgctagggctcagccaaggatctgtgagtgagatcctggcccgcccaaagccatggaataaactcaccgtgcgtgggaaagaacccttccacaagatgaaacagttcttgagcgatgagcagaatatcctcgctctaagatctatccaaggcagacagagagaaaaccccggtcaatctttgaataggttgtttcaggaagtgcctaaacgcagaaacggcagcgaggggaacattacaacccgcatcagagcttctgagacgggctcagatgaggccataaaatctatcttggaacaggccaaacgggagctccaagtgcagaaaactgctgaaccagctcagccttcaagtgcttccggtagcgggaattcagacgacgctattagatctatcttgcagcaggctaggagagagatggaagcccaacaggcggcactcgacccggcattgaagcaggcaccactgtcacagtctgatattactatcctcactcctaaactgctgagcacttcccccatgcccactgtgtcgtcctatccgcctttagcaataagcctgaaaaagccatctgctgctcccgaagccggtgcctcagccttgccgaacccacccgcgcttaagaaggaggcgcaggacgctcccggacttgacccacagggcgcagccgactgcgcacagggcgtgctccgccaagtgaaaaacgaggtcggcaggagtggtgcctggaaggatcactggtggtctgctgtgcagccggaacggaggaatgctgccagcagcgaagaggctaaggcggaggagaccgggggtggtaaggaaaaaggatctggcggttcgggcggcggatctcagccccgcgcggaacgcagtcagcttcagggaccatcttcgagtgagtactggaaggagtggccttctgctgaatccccctactctcaatcctctgagttaagcctcaccggtgcctccaggtcggagacccctcagaattcacccttgccttcaagccctattgtgcccatgagcaaacctactaaaccttccgtaccaccgctgacgcctgagcagtatgaagtttatatgtaccaggaggtggatactattgagctcactagacaggtgaaagagaagctcgccaagaatgggatatgtcaaagaattttcggcgaaaaagttctcgggctcagccaggggtcggttagcgacatgctctctcggccaaagccgtggtctaaacttactcagaagggacgagaaccattcatccgaatgcagctttggctgaatggcgagctggggcagggggttctgcctgtccagggacagcagcagggcccagtcctccattctgtgacatctctgcaggacccactgcagcaaggttgtgtgagctcagagtctacacctaagacttcggcctcatgtagtcccgcacctgaatcccccatgtccagttctgagagtgtgaagagcctgaccgaactggtacaacagccgtgcccgccgattgaggcctccaaggacagcaagccaccagagccttctgatccaccagcgtcagacagccagccaacaacaccgctgcctctcagtggccatagcgcactatcaatccaagaactcgtggccatgagccctgaattagacacttatggcatcactaagcgagtgaaagaggtcctaacagacaataatctcgggcagaggttgtttggcgaaactatattgggccttactcagggatccgtttctgatctattggccaggccaaaaccctggcacaaactttccctgaaaggacgcgagcctttcgttaggatgcagctctggttgaacgacccgaataacgtagagaaactaatggacatgaagaggatggagaagaaggcctatatgaagcgaagacacagctcggtgagtgacagtcagccctgcgagccaccttcagttgggaccgagtactctcagggagccagcccacagccacagcaccaactgaaaaagcctcgggtggtgctcgcaccagaagaaaaagaagccctaaagcgcgcataccaacagaagccctatccgtccccaaagacgattgaagatcttgctacccagctcaacctaaaaacatccacagtaattaactggttccataattatcgctctagaataagacgggaactcttcattgaagagatacaggccggatcccagggccaagccggtgcgtcagattcacccagcgcccgtagcggtcgtgctgccccttcctctgaaggagacagctgtgacggagtcgaagccacagaagggccagggtcagctgacaccgaagagccaaaatcgcagggtgaggccgaacgagaggaagtgccacggccggctgaacagactgagcctcctccctctggaacccctgggcccgatgatgccagggatgatgatcacgagggaggacctgtggagggaccaggaccactcccatcccccgcctccgccaccgccaccgccgcccccgcagcccctgaagatgccgctacgtctgctgctgctgcaccgggcgagggaccagccgcgccatcatctgcacccccacccagtaactcgtcaagcagcagtgcaccacggcggccaagctcactgcaaagcctgtttggtctacccgaagccgccggcgcccgcgactcccgcgataatcccctgcgtaaaaaaaaggccgcaaacctgaacagcatcattcatcgcctggaaaaggcagcctctagagaggagccgattgagtgggaattctag

SEQ ID NO: 80193 - DNA, 4551 bp, Artificial Sequence
  derived and/or modified sequence
atggccgccaacgtgggctccatgttccagtactggaagagatttgacctgcagcagctgcagcgggagctggatgccacagccaccgtgctggccaaccggcaggatgagagcgagcagagcaggaagaggctcatcgagcagagccgggagttcaagaagaacaccccagaggacctgaggaagcaggtggcccccctgctgaagagcttccagggcgagattgatgccctgagcaagaggagcaaggaggccgaggccgccttcctgaatgtgtacaagaggctgattgatgtgcctgaccctgtgcctgccctggacctgggccagcagctgcagctgaaggtgcagaggctgcatgacatcgagacagagaaccagaagctgcgggagaccctggaggagtacaacaaggagtttgctgaggtgaagaaccaggaggtgaccatcaaggccctgaaggagaagatccgggagtatgagcagaccctgaagaaccaggccgagaccatcgccctggagaaggagcagaagctgcagaatgactttgctgagaaggagaggaagctgcaggagacccagatgagcaccaccagcaagctggaggaggccgagcacaaggtgcagagcctgcagacagccctggagaagaccaggacagagctgtttgacctgaagaccaagtatgatgaggagaccacagccaaggcagatgaaattgagatgatcatgacagacctggagcgggccaaccagagagctgaggtggcccagcgggaggccgagaccctgcgggagcagctgagcagcgccaaccacagcctgcagctggccagccagatccagaaggccccagatgtggagcaggccatcgaggtgctgaccaggagcagcctggaggtggagctggccgccaaggagcgggagatcgcccagctggtggaggatgtgcagaggctgcaggccagcctgaccaagctgagagaaaattctgccagccagatcagccagctggagcagcagctgagcgccaagaacagcaccctgaagcagctggaggagaagctgaagggccaggccgactatgaggaggtgaagaaggagctgaacatcctgaagtccatggagtttgcccccagcgagggcgccggcacccaggatgctgccaagcccctggaggtgctgctgctggagaagaacagaagcctgcagagtgaaaatgctgccctgcgcatcagcaacagcgacctgagcggcagcgcccggaggaagggcaaggaccagcctgagagccggcggcccggcagcctgcctgcccccccacccagccagctgcccagaaatcctggagagcaggccagcaacaccaacggcacccaccagttcagccctgctggcctgagccaggacttcttcagcagcagcctggccagccccagcctgcccctggccagcacaggcaagtttgccctgaacagcctgctgcagaggcagctgatgcagagcttctacagcaaggccatgcaggaggccggcagcacctccatgatcttcagcacaggcccctacagcaccaacagcatcagcagccagagccccctgcagcagagcccagatgtgaatggcatggcccccagccccagccagagcgagagcgctggctctgtgtctgagggggaggagatggacacagctgagatcgcccggcaggtgaaggagcagctgatcaagcacaacatcggccagaggatcttcggccactacgtgctgggcctgagccagggctctgtgtctgagatcctggcccggcccaagccctggaacaagctgactgtgcggggcaaggagcccttccacaagatgaagcagttcctgagtgatgagcagaacatcctggccctgcggagcatccagggccggcagagagaaaatcctggccagagcctgaacagactcttccaggaggtgcccaagagaagaaatggaagtgagggcaacatcaccacccgcatccgggccagcgagaccggcagtgatgaggccatcaagagcatcctggagcaggccaagcgggagctgcaggtgcagaagacagctgagcccgcccagcccagcagcgccagcggcagcggcaacagtgatgatgccatccgcagcatcctgcagcaggcccggcgggagatggaggcccagcaggccgccctggaccctgccctgaagcaggcccccctgagccagagcgacatcaccatcctgacccccaagctgctgagcaccagccccatgcccaccgtgtcctcctacccacccctggccatcagcctgaagaagcccagcgctgcccctgaggccggggccagcgccctgcccaaccccccagccctgaagaaggaggcccaggatgcccctggcctggacccccagggcgctgctgactgtgcccagggcgtgctgcggcaggtgaagaatgaggtgggccgcagcggggcctggaaggaccactggtggagcgctgtgcagcctgagaggagaaatgctgccagcagcgaggaggccaaggccgaggagactggaggcggcaaggagaagggcagcggcggcagcggcggcggcagccagcccagggctgagaggagccagctgcagggccccagcagcagcgagtactggaaggagtggcccagcgctgagagcccctacagccagagcagcgagctgagcctgactggagccagccgctctgagaccccccagaacagccccctgcccagcagccccatcgtgcccatgagcaagcccaccaagcccagcgtgccccccctgaccccagagcagtatgaggtgtacatgtaccaggaggtggacaccatcgagctgacccggcaggtgaaggagaagctggccaagaatggcatctgccagaggatctttggagagaaggtgctgggcctgagccagggctctgtgtctgacatgctgagccggcccaagccctggagcaagctgacccagaagggccgggagcccttcatccgcatgcagctgtggctgaatggagagctgggccagggcgtgctgcctgtgcagggccagcagcagggccctgtgctgcacagcgtgaccagcctgcaggaccccctgcagcagggctgtgtgagcagcgagagcacccccaagaccagcgccagctgcagccctgcccctgagagccccatgagcagcagcgagagcgtgaagagcctgacagagctggtgcagcagccctgcccccccatcgaggccagcaaggacagcaagcccccagagcccagcgaccccccagccagtgacagccagcccaccacccccctgcccctgagcggccacagcgccctgagcatccaggagctggtggccatgagccctgagctggacacctacggcatcaccaagagggtgaaggaggtgctgacagacaacaacctgggccagaggctgtttggagagaccatcctgggcctgacccagggctctgtgtctgacctgctggcccggcccaagccctggcacaagctgagcctgaagggccgggagccctttgtgaggatgcagctgtggctgaatgaccccaacaacgtggagaagctgatggacatgaagaggatggagaagaaggcctacatgaagagaagacacagctctgtgtctgacagccagccctgtgagccccccagcgtgggcacagagtacagccagggcgccagcccccagccccagcaccagctgaagaagccccgggtggtgctggcccctgaggagaaggaggccctgaagagggcctaccagcagaagccctaccccagccccaagaccatcgaggacctggccacccagctgaacctgaagaccagcaccgtcatcaactggttccacaactaccgcagccgcatcagaagagagctgttcatcgaggagatccaggccggcagccagggccaggccggggccagtgacagccccagcgcccggagcggccgggccgcccccagcagcgagggggacagctgtgatggagtggaggccacagagggccctggcagcgctgacacagaggagcccaagagccagggcgaggccgagcgggaggaggtgcccaggcctgctgagcagacagagcccccaccttctggcaccccaggcccagatgatgccagagatgatgaccacgagggcggccctgtggagggccctggccccctgcccagccctgccagcgccacagccacagctgccccagctgccccagaagatgctgccaccagcgctgctgctgcccctggagagggccctgctgcccccagcagcgcccccccacccagcaacagcagcagcagcagcgccccccggcggcccagcagcctgcagagcctgtttggcctgcctgaggccgccggggcccgggacagccgggacaaccccctgaggaagaagaaggccgccaacctgaacagcatcatccaccggctggagaaggccgccagccgggaggagcccatcgagtgggagttctag

SEQ ID NO: 80194 - DNA, 4551 bp, Artificial Sequence
  derived and/or modified sequence
atggccgccaacgtgggcagcatgttccagtactggaagcggttcgacctccagcaactgcaaagggagctggatgccaccgccacagtactcgccaatcgtcaggacgaaagcgaacagtcaaggaagcgccttatcgaacagagtagggaatttaagaagaatacccccgaggacctgagaaagcaggtggcccctctccttaagagcttccagggcgagatcgatgcgctttctaaaaggagcaaggaagccgaagctgcttttctcaacgtgtacaaacgcttgattgatgtccctgaccccgttcccgccttggaccttggtcagcagcttcagttgaaggtacagaggttgcacgacatcgaaacggagaatcaaaaactgcgagagacactggaagagtataacaaagaatttgctgaggtaaagaatcaggaagtaaccattaaggcgcttaaggagaagatccgggagtacgaacagactctgaagaaccaggctgagaccatagccttagagaaagagcaaaaactccagaatgattttgctgaaaaagagcgcaagttgcaggaaactcagatgtcaaccacttccaagctggaggaggccgaacataaggtgcagagcttacaaaccgcactggagaagactcgcacagagctcttcgacctcaaaacaaagtacgacgaagagacgacagcgaaagcagatgagattgagatgattatgaccgatttggaaagggcaaaccaacgagccgaagttgcacagagagaggcagaaacactaagagagcagctgtcatcagctaaccactccctgcaacttgctagtcagatccagaaagctcccgatgtagagcaggccattgaggtgctcacaaggtcttcactcgaggtggagctggcggcgaaggaaagagaaatcgcccagctggtggaagatgtgcaacgcctccaggcatcactgacaaaattacgggagaattcagcatcccagatcagccagcttgagcagcaactgtctgctaaaaactctacactcaagcagctggaggaaaagcttaagggacaggccgattacgaggaagtgaagaaagagttgaatatactgaaaagcatggagtttgccccatccgaaggcgccggcacccaggatgctgctaaaccccttgaagttctgttgcttgagaagaaccggtcgctgcagtcagaaaatgctgcacttcggatttcaaactccgatctatctggttcggctaggagaaaagggaaagaccagcctgagtcaagacggcctggaagcctgccggctccccctccgtcccagctgcccagaaaccccggggaacaggctagcaacaccaacggcacacaccaattctctcccgccgggttatcccaagacttttttagttccagcctagccagtcccagccttcctctggccagcacaggaaagttcgccctcaactcgttgctgcagcgccaattgatgcagagtttttatagcaaggcaatgcaagaagctgggagtacatctatgatcttttctacgggaccctactctactaactcaatctcttcccagagtcccctccagcagagcccagatgtaaatggtatggcgccctccccaagtcagtccgaatcagctggttcggtcagtgaaggtgaggaaatggacaccgccgaaatcgccagacaggttaaggaacagctcattaagcacaacattggccagagaattttcggccactatgtcctgggtctgtcacagggcagtgtgtctgagatcttggccaggccaaaaccatggaataagctgaccgtgaggggcaaggagcctttccataagatgaagcagtttctctcagacgaacagaacatcctggccctccgcagtatccagggccgccagcgggagaacccaggccagtcactcaaccgcttattccaagaagtccccaagcgcaggaacggctccgaaggcaacattacaactcggatccgggcctccgaaacaggaagcgatgaggcaatcaaatcgatcctcgagcaagctaagcgggagctgcaggtgcagaagacagcggagcccgcacagccaagtagcgcgagcggctccggaaattctgacgatgccattcgctccattctgcagcaggctaggagggaaatggaagcacaacaagccgccctggatcccgccttaaagcaggccccactgtctcagtcagacattaccattctgacccctaaactccttagtacctctcctatgcctaccgtctccagctatcctccgctggctatcagtctgaagaaaccatcagctgcacccgaagcgggggcatccgcactccctaacccgcccgcacttaaaaaggaggcccaggacgctccgggtctggacccgcaaggggcagccgactgcgcacagggagtcctgagacaggtcaagaacgaggtaggccgctccggcgcttggaaagaccactggtggagcgcagtacagccggagaggcgcaacgccgcatcgagtgaagaggccaaagctgaggagaccggcggtggtaaagaaaaagggagcgggggctcaggcgggggctctcagccacgcgctgaaagatcccagctccaggggcccagctcttctgagtactggaaggaatggccaagcgctgagtcaccttatagccagtcctctgagctatctctcactggggcttcaaggagtgagacccctcagaattcccccctgcccagttcacccattgtgcccatgtctaagcctacaaaacccagtgtccctcccctgacccctgagcagtatgaggtgtatatgtaccaggaggtggacacaatcgagttaacacggcaggtgaaggagaagctcgcaaagaacggcatatgtcagagaatcttcggggagaaggtcctggggctctctcagggctccgtgtctgatatgctctcccgcccgaaaccttggagcaagctgacgcaaaaaggccgagaaccttttatccgtatgcagctctggctcaacggggagctgggacagggtgtcctgccagtgcagggccagcagcagggccctgtgttacattcggtcacctcattacaggaccctctccagcagggatgcgtctccagcgagtctactcccaagactagtgcctcatgcagccctgcccccgagagcccaatgtccagtagtgaaagcgtaaaatcgttaacagagctggttcagcaaccctgtcctcctatcgaggccagcaaggacagcaaacctcccgaaccgtctgatccccccgctagtgactcgcagccaaccacacccctgcccctgtccggacattctgccttgagtatccaggaactcgtcgctatgtcacccgagttggatacttatgggattaccaagcgggtgaaagaggtgctgactgacaacaacctagggcagcgcctgtttggggaaacgattctaggtcttacgcaagggtccgtgagcgatctgctggctcgtccaaaaccctggcacaagctgagcctgaaaggtcgagaaccatttgtgaggatgcagctgtggcttaacgacccaaacaatgtggaaaaactgatggacatgaaacggatggagaagaaggcctacatgaagcgaaggcatagcagtgtgagcgactcccaaccatgtgaacctccatcggttggaaccgaatactcccagggcgcgagtcctcagccacagcaccagctcaagaagccgagagtagtccttgcacccgaggaaaaggaggcactgaaacgggcttaccaacaaaagccatatccatcaccgaagacgatagaagacttggcaacgcagctcaacctgaaaaccagcacagtgatcaattggttccataactataggtctcgaatacgtagggagcttttcatcgaggagatccaggccgggagtcaaggccaggctggtgccagtgattcaccctcagctcgaagtggaagggctgcacctagctctgagggcgacagctgtgacggagttgaagcaacagaaggtccaggctctgccgatactgaagagcccaaatcacagggggaagccgaaagggaggaggttccccgacctgccgaacagaccgaaccccccccttctggtacgcccggaccagatgatgcccgcgacgacgaccatgagggtggccctgtggaggggccgggcccgcttccttcaccggcaagcgctacagcgacagcagctcctgcagcacccgaggacgctgccacatctgccgccgcagctcccggagaaggcccagcggctccgagctccgcgccacccccctcgaattcctcctctagcagcgcaccacgcagaccctccagcctccagtccctctttggcttaccggaagccgcgggggctagggacagtcgcgataacccacttaggaaaaagaaggccgcaaatctcaatagcatcattcatcggctggaaaaggccgctagccgcgaagaaccgatagagtgggaattttag

SEQ ID NO: 80195 - DNA, 4550 bp, Artificial Sequence
  derived and/or modified sequence
atggctgcaaacgtgggctctatgtttcaatactggaaacgattcgatctccagcaattgcaaagggagttagatgcgacagctaccgtgctggccaatagacaagacgaatcagagcagtctaggaaacgactgatagagcaatctcgggaatttaaaaagaatactccagaagacctgaggaagcaagttgcccctctcctcaaatcctttcaaggggaaattgatgccctaagcaagcgaagtaaggaggccgaggcagccttcctgaatgtgtacaagcgcctcatcgacgtgcccgaccctgtgccagctctggatctggggcagcagctccaattaaaggtgcagagacttcatgacatcgaaactgagaaccagaagctgcgcgagacgctggaggagtataacaaagagttcgcggaagtcaaaaaccaagaggtgaccataaaggccttgaaggagaaaatccgagagtatgaacagacactaaaaaatcaggctgagacaatcgcactggaaaaggaacagaagctgcaaaacgattttgccgagaaggagagaaaattgcaagaaacccagatgtcaaccacaagtaagttagaggaggctgaacataaagtgcagtcgctccaaaccgcactggagaaaaccaggaccgaactcttcgatcttaagaccaaatatgacgaggagactacagccaaagctgacgagatcgaaatgatcatgacagatcttgaacgggcaaatcaaagggccgaggttgcccagagggaggccgaaaccttgcgagaacagctcagctccgccaatcactccctgcagcttgctagtcagattcaaaaggcccctgatgtagaacaggcaattgaagttctgactcgatcttcattggaggtggaacttgcagcaaaggaacgggagatcgcacagttggttgaagacgtgcaacggctccaggcatcactcacgaaactcagggagaactcagcatcccagataagccagctggagcagcagttgtccgcaaagaattcaaccctgaagcaattagaggaaaagctgaagggacaggccgactatgaggaggtgaagaaagagctcaacatattgaaatcgatggagttcgccccttccgagggggcagggacacaggatgctgcaaagccgctggaagttctcctccttgaaaagaataggtctctgcagtccgagaacgcagctttgagaatctctaatagcgatctctcgggctctgctaggcggaaggggaaggatcagccagagtcaagaaggccagggagcctgcctgcccctcccccttcccagcttcccagaaaccccggtgaacaggcttctaacacgaacggcactcatcagttctccccggcaggcctcagtcaggattttttctcctcctcactcgcgtccccctcattacctctagctagtacgggcaagtttgccctgaatagcctcctgcaaagacagctcatgcaaagtttttattcgaaggcgatgcaagaggccggttcgacctctatgattttttccaccggcccatacagtaccaactctatatcttcccagtcaccactacagcagtcgcctgacgtcaacggaatggccccaagcccgtcccaaagcgagtccgctggaagcgtgagtgagggggaagaaatggacacagcggaaattgcccgtcaggtgaaggaacagttaatcaagcataatatcggtcagcggatcttcgggcattatgtgctgggcctgtctcaggggtcagtgagcgagatcctcgccaggcctaagccttggaacaaactgaccgtacggggaaaagagccgttccataaaatgaagcaatttctgagtgatgagcagaatattttggccctccggtccatccaggggcgacaaagggagaatccaggacaaagcctgaatagactgtttcaagaagtgcccaagcggagaaatggatcggagggcaacatcaccactagaatacgagcatccgagacaggaagtgacgaagctatcaagagtatcctggagcaggccaaaagggagctgcaggtgcagaagacagccgagcccgcacagccatccagtgccagcgggtcgggtaattccgacgatgctatccgctctatcctgcaacaggccagaagggaaatggaggcacagcaagctgctctagatcccgctcttaagcaagcacccctgagccagtcagatataaccattctcacaccaaaattgttatctacatcacctatgcctactgtgagctcgtatcccccactggcaattagcctgaaaaagccgtcggctgcgcctgaagctggtgcaagtgctctgcctaaccccccagccctgaagaaagaggcacaagacgctccgggactggacccgcagggcgcagcggactgcgcccagggggtccttcggcaggtaaagaacgaagtgggccgaagcggcgcttggaaggaccattggtggagcgcggtgcagcccgaacggaggaacgcagcctctagcgaagaagctaaggccgaggaaaccgggggaggaaaagagaaagggagcggtgggtctggcggaggctcacagcctagggctgagcgtagtcagttgcaggggcctagttcctctgagtactggaaggaatggccaagtgccgagtctccttactcacagagttccgagctaagcctgaccggagccagccgctccgagactccacagaactctcctctgccatcgagccctatcgtccctatgagcaaacccaccaagccctcggtccctccactgacccccgaacagtacgaggtgtatatgtaccaggaagtggacacaatcgagcttacaaggcaagttaaggagaaattagccaagaatggaatatgccagagaatctttggggagaaggtactgggcctctcccagggttcggtgtctgacatgttgtcccgccctaaaccttggtctaagcttacacagaagggtcgggagccctttattaggatgcagctgtggcttaatggggaactgggacagggagttctcccagtgcagggccaacagcagggcccagtgctgcattccgttacatccctccaagatccacttcagcagggttgcgtcagtagcgagagcacccctaagacaagcgcttcatgcagcccggctcctgagtcaccaatgagctcatctgagagtgtgaagagtctgacagagctggtccagcagccttgcccgccaatcgaggcatcaaaggattccaagccgccagagcctagcgatccgccagcctctgactcacaaccaaccaccccccttcccttgtctggtcacagcgcgctctccattcaggaattggtggccatgtcacccgagcttgacacctacggtattacgaaaagggtgaaagaggtattaactgacaataatctcggccaacgactatttggtgagacaatactcggcctgacacagggctccgtgagcgacctattagctcgtccaaaaccctggcataaactctctctaaagggacgagagcccttcgttaggatgcagctgtggctgaacgaccctaacaacgtcgagaagctaatggacatgaagcggatggaaaaaaaagcgtatatgaagaggcgccactcttcagtttccgactcccagccttgtgagcccccatctgtgggcaccgagtattcccagggtgcatcaccccagccccagcatcaactcaaaaagccacgggtcgtgcttgccccagaagaaaaggaggccctcaagagggcataccagcaaaaaccctatccatctccaaagactatcgaggacctggccacccagttgaacctgaaaacaagcactgtgatcaattggtttcacaattatcggagtcgtatccggagagaactgtttatcgaagagattcaggccggtagccagggacaggctggagcttccgacagcccttccgctaggtcagggagagcagcaccctctagcgagggggattcttgcgatggcgtggaggccacagaaggacccggatccgcagacaccgaagagcccaagtctcagggggaagccgagcgggaggaggtgcccaggcccgctgagcagactgaacccccaccttctggtacccccggaccagatgacgccagggatgatgatcatgaaggagggcctgtggaaggtccgggacctctgccaagccctgcctctgccacggccaccgctgccccagccgctcctgaggacgccgcaacttcagccgctgccgctcccggagaaggtccagctgcccctagcagcgccccaccgccatctaacagttccagttccagcgcccctcggcgacctagcagtctccagagcctcttcggacttcctgaagcggctggggctcgagattctcgggacaatccattaagaaagaagaaagcagccaatctgaactccatcattcacagactggagaaggcggctagcagagaggaacctattgaatgggagtttta

SEQ ID NO: 80196 - protein, 662 aa, Artificial Sequence
  derived and/or modified sequence
MAANVGSMFQYWKRFDLQQLQRELDATATVLANRQDESEQSRKRLIEQSREFKKNTPEIDALSKRSKEAEAAFLNVYKRLIDVPDPVPALDLGQQLQLKVQRLHDIETENQKLRETLEEYNKEFAEVKNQEVTIKALKEKIREYEQTLKNQAETIALEKEQKLQNDFAEKERKLQETQMSTTSKLEEAEHKVQSLQTALEKTRTELFDLKTKYDEETTAKADEIEMIMTDLERANQRAEVAQREAETLREQLSSANHSLQLASQIQKAPDVEQAIEVLTRSSLEVELAAKEREIAQLVEDVQRLQASLTKLRENSASQISQLEQQLSAKNSTLKQLEEKLKGQADYEEVKKELNILKSMEFAPSEGAGTQDAAKPLEVLLLEKNRSLQSENAALRISNSDLSGRCAELQVRITEAVATATEQRELIARLEQDLSIIQSIQRPDAEGAAEHRLEKIPEPIKEATALFYGPAAPASGALPEGQVDSLLSIISSQRERFRARNQELEAENRLAQHTLQALQSELDSLRADNIKLFEKIKFLQSYPGRGSGSDDTELRYSSQYEERLDPFSSFSKRERQRKYLSLSPWDKATLSMGRLVLSNKMARTIGFFYTLFLHCLVFLVLYKLAWSESMERDCATFCAKKFADHLHKFHENDNGAAAGDLWQ

SEQ ID NO: 80197 - DNA, 2878 bp, Artificial Sequence
  derived and/or modified sequence
ctccgtctcaatatgtctcaagatggcggccaatgtgggatcgatgtttcaatattggaagcgctttgatttacagcagctgcagagagaactcgatgccaccgcaacggtattggcgaaccggcaggatgaaagtgagcagtccagaaagcggcttatcgaacagagccgggagttcaagaagaacactccagagattgatgcactgagtaaaagaagcaaggaagctgaagcagctttcttgaatgtctacaaaagattgattgacgtcccagatcccgtaccagctttggatctcggacagcaactccagctcaaagtgcagcgcctgcacgatattgaaacagagaaccagaaacttagggaaactctggaagaatacaacaaggaatttgctgaagtgaaaaatcaagaggttacgataaaagcacttaaagagaaaatccgagaatatgaacagacactgaagaaccaagccgaaaccatagctcttgagaaggaacagaagttacagaatgactttgcagaaaaggagagaaagctgcaggagacacagatgtccaccacctcaaagctggaggaagctgagcataaggttcagagcctacaaacagccctggaaaaaactcgaacagaattatttgacctgaaaaccaaatacgatgaagaaactactgcaaaggccgacgagattgaaatgatcatgacggaccttgaaagggcaaaccagagggcagaggtggctcagagagaggcggagaccttaagggaacagctctcatcggccaatcactccctccagctggcctcacagatccagaaggcaccagacgtggagcaggccatagaggtgctgacccgctccagcctagaagttgagttggccgccaaggagcgggagatcgcacagctggtggaggacgtgcagagactccaggccagcctcaccaagctgcgggagaattcggccagccagatctcacagcttgagcagcagctgagcgccaaaaacagcacactcaaacaactggaagaaaaactcaaaggccaggctgactatgaagaggtgaagaaagagctgaacattctgaagtccatggagtttgcaccgtccgagggcgctgggacacaggatgcggccaagcccctggaggtgctgttgctggagaagaaccgctcgctgcagtccgagaacgccgcgctgcgcatctccaacagcgacctgagcggacgctgtgcagagctgcaagtccgtatcactgaggctgtggccacagccactgagcagagagagctgatcgcccgcctggagcaggacctgagcatcattcagtccatccagcggcccgatgccgagggtgccgctgagcaccgcctggagaagatcccagagcccatcaaagaggccactgccctattctacggacctgcagcaccagccagcggtgccctcccagagggccaggtggattcactgctttccatcatctccagccagagggagcgcttccgtgcccggaaccaggagcttgaggccgagaaccgcctggcccagcacaccctccaggccctgcagagtgagctggacagcctgcgcgccgacaacatcaagctctttgagaagatcaagttcctgcagagctaccctggccggggcagcggcagtgatgacacggagctgcggtactcgtcccagtacgaggagcgcctggaccccttctcctccttcagcaagcgggagcggcagaggaagtacctgagcttgagtccctgggacaaggccaccctcagcatggggcgtctggttctctccaacaagatggcgcgcaccatcggcttcttctacacactgttcctgcactgcctggtcttcctggtgctctacaagctggcatggagcgagagcatggagagggactgtgccaccttctgcgccaagaagttcgctgaccacctgcacaagttccacgagaatgacaacggggctgcggctggtgacttgtggcagtgataccccggggcctcccccgtgacagtgacggctgcgcctccaccccgactgctcagtgcatctaatcacttagactcccctgaagaatcccccatggaaactgcccttatccgctgtccagcagctgccagaggccccaggtcacctcgggtccccttgaaagaatgtctcggtcacatcaggcccgctaggtccagagagcgagcccccaatgcccggccaggctaagccgcagagaccctctcagcccccacctcaggttagggctctgcccgcagcctgacctctagccctggtggcagaggtccctcagctgcgaggctaattgggtgaccaccgattccagctgcggttaatccagcttgggcctgtctgcactgcgatcctcttgggctctcctaggatccccccatgccccgtaagaggtggaagacgcttccttccaggacagcaggctttgagtccagcacccccagcctgcctttgccaccagccccaccctgcagagtatatgaggcttgacagagtctgccccctcccccactgcaccccaagagagagagccccagccagcggaacagtttctattaccccctccctgcccccagacccatgtgatttctgctttcttctttagcaagatattctggtttctagataaggaagagtctctaatgagcccccgagccccagtctcttcagactcatggattggtctgaggggtctgaacgtctcctagccaatcagaactggctgtggaccaccctagcacggccacctctcagggccactggcaggccttcctgagttagatttgtagttgcatatttagctttgcacatttgaaataaaccacggttgcagcc

SEQ ID NO: 80198 - DNA, 1989 bp, Artificial Sequence
  derived and/or modified sequence
atggccgccaacgtgggcagcatgttccagtactggaagagattcgacctgcagcagctgcagagagagctggacgccaccgccaccgtgctggccaacagacaggacgagagcgagcagagcagaaagagactgatcgagcagagcagagagttcaagaagaacacccccgagatcgacgccctgagcaagagaagcaaggaggccgaggccgccttcctgaacgtgtacaagagactgatcgacgtgcccgaccccgtgcccgccctggacctgggccagcagctgcagctgaaggtgcagagactgcacgacatcgagaccgagaaccagaagctgagagagaccctggaggagtacaacaaggagttcgccgaggtgaagaaccaggaggtgaccatcaaggccctgaaggagaagatcagagagtacgagcagaccctgaagaaccaggccgagaccatcgccctggagaaggagcagaagctgcagaacgacttcgccgagaaggagagaaagctgcaggagacccagatgagcaccaccagcaagctggaggaggccgagcacaaggtgcagagcctgcagaccgccctggagaagaccagaaccgagctgttcgacctgaagaccaagtacgacgaggagaccaccgccaaggccgacgagatcgagatgatcatgaccgacctggagagagccaaccagagagccgaggtggcccagagagaggccgagaccctgagagagcagctgagcagcgccaaccacagcctgcagctggccagccagatccagaaggcccccgacgtggagcaggccatcgaggtgctgaccagaagcagcctggaggtggagctggccgccaaggagagagagatcgcccagctggtggaggacgtgcagagactgcaggccagcctgaccaagctgagagagaacagcgccagccagatcagccagctggagcagcagctgagcgccaagaacagcaccctgaagcagctggaggagaagctgaagggccaggccgactacgaggaggtgaagaaggagctgaacatcctgaagagcatggagttcgcccccagcgagggcgccggcacccaggacgccgccaagcccctggaggtgctgctgctggagaagaacagaagcctgcagagcgagaacgccgccctgagaatcagcaacagcgacctgagcggcagatgcgccgagctgcaggtgagaatcaccgaggccgtggccaccgccaccgagcagagagagctgatcgccagactggagcaggacctgagcatcatccagagcatccagagacccgacgccgagggcgccgccgagcacagactggagaagatccccgagcccatcaaggaggccaccgccctgttctacggccccgccgcccccgccagcggcgccctgcccgagggccaggtggacagcctgctgagcatcatcagcagccagagagagagattcagagccagaaaccaggagctggaggccgagaacagactggcccagcacaccctgcaggccctgcagagcgagctggacagcctgagagccgacaacatcaagctgttcgagaagatcaagttcctgcagagctaccccggcagaggcagcggcagcgacgacaccgagctgagatacagcagccagtacgaggagagactggaccccttcagcagcttcagcaagagagagagacagagaaagtacctgagcctgagcccctgggacaaggccaccctgagcatgggcagactggtgctgagcaacaagatggccagaaccatcggcttcttctacaccctgttcctgcactgcctggtgttcctggtgctgtacaagctggcctggagcgagagcatggagagagactgcgccaccttctgcgccaagaagttcgccgaccacctgcacaagttccacgagaacgacaacggcgccgccgccggcgacctgtggcagtag

SEQ ID NO: 80199 - DNA, 1989 bp, Artificial Sequence
  derived and/or modified sequence
atggcagccaacgtgggatcaatgtttcagtactggaaaaggtttgatttgcaacagttgcagagagagcttgacgctacagccaccgtgctggcaaatcggcaggacgagagtgagcaatcacgcaagcgactcattgagcagtctagggaatttaagaagaacacaccagagattgatgcgcttagcaagaggtctaaggaggccgaggccgcattcctgaacgtgtataagagactcatcgacgtccccgaccccgttccagccctggacttgggccagcagctccagttgaaggtgcagcgtctgcacgacattgagaccgaaaatcagaaactgcgagaaacactggaggagtataacaaggaattcgctgaggtgaaaaaccaggaggtgacaataaaagctctcaaagaaaagattagggagtatgagcagaccttgaaaaatcaagccgaaaccatcgcgcttgaaaaagaacagaagctgcagaacgattttgccgagaaagagcgcaagctccaggagactcagatgtccaccacctccaaactggaggaggcagaacataaggtacagagccttcagacagccctggaaaagacaaggacagagttgtttgacttgaagacgaagtacgacgaagaaaccactgccaaagcagatgagattgaaatgataatgactgacctggagcgggcaaaccagagggccgaggtggcacagcgagaggctgaaacgctgcgcgagcaactgtccagtgccaaccatagtctgcagctggcgtcccaaattcagaaggcccctgacgtggagcaggccattgaagtgctaactcgctcgagcctcgaggtcgagcttgctgccaaagagcgcgagattgcccagctagtagaggacgtacaacgtttgcaggcgagcttgaccaaactgcgagagaactccgctagccagatatcacagctcgagcagcagctgtccgcaaagaacagtaccttaaaacaattggaggaaaagttgaaagggcaggcggattatgaggaagtgaagaaggagctcaacattctgaagtcaatggagttcgcgccttctgaaggcgcaggcacgcaagacgctgcgaaaccattagaggttctgctacttgagaagaatcgctctctccagtctgaaaacgccgcacttcggatatctaacagtgatctctctggccgctgtgctgaactgcaggtgcgcatcacagaggccgttgccacggctaccgaacagagggagctgattgccaggcttgagcaggatctgtcgattatccaatctattcaacggccagacgccgagggggctgccgagcaccggctggagaaaatcccggagcctattaaagaggcaactgccctcttttacgggcctgctgccccggcatccggtgcactgcctgaaggacaggtggatagtctgctgtcaatcatatcttctcagagggagcggttccgggcccggaatcaggaattagaggccgagaatcgtttggcccagcacaccctacaggctctgcagtccgaacttgattccctgcgagccgacaacattaaattatttgagaaaatcaagtttttgcaatcttacccaggccgaggatcaggaagtgatgatactgaactgaggtattcatctcagtacgaagaacgcctggaccccttctcttccttcagcaaacgtgagcggcaacgaaaatacctatcactgtcaccctgggacaaagccactctaagcatgggtagactggtgttgagcaataagatggctagaacaattggcttcttttacacactgtttctgcattgcctggtcttcctggttttgtacaaactggcatggagtgagtctatggaacgagactgcgccactttctgcgcgaaaaagtttgccgaccacctacataagttccacgaaaatgacaacggtgctgctgctggggacttgtggcagtag

SEQ ID NO: 80200 - DNA, 1989 bp, Artificial Sequence
  derived and/or modified sequence
atggccgccaacgtgggctccatgttccagtactggaagagatttgacctgcagcagctgcagcgggagctggatgccacagccaccgtgctggccaaccggcaggatgagagcgagcagagcaggaagaggctcatcgagcagagccgggagttcaagaagaacaccccagaaattgatgccctgagcaagaggagcaaggaggccgaggccgccttcctgaatgtgtacaagaggctgattgatgtgcctgaccctgtgcctgccctggacctgggccagcagctgcagctgaaggtgcagaggctgcatgacatcgagacagagaaccagaagctgcgggagaccctggaggagtacaacaaggagtttgctgaggtgaagaaccaggaggtgaccatcaaggccctgaaggagaagatccgggagtatgagcagaccctgaagaaccaggccgagaccatcgccctggagaaggagcagaagctgcagaatgactttgctgagaaggagaggaagctgcaggagacccagatgagcaccaccagcaagctggaggaggccgagcacaaggtgcagagcctgcagacagccctggagaagaccaggacagagctgtttgacctgaagaccaagtatgatgaggagaccacagccaaggcagatgaaattgagatgatcatgacagacctggagcgggccaaccagagagctgaggtggcccagcgggaggccgagaccctgcgggagcagctgagcagcgccaaccacagcctgcagctggccagccagatccagaaggccccagatgtggagcaggccatcgaggtgctgaccaggagcagcctggaggtggagctggccgccaaggagcgggagatcgcccagctggtggaggatgtgcagaggctgcaggccagcctgaccaagctgagagaaaattctgccagccagatcagccagctggagcagcagctgagcgccaagaacagcaccctgaagcagctggaggagaagctgaagggccaggccgactatgaggaggtgaagaaggagctgaacatcctgaagtccatggagtttgcccccagcgagggcgccggcacccaggatgctgccaagcccctggaggtgctgctgctggagaagaacagaagcctgcagagtgaaaatgctgccctgcgcatcagcaacagcgacctgagcggccgctgtgccgagctgcaggtgcgcatcacagaagctgtggccacagccacagagcagcgggagctgattgcccggctggagcaggacctgagcatcatccagagcatccagaggccagatgctgagggcgctgctgagcaccggctggagaagatccctgagcccatcaaggaggccacagccctcttctacggccctgctgccccagccagcggggccctgcctgagggccaggtggacagcctgctgagcatcatcagcagccagcgggagcgcttccgggccaggaaccaggagctggaggccgagaaccggctggcccagcacaccctgcaggccctgcagagcgagctggacagcctgcgggctgacaacatcaagctgtttgagaagatcaagttcctgcagagctacccaggccggggcagcggcagtgatgacacagagctgcgctacagcagccagtatgaggagcggctggaccccttcagcagcttcagcaagcgggagcggcagaggaagtacctgagcctgagcccctgggacaaggccaccctgtccatgggccgcctggtgctgagcaacaagatggcccggaccatcggcttcttctacaccctcttcctgcactgcctggtgttcctggtgctgtacaagctggcctggagcgagagcatggagcgggactgtgccaccttctgtgccaagaagtttgctgaccacctgcacaagttccatgaaaatgacaatggagctgctgctggggacctgtggcagtag

SEQ ID NO: 80201 - DNA, 1989 bp, Artificial Sequence
  derived and/or modified sequence
atggccgccaacgtgggcagcatgttccagtactggaagcggttcgatctgcagcagttgcaacgcgagctggacgccactgctactgttctcgccaataggcaggacgagtcagaacagtcacgcaagcgcctcatcgaacaatcacgggaattcaagaaaaatacaccggaaatcgacgcattgtccaagcggtcaaaagaggccgaggctgcttttcttaatgtgtacaagagactaatcgacgtgccagacccagtacccgccctggatcttgggcagcagttgcagctcaaggtccagcggttgcacgatatagagacggagaaccaaaagctgagggagacgttagaggaatacaacaaggagtttgcagaggtgaagaaccaggaggtaaccattaaggctcttaaagaaaagattagagaatacgaacagacactgaagaaccaggcagagactattgcactcgaaaaggagcagaaactgcagaatgattttgccgagaaggagcgtaaattgcaggaaacgcagatgagcactactagtaaactggaagaggctgaacacaaagtgcagagcctgcaaaccgcattagaaaaaactaggaccgagttattcgacttaaaaactaaatatgacgaggaaacaacagcaaaagccgacgagatagaaatgataatgacagacttagaacgggcaaatcagcgggcggaagtggcacagagagaggccgaaaccctacgtgaacagttaagtagcgccaaccattccctgcaactggcttcacagatacaaaaggccccagatgtagagcaagcaatagaggtgctgacgaggagctccctcgaagtagagttggcagccaaggagagggaaatcgcacagttggtggaggacgtgcaacgattgcaggcctccttgacaaagctccgcgagaacagcgcgtcgcagatcagtcagctggagcagcagctgtccgccaaaaatagcacactgaagcagctcgaggagaagttaaagggccaagcagattatgaagaggttaaaaaggaactgaacattctgaagtccatggagtttgcacccagtgagggagctggcacccaggatgccgcaaaaccgctggaggtgctcttgttggagaagaaccgctcgcttcagtctgagaatgcagctctgcggatcagcaactccgacctgtctggaagatgcgccgaactccaggtccggattaccgaagccgtggccaccgcaactgaacaacgggagctgatagctagactggaacaggacctgagcatcattcagtcaatacaaaggccagatgctgaaggtgccgctgaacaccggctcgaaaagatcccagaaccgatcaaggaggcaaccgcactgttttacggtcctgctgctcccgccagtggcgccctacccgaagggcaggtcgactctctgttgtcgatcatatctagtcagagggagcgttttcgtgcacgcaatcaggagctcgaggcggagaatcgactggctcagcatacgctccaggctctgcagtctgaattggactcacttagagctgataacatcaagctttttgaaaaaatcaagtttctgcagtcgtaccctgggaggggttcagggtcagacgacacagagctgagatactctagccaatacgaggagaggctggacccattctccagtttctccaaaagggagcgccaacggaaatatttgagcctcagtccttgggataaggccactctttccatgggccgattagttttaagtaataaaatggcccgcaccattggatttttttacacactgtttctgcactgcctggttttcctcgtgctgtacaagctcgcctggtccgagagcatggaacgggattgcgccacattctgtgctaaaaaattcgcagaccatctgcacaagtttcacgaaaatgacaacggcgcggctgcgggagacctgtggcagtag

SEQ ID NO: 80202 - DNA, 1989 bp, Artificial Sequence
  derived and/or modified sequence
atggccgcaaacgtgggctccatgtttcagtactggaaaaggttcgacctccagcaattgcagagggaattggatgccaccgcaactgttctagcgaaccgccaagacgagagtgaacagagtcgtaaaagattgattgagcagagtagggagttcaagaaaaacacccccgagattgacgctttgagcaagcgcagtaaagaggctgaggccgcttttctaaatgtatacaaacgattgatcgatgtacccgaccccgtgcctgccctcgacttagggcagcagctgcaacttaaagttcagcgcctacatgacattgaaaccgagaatcagaagctacgggaaactctggaggagtataataaggagtttgcagaagtaaaaaatcaagaggtgacaataaaggccctcaaggaaaaaatccgggaatacgaacagacgttaaaaaaccaagctgaaacaatcgcgcttgagaaagagcaaaagttacagaatgatttcgccgaaaaagagcggaagcttcaggagacacaaatgtccacaaccagtaaactggaagaggctgagcacaaagtacagagtctgcaaactgccctcgaaaagactagaacagagctgttcgatcttaaaacaaagtatgatgaggagacaaccgccaaggctgatgaaatcgaaatgattatgacagaccttgaacgagccaatcagagagcagaggtggcacagagagaggcagagacacttcgagagcaactgtcgagtgctaatcatagcttacaattggcatcgcaaatccagaaagcaccagatgtggagcaggctatagaagtcctgacaaggtcctcactggaagtcgaattggcagccaaggagagggaaatcgctcagttggtggaggatgttcaacgtttacaggcctcactaactaagctcagagaaaactcagcctcgcagatctcgcagttggagcagcaactgtctgctaagaacagtacgttgaaacagctggaagaaaagctcaaaggccaagcagattacgaggaggtcaaaaaagagctgaatattcttaagagcatggagtttgcaccctctgaaggggcaggaactcaagacgcggcaaagcccctggaggttcttctgctcgagaagaatcgaagcctgcagagcgagaacgctgctctgcgtatcagcaacagtgatctgtcgggcaggtgcgccgagctgcaagtccgaataacagaagcagtggcaactgccaccgaacagagagagttgattgcacgcttggagcaggacctttcaatcatccagtccatccagcgccctgatgcagagggagccgcagagcacagactggaaaagatccccgagcctatcaaagaggctaccgccctcttttacgggccagcagctcctgctagtggagctcttcccgaagggcaggtcgatagcctgctctctatcatttcttctcaaagagagaggtttcgcgctaggaaccaagaactagaggcagaaaataggctagcacaacacacactccaggccctgcagagtgaactggactccctgcgagccgacaacatcaagctcttcgagaagatcaagttcctgcaatcatatcctggaaggggttcaggaagtgatgatactgagttacgctacagcagccagtatgaagagcgtctggatcctttctccagtttctctaagcgagaacgtcagcgcaaatacttgtcactatctccatgggacaaggcaacgctctccatgggacggctcgttctgtcgaataagatggcccgtacaatcggcttcttctacaccttatttctgcattgtcttgtcttcctggtgctgtataagctggcttggtccgaatcaatggagagagattgtgccacattttgtgctaagaaattcgcagaccacctgcacaagttccatgagaatgataatggggctgccgcaggagacctgtggcaatag

SEQ ID NO: 80203 - protein, 632 aa, Artificial Sequence
  derived and/or modified sequence
MAANVGSMFQYWKRFDLQQLQRELDATATVLANRQDESEQSRKRLIEQSREFKKNTPEDLRKQVAPLLKSFQGEIDALSKRSKEAEAAFLNVYKRLIDVPEVTIKALKEKIREYEQTLKNQAETIALEKEQKLQNDFAEKERKLQETQMSTTSKLEEAEHKVQSLQTALEKTRTELFDLKTKYDEETTAKADEIEMIMTDLERANQRAEVAQREAETLREQLSSANHSLQLASQIQKAPDVEQAIEVLTRSSLEVELAAKEREIAQLVEDVQRLQASLTKLRENSASQISQLEQQLSAKNSTLKQLEEKLKGQADYEEVKKELNILKSMEFAPSEGAGTQDAAKPLEVLLLEKNRSLQSENAALRISNSDLSGRCAELQVRITEAVATATEQRELIARLEQDLSIIQSIQRPDAEGAAEHRLEKIPEPIKEATALFYGPAAPASGALPEGQVDSLLSIISSQRERFRARNQELEAENRLAQHTLQALQSELDSLRADNIKLFEKIKFLQSYPGRGSGSDDTELRYSSQYEERLDPFSSFSKRERQRKYLSLSPWDKATLSMGRLVLSNKMARTIGFFYTLFLHCLVFLVLYKLAWSESMERDCATFCAKKFADHLHKFHENDNGAAAGDLWQ

SEQ ID NO: 80204 - DNA, 2776 bp, Artificial Sequence
  derived and/or modified sequence
atgtctcaagatggcggccaatgtgggatcgatgtttcaatattggaagcgctttgatttacagcagctgcagagagaactcgatgccaccgcaacggtattggcgaaccggcaggatgaaagtgagcagtccagaaagcggcttatcgaacagagccgggagttcaagaagaacactccagaggatttgcgcaagcaggtagcgccgctgctgaagagtttccaaggagagattgatgcactgagtaaaagaagcaaggaagctgaagcagctttcttgaatgtctacaaaagattgattgacgtcccagaggttacgataaaagcacttaaagagaaaatccgagaatatgaacagacactgaagaaccaagccgaaaccatagctcttgagaaggaacagaagttacagaatgactttgcagaaaaggagagaaagctgcaggagacacagatgtccaccacctcaaagctggaggaagctgagcataaggttcagagcctacaaacagccctggaaaaaactcgaacagaattatttgacctgaaaaccaaatacgatgaagaaactactgcaaaggccgacgagattgaaatgatcatgacggaccttgaaagggcaaaccagagggcagaggtggctcagagagaggcggagaccttaagggaacagctctcatcggccaatcactccctccagctggcctcacagatccagaaggcaccagacgtggagcaggccatagaggtgctgacccgctccagcctagaagttgagttggccgccaaggagcgggagatcgcacagctggtggaggacgtgcagagactccaggccagcctcaccaagctgcgggagaattcggccagccagatctcacagcttgagcagcagctgagcgccaaaaacagcacactcaaacaactggaagaaaaactcaaaggccaggctgactatgaagaggtgaagaaagagctgaacattctgaagtccatggagtttgcaccgtccgagggcgctgggacacaggatgcggccaagcccctggaggtgctgttgctggagaagaaccgctcgctgcagtccgagaacgccgcgctgcgcatctccaacagcgacctgagcggacgctgtgcagagctgcaagtccgtatcactgaggctgtggccacagccactgagcagagagagctgatcgcccgcctggagcaggacctgagcatcattcagtccatccagcggcccgatgccgagggtgccgctgagcaccgcctggagaagatcccagagcccatcaaagaggccactgccctattctacggacctgcagcaccagccagcggtgccctcccagagggccaggtggattcactgctttccatcatctccagccagagggagcgcttccgtgcccggaaccaggagcttgaggccgagaaccgcctggcccagcacaccctccaggccctgcagagtgagctggacagcctgcgcgccgacaacatcaagctctttgagaagatcaagttcctgcagagctaccctggccggggcagcggcagtgatgacacggagctgcggtactcgtcccagtacgaggagcgcctggaccccttctcctccttcagcaagcgggagcggcagaggaagtacctgagcttgagtccctgggacaaggccaccctcagcatggggcgtctggttctctccaacaagatggcgcgcaccatcggcttcttctacacactgttcctgcactgcctggtcttcctggtgctctacaagctggcatggagcgagagcatggagagggactgtgccaccttctgcgccaagaagttcgctgaccacctgcacaagttccacgagaatgacaacggggctgcggctggtgacttgtggcagtgataccccggggcctcccccgtgacagtgacggctgcgcctccaccccgactgctcagtgcatctaatcacttagactcccctgaagaatcccccatggaaactgcccttatccgctgtccagcagctgccagaggccccaggtcacctcgggtccccttgaaagaatgtctcggtcacatcaggcccgctaggtccagagagcgagcccccaatgcccggccaggctaagccgcagagaccctctcagcccccacctcaggttagggctctgcccgcagcctgacctctagccctggtggcagaggtccctcagctgcgaggctaattgggtgaccaccgattccagctgcggttaatccagcttgggcctgtctgcactgcgatcctcttgggctctcctaggatccccccatgccccgtaagaggtggaagacgcttccttccaggacagcaggctttgagtccagcacccccagcctgcctttgccaccagccccaccctgcagagtatatgaggcttgacagagtctgccccctcccccactgcaccccaagagagagagccccagccagcggaacagtttctattaccccctccctgcccccagacccatgtgatttctgctttcttctttagcaagatattctggtttctagataaggaagagtctctaatgagcccccgagccccagtctcttcagactcatggattggtctgaggggtctgaacgtctcctagccaatcagaactggctgtggaccaccctagcacggccacctctcagggccactggcaggccttcctgagttagatttgtagttgcatatttagctttgcacatttgaaataaaccacggttgcagcc

SEQ ID NO: 80205 - DNA, 1899 bp, Artificial Sequence
  derived and/or modified sequence
atggccgccaacgtgggcagcatgttccagtactggaagagattcgacctgcagcagctgcagagagagctggacgccaccgccaccgtgctggccaacagacaggacgagagcgagcagagcagaaagagactgatcgagcagagcagagagttcaagaagaacacccccgaggacctgagaaagcaggtggcccccctgctgaagagcttccagggcgagatcgacgccctgagcaagagaagcaaggaggccgaggccgccttcctgaacgtgtacaagagactgatcgacgtgcccgaggtgaccatcaaggccctgaaggagaagatcagagagtacgagcagaccctgaagaaccaggccgagaccatcgccctggagaaggagcagaagctgcagaacgacttcgccgagaaggagagaaagctgcaggagacccagatgagcaccaccagcaagctggaggaggccgagcacaaggtgcagagcctgcagaccgccctggagaagaccagaaccgagctgttcgacctgaagaccaagtacgacgaggagaccaccgccaaggccgacgagatcgagatgatcatgaccgacctggagagagccaaccagagagccgaggtggcccagagagaggccgagaccctgagagagcagctgagcagcgccaaccacagcctgcagctggccagccagatccagaaggcccccgacgtggagcaggccatcgaggtgctgaccagaagcagcctggaggtggagctggccgccaaggagagagagatcgcccagctggtggaggacgtgcagagactgcaggccagcctgaccaagctgagagagaacagcgccagccagatcagccagctggagcagcagctgagcgccaagaacagcaccctgaagcagctggaggagaagctgaagggccaggccgactacgaggaggtgaagaaggagctgaacatcctgaagagcatggagttcgcccccagcgagggcgccggcacccaggacgccgccaagcccctggaggtgctgctgctggagaagaacagaagcctgcagagcgagaacgccgccctgagaatcagcaacagcgacctgagcggcagatgcgccgagctgcaggtgagaatcaccgaggccgtggccaccgccaccgagcagagagagctgatcgccagactggagcaggacctgagcatcatccagagcatccagagacccgacgccgagggcgccgccgagcacagactggagaagatccccgagcccatcaaggaggccaccgccctgttctacggccccgccgcccccgccagcggcgccctgcccgagggccaggtggacagcctgctgagcatcatcagcagccagagagagagattcagagccagaaaccaggagctggaggccgagaacagactggcccagcacaccctgcaggccctgcagagcgagctggacagcctgagagccgacaacatcaagctgttcgagaagatcaagttcctgcagagctaccccggcagaggcagcggcagcgacgacaccgagctgagatacagcagccagtacgaggagagactggaccccttcagcagcttcagcaagagagagagacagagaaagtacctgagcctgagcccctgggacaaggccaccctgagcatgggcagactggtgctgagcaacaagatggccagaaccatcggcttcttctacaccctgttcctgcactgcctggtgttcctggtgctgtacaagctggcctggagcgagagcatggagagagactgcgccaccttctgcgccaagaagttcgccgaccacctgcacaagttccacgagaacgacaacggcgccgccgccggcgacctgtggcagtag

SEQ ID NO: 80206 - DNA, 1899 bp, Artificial Sequence
  derived and/or modified sequence
atggctgccaacgtcggctctatgtttcaatattggaagcgttttgatttacagcagctacagcgggagttggacgccaccgccactgtcctggccaaccgacaagatgaatccgagcagagccgcaagaggctgatcgagcagtccagggagttcaaaaagaacaccccagaggacctgaggaaacaagtggctccactcttgaagagcttccaaggggagatagatgcattgagcaagcgctccaaggaggctgaagctgccttcctcaatgtctataaacgactgattgatgtgccagaagtgacaattaaggcactgaaggagaagatcagagaatacgagcagaccctgaagaatcaagcagaaacgatcgcattagaaaaggaacagaagttacagaatgactttgcggagaaggagcggaagctccaagagacccagatgtctactacctctaaactggaggaagccgagcacaaagtgcagtcccttcagacagccctcgagaaaacaagaaccgaattattcgacctgaagactaaatatgatgaggagactactgccaaagcagacgagatcgaaatgattatgactgatcttgaaagggccaatcaaagagccgaagttgcccagcgagaagcggagactcttagagaacagctatcttcagccaaccactctctccagctggccagccagatacagaaggccccagatgtggagcaggccattgaagtgctgactcggagcagcctggaggttgaattggcagctaaggagagggaaattgcccagctggtcgaggacgtacagagactgcaggcctctctgacgaaattgcgggaaaattccgcctcccagatcagccagcttgagcagcaactgagtgctaaaaactctacccttaaacagttggaagaaaaacttaagggtcaggctgattatgaggaagtgaagaaggagctcaatatactcaagagtatggaattcgccccatcagagggggcgggcacgcaggatgccgcaaagcctctggaggtcttgcttctggagaagaacagatcactgcagagcgagaatgctgccctgagaattagcaattctgacctgagcggcaggtgtgctgagctgcaggtgcggattaccgaggctgtggcaacagcgaccgaacagcgcgaactgattgctagactggagcaggacttatcaatcattcagtccattcagcgtccagatgcagagggggcagcagaacatcgtcttgagaaaattcccgagccaattaaggaggctactgcattgttttacggcccagccgcccctgccagtggagcactccccgaggggcaggtggattctctcctgtctattatctccagtcagcgcgagcgtttccgtgctcggaaccaagagctggaggcagaaaaccgcctagcccaacacacactgcaggcgctacagtcagaactcgacagcctgagagcggacaacattaagctatttgagaagatcaagtttctccaaagctacccaggtcgaggttccggaagcgatgataccgagttgcgatatagcagtcagtatgaagagcgactggatcccttcagttcattttctaagagagaaagacagagaaagtatctgtccctgtcaccttgggataaggcgaccttatctatgggaagattggtactgtcaaataaaatggcccggactatcggatttttctacacgctgtttctgcattgcctggtgtttctggtgttgtataagctagcatggtcggaatcaatggaaagggactgcgcaaccttctgcgccaaaaaattcgccgaccaccttcataaattccacgagaacgataacggcgccgcagccggtgatctttggcagtag

SEQ ID NO: 80207 - DNA, 1899 bp, Artificial Sequence
  derived and/or modified sequence
atggccgccaacgtgggctccatgttccagtactggaagagatttgacctgcagcagctgcagcgggagctggatgccacagccaccgtgctggccaaccggcaggatgagagcgagcagagcaggaagaggctcatcgagcagagccgggagttcaagaagaacaccccagaggacctgaggaagcaggtggcccccctgctgaagagcttccagggcgagattgatgccctgagcaagaggagcaaggaggccgaggccgccttcctgaatgtgtacaagaggctgattgatgtgcctgaggtgaccatcaaggccctgaaggagaagatccgggagtatgagcagaccctgaagaaccaggccgagaccatcgccctggagaaggagcagaagctgcagaatgactttgctgagaaggagaggaagctgcaggagacccagatgagcaccaccagcaagctggaggaggccgagcacaaggtgcagagcctgcagacagccctggagaagaccaggacagagctgtttgacctgaagaccaagtatgatgaggagaccacagccaaggcagatgaaattgagatgatcatgacagacctggagcgggccaaccagagagctgaggtggcccagcgggaggccgagaccctgcgggagcagctgagcagcgccaaccacagcctgcagctggccagccagatccagaaggccccagatgtggagcaggccatcgaggtgctgaccaggagcagcctggaggtggagctggccgccaaggagcgggagatcgcccagctggtggaggatgtgcagaggctgcaggccagcctgaccaagctgagagaaaattctgccagccagatcagccagctggagcagcagctgagcgccaagaacagcaccctgaagcagctggaggagaagctgaagggccaggccgactatgaggaggtgaagaaggagctgaacatcctgaagtccatggagtttgcccccagcgagggcgccggcacccaggatgctgccaagcccctggaggtgctgctgctggagaagaacagaagcctgcagagtgaaaatgctgccctgcgcatcagcaacagcgacctgagcggccgctgtgccgagctgcaggtgcgcatcacagaagctgtggccacagccacagagcagcgggagctgattgcccggctggagcaggacctgagcatcatccagagcatccagaggccagatgctgagggcgctgctgagcaccggctggagaagatccctgagcccatcaaggaggccacagccctcttctacggccctgctgccccagccagcggggccctgcctgagggccaggtggacagcctgctgagcatcatcagcagccagcgggagcgcttccgggccaggaaccaggagctggaggccgagaaccggctggcccagcacaccctgcaggccctgcagagcgagctggacagcctgcgggctgacaacatcaagctgtttgagaagatcaagttcctgcagagctacccaggccggggcagcggcagtgatgacacagagctgcgctacagcagccagtatgaggagcggctggaccccttcagcagcttcagcaagcgggagcggcagaggaagtacctgagcctgagcccctgggacaaggccaccctgtccatgggccgcctggtgctgagcaacaagatggcccggaccatcggcttcttctacaccctcttcctgcactgcctggtgttcctggtgctgtacaagctggcctggagcgagagcatggagcgggactgtgccaccttctgtgccaagaagtttgctgaccacctgcacaagttccatgaaaatgacaatggagctgctgctggggacctgtggcagtag

SEQ ID NO: 80208 - DNA, 1899 bp, Artificial Sequence
  derived and/or modified sequence
atggccgccaacgtgggcagcatgttccagtactggaagcggttcgaccttcaacagctacagcgggaactagacgcgacagccactgtgctagcaaaccggcaagatgaaagcgaacaaagtcgaaaacggttgattgagcagtcccgagaatttaaaaaaaatacccctgaggacctgcgaaagcaggttgcccccctgctgaaaagcttccaaggcgagattgatgccctgtccaagaggtctaaagaggctgaggccgcgttcttaaatgtctacaagcgattgattgatgtaccggaggtcacgatcaaggctttgaaggagaagatccgggagtatgaacaaacccttaagaatcaggctgaaacaatcgccctggaaaaggagcagaagctgcagaacgactttgccgaaaaggagcgcaaactgcaggagactcagatgtctacaacgagcaagcttgaggaagcggagcataaagttcagagtctacagaccgctcttgagaagacgaggactgaattatttgacctgaaaacaaaatacgatgaagagaccactgctaaggctgatgaaatcgagatgattatgactgatttagaacgggccaaccaaagagccgaggtcgcgcagagggaggcggaaactttaagggagcagcttagttcagccaatcatagcctgcagctggcctctcaaatccaaaaagcgcccgatgtggagcaggccattgaggttctaacccgttcttccttagaagttgaactggccgccaaggagcgggagatagcacagctggtcgaggacgtccagaggctccaggccagtctgacaaagctccgcgagaactctgcatctcagatttcccagcttgagcaacagctttctgccaagaactctactctaaagcagctggaggagaagctcaaaggccaggcagattatgaagaagttaaaaaggagttgaacatactcaagtccatggaattcgctccttccgaaggggccggtacccaagacgccgccaaaccactggaggttttgctcctggaaaagaaccgatccctgcagtccgagaacgccgcattgaggattagtaattcggatctgagcggtcgctgtgcagagctgcaggtacggataactgaagctgtggcaacagcgactgagcagcgtgagctgattgcaaggctggaacaggatctgagcattatccagagtattcagcggccagatgctgagggcgctgccgaacacagactggaaaaaatccctgagcctattaaggaagctaccgccctgttttacggtccagccgcccccgcgtcaggagccctgccggaaggtcaagtagactcattattatccattatcagtagtcaacgggaacggtttagggccagaaaccaggagctcgaggcagagaaccggctcgcccagcataccttgcaagcattgcagagtgaacttgatagccttagagcagacaatattaagctgttcgagaaaatcaaattcctccaatcataccccggacgcgggagcggctctgacgacaccgaactcaggtatagctcgcaatatgaggaaagactggaccctttcagctccttcagtaaacgtgagcggcagaggaaatacctgtcactgtcaccctgggataaggcaaccctttctatgggtcgtctggtgctgagtaacaagatggcacgaacaattgggttcttctatactctgttcctgcattgcttagtgtttctggtcctgtataaactggcatggagcgagtccatggaacgagattgtgccactttttgtgccaagaaattcgccgaccacttgcacaaatttcacgagaacgacaacggggcagcagccggagacctctggcaatag

SEQ ID NO: 80209 - DNA, 1899 bp, Artificial Sequence
  derived and/or modified sequence
atggcggcaaacgttggctcaatgtttcagtactggaaaaggttcgatcttcagcaattacagagagagcttgatgccaccgctactgtcttagccaacaggcaagacgagtccgagcagagcaggaaacgcctgattgagcagtctagggaatttaaaaagaacacccccgaagatctgcgcaagcaggtcgccccactgctcaaatcttttcagggggagatcgatgccttatccaagaggagcaaggaggcagaggctgctttcctgaatgtttataaacgcctgatcgatgtacctgaggttaccataaaagctttgaaagagaaaattcgcgagtacgaacagacgcttaaaaaccaagctgagaccattgccctggagaaagaacagaagttgcagaacgattttgcggaaaaggagagaaagctgcaggagactcagatgtctactacctctaagctggaagaggccgagcacaaggttcagagtctacaaaccgcactggaaaaaaccaggacagagctgtttgatttaaaaaccaaatatgacgaagagacaaccgcaaaggccgatgagatcgagatgattatgaccgatctggagcgcgcaaaccagcgggctgaggtggcccagagggaggcagagactctgcgcgaacagcttagtagcgccaaccactcactacagttggcctctcagatccaaaaagcaccagacgtggagcaggcaattgaagtgctgactcggtcctctttggaagtggagcttgccgcaaaagagcgggagatagcacagcttgtcgaggatgtccagagactccaggcaagcttgacaaaactccgggagaattcagcctctcagatctcacagcttgagcagcaactgtcggccaagaatagcacccttaaacaactggaagagaaactgaaaggacaggcggattatgaggaagtcaaaaaagagctgaatatactgaaatcaatggagttcgctccaagcgagggggctggcacacaggatgccgctaaaccattagaggttctgctgttagagaagaatcgttcactgcaaagtgagaatgccgcactgcgcattagcaacagcgacctctcgggtagatgtgccgaattacaggtgcgtatcactgaggccgtggctacggccacggagcagcgagagctgatcgcgaggctagagcaggatttgtccattatccagtcaattcaacgcccagatgccgagggagctgccgaacataggctggaaaagatccccgaacctattaaggaggcaacagcgctgttctatggtcctgccgctcctgctagcggggctctgcctgaaggtcaggttgatagcctgctgagcattatctcttcacagcgggaacgcttccgggctcgtaaccaagagctggaggccgaaaacagactggctcagcacaccctgcaagccctacagtctgaacttgattcactgcgcgcagataatattaaattgtttgaaaaaatcaagtttctgcaatcataccctgggcgtggctcgggctccgatgatacagagttgcgctattcttcccaatacgaggaaagactcgaccccttctcatctttttcaaagcgggagcgacagcgcaagtatctctctctgagcccttgggacaaggctaccctgagcatgggtaggctcgtactgagtaataagatggcgaggaccatcggtttcttctacacacttttcctccattgtctggtgtttttagtgctctataaactagcgtggtcagagtcaatggagcgcgattgtgccacattctgtgccaaaaaatttgcagaccatctccacaagttccacgagaacgacaacggggctgcagccggagacctttggcagtag

SEQ ID NO: 80210 - protein, 639 aa, Artificial Sequence
  derived and/or modified sequence
MAANVGSMFQYWKRFDLQQLQDLRKQVAPLLKSFQGEIDALSKRSKEAEAAFLNVYKRLIDVPDPVPALDLGQQLQLKVQRLHDIETENQKLRETLEEYNKEFAEVKNQEVTIKALKEKIREYEQTLKNQAETIALEKEQKLQNDFAEKERKLQETQMSTTSKLEEAEHKVQSLQTALEKTRTELFDLKTKYDEETTAKADEIEMIMTDLERANQRAEVAQREAETLREQLSSANHSLQLASQIQKAPDVAIEVLTRSSLEVELAAKEREIAQLVEDVQRLQASLTKLRENSASQISQLEQQLSAKNSTLKQLEEKLKGQADYEEVKKELNILKSMEFAPSEGAGTQDAAKPLEVLLLEKNRSLQSENAALRISNSDLSGRCAELQVRITEAVATATEQRELIARLEQDLSIIQSIQRPDAEGAAEHRLEKIPEPIKEATALFYGPAAPASGALPEGQVDSLLSIISSQRERFRARNQELEAENRLAQHTLQALQSELDSLRADNIKLFEKIKFLQSYPGRGSGSDDTELRYSSQYEERLDPFSSFSKRERQRKYLSLSPWDKATLSMGRLVLSNKMARTIGFFYTLFLHCLVFLVLYKLAWSESMERDCATFCAKKFADHLHKFHENDNGAAAGDLWQ

SEQ ID NO: 80211 - DNA, 2331 bp, Artificial Sequence
  derived and/or modified sequence
actccgtctcaatatgtctcaagatggcggccaatgtgggatcgatgtttcaatattggaagcgctttgatttacagcagctgcaggatttgcgcaagcaggtagcgccgctgctgaagagtttccaaggagagattgatgcactgagtaaaagaagcaaggaagctgaagcagctttcttgaatgtctacaaaagattgattgacgtcccagatcccgtaccagctttggatctcggacagcaactccagctcaaagtgcagcgcctgcacgatattgaaacagagaaccagaaacttagggaaactctggaagaatacaacaaggaatttgctgaagtgaaaaatcaagaggttacgataaaagcacttaaagagaaaatccgagaatatgaacagacactgaagaaccaagccgaaaccatagctcttgagaaggaacagaagttacagaatgactttgcagaaaaggagagaaagctgcaggagacacagatgtccaccacctcaaagctggaggaagctgagcataaggttcagagcctacaaacagccctggaaaaaactcgaacagaattatttgacctgaaaaccaaatacgatgaagaaactactgcaaaggccgacgagattgaaatgatcatgacggaccttgaaagggcaaaccagagggcagaggtggctcagagagaggcggagaccttaagggaacagctctcatcggccaatcactccctccagctggcctcacagatccagaaggcaccagacgtggccatagaggtgctgacccgctccagcctagaagttgagttggccgccaaggagcgggagatcgcacagctggtggaggacgtgcagagactccaggccagcctcaccaagctgcgggagaattcggccagccagatctcacagcttgagcagcagctgagcgccaaaaacagcacactcaaacaactggaagaaaaactcaaaggccaggctgactatgaagaggtgaagaaagagctgaacattctgaagtccatggagtttgcaccgtccgagggcgctgggacacaggatgcggccaagcccctggaggtgctgttgctggagaagaaccgctcgctgcagtccgagaacgccgcgctgcgcatctccaacagcgacctgagcggacgctgtgcagagctgcaagtccgtatcactgaggctgtggccacagccactgagcagagagagctgatcgcccgcctggagcaggacctgagcatcattcagtccatccagcggcccgatgccgagggtgccgctgagcaccgcctggagaagatcccagagcccatcaaagaggccactgccctattctacggacctgcagcaccagccagcggtgccctcccagagggccaggtggattcactgctttccatcatctccagccagagggagcgcttccgtgcccggaaccaggagcttgaggccgagaaccgcctggcccagcacaccctccaggccctgcagagtgagctggacagcctgcgcgccgacaacatcaagctctttgagaagatcaagttcctgcagagctaccctggccggggcagcggcagtgatgacacggagctgcggtactcgtcccagtacgaggagcgcctggaccccttctcctccttcagcaagcgggagcggcagaggaagtacctgagcttgagtccctgggacaaggccaccctcagcatggggcgtctggttctctccaacaagatggcgcgcaccatcggcttcttctacacactgttcctgcactgcctggtcttcctggtgctctacaagctggcatggagcgagagcatggagagggactgtgccaccttctgcgccaagaagttcgctgaccacctgcacaagttccacgagaatgacaacggggctgcggctggtgacttgtggcagtgataccccggggcctcccccgtgacagtgacggctgcgcctccaccccgactgctcagtgcatctaatcacttagactcccctgaagaatcccccatggaaactgcccttatccgctgtccagcagctgccagaggccccaggtcacctcgggtccccttgaaagaatgtctcggtcacatcaggcccgctaggtccagagagcgagcccccaatgcccggccaggctaagccgcagagaccctctcagcccccacctcaggttagggctctgcccgcagcctgacctctagccctggtggcagaggtccctcagctgcgaggctaattgggtgaccaccgattccagctgcggttaatccagcttgggcctgtctgcactgcgatcctc

SEQ ID NO: 80212 - DNA, 1920 bp, Artificial Sequence
  derived and/or modified sequence
atggccgccaacgtgggcagcatgttccagtactggaagagattcgacctgcagcagctgcaggacctgagaaagcaggtggcccccctgctgaagagcttccagggcgagatcgacgccctgagcaagagaagcaaggaggccgaggccgccttcctgaacgtgtacaagagactgatcgacgtgcccgaccccgtgcccgccctggacctgggccagcagctgcagctgaaggtgcagagactgcacgacatcgagaccgagaaccagaagctgagagagaccctggaggagtacaacaaggagttcgccgaggtgaagaaccaggaggtgaccatcaaggccctgaaggagaagatcagagagtacgagcagaccctgaagaaccaggccgagaccatcgccctggagaaggagcagaagctgcagaacgacttcgccgagaaggagagaaagctgcaggagacccagatgagcaccaccagcaagctggaggaggccgagcacaaggtgcagagcctgcagaccgccctggagaagaccagaaccgagctgttcgacctgaagaccaagtacgacgaggagaccaccgccaaggccgacgagatcgagatgatcatgaccgacctggagagagccaaccagagagccgaggtggcccagagagaggccgagaccctgagagagcagctgagcagcgccaaccacagcctgcagctggccagccagatccagaaggcccccgacgtggccatcgaggtgctgaccagaagcagcctggaggtggagctggccgccaaggagagagagatcgcccagctggtggaggacgtgcagagactgcaggccagcctgaccaagctgagagagaacagcgccagccagatcagccagctggagcagcagctgagcgccaagaacagcaccctgaagcagctggaggagaagctgaagggccaggccgactacgaggaggtgaagaaggagctgaacatcctgaagagcatggagttcgcccccagcgagggcgccggcacccaggacgccgccaagcccctggaggtgctgctgctggagaagaacagaagcctgcagagcgagaacgccgccctgagaatcagcaacagcgacctgagcggcagatgcgccgagctgcaggtgagaatcaccgaggccgtggccaccgccaccgagcagagagagctgatcgccagactggagcaggacctgagcatcatccagagcatccagagacccgacgccgagggcgccgccgagcacagactggagaagatccccgagcccatcaaggaggccaccgccctgttctacggccccgccgcccccgccagcggcgccctgcccgagggccaggtggacagcctgctgagcatcatcagcagccagagagagagattcagagccagaaaccaggagctggaggccgagaacagactggcccagcacaccctgcaggccctgcagagcgagctggacagcctgagagccgacaacatcaagctgttcgagaagatcaagttcctgcagagctaccccggcagaggcagcggcagcgacgacaccgagctgagatacagcagccagtacgaggagagactggaccccttcagcagcttcagcaagagagagagacagagaaagtacctgagcctgagcccctgggacaaggccaccctgagcatgggcagactggtgctgagcaacaagatggccagaaccatcggcttcttctacaccctgttcctgcactgcctggtgttcctggtgctgtacaagctggcctggagcgagagcatggagagagactgcgccaccttctgcgccaagaagttcgccgaccacctgcacaagttccacgagaacgacaacggcgccgccgccggcgacctgtggcagtag

SEQ ID NO: 80213 - DNA, 1920 bp, Artificial Sequence
  derived and/or modified sequence
atggccgccaatgtcggatctatgtttcaatattggaagcggtttgatctccagcagcttcaggatttacggaagcaggtagcccctcttctcaagtccttccagggggagattgacgccctcagcaagcggtcaaaggaagctgaggccgcatttctcaacgtgtacaaacgtttgatagacgtcccagatcctgtccctgccctggatctaggccagcagctgcagctgaaggttcaaaggctccacgacatcgaaaccgagaatcagaagctgagggaaactctggaggagtataacaaagagtttgccgaagtaaagaaccaggaagtcacaattaaagcactcaaggaaaaaatccgagagtatgaacaaactcttaagaatcaggctgaaaccattgcactggaaaaggaacagaaactacagaacgatttcgcagagaaagagaggaaattacaagagactcagatgagcacaacctcaaagctggaggaagccgagcataaggtgcagtccctgcagaccgcccttgaaaaaactcgcacagagcttttcgaccttaagactaaatatgatgaagaaacgacagcaaaggcggatgagatcgaaatgataatgaccgatctggagcgcgccaatcaaagagcggaagttgcccaaagagaagccgaaaccctgcgtgaacagctctcatcagccaaccactcactgcagctggcatcacagatccagaaagctcccgatgtggccattgaagtcctaacacgctcttcactggaggtcgaacttgcagccaaagagcgggaaattgctcagcttgtggaggatgtgcagcgactgcaggcctctctgaccaagctgagggaaaacagtgctagtcagatttcccagctggaacagcagctctctgcaaagaatagcacacttaagcaactggaggagaagctgaagggtcaggctgactatgaggaagtcaagaaggagcttaatatcctgaaatccatggaattcgcaccgtcagagggagcaggcactcaagatgccgctaagcccctggaggtgttgctgctcgagaaaaatagatctctccagtcagaaaatgccgcattgcgaataagtaactcagatctctccggcagatgcgccgaattgcaggtgcgaatcacagaggcagtggctactgccacagaacagcgcgagctgattgcccgtcttgaacaagacctgtcgattatccaatctatacagagaccagatgccgagggtgctgccgaacataggctggagaaaatcccggaacccatcaaagaagccaccgcactgttttatgggccggccgccccagctagcggggctttgcccgagggacaagtggatagcctgctgtcgattattagctcccagcgtgaacgatttcgcgcacggaaccaggagcttgaggcagagaaccgcctcgcccaacatactctgcaggccctgcaaagcgaactagactctctcagggcggataacattaagttattcgaaaagattaagttcctgcagagctatcctggacgcggtagcgggtctgacgatacagagctgagatactcttcccagtatgaagagcgcctggaccctttctcctctttctccaagcgagagcgccagcgaaagtacctgtccctgagcccctgggacaaggcaaccttgtctatgggcaggctggtgctctcgaataaaatggctaggaccatcgggtttttctacacattatttctccattgtctggttttcctggtgctgtataagctggcttggagcgagtctatggagagggattgcgcgacattttgtgccaagaaatttgccgaccacttgcacaagttccacgagaatgataatggcgctgcggcaggggacctatggcagtag

SEQ ID NO: 80214 - DNA, 1920 bp, Artificial Sequence
  derived and/or modified sequence
atggccgccaacgtgggctccatgttccagtactggaagagatttgacctgcagcagctgcaggacctgaggaagcaggtggcccccctgctgaagagcttccagggcgagattgatgccctgagcaagaggagcaaggaggccgaggccgccttcctgaatgtgtacaagaggctgattgatgtgcctgaccctgtgcctgccctggacctgggccagcagctgcagctgaaggtgcagaggctgcatgacattgaaacagagaaccagaagctgcgggagaccctggaggagtacaacaaggagtttgctgaggtgaagaaccaggaggtgaccatcaaggccctgaaggagaagatccgggagtatgagcagaccctgaagaaccaggccgagaccatcgccctggagaaggagcagaagctgcagaatgactttgctgagaaggagaggaagctgcaggagacccagatgagcaccaccagcaagctggaggaggccgagcacaaggtgcagagcctgcagacagccctggagaagaccaggacagagctgtttgacctgaagaccaagtatgatgaggagaccacagccaaggcagatgaaattgagatgatcatgacagacctggagcgggccaaccagagagctgaggtggcccagcgggaggccgagaccctgcgggagcagctgagcagcgccaaccacagcctgcagctggccagccagatccagaaggccccagatgtggccatcgaggtgctgaccaggagcagcctggaggtggagctggccgccaaggagcgggagatcgcccagctggtggaggatgtgcagaggctgcaggccagcctgaccaagctgcgggagaacagcgccagccagatcagccagctggagcagcagctgagcgccaagaacagcaccctgaagcagctggaggagaagctgaagggccaggccgactatgaggaggtgaagaaggagctgaacatcctgaagtccatggagtttgcccccagcgagggcgccggcacccaggatgctgccaagcccctggaggtgctgctgctggagaagaacagaagcctgcagagtgaaaatgctgccctgcgcatcagcaacagcgacctgagcggccgctgtgccgagctgcaggtgcgcatcacagaggccgtggccacagccacagagcagcgggagctgattgcccggctggagcaggacctgagcatcatccagagcatccagaggccagatgctgagggcgctgctgagcaccggctggagaagatccctgagcccatcaaggaggccacagccctcttctacggccctgctgccccagccagcggggccctgcctgagggccaggtggacagcctgctgagcatcatcagcagccagcgggagcgcttccgggccaggaaccaggagctggaggctgaaaatcggctggcccagcacaccctgcaggccctgcagagcgagctggacagcctgcgggctgacaacatcaagctgtttgagaagatcaagttcctgcagagctacccaggccggggcagcggcagtgatgacacagagctgcgctacagcagccagtatgaggagcggctggaccccttcagcagcttcagcaagcgggagcggcagaggaagtacctgagcctgagcccctgggacaaggccaccctgtccatgggccgcctggtgctgagcaacaagatggcccggaccatcggcttcttctacaccctcttcctgcactgcctggtgttcctggtgctgtacaagctggcctggagcgagagcatggagcgggactgtgccaccttctgtgccaagaagtttgctgaccacctgcacaagttccatgaaaatgacaacggggctgctgctggggacctgtggcagtag

SEQ ID NO: 80215 - DNA, 1920 bp, Artificial Sequence
  derived and/or modified sequence
atggccgccaacgtgggcagcatgttccagtactggaagcggttcgatctacaacagttacaggacttgcgcaaacaggtcgctccacttctgaaatcgttccagggtgaaattgacgccttgtcgaaacgctccaaagaggctgaggcagcattcctaaatgtgtacaagcgtcttattgacgtccctgatcctgttccagcacttgatctgggtcagcagttgcagttaaaggtccaacggctccacgacatcgaaacagagaatcagaaactaagggagacattggaagaatataacaaagagtttgcagaggtgaaaaaccaggaagtgactatcaaggcactcaaagagaaaatccgggaatacgagcagaccctgaaaaatcaagcagaaacaattgccctggaaaaagaacagaaactgcaaaacgacttcgccgaaaaagagcggaagctgcaggagactcagatgtccactacctctaaactggaggaagcagagcataaagtgcagtcgctacagaccgctctggaaaagactcggacagagctctttgacctcaagacaaagtatgacgaagagacgactgctaaagccgacgaaattgagatgatcatgacagatttagagagagccaaccagcgcgccgaggtagcccagcgggaagccgagacactaagggagcagcttagcagtgctaatcatagtttacaactggccagccagattcagaaggcgccggatgtggccatcgaggtgctgacacggtcatctctcgaggtcgaacttgcagctaaagagagggagatcgcccagcttgtcgaggatgtacagagacttcaggcgtctctcacgaaattgagagagaattccgcatcgcagatttctcagctcgagcaacaactgtcagccaaaaactcaacactgaaacaactcgaggaaaaactaaaaggacaggccgactacgaggaagttaagaaggagttgaacatccttaagtccatggagttcgcccctagcgaaggggccgggacccaagatgcagccaaaccgctcgaggtgctcctgctggagaagaataggagcctccagtctgaaaacgccgcgctcaggatcagcaactccgatttatcgggacgatgtgccgaattacaagtgcgcatcacagaagctgtcgccaccgcaacagagcagcgggagctcatagcgcgccttgaacaggatctgagcatcatacaaagcatccagcggcctgacgctgagggggcagcggagcataggttggagaagattcctgaacctatcaaagaagccaccgcccttttttatggccccgcagcacccgcgtctggagctctacctgagggacaagtcgactctctgctatctatcatttcgtcccaaagggaacggtttcgggcccgaaatcaggaactggaggcggagaatcgtctggcccagcacacgctgcaggccctccagtctgaactggattcgctccgggccgataacatcaagttgttcgaaaaaattaagttccttcagagttacccgggacgcggatccggctccgatgacaccgagctgcgctactcttctcagtatgaagaacggctcgatccgttttcaagctttagtaaaagagagcggcagcggaaatacctttcactcagcccctgggacaaagctaccctgtctatgggaaggctggtcttgagtaacaagatggcccgcactattggattcttctatactcttttcttacactgtctcgtcttcttggttctctataagctcgcctggagtgagagcatggaaagggattgtgcaacattttgcgcgaaaaagttcgctgaccatttgcataagttccacgaaaatgataatggcgctgctgccggcgatctgtggcagtag

SEQ ID NO: 80216 - DNA, 1920 bp, Artificial Sequence
  derived and/or modified sequence
atggccgcaaatgtgggttctatgttccaatattggaaaaggtttgatttgcaacagcttcaggacttgcggaaacaggtggccccattgctcaaatctttccaaggtgaaattgatgctctgagtaagaggtccaaggaggcagaagcagcatttctaaacgtatataaaaggctgattgacgtacctgatccagtgccagctctggacctgggccaacagctccagctgaaagttcagagactgcacgacatcgaaacagagaatcagaagcttcgcgaaaccctcgaggagtataataaggaattcgcagaggtaaagaaccaagaggtgaccatcaaggctcttaaggagaagattcgggaatatgaacagactctgaagaatcaagccgaaactattgccctcgagaaggagcaaaaacttcagaacgactttgcagaaaaagagcgcaaattgcaggaaacccaaatgagcaccacaagcaagctggaagaggctgagcacaaagtgcaaagcttgcagaccgccctggagaaaacacgaaccgagctctttgatcttaaaactaagtatgatgaggagacaacagctaaggccgatgagattgaaatgattatgacagatttggaacgcgcaaaccagcgagcagaggtcgcgcaacgggaagccgaaactttgcgagagcagctgagctccgcaaaccactccttacaactggccagtcagatacagaaagccccagatgttgccattgaggtcctcacccgatctagcctggaagtggaactcgcggcaaaagaacgagagatcgcccaactggtcgaggatgtgcagcggttacaggcaagtcttaccaaactgcgcgagaattccgcttctcaaatttcacagcttgagcagcagctgagtgctaaaaattctactctgaagcagttggaggaaaagttaaaaggtcaggcagattatgaggaggtcaaaaaagagctgaatatcttaaagtctatggaattcgcccctagtgaaggggctggaacccaggatgccgcaaaacccctggaggtgctccttctcgagaagaaccgcagcttacagagtgagaacgccgctctgcgcatctctaattcggacctgagcggaaggtgcgctgagctgcaggtacgaatcacagaggcagtggcaacggccaccgagcagcgggaacttatcgccaggcttgagcaagatctgagtatcattcagtcaatccaacggccagatgctgaaggagccgctgaacacaggcttgaaaagatacctgaaccaatcaaagaggccacagctttattttatggaccagcagcaccagcatcaggcgctctacccgagggacaagtcgactcgctcttgtccattattagctcccagagggaacggtttagggccagaaatcaagaactggaagctgagaaccgactggcccagcataccctgcaggcactgcagagtgagctagacagcctgcgggcagataatataaaactttttgaaaaaatcaaatttctgcagtcttacccgggtcgcggatcgggctccgacgacactgaattacgctatagcagtcagtatgaagagaggctggaccctttctcttccttctcgaagcgcgaaagacaaaggaaatacttgagcctgtccccttgggataaggctacactgtctatggggagactggtgctctctaataagatggcgcgaaccattggcttcttttacaccctatttctgcactgtcttgtttttctggttctgtacaaacttgcctggagcgagagtatggaacgggattgtgctacattctgcgctaaaaagtttgccgatcatctgcataagttccatgaaaacgataacggcgctgcggcaggagacctgtggcagtag

SEQ ID NO: 80217 - protein, 131 aa, Artificial Sequence
  derived and/or modified sequence
MARSLVCLGVIILLSAFSGPGVRGGPMPKLADRKLCADQECSHPISMAVALQDYMAPDCRFLTIHRGQVVYVFSKLKGRGRLFWGGSVQGDYYGDLAARLGYFPSSIVREDQTLKPGKVDVKTDKWDFYCQ

SEQ ID NO: 80218 - protein, 131 aa, Artificial Sequence
  derived and/or modified sequence
MARSLVCLGVIILLSAFSGPGVRGGPMPKLADRKLCADQECSHPISMAVALQDYMAPDCRFLTIHRGQVVYVFSKLKGRGRLFWGGSVQGDYYGDLAARLGYFPSSIVREDQTLKPGKVDVKTDTSSSNSW

SEQ ID NO: 80219 - DNA, 396 bp, Artificial Sequence
  derived and/or modified sequence
atggccagaagcctggtgtgcctgggcgtgatcatcctgctgagcgccttcagcggccccggcgtgagaggcggccccatgcccaagctggccgacagaaagctgtgcgccgaccaggagtgcagccaccccatcagcatggccgtggccctgcaggactacatggcccccgactgcagattcctgaccatccacagaggccaggtggtgtacgtgttcagcaagctgaagggcagaggcagactgttctggggcggcagcgtgcagggcgactactacggcgacctggccgccagactgggctacttccccagcagcatcgtgagagaggaccagaccctgaagcccggcaaggtggacgtgaagaccgacaagtgggacttctactgccagtag

SEQ ID NO: 80220 - DNA, 396 bp, Artificial Sequence
  derived and/or modified sequence
atggctcgttctcttgtgtgtctgggagtaataatcttacttagtgcattttccggccccggggtgcggggcgggcccatgccaaagctcgccgacagaaagctgtgtgcagaccaggagtgttcacatccaatctccatggctgtggcgcttcaggattatatggcccctgattgccgattcctcactatccataggggccaggtcgtgtacgtcttttccaaattgaagggccgcggccggctgttctggggtggttccgtgcagggcgactactacggcgacctggcggctcgactaggatacttcccttcaagtatcgtgagggaggatcagacactgaagcctggcaaggtggacgttaagaccgacaagtgggatttctactgccagtag

SEQ ID NO: 80221 - DNA, 396 bp, Artificial Sequence
  derived and/or modified sequence
atggcccggagcctggtgtgcctgggcgtcatcatcctgctgagcgccttcagcggccctggggtgcggggcggccccatgcccaagctggccgacaggaagctgtgtgccgaccaggagtgcagccaccccatctccatggctgtggccctgcaggactacatggccccagactgccgcttcctgaccatccaccggggccaggtggtgtatgtgttcagcaagctgaagggccggggccgcctcttctggggcggctctgtgcagggcgactactatggagacctggccgcccggctgggctacttccccagcagcatcgtgcgggaggaccagaccctgaagccaggcaaggtggatgtgaagacagacaagtgggacttctactgccagtag

SEQ ID NO: 80222 - DNA, 396 bp, Artificial Sequence
  derived and/or modified sequence
atggcccggagcctggtgtgcctgggcgtgatcatcctgctgagcgccttctctggacctggagtgaggggtgggcctatgcccaaattggccgacagaaagctgtgtgctgaccaggaatgcagtcatcctatctctatggccgtggctcttcaagattacatggctcctgattgtcgcttcctgaccattcatcgtggtcaagtggtttacgtgttttcaaaacttaagggacgcggcaggttgttctgggggggctcggtgcagggggattactacggcgatcttgccgcaagactcggatacttccccagcagcattgtgcgtgaagaccaaacattaaagcctgggaaagtggatgtgaagacagataagtgggacttctactgtcaatag

SEQ ID NO: 80223 - DNA, 507 bp, Artificial Sequence
  derived and/or modified sequence
cttctgtggccagaggggacagcggaggagcccagtccacgatggcccggtccctggtgtgccttggtgtcatcatcttgctgtctgccttctccggacctggtgtcaggggtggtcctatgcccaagctggctgaccggaagctgtgtgcggaccaggagtgcagccaccctatctccatggctgtggcccttcaggactacatggcccccgactgccgattcctgaccattcaccggggccaagtggtgtatgtcttctccaagctgaagggccgtgggcggctcttctggggaggcagcgttcagggagattactatggagatctggctgctcgcctgggctatttccccagtagcattgtccgagaggaccagaccctgaaacctggcaaagtcgatgtgaagacagacaaatgggatttctactgccagtgagctcagcctaccgctggccctgccgtttcccctccttggctttatgcaaatacaatcagcccagtgcaaa

SEQ ID NO: 80224 - DNA, 396 bp, Artificial Sequence
  derived and/or modified sequence
atggccaggtctctggtgtgcctgggagtgattatccttttgtctgccttctctgggccaggtgtgcgaggaggtccaatgcctaagctcgccgaccggaagctgtgtgcagaccaggaatgtagccaccccatctcgatggcagtggcccttcaggactacatggcgcctgactgcaggtttctgacaatacaccgtggtcaggtagtgtatgtgttttcaaaactcaaagggcgtgggagactgttttggggagggagtgttcagggggactactacggtgacctcgctgccaggctgggctattttccttccagcatcgtgcgggaggaccaaacgctgaaaccgggaaaagtggatgttaaaacagacaaatgggatttctattgccagtag

SEQ ID NO: 80225 - DNA, 396 bp, Artificial Sequence
  derived and/or modified sequence
atggctcggtctctggtgtgtctgggcgtgataatccttctcagcgcttttagtgggcccggcgttagaggaggacctatgccgaagctggccgatcgaaagctgtgtgccgatcaggagtgttctcatcctatctccatggctgtcgctctgcaggattacatggctcctgattgtcgcttcctcacaattcacaggggccaagttgtgtatgtattcagcaagctaaagggtaggggcagactgttctggggcggatccgtccagggcgattattacggggacctggctgcgcgcctgggatactttccaagttcaatcgttagggaggaccaaaccctgaaaccgggcaaggtggatgtgaaaacagataagtgggacttctattgtcagtag

SEQ ID NO: 80226 - DNA, 396 bp, Artificial Sequence
  derived and/or modified sequence
atggctcgctcattagtctgcttgggggtgataatcctgctcagtgcctttagcgggcctggcgtgaggggcgggcccatgcctaaactggcagataggaagctctgcgccgatcaagagtgttcccaccctatcagcatggcagtcgccctgcaggactacatggctccagactgccgctttctgacaattcatagaggtcaggtcgtttacgtgttttcaaagctgaaggggcgcggccgactgttctggggcggcagcgtgcaaggtgactattatggcgacctcgccgcccgtctgggctactttccatcttccatagtgcgcgaagaccagaccctaaaaccaggaaaagtagatgtcaaaactgatactagttcatccaacagctggtag

SEQ ID NO: 80227 - DNA, 396 bp, Artificial Sequence
  derived and/or modified sequence
atggcccggagcctggtgtgcctgggcgtcatcatcctgctgagcgccttcagcggccctggggtgcggggcggccccatgcccaagctggccgacaggaagctgtgtgccgaccaggagtgcagccaccccatctccatggctgtggccctgcaggactacatggccccagactgccgcttcctgaccatccaccggggccaggtggtgtatgtgttcagcaagctgaagggccggggccgcctcttctggggcggctctgtgcagggcgactactatggagacctggccgcccggctgggctacttccccagcagcatcgtgcgggaggaccagaccctgaagccaggcaaggtggatgtgaagacagacaccagcagcagcaacagctggtag

SEQ ID NO: 80228 - DNA, 611 bp, Artificial Sequence
  derived and/or modified sequence
cttctaggtggtgtgggcgaagtttgggactggtttagggcggggacaagaccaagaacacaagtttccttgtactacgggagagagggaggggaggaaattggagaccccagcacccccttgctcactctcttgctcacagtccacgatggcccggtccctggtgtgccttggtgtcatcatcttgctgtctgccttctccggacctggtgtcaggggtggtcctatgcccaagctggctgaccggaagctgtgtgcggaccaggagtgcagccaccctatctccatggctgtggcccttcaggactacatggcccccgactgccgattcctgaccattcaccggggccaagtggtgtatgtcttctccaagctgaagggccgtgggcggctcttctggggaggcagcgttcagggagattactatggagatctggctgctcgcctgggctatttccccagtagcattgtccgagaggaccagaccctgaaacctggcaaagtcgatgtgaagacagacaaatgggatttctactgccagtgagctcagcctaccgctggccctgccgtttcccctccttggctttatgcaaatacaatcagcccagtgc

SEQ ID NO: 80229 - DNA, 1015 bp, Artificial Sequence
  derived and/or modified sequence
aggtagacagaaaagttctccaagtcctcaccggcccagaggcccagccatcttcacctctcaagctgtctgtagaggtccacgtgtcaagaaaactgaggacagaggccctcagtccagttcccacaagcaactgcatctccccaacagctgcctgaatgagtttggaagcagtcctcccaccattcagccttcagatgaaactgcacccctggctgacaggctgattgcagccttatagcagaccttaagcctgagacattcgacccacagaaaaggtgataattttggtctttttttttctaaacaggttcttgctctagagtgcagtggcacgatcatggctcactgcggcctctacatcctgggttcaagtggtcctcccacctcaacctcctgagtggctgggactacagtccacgatggcccggtccctggtgtgccttggtgtcatcatcttgctgtctgccttctccggacctggtgtcaggggtggtcctatgcccaagctggctgaccggaagctgtgtgcggaccaggagtgcagccaccctatctccatggctgtggcccttcaggactacatggcccccgactgccgattcctgaccattcaccggggccaagtggtgtatgtcttctccaagctgaagggccgtgggcggctcttctggggaggcagcgttcagggagattactatggagatctggctgctcgcctgggctatttccccagtagcattgtccgagaggaccagaccctgaaacctggcaaagtcgatgtgaagacagacacttcctcttcaaattcctggtgattggcagtgcaggaactggcaaatcatgtctccttcatcagttcattgagaataagttcaaacaggactccaaccacacaatcggcgtggagtttggatcccgggtggtcaacgtgggtgggaagactgtgaagctacagatttgggacacggctggccaggagcggtttcggtcagtgacgcggagttattaccga

SEQ ID NO: 80230 - DNA, 396 bp, Artificial Sequence
  derived and/or modified sequence
atggcccggagcctggtgtgcctgggcgtgatcatcctgctgagcgctttcagcgggcctggtgtgcgtggcggccccatgcccaagctggcagatcgcaagctttgcgctgatcaggaatgttcacatcccatttccatggcagtggccctacaggattacatggctcccgactgccgtttcctgaccattcacaggggtcaggtggtctacgtgtttagcaagctgaagggcaggggtaggttgttttggggcggctcagtgcaaggggattattatggagatctggccgccaggctgggctactttcccagctccatagtgagagaggaccagaccctgaaaccaggtaaagtcgacgtcaagaccgacaagtgggacttttactgtcagtag

SEQ ID NO: 80231 - DNA, 396 bp, Artificial Sequence
  derived and/or modified sequence
atggcccggagcctggtgtgcctgggcgtgatcatcctgctgagcgcattttccggcccaggggtccgcggaggcccaatgcccaagttagctgaccggaaactgtgtgcagaccaggagtgttctcacccgattagcatggctgtggctctccaggattatatggccccagactgtaggtttctcactattcataggggccaggtagtgtatgtcttctccaaactgaaaggccggggacgcctgttctggggaggatccgtgcagggtgactattacggcgacctggcggccagattagggtactttccatcaagtatcgtccgcgaggaccagaccctgaagcccggcaaagttgatgtgaaaaccgatacatcctcttccaactcttggtag

SEQ ID NO: 80232 - DNA, 396 bp, Artificial Sequence
  derived and/or modified sequence
atggcaaggagccttgtttgccttggagtcatcatccttttgagcgcctttagtggcccaggcgtgcgcggtggccctatgcctaagcttgctgatagaaaactgtgcgccgaccaagaatgttctcaccctatcagcatggctgtggccctgcaggactatatggcccctgattgcagatttctgaccatacaccggggacaggtggtgtatgtcttctcaaagctcaagggtcggggacggttgttctggggaggatctgtgcagggtgactactacggcgacctggccgctagactcgggtacttcccaagctctatcgtcagagaggaccagaccttgaaacctggtaaggtggacgtcaaaacagataagtgggatttttactgccagtag

SEQ ID NO: 80233 - DNA, 396 bp, Artificial Sequence
  derived and/or modified sequence
atggccaggtcattggtctgcttaggagtgatcatccttctcagtgccttctcaggccctggagtgcggggagggcctatgccaaaacttgctgataggaagctttgcgccgaccaggagtgctcacacccgatttccatggccgtcgctctgcaggactatatggccccagactgccgattcctgacaatacatcggggacaagttgtgtacgtgttctcaaagctgaaagggcgaggtcgtctgttctggggcggatccgtgcaaggtgactattacggagatctagccgcacgattgggctattttcccagctctatcgtgagagaagaccagaccctgaagccagggaaagtcgatgtgaaaacagatacctcttcgtccaattcgtggtag

SEQ ID NO: 80234 - DNA, 396 bp, Artificial Sequence
  derived and/or modified sequence
atggccagaagcctggtgtgcctgggcgtgatcatcctgctgagcgccttcagcggccccggcgtgagaggcggccccatgcccaagctggccgacagaaagctgtgcgccgaccaggagtgcagccaccccatcagcatggccgtggccctgcaggactacatggcccccgactgcagattcctgaccatccacagaggccaggtggtgtacgtgttcagcaagctgaagggcagaggcagactgttctggggcggcagcgtgcagggcgactactacggcgacctggccgccagactgggctacttccccagcagcatcgtgagagaggaccagaccctgaagcccggcaaggtggacgtgaagaccgacaccagcagcagcaacagctggtag

SEQ ID NO: 80235 - protein, 80 aa, Artificial Sequence
  derived and/or modified sequence
MDKFWWHAAWGLCLVPLSLAQIDLNITCRFAGVFHVEKNGRYSISRTEAADLCKAFNSTLPTMAQMEKALSIGFETCSST

SEQ ID NO: 80236 - protein, 429 aa, Artificial Sequence
  derived and/or modified sequence
MDKFWWHAAWGLCLVPLSLAQIDLNITCRFAGVFHVEKNGRYSISRTEAADLCKAFNSTLPTMAQMEKALSIGFETCRYGFIEGHVVIPRIHPNSICAANNTGVYILTSNTSQYDTYCFNASAPPEEDCTSVTDLPNAFDGPITITIVNRDGTRYVQKGEYRTNPEDIYPSNPTDDDVSSGSSSERSSTSGGYIFYTFSTVHPIPDEDSPWITDSTDRIPATNRNDVTGGRRDPNHSEGSTTLLEGYTSHYPHTKESRTFIPVTSAKTGSFGVTAVTVGDSNSNVNRSLSGDQDTFHPSGGSHTTHGSESDGHSHGSQEGGANTTSGPIRTPQIPEWLIILASLLALALILAVCIAVNSRRRCGQKKKLVINSGNGAVEDRKPSGLNGEASKSQEMVHLVNKESSETPDQFMTADETRNLQNVDMKIGV

SEQ ID NO: 80237 - protein, 78 aa, Artificial Sequence
  derived and/or modified sequence
MDKFWWHAAWGLCLVPLSLAQIDLNITCRFAGVFHVEKNGRYSISRTEAADLCKAFNSTLPTMAQMEKALSIGFETCR

SEQ ID NO: 80238 - DNA, 1290 bp, Artificial Sequence
  derived and/or modified sequence
atggacaagttttggtggcacgccgcctggggtctgtgtctggtccctctttcactggcacagatcgatctgaacataacttgccggttcgcaggagtgtttcacgtagaaaagaacggaaggtattccataagtaggacggaggccgctgatctgtgtaaggccttcaactctaccctacctacgatggcgcagatggagaaggcactgagcatcggcttcgagacatgtcgttacgggtttatcgaggggcacgtcgtgattccgcgaatccaccccaactcaatctgcgccgctaataataccggtgtgtatatattgacaagcaataccagccagtacgacacatactgttttaatgcctcagctcctcccgaagaggactgcacttcagtgactgatttgccaaatgcttttgacggccccatcactattaccatcgtcaaccgcgacggaactaggtacgtccagaaaggcgagtatcgcacgaaccccgaagacatctacccctcgaaccccaccgacgacgatgttagctccgggtcatcgtccgagcggtcttccaccagcggcggatatatcttttacacattttccacagtgcatcccattcctgacgaagactccccatggattactgactcgaccgataggattccggctacgaacagaaatgacgtgaccggaggaaggagggatccgaaccattccgaaggttcgaccactctgctcgagggttatactagccactacccccacacaaaggaatcaaggaccttcatcccggtgaccagcgccaagactggcagtttcggcgttaccgcagttacagtcggcgactctaacagcaatgtaaataggtcattgtcgggggatcaggacacattccatccttcaggcggcagtcacactacacacggaagtgagagcgacgggcattcccacgggtcccaggaaggtggggctaacactacaagtggacccattcgaacaccacagatccctgaatggctaatcattttggccagtttactcgccctcgcactgatcttggcagtgtgtatcgcagtgaattcccgcagaaggtgcggacagaaaaagaaattggtgattaatagcggtaacggggctgttgaggacagaaaacctagcgggctgaacggggaggcttcaaagtctcaggagatggtacatctggtcaataaagaatccagcgagactccagatcagttcatgaccgccgatgaaactcgaaatctgcagaatgttgatatgaagattggcgtttag

SEQ ID NO: 80239 - DNA, 1290 bp, Artificial Sequence
  derived and/or modified sequence
atggacaagttctggtggcacgccgcctggggcctgtgcctggtgcccctgagcctggcccagattgacctgaacatcacctgccgctttgctggggtcttccacgtggagaagaatggccgctacagcatcagcaggacagaagctgctgacctgtgcaaggccttcaacagcaccctgcccaccatggcccagatggagaaggccctgagcatcggctttgagacctgccgctatggcttcatcgagggccacgtggtgatcccccgcatccaccccaacagcatctgtgccgccaacaacacaggagtgtacatcctgaccagcaacaccagccagtatgacacctactgcttcaatgccagcgcccccccagaggaggactgcacctctgtgacagacctgcccaatgcctttgatggccccatcaccatcaccatcgtgaacagagatggcaccaggtatgtgcagaagggggagtaccgcaccaaccctgaggacatctaccccagcaaccccacagatgatgatgtgagcagcggcagcagcagcgagaggagcagcaccagcggcggctacatcttctacaccttcagcacagtgcaccccatcccagatgaggacagcccctggatcacagacagcacagaccgcatcccagccaccaacagaaatgatgtgactggaggaagaagagaccccaaccacagcgagggcagcaccaccctgctggagggctacaccagccactacccccacaccaaggagagcaggaccttcatccctgtgaccagcgccaagacaggcagctttggagtgacagctgtgacagtgggggacagcaacagcaatgtgaacagaagcctgagcggggaccaggacaccttccaccccagcggcggcagccacaccacccacggcagcgagagtgatggccacagccacggcagccaggagggcggggccaacaccaccagcggccccatccgcaccccccagatccctgagtggctgatcatcctggccagcctgctggccctggccctgatcctggccgtgtgcatcgctgtgaacagcagaagaagatgtggccagaagaagaagctggtgatcaacagcggaaatggagctgtggaggacaggaagcccagcggcctgaatggagaggccagcaagagccaggagatggtgcacctggtgaacaaggagagcagcgagaccccagaccagttcatgacagcagatgagaccaggaacctgcagaatgtggacatgaagattggagtgtag

SEQ ID NO: 80240 - DNA, 1290 bp, Artificial Sequence
  derived and/or modified sequence
atggacaagttctggtggcacgccgcctggggcctgtgcctggtgccacttagtctcgcccagatagatctcaacatcacatgtcgctttgcaggcgtgttccacgtggaaaagaacggcagatactcaatttctcgaaccgaagccgccgatctgtgcaaagccttcaactccacactgcccaccatggcccagatggagaaggccctttctattggattcgaaacatgtcggtacgggttcatagagggacacgtcgtcatccctaggatacatccgaattcaatctgtgcagcaaacaacaccggtgtgtatattctcaccagcaatactagccagtatgatacctactgcttcaacgcaagcgcccctccagaagaggactgcacgagtgtgacagaccttccaaacgcattcgatgggcctatcaccatcaccatcgtgaatcgcgacggcacacgatatgtccagaagggtgaataccggacgaacccagaagatatatatccatccaaccccaccgatgacgacgtttctagtggttcctccagcgaacggtcctccaccagtggtggttacatcttttacaccttttctaccgtccatcccataccagacgaggactctccatggatcactgattccactgacaggatccccgccacaaataggaatgatgtcactggcgggcgcagggatcccaaccacagtgagggctcaacgactctgctggagggctacactagccattacccacatactaaggagagtcgaactttcattcctgtgacgagtgctaagacgggctcctttggagtcactgcggtcaccgttggcgatagtaatagcaatgtgaatagatcactctcaggcgaccaagacacattccacccctccgggggttctcatactacccatgggtctgaaagtgacggccattcgcacggctcgcaagagggtggcgccaacaccacgagcggaccaatcaggaccccacagatacccgagtggctcatcatcctcgcctccctgctggcactggccctgattctggctgtctgtatcgcagtgaactcacgacgccgttgcgggcagaaaaagaagctggtgatcaattccggcaacggtgcggttgaagaccgaaagccctcagggctgaacggtgaagcttccaagtcccaggagatggttcatctcgtcaacaaggagagcagcgagacccctgaccagtttatgacagcagacgagacacggaatctgcagaatgtcgacatgaaaatcggagtgtag

SEQ ID NO: 80241 - DNA, 1290 bp, Artificial Sequence
  derived and/or modified sequence
atggacaaattctggtggcacgcagcatggggtctttgtctcgtccctctgtccctggcccagatcgacctgaatatcacctgcagattcgctggcgttttccatgttgaaaaaaacgggagatacagcatttcacgtactgaagccgctgacctctgtaaagcttttaattccaccttgccaacaatggcccaaatggaaaaagcgctcagcattggatttgagacttgccgctacggctttattgaggggcacgtggtgattccaagaatccacccaaactctatctgcgctgcgaacaatactggcgtttatatactgacatctaatacatctcaatacgatacatactgtttcaacgcgagcgctccacctgaggaagattgtacatctgttactgaccttccaaacgcttttgacggacccattactataaccatcgtaaacagagatgggactagatatgtgcagaaaggcgagtaccgtaccaatcctgaggacatctacccaagcaacccaactgatgatgacgtctcgtcaggctcaagctctgaaaggagctccacaagtgggggttatatcttttataccttcagcactgtgcaccccatccctgatgaagactccccttggatcaccgactctactgacagaattcccgctacgaaccggaatgacgtgaccggcggtagacgggatcccaaccactctgaggggtcaacaacccttttggagggatacaccagtcactatccacatactaaagagtcccgaaccttcatccccgtcacctcagccaaaaccggatcattcggtgtgacagccgtgacagtgggtgactctaatagcaatgtcaaccgctcactcagcggggatcaggacactttccacccatcggggggatcacatacaacacacgggagtgaaagcgacggacattctcacggaagccaggaaggaggcgctaacacgactagtggccctattagaacaccacagatccctgagtggctgattatcctggcctctcttctcgcactggcgctgatcctggccgtgtgcatcgccgtaaattcacggagacgttgtggtcaaaagaagaaactggtcataaattctggaaatggcgctgtcgaggacagaaaaccgtctgggctgaatggggaagcctcaaaatctcaggaaatggttcacctggtgaacaaggagtcatccgaaacccccgaccagttcatgacagctgacgaaactcgaaacctccagaatgttgacatgaaaatcggcgtttag

SEQ ID NO: 80242 - DNA, 1634 bp, Artificial Sequence
  derived and/or modified sequence
ctccggacaccatggacaagttttggtggcacgcagcctggggactctgcctcgtgccgctgagcctggcgcagatcgatttgaatataacctgccgctttgcaggtgtattccacgtggagaaaaatggtcgctacagcatctctcggacggaggccgctgacctctgcaaggctttcaatagcaccttgcccacaatggcccagatggagaaagctctgagcatcggatttgagacctgcaggtatgggttcatagaagggcacgtggtgattccccggatccaccccaactccatctgtgcagcaaacaacacaggggtgtacatcctcacatccaacacctcccagtatgacacatattgcttcaatgcttcagctccacctgaagaagattgtacatcagtcacagacctgcccaatgcctttgatggaccaattaccataactattgttaaccgtgatggcacccgctatgtccagaaaggagaatacagaacgaatcctgaagacatctaccccagcaaccctactgatgatgacgtgagcagcggctcctccagtgaaaggagcagcacttcaggaggttacatcttttacaccttttctactgtacaccccatcccagacgaagacagtccctggatcaccgacagcacagacagaatccctgctaccaataggaatgatgtcacaggtggaagaagagacccaaatcattctgaaggctcaactactttactggaaggttatacctctcattacccacacacgaaggaaagcaggaccttcatcccagtgacctcagctaagactgggtcctttggagttactgcagttactgttggagattccaactctaatgtcaatcgttccttatcaggagaccaagacacattccaccccagtggggggtcccataccactcatggatctgaatcagatggacactcacatgggagtcaagaaggtggagcaaacacaacctctggtcctataaggacaccccaaattccagaatggctgatcatcttggcatccctcttggccttggctttgattcttgcagtttgcattgcagtcaacagtcgaagaaggtgtgggcagaagaaaaagctagtgatcaacagtggcaatggagctgtggaggacagaaagccaagtggactcaacggagaggccagcaagtctcaggaaatggtgcatttggtgaacaaggagtcgtcagaaactccagaccagtttatgacagctgatgagacaaggaacctgcagaatgtggacatgaagattggggtgtaacacctacaccattatcttggaaagaaacaaccgttggaaacataaccattacagggagctgggacacttaacagatgcaatgtgctactgattgtttcattgcgaatcttttttagcataaaattttctactctttttgttttttgtgttttgttctttaaagtcaggtccaatttgtaaaaacagcattgctttctgaaattagggcccaattaataatcagcaagaatttgatcgttccagttcccacttggaggcctttcatccctcgggtgtgctatggatggcttctaacaaaaactacacatatgtattcctgatcgccaacctttc

SEQ ID NO: 80243 - DNA, 1290 bp, Artificial Sequence
  derived and/or modified sequence
atggacaagttctggtggcacgccgcctggggcctgtgcctggtgcccctgagcctggcccagatcgacctgaacatcacctgcagattcgccggcgtgttccacgtggagaagaacggcagatacagcatcagcagaaccgaggccgccgacctgtgcaaggccttcaacagcaccctgcccaccatggcccagatggagaaggccctgagcatcggcttcgagacctgcagatacggcttcatcgagggccacgtggtgatccccagaatccaccccaacagcatctgcgccgccaacaacaccggcgtgtacatcctgaccagcaacaccagccagtacgacacctactgcttcaacgccagcgccccccccgaggaggactgcaccagcgtgaccgacctgcccaacgccttcgacggccccatcaccatcaccatcgtgaacagagacggcaccagatacgtgcagaagggcgagtacagaaccaaccccgaggacatctaccccagcaaccccaccgacgacgacgtgagcagcggcagcagcagcgagagaagcagcaccagcggcggctacatcttctacaccttcagcaccgtgcaccccatccccgacgaggacagcccctggatcaccgacagcaccgacagaatccccgccaccaacagaaacgacgtgaccggcggcagaagagaccccaaccacagcgagggcagcaccaccctgctggagggctacaccagccactacccccacaccaaggagagcagaaccttcatccccgtgaccagcgccaagaccggcagcttcggcgtgaccgccgtgaccgtgggcgacagcaacagcaacgtgaacagaagcctgagcggcgaccaggacaccttccaccccagcggcggcagccacaccacccacggcagcgagagcgacggccacagccacggcagccaggagggcggcgccaacaccaccagcggccccatcagaaccccccagatccccgagtggctgatcatcctggccagcctgctggccctggccctgatcctggccgtgtgcatcgccgtgaacagcagaagaagatgcggccagaagaagaagctggtgatcaacagcggcaacggcgccgtggaggacagaaagcccagcggcctgaacggcgaggccagcaagagccaggagatggtgcacctggtgaacaaggagagcagcgagacccccgaccagttcatgaccgccgacgagaccagaaacctgcagaacgtggacatgaagatcggcgtgtag

SEQ ID NO: 80244 - protein, 340 aa, Artificial Sequence
  derived and/or modified sequence
MDKFWWHAAWGLCLVPLSLAQIDLNITCRFAGVFHVEKNGRYSISRTEAADLCKAFNSTLPTMAQMEKALSIGFETCRYGFIEGHVVIPRIHPNSICAANNTGVYILTSNTSQYDTYCFNASAPPEEDCTSVTDLPNAFDGPITITIVNRDGTRYVQKGEYRTNPEDIYPSNPTDDDVSSGSSSERSSTSGGYIFYTFSTVHPIPDEDSPWITDSTDRIPATRHSHGSQEGGANTTSGPIRTPQIPEWLIILASLLALALILAVCIAVNSRRRCGQKKKLVINSGNGAVEDRKPSGLNGEASKSQEMVHLVNKESSETPDQFMTADETRNLQNVDMKIGV

SEQ ID NO: 80245 - DNA, 1023 bp, Artificial Sequence
  derived and/or modified sequence
atggacaaattttggtggcacgccgcttggggcctgtgcttggtgcccctgtctctagcacagatcgatctgaacatcacctgccggtttgcaggcgtgtttcacgtagagaagaatggccggtattctatttccagaaccgaagccgctgacctgtgtaaggcctttaattccacgctcccaacgatggcccaaatggaaaaggcactgtctatcggcttcgagacatgtcgctatggtttcattgaagggcatgtggtgatcccacgaatccacccaaattcgatttgtgccgctaataatacaggcgtttatatactcacctctaacacgagtcagtatgatacttattgtttcaatgccagcgccccacctgaagaagactgtacttcagtgacagatctgcctaacgcattcgacggcccaatcaccatcaccatagtcaatagggatggtacgcggtacgtccaaaaaggggagtatagaacaaatcccgaggacatctacccttccaatccgacagacgacgatgtcagctctggaagcagctccgaacggtcttcaaccagtggcggctatattttttataccttcagcactgtacacccgatccccgacgaggacagcccgtggattacagatagtacagaccggatcccagcaacaaggcatagtcacggttcccaggagggcggggccaacaccaccagcggccccatcaggaccccacagatacccgagtggctgatcatcctggcttccctgcttgctctggccctgatattagccgtgtgtattgccgtgaattctcgtcgcagatgtgggcagaagaagaagctggtgatcaacagtggaaatggtgctgtcgaggaccggaagccttcaggactcaacggggaggcgagtaaatcccaagagatggtgcaccttgtcaacaaggagtcatctgaaacccctgatcagtttatgactgccgatgagacacgcaacctccagaacgtagatatgaaaataggggtttag

SEQ ID NO: 80246 - DNA, 1023 bp, Artificial Sequence
  derived and/or modified sequence
atggacaagttctggtggcacgccgcctggggcctgtgcctggtgcccctgagcctggcccagattgacctgaacatcacctgccgctttgctggggtcttccacgtggagaagaatggccgctacagcatcagcaggacagaagctgctgacctgtgcaaggccttcaacagcaccctgcccaccatggcccagatggagaaggccctgagcatcggctttgagacctgccgctatggcttcatcgagggccacgtggtgatcccccgcatccaccccaacagcatctgtgccgccaacaacacaggagtgtacatcctgaccagcaacaccagccagtatgacacctactgcttcaatgccagcgcccccccagaggaggactgcacctctgtgacagacctgcccaatgcctttgatggccccatcaccatcaccatcgtgaacagagatggcaccaggtatgtgcagaagggggagtaccgcaccaaccctgaggacatctaccccagcaaccccacagatgatgatgtgagcagcggcagcagcagcgagaggagcagcaccagcggcggctacatcttctacaccttcagcacagtgcaccccatcccagatgaggacagcccctggatcacagacagcacagaccgcatcccagccaccaggcacagccacggcagccaggagggcggggccaacaccaccagcggccccatccgcaccccccagatccctgagtggctgatcatcctggccagcctgctggccctggccctgatcctggccgtgtgcatcgctgtgaacagcagaagaagatgtggccagaagaagaagctggtgatcaacagcggaaatggagctgtggaggacaggaagcccagcggcctgaatggagaggccagcaagagccaggagatggtgcacctggtgaacaaggagagcagcgagaccccagaccagttcatgacagcagatgagaccaggaacctgcagaatgtggacatgaagattggagtgtag

SEQ ID NO: 80247 - DNA, 1023 bp, Artificial Sequence
  derived and/or modified sequence
atggacaagttctggtggcacgccgcctggggcctgtgcctggtgcctctgagtttggctcaaattgacctgaatataacctgccggtttgctggagtttttcatgttgagaagaacgggcgctacagtatatcccgcactgaggctgccgatctctgtaaagccttcaattcaactctccccacaatggcccagatggagaaggctttgagcatcgggttcgaaacgtgtcgctatggatttattgagggccatgtggtgatccctcggattcaccccaactcaatctgtgccgccaataacacaggggtttacatactgaccagcaacacttcacagtatgatacctactgcttcaacgcgagtgcgcctcctgaagaagactgcacttctgttacagacctgcccaacgcattcgatggcccaattacaattaccatagtgaacagggacgggacgcgatatgtccagaagggtgagtacagaaccaatcccgaggacatctatcctagtaatccaaccgatgacgacgtctcgtctggttcatcctccgagcgctcttctacctctggcggctacattttttataccttcagcactgtgcacccaatcccagacgaagactccccctggattaccgactcaactgaccgaattcctgcgactcgacatagccatggatctcaggaaggcggtgcaaacaccaccagcggcccaatcaggacaccgcagatccccgaatggttaatcatcttggctagcctactggcactcgctctcatcctagctgtatgtattgccgtgaactcccgtcgccgctgcggccagaagaaaaagttggtgattaatagcggcaacggcgccgtggaggacagaaaaccatcaggactaaacggggaggccagcaaaagtcaagagatggtccaccttgtgaataaagagtctagcgaaacccccgaccagttcatgaccgctgacgagacaagaaatctccagaacgtggatatgaagatcggcgtctag

SEQ ID NO: 80248 - DNA, 1023 bp, Artificial Sequence
  derived and/or modified sequence
atggataaattctggtggcacgccgcttggggtttgtgcctggtcccactctcactggcccagatcgatttgaatatcacctgtcggttcgccggtgttttccatgtggagaagaatgggcgatacagcatcagtcgtacagaagctgcagatctgtgcaaagccttcaacagcacactgccaactatggcccagatggaaaaggctctaagtatcggctttgagacctgccgttacggctttattgaaggccacgtggtgatacccaggatccaccctaattccatttgtgcagctaataacactggagtgtacattcttacttctaacacatctcagtatgatacatactgcttcaatgcttccgcaccgccagaggaagactgtacgtcagtgacggatctcccaaatgcctttgacggacctattactattacaatagtgaacagggatggcaccaggtatgtgcaaaagggagaatatagaacgaatcccgaagatatctacccatccaaccccactgatgacgacgtaagttctgggagctctagcgagaggagcagcacgagcggcggatacatcttctataccttctccacagtgcatccaatccctgacgaagattcgccctggattacagacagtaccgatagaattcccgctacgcggcattcacacggcagtcaagagggtggggcaaatacaactagtggaccgatccggaccccccaaatacccgaatggcttatcatcctcgcttctctgctggccctcgctttaatattggccgtctgtatcgcagtgaattccaggcgcaggtgtggtcagaagaaaaagttagtgatcaactcgggcaacggcgcagttgaggatagaaagcccagcggcctgaatggggaagctagcaaatcgcaggagatggtacacctagtaaacaaagagagttccgaaacaccagaccagttcatgactgccgatgagacgcggaacttgcagaatgtggatatgaaaattggggtttag

SEQ ID NO: 80249 - DNA, 1023 bp, Artificial Sequence
  derived and/or modified sequence
atggacaagttttggtggcacgcagcctggggactctgcctcgtgccgctgagcctggcgcagatcgatttgaatataacctgccgctttgcaggtgtattccacgtggagaaaaatggtcgctacagcatctctcggacggaggccgctgacctctgcaaggctttcaatagcaccttgcccacaatggcccagatggagaaagctctgagcatcggatttgagacctgcaggtatgggttcatagaagggcacgtggtgattccccggatccaccccaactccatctgtgcagcaaacaacacaggggtgtacatcctcacatccaacacctcccagtatgacacatattgcttcaatgcttcagctccacctgaagaagattgtacatcagtcacagacctgcccaatgcctttgatggaccaattaccataactattgttaaccgtgatggcacccgctatgtccagaaaggagaatacagaacgaatcctgaagacatctaccccagcaaccctactgatgatgacgtgagcagcggctcctccagtgaaaggagcagcacttcaggaggttacatcttttacaccttttctactgtacaccccatcccagacgaagacagtccctggatcaccgacagcacagacagaatccctgctaccagacactcacatgggagtcaagaaggtggagcaaacacaacctctggtcctataaggacaccccaaattccagaatggctgatcatcttggcatccctcttggccttggctttgattcttgcagtttgcattgcagtcaacagtcgaagaaggtgtgggcagaagaaaaagctagtgatcaacagtggcaatggagctgtggaggacagaaagccaagtggactcaacggagaggccagcaagtctcaggaaatggtgcatttggtgaacaaggagtcgtcagaaactccagaccagtttatgacagctgatgagacaaggaacctgcagaatgtggacatgaagattggggtgtaa

SEQ ID NO: 80250 - DNA, 1023 bp, Artificial Sequence
  derived and/or modified sequence
atggacaagttctggtggcacgccgcctggggcctgtgcctggtgcccctgagcctggcccagatcgacctgaacatcacctgcagattcgccggcgtgttccacgtggagaagaacggcagatacagcatcagcagaaccgaggccgccgacctgtgcaaggccttcaacagcaccctgcccaccatggcccagatggagaaggccctgagcatcggcttcgagacctgcagatacggcttcatcgagggccacgtggtgatccccagaatccaccccaacagcatctgcgccgccaacaacaccggcgtgtacatcctgaccagcaacaccagccagtacgacacctactgcttcaacgccagcgccccccccgaggaggactgcaccagcgtgaccgacctgcccaacgccttcgacggccccatcaccatcaccatcgtgaacagagacggcaccagatacgtgcagaagggcgagtacagaaccaaccccgaggacatctaccccagcaaccccaccgacgacgacgtgagcagcggcagcagcagcgagagaagcagcaccagcggcggctacatcttctacaccttcagcaccgtgcaccccatccccgacgaggacagcccctggatcaccgacagcaccgacagaatccccgccaccagacacagccacggcagccaggagggcggcgccaacaccaccagcggccccatcagaaccccccagatccccgagtggctgatcatcctggccagcctgctggccctggccctgatcctggccgtgtgcatcgccgtgaacagcagaagaagatgcggccagaagaagaagctggtgatcaacagcggcaacggcgccgtggaggacagaaagcccagcggcctgaacggcgaggccagcaagagccaggagatggtgcacctggtgaacaaggagagcagcgagacccccgaccagttcatgaccgccgacgagaccagaaacctgcagaacgtggacatgaagatcggcgtgtag

SEQ ID NO: 80251 - DNA, 885 bp, Artificial Sequence
  derived and/or modified sequence
taggacaaattttggtggcacgcggcctggggactatgtctcgtcccgctcagtctagcccagatcgatttgaacattacctgccgctttgccggagtcttccatgtggagaaaaacggacgctattctatatccaggacagaggctgcagacctgtgtaaggcattcaactctaccctccccaccatggctcagatggaaaaagctctctctattggctttgaaacctgtcgttatggcttcatcgaaggacatgtcgttattccgaggatccatccaaactcaatttgtgccgccaataatacaggcgtttacattctgactagcaatacgagccagtacgatacctactgtttcaacgcatcggcgcccccagaagaagactgcacatccgtgaccgatctgcctaacgcattcgatggccccatcactatcactattgtgaatcgggatggaacacgatacgtacagaagggtgaatacaggacaaatcccgaggacatttacccatccaatcccacagatgacgacgtatcttctggctcctccagcgaacgtagctctacaagtggcggctacattttctacaccttctctaccgtgcatccaattcctgacgaggacagcccatggattactgacagcaccgatcggattcctgcaacacgagatcaggacacatttcacccttctgggggcagccacacaactcacggctcagaatccgatgggcatagccatgggtcccaagagggtggggcaaacacaactagcggacccattcgcacgccacagataccagagtggcttattattcttgcctcactcctggctctcgccctgatcctagcggtgtgtattgctgtgaacagtaggcggtcttag

SEQ ID NO: 80252 - DNA, 885 bp, Artificial Sequence
  derived and/or modified sequence
tgagacaagttctggtggcacgccgcctggggcctgtgcctggtgcccctgagcctggcccagattgacctgaacatcacctgccgctttgctggggtcttccacgtggagaagaatggccgctacagcatcagcaggacagaagctgctgacctgtgcaaggccttcaacagcaccctgcccaccatggcccagatggagaaggccctgagcatcggctttgagacctgccgctatggcttcatcgagggccacgtggtgatcccccgcatccaccccaacagcatctgtgccgccaacaacacaggagtgtacatcctgaccagcaacaccagccagtatgacacctactgcttcaatgccagcgcccccccagaggaggactgcacctctgtgacagacctgcccaatgcctttgatggccccatcaccatcaccatcgtgaacagagatggcaccaggtatgtgcagaagggggagtaccgcaccaaccctgaggacatctaccccagcaaccccacagatgatgatgtgagcagcggcagcagcagcgagaggagcagcaccagcggcggctacatcttctacaccttcagcacagtgcaccccatcccagatgaggacagcccctggatcacagacagcacagaccgcatcccagccacccgggaccaggacaccttccaccccagcggcggcagccacaccacccacggcagcgagagtgatggccacagccacggcagccaggagggcggggccaacaccaccagcggccccatccgcaccccccagatccctgagtggctgatcatcctggccagcctgctggccctggccctgatcctggccgtgtgcatcgctgtgaacagccgccgctcctag

SEQ ID NO: 80253 - DNA, 885 bp, Artificial Sequence
  derived and/or modified sequence
tgagacaagttctggtggcacgccgcctggggcctgtgcctggtgccactttcactggctcagatcgacctgaacataacctgtcgctttgccggcgtattccatgtagaaaaaaacggaaggtattccatttcacggaccgaggccgctgatctgtgcaaagctttcaattcaacactccctactatggcccaaatggaaaaggctctgagtattgggtttgagacctgtcgatacggctttattgagggccatgtggtcattcccagaattcatcccaattctatctgtgctgcaaataacactggagtttatatccttacatccaacacatcacaatacgacacctattgttttaacgcctccgcccctcctgaagaagattgtacttctgtcaccgacctccctaacgcctttgatggccccattacaatcaccatcgtaaatcgcgacggtactaggtacgtgcaaaaaggcgaatatcgtacaaaccccgaggacatttacccttcaaaccctactgatgatgatgtttcttccggctcatccagtgagagatcatcaacaagcggaggatatattttctacacattcagcaccgtccaccctatcccagacgaggactctccttggatcacagatagtaccgacagaatccccgctacacgagaccaggacactttccacccctcagggggatcccacactacccatggctccgaaagtgatggtcactcccacgggtcgcaagagggcggcgccaatacgacctccggccccattagaacccctcagataccggagtggctgatcatactggcttccctgctggcgctggcgctaatccttgccgtgtgtattgccgtgaactcccgaaggagttag

SEQ ID NO: 80254 - DNA, 885 bp, Artificial Sequence
  derived and/or modified sequence
tgagacaagttctggtggcatgctgcctggggcctgtgcctggtgcctctctctcttgcccagatcgaccttaatatcacgtgccgctttgcgggagtgtttcacgtggaaaagaacggcaggtatagcatcagccggaccgaagcagctgacttgtgtaaagcatttaacagcactttacctaccatggctcagatggagaaggcgctcagtattggatttgaaacctgccgctatggtttcattgaaggccacgtggtgatcccgaggattcaccctaattctatatgcgcagccaataacaccggagtctacatcctcacatccaacacctctcaatatgacacttattgctttaacgcctctgcccctccagaagaagattgcacttccgtgaccgatcttcccaacgccttcgatggcccaataaccatcaccatagtgaaccgcgacggcacaagatacgtgcagaagggcgagtatcggactaatcccgaggacatctatcctagcaatcccactgatgatgacgtgtcctccggatcatcgagcgagaggagcagcacatccggaggctacattttctacacctttagcaccgtacatccaatccctgatgaagatagcccatggattaccgacagtacggacaggatcccagcaaccagggaccaggacaccttccacccatcaggtggcagtcacactacccacgggtccgagtctgatggtcacagccatggcagccaggaaggtggtgccaatactacgtccggccctataagaaccccccagatacccgaatggctcattatcctggcctccctgcttgcactcgcactgattctggctgtgtgtatcgcagtaaacagcagaagatcctag

SEQ ID NO: 80255 - DNA, 1825 bp, Artificial Sequence
  derived and/or modified sequence
ggacaagttttggtggcacgcagcctggggactctgcctcgtgccgctgagcctggcgcagatcgatttgaatataacctgccgctttgcaggtgtattccacgtggagaaaaatggtcgctacagcatctctcggacggaggccgctgacctctgcaaggctttcaatagcaccttgcccacaatggcccagatggagaaagctctgagcatcggatttgagacctgcaggtatgggttcatagaagggcacgtggtgattccccggatccaccccaactccatctgtgcagcaaacaacacaggggtgtacatcctcacatccaacacctcccagtatgacacatattgcttcaatgcttcagctccacctgaagaagattgtacatcagtcacagacctgcccaatgcctttgatggaccaattaccataactattgttaaccgtgatggcacccgctatgtccagaaaggagaatacagaacgaatcctgaagacatctaccccagcaaccctactgatgatgacgtgagcagcggctcctccagtgaaaggagcagcacttcaggaggttacatcttttacaccttttctactgtacaccccatcccagacgaagacagtccctggatcaccgacagcacagacagaatccctgctaccagagaccaagacacattccaccccagtggggggtcccataccactcatggatctgaatcagatggacactcacatgggagtcaagaaggtggagcaaacacaacctctggtcctataaggacaccccaaattccagaatggctgatcatcttggcatccctcttggccttggctttgattcttgcagtttgcattgcagtcaacagtcgaagaagttgaagagattcaggttatagcataagaagagcactgtttcatcgtcttcttgctgttaggaggtctatgaagcagagaagaactttcctttggaaaacaactaaatgaagacagtcacctcgctagaactgacacatgggctgtttttatattcttgaaggccactctctccctacctgaaccaagacctataggtttacatgttatttacattttatatataatatatatatatatatatacacatacattatatatacacaatagtaattctagcaacagaggaaatgacctttaacaggggtataaatctaaatttataaaagtataaatctaaatttcttacccaagacactttaaagatacattatttttctccaggacgtaattcataggaatattaagccttttgtaaatgtccctttagatggtttctcataaggtaaaagaaacttatttccaagcaggaccacctttattgtgtccccagatcacctcacagggcagaaaaatgcccctcagtctgggagaagacctagagagaattatggactccttactggtttttggaaagcaaccaacagctaattccaacaccatgggcagcccatacagtctctaattatctgagaaaatcaaatgatgctgttacaataattacgctggtacaagttaataaaagtgccatgttacagtcaaacagctatgttgctatctataccattgagggcatagttttaaaaagtagttatgctacctgattgtataaggaacaaaactgagagaaaaaatctaaaaggccgcctatgattgaatggaaagattttttttagttgaatttaaataatgtgacttgggggagcctttacaaagagtctttatacctcccttcagcttcctcattttcccttggattacttttgctcaattaaatatgaatttcct

SEQ ID NO: 80256 - DNA, 885 bp, Artificial Sequence
  derived and/or modified sequence
tgagacaagttctggtggcacgccgcctggggcctgtgcctggtgcccctgagcctggcccagatcgacctgaacatcacctgcagattcgccggcgtgttccacgtggagaagaacggcagatacagcatcagcagaaccgaggccgccgacctgtgcaaggccttcaacagcaccctgcccaccatggcccagatggagaaggccctgagcatcggcttcgagacctgcagatacggcttcatcgagggccacgtggtgatccccagaatccaccccaacagcatctgcgccgccaacaacaccggcgtgtacatcctgaccagcaacaccagccagtacgacacctactgcttcaacgccagcgccccccccgaggaggactgcaccagcgtgaccgacctgcccaacgccttcgacggccccatcaccatcaccatcgtgaacagagacggcaccagatacgtgcagaagggcgagtacagaaccaaccccgaggacatctaccccagcaaccccaccgacgacgacgtgagcagcggcagcagcagcgagagaagcagcaccagcggcggctacatcttctacaccttcagcaccgtgcaccccatccccgacgaggacagcccctggatcaccgacagcaccgacagaatccccgccaccagagaccaggacaccttccaccccagcggcggcagccacaccacccacggcagcgagagcgacggccacagccacggcagccaggagggcggcgccaacaccaccagcggccccatcagaaccccccagatccccgagtggctgatcatcctggccagcctgctggccctggccctgatcctggccgtgtgcatcgccgtgaacagcagaagaagctag

SEQ ID NO: 80257 - protein, 298 aa, Artificial Sequence
  derived and/or modified sequence
MASRGRRPEHGGPPELFYDETEARKYVRNSRMIDIQTRMAGRALELLYLPENKPCYLLDIGCGTGLSGSYLSDEGHYWVGLDISPAMLDEAVDREIEGDLLLGDMGQGIPFKPGTFDGCISISAVQWLCNANKKSENPAKRLYCFFASLFSVLVRGSRAVLQLYPENSEQLELITTQATKAGFSGGMVVDYPNSAKAKKFYLCLFSGPSTFIPEGLSENQDEVEPRESVFTNEREGGAFERRGIRGHQTRRFPLRMSRRGMVRKSRAWVLEKKERHRRQGREVRPDTQYTGRKRKPRF

SEQ ID NO: 80258 - DNA, 897 bp, Artificial Sequence
  derived and/or modified sequence
atggccagcagaggcagaagacccgagcacggcggcccccccgagctgttctacgacgagaccgaggccagaaagtacgtgagaaacagcagaatgatcgacatccagaccagaatggccggcagagccctggagctgctgtacctgcccgagaacaagccctgctacctgctggacatcggctgcggcaccggcctgagcggcagctacctgagcgacgagggccactactgggtgggcctggacatcagccccgccatgctggacgaggccgtggacagagagatcgagggcgacctgctgctgggcgacatgggccagggcatccccttcaagcccggcaccttcgacggctgcatcagcatcagcgccgtgcagtggctgtgcaacgccaacaagaagagcgagaaccccgccaagagactgtactgcttcttcgccagcctgttcagcgtgctggtgagaggcagcagagccgtgctgcagctgtaccccgagaacagcgagcagctggagctgatcaccacccaggccaccaaggccggcttcagcggcggcatggtggtggactaccccaacagcgccaaggccaagaagttctacctgtgcctgttcagcggccccagcaccttcatccccgagggcctgagcgagaaccaggacgaggtggagcccagagagagcgtgttcaccaacgagagagagggcggcgccttcgagagaagaggcatcagaggccaccagaccagaagattccccctgagaatgagcagaagaggcatggtgagaaagagcagagcctgggtgctggagaagaaggagagacacagaagacagggcagagaggtgagacccgacacccagtacaccggcagaaagagaaagcccagattctag

SEQ ID NO: 80259 - DNA, 897 bp, Artificial Sequence
  derived and/or modified sequence
atggccagccgcggacgccgacccgagcacggtgggcccccagagttgttctacgacgagaccgaagcgagaaagtacgtgcgcaatagtaggatgattgacattcaaacaagaatggctggtagagccttagagctgctgtatctgcccgagaacaagccctgttacctgttagacattggatgtggcaccggcctgtctggttcatatctgtctgatgaaggccactactgggtcggcctcgacatttcgccagccatgttggacgaggcggtggatcgggagattgaaggagacctgctactgggcgacatgggacaagggatccctttcaagcccggtacattcgacggttgcatcagtattagcgccgtccaatggctgtgtaacgccaacaagaagagtgaaaacccagccaaaagattgtactgctttttcgccagtctgttttccgtgctcgttcgcggaagtcgagctgtgctccagttatatccggagaactccgaacagctggaactgattacgacacaggccacaaaggctggtttcagcggtggcatggtcgtggattatcctaattctgccaaagctaagaagttctatctgtgtttattcagcggccctagcacttttattccggaaggcttgagtgagaatcaagacgaagtggagcctagggagtcagtgtttaccaatgagcgggaggggggcgccttcgaacgacgtggcattagaggccatcagactcggcgatttccccttcggatgagtaggagaggtatggtgaggaaatcccgcgcgtgggtgcttgagaaaaaggagaggcacaggcgccaaggtcgcgaagtgcggcctgacactcaatatactggtcggaaacgcaagccacggttttag

SEQ ID NO: 80260 - DNA, 897 bp, Artificial Sequence
  derived and/or modified sequence
atggccagccggggccggcggcctgagcacggcggccccccagagctgttctatgatgaaacagaggccaggaaatatgtgaggaacagcaggatgattgacatccagaccaggatggccggccgggccctggagctgctgtacctgcctgagaacaagccctgctacctgctggacatcggctgcggcaccggcctgagcggcagctacctgagtgatgagggccactactgggtgggcctggacatcagccctgccatgctggatgaagctgtggaccgggagattgaaggagacctgctgctgggggacatgggccagggcatccccttcaagccaggcacctttgatggctgcatcagcatctctgctgtgcagtggctgtgcaatgccaacaagaagtctgagaacccagccaagaggctgtactgcttctttgccagcctcttctctgtgctggtgcggggcagcagagctgtgctgcagctgtacccagagaacagcgagcagctggagctgatcaccacccaggccaccaaggccggcttcagcggcggcatggtggtggactaccccaacagcgccaaggccaagaagttctacctgtgcctcttcagcggccccagcaccttcatccctgagggcctgtctgagaaccaggatgaggtggagccccgggagagcgtcttcaccaatgaaagagagggcggggcctttgaaagaagaggcatccggggccaccagacccggcgcttccccctgaggatgagccggcggggcatggtgaggaagagccgggcctgggtgctggagaagaaggagcggcaccggcggcagggccgggaggtgcggccagacacccagtacacaggcaggaagaggaagccccgcttctag

SEQ ID NO: 80261 - DNA, 897 bp, Artificial Sequence
  derived and/or modified sequence
atggccagccggggccggcggcccgagcacggcggcccccccgagctgttctacgacgaaacagaggccaggaagtacgtccggaactccagaatgattgatattcaaaccaggatggcaggcagagctctcgaacttctctatctccccgaaaacaagccttgttacctgctcgacatcggttgcgggactggactctcaggcagttatcttagtgatgaggggcattactgggttggtctggacatctcccctgccatgctggacgaagctgtggacagggaaattgagggcgatcttctgctaggagatatgggtcagggtataccctttaagcctggcacattcgacgggtgcatttccatctccgcagttcaatggctttgcaatgccaataaaaagtccgagaaccctgcgaagcgtctatattgtttcttcgcatctttgttttccgtcctggtgagaggatctcgggccgtgttgcaactctatcccgagaactctgaacagctggagctaattacaacacaggccacaaaagccggcttcagcggtggtatggtggtggattaccctaatagcgctaaagcgaaaaagttctacctctgtctgttctccggtcctagtacctttatcccagagggcctgtcagagaaccaggacgaggtcgaaccacgtgagagcgtgtttactaatgagcgggagggcggcgcatttgagcggcggggcatccgcggccaccagacacggagatttcccctgaggatgagccgccgggggatggtccggaagagccgagcctgggtgcttgagaagaaagagaggcatcgacgacagggccgggaggtccggccggacacccagtatactgggcgcaagcgcaagccaagattctag

SEQ ID NO: 80262 - DNA, 897 bp, Artificial Sequence
  derived and/or modified sequence
atggcctcccggggacggcgtcccgaacatggtgggcctccagagttgttctatgacgagaccgaagcccgaaagtacgtccggaactctcgcatgattgatatccagactagaatggcgggacgggctctagagctcctttacttgcccgaaaataagccctgctatcttctggacattgggtgtggcacaggactttcgggatcctacctgtctgacgaaggacattactgggttggacttgacatttctccggcaatgctcgatgaggctgtcgatcgagaaatagaaggtgatctcctgctgggggatatgggccaaggaataccatttaagcccggtacttttgatggatgcatcagcatctcagctgtgcagtggttatgcaacgccaacaagaaatcagagaatcctgcaaaaagactgtactgtttctttgcatctttgtttagcgttctggtgaggggctcccgcgcagtcttgcagttgtaccctgagaatagcgagcagctggagctaatcaccacccaagccacgaaggcaggcttctccgggggtatggtggtggattaccctaactccgccaaggcgaagaagttttatctctgcctgtttagcggccctagtacttttattcccgaggggctgagtgaaaaccaagatgaagttgaacctagagagagcgtcttcaccaacgaacgcgaaggcggagcatttgaacggcgtggtatcagaggacaccagacccgcagattcccccttcgcatgtccagacgcggtatggtgcgcaagtcgagagcttgggtactggaaaagaaggaaagacaccgcaggcagggcagggaggtgagacctgacacacagtatactgggagaaagagaaaacctagattctag

SEQ ID NO: 80263 - DNA, 1219 bp, Artificial Sequence
  derived and/or modified sequence
atggcgtcccgcggccggcgtccggagcatggcggacccccagagctgttttatgacgagacagaagcccggaaatacgttcgcaactcacggatgattgatatccagaccaggatggctgggcgagcattggagcttctttatctgccagagaataagccctgttacctgctggatattggctgtggcactgggctgagtggaagttatctgtcagatgaagggcactattgggtgggcctggatatcagccctgccatgctggatgaggctgtggaccgagagatagagggagacctgctgctgggggatatgggccagggcatcccattcaagccaggcacatttgatggttgcatcagcatttctgctgtgcagtggctctgtaatgctaacaagaagtctgaaaaccctgccaagcgcctgtactgcttttttgcttctcttttttctgttctcgtccggggatcccgagctgtcctgcagctgtaccctgagaactcagagcagttggagctgatcacaacccaggccacaaaggcaggcttctccggtggcatggtggtagactaccctaacagtgccaaagcaaagaaattctacctctgcttgttttctgggccttcgacctttataccagaggggctgagtgaaaatcaggatgaagttgaacccagggagtctgtgttcaccaatgagagggaaggtggagcatttgagagaaggggcatccgaggccaccagactcggaggttcccattaaggatgtcgaggcggggaatggtgaggaagagtcgggcatgggtgctggagaagaaggagcggcacaggcgccagggcagggaagtcagacctgacacccagtacaccggccgcaagcgcaagccccgcttctaagtcaccacgcggttctggaaaggcacttgcctctgcacttttctatattgttcagctgacaaagtagtattttagaaaagttctaaagttataaaaatgttttctgcagtaaaaaaaaagttctctgggccgggcgtggtggctcacacctgtaatcccagcaccttgggaggctgaggtgggaggatcatttgaggccaggagtttgagacctgcctgggcaacataatgaaacttcctttccagggaggaaaaaaaaaaaaaaaaaaagctctgagagcatcttattttgtttaaaggcaagaaataaaatttccttttg

SEQ ID NO: 80264 - DNA, 240 bp, Artificial Sequence
  derived and/or modified sequence
atggttcctattatcgcccagtatggcgacgtattagtccgaaacctccggcgagaggctgagacgggtaaacctgtcacgctaaaagacgtattcggtgcttattccatggatgttattacatccacctcttttggggtaaatattgatagcctgaataatccccaggaccccttcgtggagaatacaaaaaagttactaaggtttgacttcctggaccctttcttcctttcaatctag

SEQ ID NO: 80265 - DNA, 240 bp, Artificial Sequence
  derived and/or modified sequence
atggtgcccatcatcgcccagtatggagatgtgctggtgaggaacctgcggcgggaggccgagaccgggaagcctgtgaccctgaaggatgtgtttggagcctacagcatggatgtgatcaccagcaccagctttggagtgaacatcgacagcctgaacaacccccaggacccctttgtggagaacaccaagaagctgctgcgctttgacttcctggaccccttcttcctgagcatctag

SEQ ID NO: 80266 - DNA, 240 bp, Artificial Sequence
  derived and/or modified sequence
atggtgcccatcatcgcccagtacggcgacgtgctggtgcggaacttaagacgtgaagccgaaactggcaaacccgtcactctgaaggacgtgttcggtgcttacagcatggatgtcatcactagcacaagtttcggggtcaacatcgactccttgaacaaccctcaagaccccttcgtggagaacacaaaaaaacttcttcggtttgatttcctagatcctttctttttgtcaatctag

SEQ ID NO: 80267 - DNA, 240 bp, Artificial Sequence
  derived and/or modified sequence
atggtgcctataatcgcgcagtatggagatgtacttgtccgcaacttgcggagggaggccgaaactggaaagcccgttacccttaaagacgtgtttggggcatattccatggacgtcatcactagtacctccttcggggtgaacattgacagtctgaacaacccacaagaccccttcgtcgagaataccaaaaagctgctgagattcgactttctggaccctttttttctcagtatctag

SEQ ID NO: 80268 - DNA, 240 bp, Artificial Sequence
  derived and/or modified sequence
atggtgcccatcatcgcccagtacggcgacgtgctggtgagaaacctgagaagagaggccgagaccggcaagcccgtgaccctgaaggacgtgttcggcgcctacagcatggacgtgatcaccagcaccagcttcggcgtgaacatcgacagcctgaacaacccccaggaccccttcgtggagaacaccaagaagctgctgagattcgacttcctggaccccttcttcctgagcatctag

SEQ ID NO: 80269 - protein, 305 aa, Artificial Sequence
  derived and/or modified sequence
MAGFDGSAWDEEEEEPPDHQYYNDFPGKEPPLGGVVDMRLREGAAPGAARPTAPNAQTPSHLGATLPVGQPVGGDPEVRKQMPPPPPCPGRELFDDPSYVNVQNLDKARQAVGGAGPPNPAINGSAPRDLFDMKPFEDALRVPPPPQSVSMAEQLRGEPWFHGKLSRREAEALLQLNGDFLVRESTTTPGQYVLTGLQSGQPKHLLLVDPEGVRWGFAMLPKLFLNSRAQVIRLPRPPRVLGLQARTTMPSLHIFFCTVYTLLRHANFLQVKKGVYSSQLHSFRADVAFAFSHFTDLSIPTTVSF

SEQ ID NO: 80270 - protein, 384 aa, Artificial Sequence
  derived and/or modified sequence
MDLLPPKPKYNPLRNESLSILGRSNLKFAGMPITLTVSTSSLNLMAADCKQIIANHHMQSISFASGGDPDTAEYVAYVAKDPVNQRACHILECPEGLAQDVISTIGQAFELRFKQYLRNPPKLVTPHDRMAGFDGSAWDEEEEEPPDHQYYNDFPGKEPPLGGVVDMRLREGAAPGAARPTAPNAQTPSHLGATLPVGQPVGGDPEVRKQMPPPPPCPGRELFDDPSYVNVQNLDKARQAVGGAGPPNPAINGSAPRDLFDMKPFEDALRVPPPPQSVSMAEQLRGEPWFHGKLSRREAEALLQLNGDFLVRESTTTPGQYVLTGLQSGQPKHLLLVDPEGVVRTKDHRFESVSHLISYHMDNHLPIISAGSELCLQQPVERKL

SEQ ID NO: 80271 - protein, 297 aa, Artificial Sequence
  derived and/or modified sequence
  misc_feature (1)..(1): Xaa can be any naturally occurring amino acid
XDEEEEEPPDHQYYNDFPGKEPPLGGVVDMRLREGAAPGAARPTAPNAQTPSHLGATLPVGQPVGGDPEVRKQMPPPPPCPGRELFDDPSYVNVQNLDKARQAVGGAGPPNPAINGSAPRDLFDMKPFEDALRVPPPPQSVSMAEQLRGEPWFHGKLSRREAEALLQLNGDFLVRESTTTPGQYVLTGLQSGQPKHLLLVDPEGVRWGFAMLPKLFLNSRAQVIRLPRPPRVLGLQARTTMPSLHIFFCTVYTLLRHANFLQVKKGVYSSQLHSFRADVAFAFSHFTDLSIPTTVSF

SEQ ID NO: 80272 - DNA, 918 bp, Artificial Sequence
  derived and/or modified sequence
atggccggcttcgacggcagcgcctgggacgaggaggaggaggagccccccgaccaccagtactacaacgacttccccggcaaggagccccccctgggcggcgtggtggacatgagactgagagagggcgccgcccccggcgccgccagacccaccgcccccaacgcccagacccccagccacctgggcgccaccctgcccgtgggccagcccgtgggcggcgaccccgaggtgagaaagcagatgccccccccccccccctgccccggcagagagctgttcgacgaccccagctacgtgaacgtgcagaacctggacaaggccagacaggccgtgggcggcgccggcccccccaaccccgccatcaacggcagcgcccccagagacctgttcgacatgaagcccttcgaggacgccctgagagtgcccccccccccccagagcgtgagcatggccgagcagctgagaggcgagccctggttccacggcaagctgagcagaagagaggccgaggccctgctgcagctgaacggcgacttcctggtgagagagagcaccaccacccccggccagtacgtgctgaccggcctgcagagcggccagcccaagcacctgctgctggtggaccccgagggcgtgagatggggcttcgccatgctgcccaagctgttcctgaacagcagagcccaggtgatcagactgcccagaccccccagagtgctgggcctgcaggccagaaccaccatgcccagcctgcacatcttcttctgcaccgtgtacaccctgctgagacacgccaacttcctgcaggtgaagaagggcgtgtacagcagccagctgcacagcttcagagccgacgtggccttcgccttcagccacttcaccgacctgagcatccccaccaccgtgagcttctag

SEQ ID NO: 80273 - DNA, 1155 bp, Artificial Sequence
  derived and/or modified sequence
atggacctgctgccccccaagcccaagtacaaccccctgagaaacgagagcctgagcatcctgggcagaagcaacctgaagttcgccggcatgcccatcaccctgaccgtgagcaccagcagcctgaacctgatggccgccgactgcaagcagatcatcgccaaccaccacatgcagagcatcagcttcgccagcggcggcgaccccgacaccgccgagtacgtggcctacgtggccaaggaccccgtgaaccagagagcctgccacatcctggagtgccccgagggcctggcccaggacgtgatcagcaccatcggccaggccttcgagctgagattcaagcagtacctgagaaacccccccaagctggtgaccccccacgacagaatggccggcttcgacggcagcgcctgggacgaggaggaggaggagccccccgaccaccagtactacaacgacttccccggcaaggagccccccctgggcggcgtggtggacatgagactgagagagggcgccgcccccggcgccgccagacccaccgcccccaacgcccagacccccagccacctgggcgccaccctgcccgtgggccagcccgtgggcggcgaccccgaggtgagaaagcagatgccccccccccccccctgccccggcagagagctgttcgacgaccccagctacgtgaacgtgcagaacctggacaaggccagacaggccgtgggcggcgccggcccccccaaccccgccatcaacggcagcgcccccagagacctgttcgacatgaagcccttcgaggacgccctgagagtgcccccccccccccagagcgtgagcatggccgagcagctgagaggcgagccctggttccacggcaagctgagcagaagagaggccgaggccctgctgcagctgaacggcgacttcctggtgagagagagcaccaccacccccggccagtacgtgctgaccggcctgcagagcggccagcccaagcacctgctgctggtggaccccgagggcgtggtgagaaccaaggaccacagattcgagagcgtgagccacctgatcagctaccacatggacaaccacctgcccatcatcagcgccggcagcgagctgtgcctgcagcagcccgtggagagaaagctgtag

SEQ ID NO: 80274 - DNA, 393 bp, Artificial Sequence
  derived and/or modified sequence
atgcccatcaccctgaccgtgagcaccagcagcctgaacctgatggccgccgactgcaagcagatcatcgccaaccaccacatgcagagcatcagcttcgccagcggcggcgaccccgacaccgccgagtacgtggcctacgtggccaaggaccccgtgaaccagagagcctgccacatcctggagtgccccgagggcctggcccaggacgtgatcagcaccatcggccaggccttcgagctgagattcaagcagtacctgagaaacccccccaagctggtgaccccccacgacagaatggccggcttcgacggcagcgcctgggacgaggaggaggaggagccccccgaccaccagtactacaacgacttccccggcaaggagcccccctag

SEQ ID NO: 80275 - DNA, 894 bp, Artificial Sequence
  derived and/or modified sequence
tgagacgaggaggaggaggagccccccgaccaccagtactacaacgacttccccggcaaggagccccccctgggcggcgtggtggacatgagactgagagagggcgccgcccccggcgccgccagacccaccgcccccaacgcccagacccccagccacctgggcgccaccctgcccgtgggccagcccgtgggcggcgaccccgaggtgagaaagcagatgccccccccccccccctgccccggcagagagctgttcgacgaccccagctacgtgaacgtgcagaacctggacaaggccagacaggccgtgggcggcgccggcccccccaaccccgccatcaacggcagcgcccccagagacctgttcgacatgaagcccttcgaggacgccctgagagtgcccccccccccccagagcgtgagcatggccgagcagctgagaggcgagccctggttccacggcaagctgagcagaagagaggccgaggccctgctgcagctgaacggcgacttcctggtgagagagagcaccaccacccccggccagtacgtgctgaccggcctgcagagcggccagcccaagcacctgctgctggtggaccccgagggcgtgagatggggcttcgccatgctgcccaagctgttcctgaacagcagagcccaggtgatcagactgcccagaccccccagagtgctgggcctgcaggccagaaccaccatgcccagcctgcacatcttcttctgcaccgtgtacaccctgctgagacacgccaacttcctgcaggtgaagaagggcgtgtacagcagccagctgcacagcttcagagccgacgtggccttcgccttcagccacttcaccgacctgagcatccccaccaccgtgagcttctag

SEQ ID NO: 80276 - DNA, 918 bp, Artificial Sequence
  derived and/or modified sequence
atggccggctttgacggatctgcttgggatgaagaagaagaagaaccccctgaccatcaatactacaacgacttccccggaaaggaaccgccattggggggcgtcgtggatatgagactccgcgagggtgcggctccaggagccgccaggcccaccgccccaaatgcgcagacgccctcccatttaggtgcaacgctgcctgtgggacagcccgtcgggggtgatcctgaggtgcggaagcagatgcctccccccccaccctgccctggccgcgaactgtttgatgacccctcatacgttaacgttcaaaacttggataaggcacgccaagctgttggaggtgcagggccgccgaacccagccattaacggctctgcccctagggacctctttgacatgaaacccttcgaggatgctctgagggtcccaccacctcctcagagcgtgtcaatggcagaacagctccggggcgagccttggtttcatgggaaactgagccgcagggaagccgaagcgctgctgcaactcaacggagatttcctggtaagagagagcactaccaccccgggccagtacgtactgacgggactgcaaagcggccagccaaagcatttgctgctggttgaccccgaaggagttagatggggctttgctatgctccctaagctcttcctgaattccagggcacaggtgatacggctccctaggccgcctcgagttttaggactccaagcccggacaaccatgcccagcctccacatctttttctgtactgtctataccttgcttcgccatgccaactttcttcaggtgaagaagggcgtttattccagccaactgcattcttttcgagcagacgtggcatttgccttctcacattttacggacttgtccattcctactacagtgtctttctag

SEQ ID NO: 80277 - DNA, 1155 bp, Artificial Sequence
  derived and/or modified sequence
atggacttgctgccgccaaagcctaaatataatccgctgcggaatgagagtttgtccatactgggacgtagcaacctcaagttcgctggcatgccaattactttgaccgtgtcgacctcatccttgaatctgatggccgccgattgcaaacagatcatcgcaaatcaccatatgcagtcaatctcatttgcatccggtggagacccggacaccgcagagtacgtggcgtacgtggctaaggatcctgtgaaccaacgagcgtgccatatcctagagtgccccgagggccttgctcaggatgtcatctcaaccatcgggcaggccttcgagctgcgctttaagcagtatctgcgaaatcctccaaagctggtgactccccacgaccgaatggcagggtttgacggcagcgcttgggatgaggaggaggaggaaccgcccgatcatcagtactacaatgattttccaggcaaggagccccccctgggcggggttgtggatatgcgactccgagaaggtgcagcacccggggcggcaaggcctaccgcacccaatgctcaaaccccctcccacttgggggctaccctcccagtgggccagccggttgggggcgatcccgaggtccggaagcaaatgcctccccctcccccttgtccaggtcgcgagttgttcgacgacccttcatatgtcaacgtgcagaacttggacaaggctagacaggccgtgggtggagccggaccacctaaccctgctattaatgggtctgcacctagagacttgtttgacatgaaaccttttgaggatgccctgagggttccaccacctcctcagagcgtgagcatggccgagcagctgaggggggaaccttggtttcacggcaaactgtcccggcgggaggccgaagcacttctgcagctgaatggcgatttcctagtcagggagtctaccacgacacccgggcagtacgttctgactgggctccagagcggccaaccgaagcacctattactggtagatcctgaaggagtggtaaggactaaggaccatagattcgagagcgtgtctcatcttatcagttaccatatggataaccacttacccataatctcagcaggcagtgaactgtgtctccagcagcctgtggaacgaaagctttag

SEQ ID NO: 80278 - DNA, 393 bp, Artificial Sequence
  derived and/or modified sequence
atgcctatcacccttaccgtgtcgacttcaagcttaaatctgatggcagcagattgcaagcagatcattgccaaccatcacatgcagtctatctcatttgcttctggcggagaccccgacactgccgaatacgtcgcttacgttgccaaagaccccgtaaaccagagggcttgtcatattctagaatgtcctgagggactcgctcaggatgtgatctctacaataggacaggcctttgaactgcggtttaaacaatacctaagaaatccacccaagttggtgacaccacacgaccgcatggccggattcgacggcagtgcctgggacgaagaggaagaggaaccccccgaccaccagtactacaatgacttcccaggaaaggaaccaccttag

SEQ ID NO: 80279 - DNA, 894 bp, Artificial Sequence
  derived and/or modified sequence
taagatgaagaggaagaggagcctcccgatcatcaatattacaatgactttcccggcaaagaaccgcccttgggtggagtcgtagatatgcgattgcgcgagggggccgccccaggcgctgcccggcccaccgcccctaacgcacagaccccctcgcatctcggtgctaccttgcctgtagggcagcccgtcgggggagaccctgaggtacgaaagcagatgcccccccctcccccttgcccggggcgcgagctgtttgatgatcctagctatgtgaacgtccagaacctagataaggcacggcaggcagtcgggggggcagggcctccgaaccccgccattaatggctcagctccaagagatctgtttgacatgaaacctttcgaggacgctctaagggtgccacctcctccacaatccgtcagcatggccgagcagctgcggggcgagccttggtttcacggtaagctgtctagacgggaggctgaggctctactacagttgaacggagacttcctggttcgtgaaagtactaccactcctgggcagtacgtgctgacgggtctgcagagcgggcagcccaagcacctcctcctcgtggaccctgagggagttagatggggatttgcaatgctgccgaagctatttctcaattcgcgcgcccaggtgattagactgccccggcctcccagggtactcggcctgcaggccaggaccactatgccatccttacatatctttttctgcacagtttacactctcttaaggcatgccaattttctacaagtaaaaaaaggagtctacagtagccaactacattccttccgggctgacgtcgcctttgccttcagccatttcactgatctcagtattcccaccaccgtgagtttttag

SEQ ID NO: 80280 - DNA, 918 bp, Artificial Sequence
  derived and/or modified sequence
atggccggctttgatggcagcgcctgggatgaggaggaggaggagcccccagaccaccagtactacaatgacttccctgggaaggagccccccctgggcggcgtggtggacatgaggctgcgggagggcgccgcccctggggccgcccggcccacagccccaaatgcccagacccccagccacctgggcgccaccctgcctgtgggccagcctgtgggcggggaccctgaggtgaggaagcagatgcctcctcctccaccctgccccggccgggagctgtttgatgaccccagctatgtgaatgtgcagaacctggacaaggcccggcaggccgtgggcggggccggcccccccaacccagccatcaatggaagtgccccccgggacctgtttgacatgaagccctttgaagatgccctgcgggtgcccccaccaccccagagcgtgtccatggccgagcagctgcggggggagccctggttccacggcaagctgagcagaagagaggccgaggccctgctgcagctgaatggagacttcctggtgcgggagagcaccaccaccccaggccagtatgtgctgaccggcctgcagagcggccagcccaagcacctgctgctggtggaccctgagggcgtgcgctggggctttgccatgctgcccaagctgttcctgaacagccgggcccaggtgatccggctgcccaggcctccccgggtgctgggcctgcaggcccggaccaccatgcccagcctgcacatcttcttctgcaccgtgtacaccctgctgcggcatgccaacttcctgcaggtgaagaagggcgtgtacagcagccagctgcacagcttccgggcagatgtggcctttgccttcagccacttcacagacctgagcatccccaccaccgtgtccttctag

SEQ ID NO: 80281 - DNA, 1155 bp, Artificial Sequence
  derived and/or modified sequence
atggacctgctgccccccaagcccaagtacaaccccctgagaaatgaaagcctgagcatcctgggccgcagcaacctgaagtttgctggcatgcccatcaccctgactgtgtccaccagcagcctgaacctgatggctgctgactgcaagcagatcatcgccaaccaccacatgcagagcatcagctttgccagcggcggggaccctgacacagcagaatatgtggcctacgtggccaaggaccctgtgaaccagagggcctgccacatcctggagtgcccagagggcctggcccaggacgtcatcagcaccatcggccaggcctttgagctgcgcttcaagcagtacctgaggaacccccccaagctggtgacccctcatgacaggatggccggctttgatggcagcgcctgggatgaggaggaggaggagcccccagaccaccagtactacaatgacttccctgggaaggagccccccctgggcggcgtggtggacatgaggctgcgggagggcgccgcccctggagctgcccggcccacagccccaaatgcccagacccccagccacctgggcgccaccctgcctgtgggccagcctgtgggcggggaccctgaggtgaggaagcagatgcctcctcctccaccctgccccggccgggagctgtttgatgaccccagctatgtgaatgtgcagaacctggacaaggcccggcaggccgtgggcggggccggcccccccaacccagccatcaatggcagcgccccccgggacctgtttgacatgaagccctttgaagatgccctgcgggtgcccccaccaccccagagcgtgtccatggccgagcagctgcggggggagccctggttccacggcaagctgagccggcgggaggccgaggccctgctgcagctgaatggagacttcctggtgcgggagagcaccaccaccccaggccagtatgtgctgaccggcctgcagagcggccagcccaagcacctgctgctggtggaccctgagggcgtggtgaggaccaaggaccacagatttgagagcgtgagccacctgatctcctaccacatggacaaccacctgcccatcatctctgctggcagcgagctgtgcctgcagcagcctgtggagaggaagctgtag

SEQ ID NO: 80282 - DNA, 393 bp, Artificial Sequence
  derived and/or modified sequence
atgcccatcaccctgactgtgtccaccagcagcctgaacctgatggctgctgactgcaagcagatcatcgccaaccaccacatgcagagcatcagctttgccagcggcggggaccctgacacagcagaatatgtggcctacgtggccaaggaccctgtgaaccagagggcctgccacatcctggagtgcccagagggcctggcccaggacgtcatcagcaccatcggccaggcctttgagctgcgcttcaagcagtacctgaggaacccccccaagctggtgacccctcatgacaggatggccggctttgatggcagcgcctgggatgaggaggaggaggagcccccagaccaccagtactacaatgacttccctgggaaggagcccccatag

SEQ ID NO: 80283 - DNA, 894 bp, Artificial Sequence
  derived and/or modified sequence
tgagatgaggaggaggaggagcccccagaccaccagtactacaatgacttccctgggaaggagccccccctgggcggcgtggtggacatgaggctgcgggagggcgccgcccctggggccgcccggcccacagccccaaatgcccagacccccagccacctgggcgccaccctgcctgtgggccagcctgtgggcggggaccctgaggtgaggaagcagatgcctcctcctccaccctgccccggccgggagctgtttgatgaccccagctatgtgaatgtgcagaacctggacaaggcccggcaggccgtgggcggggccggcccccccaacccagccatcaatggaagtgccccccgggacctgtttgacatgaagccctttgaagatgccctgcgggtgcccccaccaccccagagcgtgtccatggccgagcagctgcggggggagccctggttccacggcaagctgagcagaagagaggccgaggccctgctgcagctgaatggagacttcctggtgcgggagagcaccaccaccccaggccagtatgtgctgaccggcctgcagagcggccagcccaagcacctgctgctggtggaccctgagggcgtgcgctggggctttgccatgctgcccaagctgttcctgaacagccgggcccaggtgatccggctgcccaggcctccccgggtgctgggcctgcaggcccggaccaccatgcccagcctgcacatcttcttctgcaccgtgtacaccctgctgcggcatgccaacttcctgcaggtgaagaagggcgtgtacagcagccagctgcacagcttccgggcagatgtggcctttgccttcagccacttcacagacctgagcatccccaccaccgtgtccttctag

SEQ ID NO: 80284 - DNA, 918 bp, Artificial Sequence
  derived and/or modified sequence
atggccggcttcgacggcagcgcctgggacgaggaggaggaggagcctccagaccaccagtattataatgatttcccaggcaaagaaccccccctgggtggagtggttgatatgagactcagggagggcgctgcccctggagctgccagaccaaccgctcctaacgcccagacccctagccacctgggcgccaccctccccgtgggccagcccgtcggaggagatcctgaggtgaggaagcagatgcccccaccccctccctgccccggccgcgaactgtttgatgacccatcttacgtgaacgtgcagaacctggataaagctaggcaggctgttggaggagcaggccccccaaatccagccatcaacgggagtgccccacgcgatctgttcgatatgaaacctttcgaagatgccctgcgcgttcctccaccccctcagagtgtgtcaatggcagagcagctcagaggcgagccatggtttcacgggaagctatcgcgaagagaggcagaggcactgctgcagctgaatggagacttcctggtccgagagtccacgaccacgccaggacaatacgtgctgacgggcttgcagtctggccagcctaaacaccttttgcttgtggaccccgagggggtgcgatggggcttcgccatgttacccaaactctttctgaatagccgtgcccaggtgatccgtctgcctcgtcctccaagggtgttgggcctccaggcaagaactactatgccgtctctgcacatttttttctgtactgtctatacgctgctgcgacacgctaacttcctgcaggtcaaaaagggcgtctattcaagtcaactgcacagctttcgagcagacgtagcatttgcttttagccatttcaccgatctgtccatacctacaaccgtgtctttttag

SEQ ID NO: 80285 - DNA, 1155 bp, Artificial Sequence
  derived and/or modified sequence
atggacctgctgccccccaagcccaagtacaaccccctgcggaacgagtcattgagcatccttgggaggtccaaccttaagttcgcaggaatgccaattactctgactgtatccacctcttcgctgaacctgatggcggccgattgtaaacagataatcgccaatcatcatatgcaatcaattagtttcgcaagtggtggcgaccccgatacagcagaatatgtagcatatgtggccaaagatccagtcaaccagagggcctgccatattctggagtgtccagaaggcctggcccaggatgttattagcaccattggacaggctttcgagctgaggtttaaacagtatctcaggaaccctcccaagctggtgaccccccatgatcgcatggcaggtttcgacggcagtgcttgggacgaggaggaggaggaaccccctgatcaccagtactataatgatttccctggcaaagagcctcctctgggaggcgtcgttgacatgaggcttcgtgaaggcgccgcccctggtgctgcccggccaacggccccaaatgctcaaacaccatcccacctgggcgcaacactacccgtggggcaacctgttggaggcgaccccgaagtgagaaagcagatgccccctccgcctccttgtcctggtcgcgagttgttcgacgaccccagctatgtcaatgtgcagaacctggataaagcccgacaagcagtgggtggagcaggcccacccaatcccgcaatcaacggatcagcccccagagacctgtttgatatgaagccctttgaggatgctctgcgagttccacctcccccccagtctgtgagcatggccgagcagctacgcggcgagccatggttccacgggaaactgagcagacgggaggccgaagcattgttacagttaaacggtgactttctcgtaagagagagcaccacaacacccggccagtacgttctcacaggccttcaaagcggccagcccaagcacctgttgctggtggaccccgaaggcgtagtgagaactaaagatcataggttcgaaagcgtgagtcacctcatttcataccatatggataatcacctacctattattagcgccggttctgagttgtgtctacagcagcctgtggaaagaaaactgtag

SEQ ID NO: 80286 - DNA, 393 bp, Artificial Sequence
  derived and/or modified sequence
atgcccatcaccctgaccgtgagcaccagcagcctgaacctgatggcggctgattgtaaacaaatcatagcaaatcatcacatgcagtcaattagcttcgcatctggcggtgatcccgacaccgctgagtatgtggcctacgtcgcaaaggatccagtgaatcagcgggcttgccatatcctggaatgccccgaaggccttgctcaggacgttattagcacaatcggccaagctttcgagcttagattcaagcagtatctgcgcaacccccctaaactcgtgacgcctcacgatagaatggcaggcttcgatggatctgcttgggatgaggaggaggaggagccccctgatcatcaatattacaacgattttccgggaaaggagcctccatag

SEQ ID NO: 80287 - DNA, 894 bp, Artificial Sequence
  derived and/or modified sequence
tgagacgaggaggaggaggagccccccgaccaccagtactacaacgacttccccggaaaagagccaccactcggcggcgtcgtggatatgcgccttcgtgaaggagctgcccctggggcagccaggcccactgctcctaacgcacagactcctagccacctgggggctacactcccggtgggtcagcccgttgggggggatcctgaagtccgcaagcagatgcctccaccacctccatgccctgggcgagaacttttcgatgacccgagctatgttaacgtgcagaacctggacaaggctaggcaggccgtggggggagcaggtccgccaaacccagctattaatgggagtgctccgcgcgatctcttcgacatgaaaccattcgaggacgcactccgcgttccccctccgcctcaatctgtaagtatggcggagcagctgcgcggggaaccatggttccatggaaagctatcccgccgcgaagctgaggccctccttcagctgaacggtgattttctagtacgggagagcaccactacaccgggccagtatgtgctcacaggactccagtctgggcagccaaagcacctgttactggtagatccagagggcgttaggtggggattcgctatgcttcctaaactctttctcaactccagggctcaagtaatccgtctaccgcgccccccccgcgtactgggactgcaggctcgtacaacgatgccttctttgcacattttcttttgcaccgtatacactctgctgaggcacgccaacttccttcaggtgaaaaaaggcgtgtatagctcacaactgcacagctttagagcggacgtcgctttcgccttcagtcactttacagacctgagcatccccacgacagtctcattttag

SEQ ID NO: 80288 - DNA, 918 bp, Artificial Sequence
  derived and/or modified sequence
atggcagggtttgatggaagcgcctgggacgaagaggaggaagagccacctgatcaccagtattacaacgacttcccaggcaaggagcccccactgggaggtgtggttgacatgagacttcgggaaggagcagcccctggtgccgctaggcccaccgcccctaacgctcaaaccccctcgcacctgggggcaactctgcctgtggggcagcccgtggggggagaccccgaggtgagaaaacagatgccaccaccacccccatgtccaggccgtgaactgtttgatgatccgtcgtacgtgaatgtccagaacctagataaggccaggcaagctgtgggcggtgccggacccccaaaccctgcaatcaatggttccgccccacgcgatctgttcgacatgaagccatttgaagatgccctgcgagttccccctcctcctcagagtgtgagtatggcggaacagcttagaggggagccatggtttcacggcaagctgagtaggcgggaagccgaggccctgctgcagctgaacggagatttccttgtccgagaaagcactaccacacctgggcaatacgttctgaccggccttcagtctgggcagcctaaacatctgttgctggtggatcctgagggggtgaggtggggatttgcaatgctgcccaagctgttccttaattcacgagcacaggtgatccgcctccctaggccgccaagagtgctaggactgcaggccaggacaaccatgccctccttacatatatttttttgtaccgtctacacactgctgcgccatgccaacttcttacaggtaaagaagggcgtgtattctagtcagcttcactccttcagggctgacgttgcttttgcgttttctcatttcacagacttatccattcccaccacagttagtttttag

SEQ ID NO: 80289 - DNA, 1155 bp, Artificial Sequence
  derived and/or modified sequence
atggacctcctgccaccgaagcctaagtataatccactgcgaaatgaaagcctgtctattctggggaggagcaacctgaaattcgccggaatgccaattacgctcacggtctcaactagttcgctgaacttgatggcggcagattgcaagcagattatcgctaaccaccacatgcagtccatttcctttgccagcggcggtgacccagataccgccgaatacgtggcttacgttgctaaggaccccgtaaatcagagagcctgtcacatccttgaatgcccagaggggctggcccaggacgtgataagcaccattggccaggcctttgaactgaggttcaagcagtacctaagaaaccctcccaagctagtcaccccccacgaccgcatggctggatttgatgggtcggcctgggacgaggaagaagaggagcctcctgaccaccagtactataacgacttccctggaaaggaaccccctctgggaggcgtggttgacatgcgactccgcgagggggcagcgcctggcgcagctcggcctaccgccccaaatgctcagacgcccagtcacctgggagccacccttccggttgggcagcccgtggggggagaccccgaggtcagaaagcagatgcccccaccaccaccttgtccaggtcgggaactctttgatgatccttcttatgtcaatgtgcaaaacctggataaagccagacaggccgtcggtggcgctgggcctcccaatccagccatcaacggttccgcccctagagatctgtttgatatgaaaccattcgaggacgcacttcgggtccccccaccgcctcagagcgtcagcatggccgaacaactgcgaggcgagccatggttccacgggaagctctcacggagggaggccgaagccctgctgcagttgaacggagacttcttggtgagagaatcaaccacaacacctggacaatatgtcctgactgggcttcagagtggccagccgaagcaccttctgctcgtagacccggagggtgttgtccgcactaaggatcatagatttgaatccgtgtcccacttgatcagctaccacatggacaatcacttacccataatctccgctggctccgagctgtgtctgcagcagcccgtggaacggaaactgtag

SEQ ID NO: 80290 - DNA, 393 bp, Artificial Sequence
  derived and/or modified sequence
atgccgattaccttgaccgtgagtacatccagtttgaacctgatggccgcagactgtaaacagatcattgccaatcatcacatgcagtccattagcttcgcttcagggggtgatccagacacggcagaatatgtggcatacgtggccaaagatccggtgaaccagagggcatgccatattctagaatgtcccgaaggcctggcccaggatgttataagcacaatagggcaggccttcgagttgaggttcaaacagtacctacggaatccaccaaagttagtcaccccacatgatcggatggcgggatttgacggtagtgcttgggatgaggaggaagaggagccaccggatcaccaatattataatgactttcctgggaaggagcctccgtag

SEQ ID NO: 80291 - DNA, 894 bp, Artificial Sequence
  derived and/or modified sequence
taggatgaggaggaagaagagcctcccgatcatcagtactataacgattttcccggaaaggagccccctctggggggagtggtcgacatgcggctgagagagggtgctgcaccgggagcggctagacccactgcgccaaacgcccagacacctagtcatttgggggcaacactgcccgtagggcagccagtgggtggggatcccgaggtacgcaagcagatgcctccccctccaccatgtcctggaagggagttgtttgacgaccctagttacgttaacgtgcagaatctagataaggcccgtcaagcagtcggtggagctggtccacccaaccccgctattaatggctctgcacctcgagatctcttcgatatgaagccattcgaggacgctctgcgggttccacccccaccccagagtgtgtccatggctgaacagttaaggggtgaaccttggtttcacggaaagctttctagaagagaggctgaagcactcctgcagctgaatggcgactttttagttagggaatcaaccacaactcctggacagtacgtgttaactggccttcagagtgggcagccaaagcatctactgcttgtggacccggagggtgtgagatgggggtttgcgatgttaccaaaactcttcttaaactcccgggctcaggtgatccggctgccgagaccacccagagtactagggctgcaggccagaacgacaatgccgagcctgcacatcttcttctgtaccgtgtacactttgctgcggcacgccaattttttacaggttaaaaaaggggtttactctagccagctccacagcttccgtgccgatgttgcattcgccttttcccacttcactgatctgtccattcccacgacagtttccttctag

SEQ ID NO: 80292 - DNA, 2881 bp, Artificial Sequence
  derived and/or modified sequence
agagaagaggctccacgttgggcggggatggggcctgaaactgtctgggtctgagctggggagcggaagccacttgtccctctccctccccaggacttctgtgactcctgggccacagaggtccaaccaggctaagggcctggggataccccctgcctggcccccttgcccaaactggcaggggggccaggctgggcagcagcccctctttcacctcaactatggatctcctgccccccaagcccaagtacaatccactccggaatgagtctctctctatcctggggaggagtaacctgaaatttgctggaatgccaatcactctcaccgtctccaccagcagcctcaacctcatggccgcagactgcaaacagatcatcgccaaccaccacatgcaatctatctcatttgcatccggcggggatccggacacagccgagtatgtcgcctatgttgccaaagaccctgtgaatcagagagcctgccacattctggagtgtcccgaagggcttgcccaggatgtcatcagcaccattggccaggccttcgagttgcgcttcaaacaatacctcaggaacccacccaaactggtcacccctcatgacaggatggctggctttgatggctcagcatgggatgaggaggaggaagagccacctgaccatcagtactataatgacttcccggggaaggaaccccccttggggggggtggtagacatgaggcttcgggaaggagccgctccaggggctgctcgacccactgcacccaatgcccagacccccagccacttgggagctacattgcctgtaggacagcctgttgggggagatccagaagtccgcaaacagatgccacctccaccaccctgtccaggcagagagctttttgatgatccctcctatgtcaacgtccagaacctagacaaggcccggcaagcagtgggtggtgctgggccccccaatcctgctatcaatggcagtgcaccccgggacctgtttgacatgaagcccttcgaagatgctcttcgcgtgcctccacctccccagtcggtgtccatggctgagcagctccgaggggagccctggttccatgggaagctgagccggcgggaggctgaggcactgctgcagctcaatggggacttcctggtacgggagagcacgaccacacctggccagtatgtgctcactggcttgcagagtgggcagcctaagcatttgctactggtggaccctgagggtgtggttcggactaaggatcaccgctttgaaagtgtcagtcaccttatcagctaccacatggacaatcacttgcccatcatctctgcgggcagcgaactgtgtctacagcaacctgtggagcggaaactgtgatctgccctagcgctctcttccagaagatgccctccaatcctttccaccctattccctaactctcgggacctcgtttgggagtgttctgtgggcttggccttgtgtcagagctgggagtagcatggactctgggtttcatatccagctgagtgagagggtttgagtcaaaagcctgggtgagaatcctgcctctccccaaacattaatcaccaaagtattaatgtacagagtggcccctcacctgggcctttcctgtgccaacctgatgccccttccccaagaaggtgagtgcttgtcatggaaaatgtcctgtggtgacaggcccagtggaacagtcacccttctgggcaagggggaacaaatcacacctctgggcttcagggtatcccagacccctctcaacacccgccccccccatgtttaaactttgtgcctttgaccatctcttaggtctaatgatattttatgcaaacagttcttggacccctgaattcaatgacagggatgccaacaccttcttggcttctgggacctgtgttcttgctgagcaccctctccggtttgggttgggataacagaggcaggagtggcagctgtcccctctccctggggatatgcaacccttagagattgccccagagccccactcccggccaggcgggagatggacccctcccttgctcagtgcctcctggccggggcccctcaccccaaggggtctgtatatacatttcataaggcctgccctcccatgttgcatgcctatgtactctacgccaaagtgcagcccttcctcctgaagcctctgccctgcctccctttctgggagggcggggtgggggtgactgaatttgggcctcttgtacagttaactctcccaggtggattttgtggaggtgagaaaaggggcattgagactataaagcagtagacaatccccacataccatctgtagagttggaactgcattcttttaaagttttatatgcatatattttagggctgtagacttactttcctattttcttttccattgcttattcttgagcacaaaatgataatcaattattacatttatacatcacctttttgacttttccaagcccttttacagctcttggcattttcctcgcctaggcctgtgaggtaactgggatcgcaccttttataccagagacctgaggcagatgaaatttatttccatctaggactagaaaaacttgggtctcttaccgcgagactgagaggcagaagtcagcccgaatgcctgtcagtttcatggaggggaaacgcaaaacctgcagttcctgagtaccttctacaggcccggcccagcctaggcccggggtggccacaccacagcaagccggccccccctcttttggccttgtggataagggagagttgaccgttttcatcctggcctccttttgctgtttggatgtttccacgggtctcacttataccaaagggaaaactcttcattaaagtccgtatttcttcta

SEQ ID NO: 80293 - DNA, 550 bp, Artificial Sequence
  derived and/or modified sequence
ggcaggcaggcgctgggtctgagtacccctctttccccagggaggccatcagtctggtgtgtgaggctgtgccgggtgctaagggggcgacaaggaggagaaagccctgtagccgcccgctcagctctatcctggggaggagtaacctgaaatttgctggaatgccaatcactctcaccgtctccaccagcagcctcaacctcatggccgcagactgcaaacagatcatcgccaaccaccacatgcaatctatctcatttgcatccggcggggatccggacacagccgagtatgtcgcctatgttgccaaagaccctgtgaatcagagagcctgccacattctggagtgtcccgaagggcttgcccaggatgtcatcagcaccattggccaggccttcgagttgcgcttcaaacaatacctcaggaacccacccaaactggtcacccctcatgacaggatggctggctttgatggctcagcatgggatgaggaggaggaagagccacctgaccatcagtactataatgacttcccggggaaggaaccccc

SEQ ID NO: 80294 - DNA, 1305 bp, Artificial Sequence
  derived and/or modified sequence
ggatgaggaggaggaagagccacctgaccatcagtactataatgacttcccggggaaggaaccccccttggggggggtggtagacatgaggcttcgggaaggagccgctccaggggctgctcgacccactgcacccaatgcccagacccccagccacttgggagctacattgcctgtaggacagcctgttgggggagatccagaagtccgcaaacagatgccacctccaccaccctgtccaggcagagagctttttgatgatccctcctatgtcaacgtccagaacctagacaaggcccggcaagcagtgggtggtgctgggccccccaatcctgctatcaatggcagtgcaccccgggacctgtttgacatgaagcccttcgaagatgctcttcgcgtgcctccacctccccagtcggtgtccatggctgagcagctccgaggggagccctggttccatgggaagctgagccggcgggaggctgaggcactgctgcagctcaatggggacttcctggtacgggagagcacgaccacacctggccagtatgtgctcactggcttgcagagtgggcagcctaagcatttgctactggtggaccctgagggtgtgagatggggtttcgccatgttgcccaagctgttcttgaactcccgggctcaagtgatccgcctccctcggcctcccagagtgctgggattacaggcacggaccaccatgcccagcctccacatctttttttgcactgtgtatactcttctgagacatgccaacttcctccaggtcaagaaaggggtatatagctctcagcttcactctttcagggctgatgtcgcctttgccttttctcacttcactgacctgtctattcctacaactgtctctttctagagaagcctcaatgatcaggattgacaggccacactctcccccaccatttttttctcctccttcaagcctcttgtctgtttcaccctcttccaccttggaggctgaggtcttatttgactcttcacctgaattgaccttcttccttcccaccctcccaggttcggactaaggatcaccgctttgaaagtgtcagtcaccttatcagctaccacatggacaatcacttgcccatcatctctgcgggcagcgaactgtgtctacagcaacctgtggagcggaaactgtgatctgccctagcgctctcttccagaagatgccctccaatcctttccaccctattccctaactctcgggacctcgtttgggagtgttctgtgggcttggccttgtgtcagagctgggagtagcatgga

SEQ ID NO: 80295 - protein, 789 aa, Artificial Sequence
  derived and/or modified sequence
MKMDMEDADMTLWTEAEFEEKCTYIVNDHPWDSGADGGTSVQAEASLPRNLLFKYATNSEEVIGVMSKEYIPKGTRFGPLIGEIYTNDTVPKNANRKYFWRIYSRGELHHFIDGFNEEKSNWMRYVNPAHSPREQNLAACQNGMNIYFYTIKPIPANQELLVWYCRDFAERLHYPYPGELTMMNLTQTQSSLKQPSTEKNELCPKNVPKREYSVKEILKLDSNPSKGKDLYRSNISPLTSEKDLDDFRRRGSPEMPFYPRVVYPIRAPLPEDFLKASLAYGIERPTYITRSPIPSSTTPSPSARSSPDQSLKSSSPHSSPGNTVSPVGPGSQEHRDSYAYLNASYGTEGLGSYPGYAPLPHLPPAFIPSYNAHYPKFLLPPYGMNCNGLSAVSSMNGINNFGLFPRLCPVYSNLLGGGSLPHPMLNPTSLPSSLPSDGARRLLQPEHPREVLVPAPHSAFSFTGAAASMKDKACSPTSGSPTAGTAATAEHVVQPKATSAAMAAPSSDEAMNLIKNKRNMTGYKTLPYPLKKQNGKIKYECNVCAKTFGQLSNLKVHLRVHSGERPFKCQTCNKGFTQLAHLQKHYLVHTGEKPHECQVCHKRFSSTSNLKTHLRLHSGEKPYQCKVCPAKFTQFVHLKLHKRLHTRERPHKCSQCHKNYIHLCSLKVHLKGNCAAAPAPGLPLEDLTRINEEIEKFDISDNADRLEDVEDDISVISVVEKEILAVVRKEKEETGLKVSLQRNMGNGLLSSGCSLYESSDLPLMKLPPSNPLPLVPVKVKQETVEPMDP

SEQ ID NO: 80296 - protein, 825 aa, Artificial Sequence
  derived and/or modified sequence
MLDICLEKRVGTTLAAPKCNSSTVRFQGLAEGTKGTMKMDMEDADMTLWTEAEFEEKCTYIVNDHPWDSGADGGTSVQAEASLPRNLLFKYATNSEEVIGVMSKEYIPKGTRFGPLIGEIYTNDTVPKNANRKYFWRIYSRGELHHFIDGFNEEKSNWMRYVNPAHSPREQNLAACQNGMNIYFYTIKPIPANQELLVWYCRDFAERLHYPYPGELTMMNLTQTQSSLKQPSTEKNELCPKNVPKREYSVKEILKLDSNPSKGKDLYRSNISPLTSEKDLDDFRRRGSPEMPFYPRVVYPIRAPLPEDFLKASLAYGIERPTYITRSPIPSSTTPSPSARSSPDQSLKSSSPHSSPGNTVSPVGPGSQEHRDSYAYLNASYGTEGLGSYPGYAPLPHLPPAFIPSYNAHYPKFLLPPYGMNCNGLSAVSSMNGINNFGLFPRLCPVYSNLLGGGSLPHPMLNPTSLPSSLPSDGARRLLQPEHPREVLVPAPHSAFSFTGAAASMKDKACSPTSGSPTAGTAATAEHVVQPKATSAAMAAPSSDEAMNLIKNKRNMTGYKTLPYPLKKQNGKIKYECNVCAKTFGQLSNLKVHLRVHSGERPFKCQTCNKGFTQLAHLQKHYLVHTGEKPHECQVCHKRFSSTSNLKTHLRLHSGEKPYQCKVCPAKFTQFVHLKLHKRLHTRERPHKCSQCHKNYIHLCSLKVHLKGNCAAAPAPGLPLEDLTRINEEIEKFDISDNADRLEDVEDDISVISVVEKEILAVVRKEKEETGLKVSLQRNMGNGLLSSGCSLYESSDLPLMKLPPSNPLPLVPVKVKQETVEPMDP

SEQ ID NO: 80297 - protein, 63 aa, Artificial Sequence
  derived and/or modified sequence
MKMDMEDADMTLWTEAEFEEKCTYIVNDHPWDSGADGGTSVQAEASLPRNLLFKYATNSEEVI

SEQ ID NO: 80298 - protein, 788 aa, Artificial Sequence
  derived and/or modified sequence
MKMDMEDADMTLWTEAEFEEKCTYIVNDHPWDSGADGGTSVQAEASLPRNLLFKYATNSEEVIGVMSKEYIPKGTRFGPLIGEIYTNDTVPKNANRKYFWRIYSRGELHHFIDGFNEEKSNWMRYVNPAHSPREQNLAACQNGMNIYFYTIKPIPANQELLVWYCRDFAERLHYPYPGELTMMNLTQTQSSLKQPSTEKNELCPKNVPKREYSVKEILKLDSNPSKGKDLYRSNISPLTSEKDLDDFRRRGSPEMPFYPRVVYPIRAPLPEDFLKASLAYGIERPTYITRSPIPSSTTPSPSARSSPDQSLKSSSPHSSPGNTVSPVGPGSQEHRDSYAYLNASYGTEGLGSYPGYAPLPHLPPAFIPSYNAHYPKFLLPPYGMNCNGLSAVSSMNGINNFGLFPRLCPVYSNLLGGGSLPTPCSTPLLPSSLPSDGARRLLQPEHPREVLVPAPHSAFSFTGAAASMKDKACSPTSGSPTAGTAATAEHVVQPKATSAAMAAPSSDEAMNLIKNKRNMTGYKTLPYPLKKQNGKIKYECNVCAKTFGQLSNLKVHLRVHSGERPFKCQTCNKGFTQLAHLQKHYLVHTGEKPHECQVCHKRFSSTSNLKTHLRLHSGEKPYQCKVCPAKFTQFVHLKLHKRLHTRERPHKCSQCHKNYIHLCSLKVHLKGNCAAAPAPGLPLEDLTRINEEIEKFDISDNADRLEDVEDDISVISVVEKEILAVVRKEKEETGLKVSLQRNMGNGLLSSGCSLYESSDLPLMKLPPSNPLPLVPVKVKQETVEPMDP

SEQ ID NO: 80299 - protein, 702 aa, Artificial Sequence
  derived and/or modified sequence
MWGRLWPLLLSILTATAVPGPSLRRPSRELDATPRMTIPYEELSGTRHFKGQAQNYSTLLLEEASARLLVGARGALFSLSANDIGDGAHKEIHWEASPEMQSKCHQKGKNNQTECFNHVRFLQRLNSTHLYACGTHAFQPLCAAIDAEAFTLPTSFEEGKEKCPYDPARGFTGLIIDGGLYTATRYEFRSIPDIRRSRHPHSLRTEETPMHWLNDAEFVFSVLVRESKASAVGDDDKVYYFFTERATEEGSGSFTQSRSSHRVARVARVCKGDLGGKKILQKKWTSFLKARLICHIPLYETLRGVCSLDAETSSRTHFYAAFTLSTQWKTLEASAICRYDLAEIQAVFAGPYMEYQDGSRRWGRYEGGVPEPRPGSCITDSLRSQGYNSSQDLPSLVLDFVKLHPLMARPVVPTRGRPLLLKRNIRYTHLTGTPVTTPAGPTYDLLFLGTADGWIHKAVVLGSGMHIIEETQVFRESQSVENLVISLLQHSLYVGAPSGVIQLPLSSCSRYRSCYDCILARDPYCGWDPGTHACAAATTIANRSQGSRTALIQDIERGNRGCESSRDTGRALQVHMGSMSPPSAWPCVLDGPETRQDLCQPPKPCVHSHAHMEECLSAGLQCPHPHLLLVHSCFIPASGLGVPSQLPHPIWSSSPAPCGDLFVKSLGTGQPGEVRLHHSPPLPSCVALVNQPPHSPWSFSRV

SEQ ID NO: 80300 - DNA, 2109 bp, Artificial Sequence
  derived and/or modified sequence
atgtggggcagactgtggcccctgctgctgagcatcctgaccgccaccgccgtgcccggccccagcctgagaagacccagcagagagctggacgccacccccagaatgaccatcccctacgaggagctgagcggcaccagacacttcaagggccaggcccagaactacagcaccctgctgctggaggaggccagcgccagactgctggtgggcgccagaggcgccctgttcagcctgagcgccaacgacatcggcgacggcgcccacaaggagatccactgggaggccagccccgagatgcagagcaagtgccaccagaagggcaagaacaaccagaccgagtgcttcaaccacgtgagattcctgcagagactgaacagcacccacctgtacgcctgcggcacccacgccttccagcccctgtgcgccgccatcgacgccgaggccttcaccctgcccaccagcttcgaggagggcaaggagaagtgcccctacgaccccgccagaggcttcaccggcctgatcatcgacggcggcctgtacaccgccaccagatacgagttcagaagcatccccgacatcagaagaagcagacacccccacagcctgagaaccgaggagacccccatgcactggctgaacgacgccgagttcgtgttcagcgtgctggtgagagagagcaaggccagcgccgtgggcgacgacgacaaggtgtactacttcttcaccgagagagccaccgaggagggcagcggcagcttcacccagagcagaagcagccacagagtggccagagtggccagagtgtgcaagggcgacctgggcggcaagaagatcctgcagaagaagtggaccagcttcctgaaggccagactgatctgccacatccccctgtacgagaccctgagaggcgtgtgcagcctggacgccgagaccagcagcagaacccacttctacgccgccttcaccctgagcacccagtggaagaccctggaggccagcgccatctgcagatacgacctggccgagatccaggccgtgttcgccggcccctacatggagtaccaggacggcagcagaagatggggcagatacgagggcggcgtgcccgagcccagacccggcagctgcatcaccgacagcctgagaagccagggctacaacagcagccaggacctgcccagcctggtgctggacttcgtgaagctgcaccccctgatggccagacccgtggtgcccaccagaggcagacccctgctgctgaagagaaacatcagatacacccacctgaccggcacccccgtgaccacccccgccggccccacctacgacctgctgttcctgggcaccgccgacggctggatccacaaggccgtggtgctgggcagcggcatgcacatcatcgaggagacccaggtgttcagagagagccagagcgtggagaacctggtgatcagcctgctgcagcacagcctgtacgtgggcgcccccagcggcgtgatccagctgcccctgagcagctgcagcagatacagaagctgctacgactgcatcctggccagagacccctactgcggctgggaccccggcacccacgcctgcgccgccgccaccaccatcgccaacagaagccagggcagcagaaccgccctgatccaggacatcgagagaggcaacagaggctgcgagagcagcagagacaccggcagagccctgcaggtgcacatgggcagcatgagcccccccagcgcctggccctgcgtgctggacggccccgagaccagacaggacctgtgccagccccccaagccctgcgtgcacagccacgcccacatggaggagtgcctgagcgccggcctgcagtgcccccacccccacctgctgctggtgcacagctgcttcatccccgccagcggcctgggcgtgcccagccagctgccccaccccatctggagcagcagccccgccccctgcggcgacctgttcgtgaagagcctgggcaccggccagcccggcgaggtgagactgcaccacagcccccccctgcccagctgcgtggccctggtgaaccagcccccccacagcccctggagcttcagcagagtgtag

SEQ ID NO: 80301 - DNA, 513 bp, Artificial Sequence
  derived and/or modified sequence
atgtggggcagactgtggcccctgctgctgagcatcctgaccgccaccgccgtgcccggccccagcctgagaagacccagcagagagctggacgccacccccagaatgaccatcccctacgaggagctgagcggcaccagacacttcaagggccaggcccagaactacagcaccctgctgctggaggaggccagcgccagactgctggtgggcgccagaggcgccctgttcagcctgagcgccaacgacatcggcgacggcgcccacaaggagatccactgggaggccagccccgagatgcagagcaagtgccaccagaagggcaagaacaaccagaccgagtgcttcaaccacgtgagattcctgcagagactgaacagcacccacctgtacgcctgcggcacccacgccttccagcccctgtgcgccgccatcgacgccgaggccttcaccctgcccaccagcttcgaggagggcaaggagaagtgcccctacgaccccgccagaggctag

SEQ ID NO: 80302 - DNA, 2109 bp, Artificial Sequence
  derived and/or modified sequence
atgtgggggcggctgtggccgttgctgctcagcatcctcacagcaactgccgtcccaggcccctctctgcggagaccctccagggagctggacgccaccccaagaatgactataccttatgaggagctgtccggtactaggcatttcaaaggacaggctcaaaactacagtacacttcttctggaagaggcatcagcgcgtctcttggttggcgctagaggagcgctattctcactttcggcgaacgatatcggcgacggcgctcacaaggagattcactgggaggcgtctccggaaatgcagagcaagtgtcaccagaaggggaagaataaccaaactgagtgctttaatcacgtccgcttcctgcaacggctgaattccacacacctatacgcttgcggaacccatgctttccagccactgtgcgctgctattgacgcggaggcattcaccctacccaccagcttcgaagaaggaaaggaaaagtgcccatacgatcccgcccggggctttacaggcttgattattgacggggggctgtatactgctaccagatatgagttcaggtccatccccgacatccggagaagtcggcacccccatagcttgaggaccgaggagacccccatgcactggctcaatgatgcagagttcgtgttctcagtactggttcgggagtccaaggcatcagccgtcggtgatgacgacaaggtgtactacttttttaccgagagggctacggaggaaggatccgggtccttcacccagtcaagatccagtcatagagtggcccgcgtcgctcgtgtttgtaagggggacctgggcggaaaaaaaattctgcagaagaagtggacatctttcctcaaggcaaggttgatttgccacattcctctctacgagacactgcggggagtatgcagtcttgacgcagagaccagcagtcggacgcatttctacgctgccttcactttgagcacccagtggaagactctggaagcatccgccatttgtcgatacgacctagctgaaatacaagctgtcttcgcgggaccctacatggagtaccaggacggaagtcgccggtgggggagatatgagggaggcgtgcccgagcctagacccggctcatgcatcacagactccctccgctctcagggttacaactcctctcaggacctaccatccctggtgcttgactttgtgaaactccatcctttgatggctagaccagttgtgcctacccgcggaagaccactactgttgaaaaggaatattagatatacccacttgacgggcacacccgttacaaccccagccggccctacctacgatctgctgttcctggggacagctgatggctggattcacaaagccgttgtcttgggtagcgggatgcatatcatcgaggagacccaggtctttcgagaatcgcaaagtgtcgagaatctggtcatctccctcctgcagcactccctgtatgttggcgccccgtcaggcgtcattcagcttcccttatcatcctgctccaggtatcgctcctgttatgattgtatcctggccagggatccatattgtgggtgggacccaggtacccacgcctgtgccgccgctacaactatagcgaacaggagccagggttcccggaccgccctgattcaggacatagaaagaggaaatagaggctgcgaatctagtcgggacaccggcagggctttacaggttcatatgggatcaatgagtccaccgtcagcctggccgtgtgtgctagacggccctgagacccgacaagatctctgtcaaccacctaagccctgcgtccattcacatgctcacatggaggagtgcctaagtgcaggactgcagtgcccccacccacacctcctgttggtgcactcatgttttataccagcaagcggactgggtgttccgtctcagcttccgcaccctatctggagcagttcccccgctccttgcggggacctttttgtgaaaagcttgggtacaggccaaccaggcgaggtcagacttcaccacagtcctcccttgcctagctgcgtggcattggtcaaccagccaccccactccccttggagcttcagcagggtttag

SEQ ID NO: 80303 - DNA, 513 bp, Artificial Sequence
  derived and/or modified sequence
atgtggggccgtctgtggccgttgttactctccatccttactgctactgccgtacccggcccatctctgcgtaggcctagtagagagctggatgcaacccctcgcatgacgataccctacgaggagctgtcaggcacccggcacttcaaaggccaggcgcagaactacagtaccctgctcctagaagaggcgtctgctaggcttttggtaggcgcacgcggggccctgttttcactatccgccaacgacatcggagatggcgcccataaagagatccactgggaggcctcccccgaaatgcagtctaagtgccaccagaagggcaaaaataatcagactgagtgcttcaaccatgtcaggttcctgcaacgactcaattccacacatttgtacgcatgcgggacccatgcttttcaaccgctctgtgccgccattgacgccgaagcgttcacactgcccactagctttgaagaggggaaagaaaaatgcccttatgatcctgctagggggtag

SEQ ID NO: 80304 - DNA, 2109 bp, Artificial Sequence
  derived and/or modified sequence
atgtggggccgcctgtggcccctgctgctgagcatcctgacagccacagctgtgcccggccccagcctgcggcggcccagccgggagctggatgccacccccaggatgaccatcccctatgaggagctgagcggcaccaggcacttcaagggccaggcccagaactacagcaccctgctgctggaggaggccagcgcccggctgctggtgggcgcccggggggccctcttcagcctgagcgccaatgacattggagatggagcccacaaggagatccactgggaggccagccctgagatgcagagcaagtgccaccagaagggcaagaacaaccagacagagtgcttcaaccacgtgcgcttcctgcagaggctgaacagcacccacctgtatgcctgtggcacccacgccttccagcccctgtgtgccgccattgatgctgaggccttcaccctgcccaccagctttgaggagggcaaggagaagtgcccctatgaccctgcccggggcttcaccggcctcatcattgatggcggcctgtacacagccaccaggtatgagttccgcagcatcccagacatcagaagaagccgccacccccacagcctgaggacagaggagacccccatgcactggctgaatgatgctgagtttgtgttttctgtgctggtgcgggagagcaaggccagcgctgtgggagatgatgacaaggtgtactacttcttcacagagcgggccacagaggagggcagcggcagcttcacccagagccgcagcagccaccgggtggcccgggtggcccgggtgtgcaagggggacctgggcggcaagaagatcctgcagaagaagtggaccagcttcctgaaggcccggctcatctgccacatccccctgtatgagaccctgcggggcgtgtgcagcctggatgctgagaccagcagcaggacccacttctacgccgccttcaccctgagcacccagtggaagaccctggaggccagcgccatctgccgctatgacctggccgagatccaggccgtgtttgctggcccctacatggagtaccaggacggcagccgccgctggggccgctatgaaggaggagtgcctgagccccggcccggcagctgcatcacagacagcctgcggagccagggctacaacagcagccaggacctgcccagcctggtgctggactttgtgaagctgcaccccctgatggcccggcctgtggtgcccacccggggccggcccctgctgctgaagaggaacatccgctacacccacctgaccggcacccctgtgaccaccccagctggccccacctatgacctgctcttcctgggcacagcagatggctggatccacaaggctgtggtgctgggcagcggcatgcacatcatcgaggagacccaggtgttccgggagagccagagcgtggagaacctggtgatcagcctgctgcagcacagcctgtatgtgggcgcccccagcggggtcatccagctgcccctgagcagctgcagccgctaccgcagctgctatgactgcatcctggcccgggacccctactgcggctgggaccccggcacccacgcctgtgccgccgccaccaccatcgccaacagaagccagggcagcaggacagccctgatccaggacatcgagcggggcaacagaggctgtgagagcagccgggacaccggccgggccctgcaggtgcacatgggctccatgagccccccatctgcctggccctgtgtgctggatggccctgagacccggcaggacctgtgccagccccccaagccctgtgtgcacagccacgcccacatggaggagtgcctgtctgctggcctgcagtgcccccacccccacctgctgctggtgcacagctgcttcatcccagccagcggcctgggcgtgcccagccagctgccccaccccatctggagcagcagccctgccccctgtggggacctgtttgtgaagagcctgggcaccggccagcctggagaggtgcggctgcaccacagcccccccctgcccagctgtgtggccctggtgaaccagcccccccacagcccctggagcttcagccgggtgtag

SEQ ID NO: 80305 - DNA, 513 bp, Artificial Sequence
  derived and/or modified sequence
atgtggggccgcctgtggcccctgctgctgagcatcctgacagccacagctgtgcccggccccagcctgcggcggcccagccgggagctggatgccacccccaggatgaccatcccctatgaggagctgagcggcaccaggcacttcaagggccaggcccagaactacagcaccctgctgctggaggaggccagcgcccggctgctggtgggcgcccggggggccctcttcagcctgagcgccaatgacattggagatggagcccacaaggagatccactgggaggccagccctgagatgcagagcaagtgccaccagaagggcaagaacaaccagacagagtgcttcaaccacgtgcgcttcctgcagaggctgaacagcacccacctgtatgcctgtggcacccacgccttccagcccctgtgtgccgccattgatgctgaggccttcaccctgcccaccagctttgaggagggcaaggagaagtgcccctatgaccctgcccggggctag

SEQ ID NO: 80306 - DNA, 2109 bp, Artificial Sequence
  derived and/or modified sequence
atgtggggccggctgtggcccctgctgctgagcatcctgaccgccaccgctgtgcctggcccatccctaaggcggccctcacgcgagcttgacgccactccccggatgaccatcccctacgaggaattgagcggtacccgtcattttaaaggacaggcccagaactactctactctcctcttggaggaagcgagtgcaagattacttgtcggtgcccgcggagccttgttttcgctgtctgcgaacgatataggtgacggcgcgcataaggagatccactgggaagcctcgccagaaatgcagagtaagtgtcaccagaagggaaagaacaatcagactgaatgtttcaaccacgtcaggtttctgcagaggctgaacagcacacacctgtacgcctgcgggactcacgccttccagcctctatgcgctgcgatagacgcagaggcttttacactgccgacctcattcgaggaaggtaaagaaaaatgtccctatgacccagctcgcggcttcaccggcctcataatcgatggcggactctataccgccacccgatatgagtttcggagcatccctgatattaggaggagccgacatccgcattcgcttaggacagaggaaactcccatgcactggctcaatgacgcagagtttgttttctcagtgctggtgcgcgagtctaaggcatctgccgttggcgatgacgacaaggtgtattactttttcactgagcgcgcaaccgaggaaggctcaggaagcttcacgcagagtagaagttctcatcgagtcgccagagtggcacgcgtctgcaaaggagatctcggcggtaaaaagatccttcaaaagaaatggaccagttttttgaaggctagactgatctgtcacatcccactctacgagactctgcgcggagtttgttccctcgacgccgagacatcttcccggactcacttttacgcggcgttcaccttaagcactcaatggaaaaccctcgaggcttccgccatctgtcgttacgatcttgccgagatccaagccgtcttcgccggcccatacatggagtaccaggatggtagccgacgttggggtcgatatgaaggtggggtccccgagccacgcccaggaagttgcattactgattcactgcgttcacagggctataacagctctcaggacctgccctcactggttctggattttgtgaagctccacccgttgatggctagaccggttgttcctactcgtggccgtccactgctgctgaagaggaatataaggtacactcaccttacagggactcctgtaacaacccctgctgggccaacctatgacctgttgtttctgggtactgccgacgggtggatacataaagccgttgtgttggggagtggtatgcacataattgaagagactcaagttttcagggagtcccaatctgtcgaaaacctagtcatttcactactgcaacattctctttatgtcggtgcacccagcggggtcatacagctgcccctaagttcctgttccagataccgatcctgctacgattgtattcttgcccgggatccttactgcgggtgggacccgggtacccacgcatgtgctgcagcaactaccattgcaaacagaagccagggctcaaggacagccctaatccaggacatcgagagggggaatcgggggtgtgagtcttcacgagacaccggccgcgccttgcaggtccacatgggttccatgagtccacccagcgcgtggccctgtgtgttggacggccccgagactcggcaggacctgtgtcaacctcctaagccatgcgtccatagtcatgctcatatggaggagtgtttgagtgccggcctgcaatgtcctcacccccaccttctgctggtgcattcatgctttataccagcatctggcctaggggtccccagccagctgccccaccccatctggtcctcttcacctgcaccatgcggtgacctgttcgtaaaatctcttggaacagggcaaccaggtgaagtgcgcttacaccactctccgccattaccctcttgtgtagctctggtgaaccagcctcctcatagcccttggagcttttccagggtctag

SEQ ID NO: 80307 - DNA, 513 bp, Artificial Sequence
  derived and/or modified sequence
atgtggggccggctgtggcccctgctgctgagcatcctgaccgccaccgctgtaccgggaccctctctgaggagaccttcacgagagctggacgctaccccaaggatgacaattccatatgaggagctgtccggaaccaggcattttaaggggcaggcccagaattactctacattgctgctcgaggaggcctcagcccggctcctcgtgggtgcccggggggccctattctctctctccgccaacgacattggcgatggggctcataaggagatccactgggaggcctccccggaaatgcaatcgaagtgtcaccagaaagggaaaaataatcagacggagtgttttaaccatgtccgatttctccagcgtctgaactcaacccacctgtacgcttgtggaacgcacgcattccagccgctgtgcgccgccatagatgcggaggcatttactctgcctacttcctttgaagaaggaaaggagaagtgtccttatgatcctgcccgcggatag

SEQ ID NO: 80308 - DNA, 2109 bp, Artificial Sequence
  derived and/or modified sequence
atgtggggcaggctctggccactgctcctgtctatcctaaccgcgaccgctgtaccaggaccctcactacggaggcccagtagagaattagatgccacaccgaggatgaccattccatatgaggaattgtcaggtactaggcatttcaagggccaggcccaaaattactccacgctactgcttgaggaagcatccgcacgccttctcgtgggggcaagaggtgcactcttctcgctctctgccaacgatatcggagacggagctcacaaggagattcattgggaagcttccccggaaatgcagagcaaatgccatcagaaagggaagaacaaccagaccgagtgctttaaccacgtgcgtttccttcagcggctgaattcaacccatttgtatgcctgcggcacacacgcgttccagcctttgtgtgccgctatcgatgctgaggcctttacactaccaaccagcttcgaggagggtaaggagaagtgcccatacgacccagctaggggatttacaggacttatcatcgacggaggtctatacacagccactaggtatgagtttcgttctatacccgatatcagacgatccaggcatccacactcactgcggacagaggaaacccccatgcattggctaaatgatgctgagtttgtgtttagcgtgctggtcagagagtctaaagccagcgcggtaggcgatgacgataaggtgtattacttttttaccgaacgagccaccgaggagggcagtgggtcattcacccagtctagatcatcccacagagttgctcgcgtggccagggtgtgcaaaggtgacctcggaggcaagaaaatactccaaaagaagtggacctcttttctgaaggctaggctaatttgtcatattccgctgtatgaaactctgcgaggcgtatgttctctggacgcagaaacaagcagtcggacccatttttacgccgcatttacattgtctacccagtggaagacgcttgaagcttccgcaatctgtagatacgacctcgccgaaatccaagctgtttttgctggtccctatatggagtatcaggatggcagccggcgttggggtaggtacgaggggggagtccccgaacccagaccaggcagttgtatcactgactcattaagatctcaggggtataattccagccaagatttaccaagtctagtcctcgactttgttaagctacatccattgatggccaggcctgtggtacctactcgtggtcgtcctttattgctgaaacgcaacattcggtacacacacctgactgggacgccagtgaccactcctgcagggcctacctacgacctcctgtttctgggaaccgcagatggctggatccacaaggccgtggtattaggcagcgggatgcacattatagaagagacccaagttttcagagaatcccagagcgtggagaacctcgtgattagtctgcttcagcattcgctctatgtgggggctccttctggcgtgatacaattaccacttagttcttgtagcaggtacagaagctgctacgactgcatcctggctcgagacccatactgtggatgggatcctggcacacacgcttgtgctgctgcaactaccatcgctaatcggtcccagggctccaggactgcattaatccaagatattgagagagggaacaggggttgcgagtctagccgggacacaggtcgcgcactgcaagtacatatgggatccatgagtcctccatcggcatggccctgcgtgctcgacggccctgagactcggcaggacttgtgccagcctccaaagccttgtgtgcatagccatgcgcacatggaagaatgcttaagtgcagggttacaatgcccgcaccctcatcttctgttggtgcattcctgcttcattccggcatccggcctcggagtgccctcacaacttccacacccaatctggtcttccagtcccgctccttgcggagacttgtttgtcaaaagtctgggcaccgggcaacccggagaggtgcgtttgcaccatagtcccccacttccgtcttgcgtcgctttagtgaatcaaccaccgcatagcccgtggagcttttccagggtctag

SEQ ID NO: 80309 - DNA, 513 bp, Artificial Sequence
  derived and/or modified sequence
atgtgggggagactctggccactgctgctttctattctgacggctactgccgtgcccggtccatcccttcggaggccaagccgcgagctggacgcgacgcccaggatgactattccctacgaggaattatctggcaccagacattttaaaggccaggctcaaaattattccactctgctgctcgaggaggcctctgcacgtcttctggtgggagctcggggtgccctgtttagtctgtcagctaacgacataggggacggtgcccataaggagattcattgggaggcatccccagaaatgcagtccaaatgtcatcagaaaggaaaaaacaaccagacggagtgctttaatcatgtgaggttcttgcaacggttgaactctacccatctgtacgcttgtgggacccacgcatttcagccactttgtgccgcaattgatgccgaggcttttacgttacccactagcttcgaggagggcaaggaaaaatgtccttatgatcccgctcgcggttag

SEQ ID NO: 80310 - DNA, 2675 bp, Artificial Sequence
  derived and/or modified sequence
ccctgtgactccatgtccccccgattccaggaccccccatggccccatgattccttgactcctatgaccttatgacccctgaccttccaagtgacttccttggactttgacccctgtgactgtgcttcccattccccgcccccacaacctgtgactctggctccctttgggggtcttgttagtctgggcctccccaggaagatgtgggggaggctctggcccctcctcctcagcatcctcacagcaactgcagtcccaggaccctcactgcggagaccgtctagagaactagatgccacccctcggatgaccataccctatgaagagctctctgggacccggcacttcaagggccaagcccagaactactcaacactgctgctggaggaggcctcagcaaggctgctggtgggagcccgaggtgccctgttctctctcagtgccaacgacataggagatggggctcacaaagagatccactgggaagcctccccagagatgcaaagcaaatgtcatcaaaaagggaaaaacaaccagacggagtgctttaaccatgtgcggttcctgcagcggctcaattctacccacctctatgcatgtgggactcacgccttccagcccctctgtgcagccattgatgctgaggccttcaccttgccaaccagcttcgaggaggggaaggagaagtgtccttatgacccagcccgtggcttcacaggcctcatcattgatggaggcctctacacagccactaggtatgaattccggagcattcctgacatccgccggagccgccacccacactccctgagaactgaggagacaccaatgcattggctcaatgatgcggagtttgtgttctccgtcctcgtgcgggagagcaaggccagtgcagtgggtgatgatgacaaggtgtactacttcttcacggagcgtgccactgaggagggctctggcagcttcactcagagccgcagcagtcaccgtgtggcccgtgtggctcgtgtctgcaagggagacctgggagggaagaagatcctgcagaagaagtggacttccttcctgaaagcccgtctcatctgccacattccactgtatgagacactgcgtggggtctgcagcctggatgctgaaacctcaagccgtacacacttctatgcagccttcacgctgagcacacagtggaagaccctggaggcctcagccatctgccgctatgacctggcagagatccaggctgtctttgcaggaccctatatggaataccaggatggttcccggcgctggggtcgctatgagggtggggtgcctgagccccggcctggctcgtgtatcacagattcattgcgcagccaaggctacaattcatcccaagacttgccatccctggtcctggactttgtaaagttgcacccactgatggctcggcccgttgtgcccacacgtggacggcccctgctgctcaagcgcaacatacgctacacacaccttacagggacacctgtcaccacgcctgctggacctacctatgacctgctctttctgggcacagctgatggctggatccacaaggccgtagtcctgggctctgggatgcacattattgaagagacacaagtgttcagggagtcccagtctgtggaaaatctagtcatctctctattgcagcacagcctctatgtgggggctcctagcggagtcatccagctaccactctccagctgctcccgctaccgatcctgctatgactgcatcttggcccgagacccctactgtggctgggaccctggcacccatgcctgcgcagcagccaccaccatagccaacaggtcccagggaagcaggacagcactgatacaggacatagagagaggaaatcgaggctgtgagagcagcagggatacaggcagggctctgcaggtccatatgggctcaatgtcaccaccctctgcatggccctgtgtgctggatggtcctgaaaccagacaagacctctgccagccacctaagccctgcgtacattcacatgcacacatggaagaatgtttatcggctgggctgcagtgcccccaccctcaccttctcctggtgcattcttgtttcatccctgcttctggacttggggtaccctcccaattgccacatcctatctggtcctcttccccagccccatgtggtgacctctttgtcaagagcttgggaacgggccagcctggggaggtaagactgcatcactcccctcctctcccttcctgtgtggcccttgtgaatcagcctccccactctccttggtcattctcaagagtatgagagacagagctccaggcatgtcccatccccatgcacatgtggtaacacacacctgtatcacacatgtgcttacatttccactcacatgcacctctgagcctcccttgctgtcttggacctgtctgttgggtttagtccgtggacatttcagagggagatccccctcccatttaactgtcctcacaggcccttgcctaggatggatgaccaacactgcactcaatgagccagcctctcttttgggggaatcaagcatttgcttcctctagactacagcagggaaagggaggagaaatctgatgtctcaactggcacatgaagcccattcttggaactatgcaaagggcagaggctgggagtttgga

SEQ ID NO: 80311 - DNA, 596 bp, Artificial Sequence
  derived and/or modified sequence
gctggtgctgtggggccgcggagccgcgcgtcgctgtctctatggccccggatccgagcgcaaagtctgggcctccccaggaagatgtgggggaggctctggcccctcctcctcagcatcctcacagcaactgcagtcccaggaccctcactgcggagaccgtctagagaactagatgccacccctcggatgaccataccctatgaagagctctctgggacccggcacttcaagggccaagcccagaactactcaacactgctgctggaggaggcctcagcaaggctgctggtgggagcccgaggtgccctgttctctctcagtgccaacgacataggagatggggctcacaaagagatccactgggaagcctccccagagatgcaaagcaaatgtcatcaaaaagggaaaaacaaccagacggagtgctttaaccatgtgcggttcctgcagcggctcaattctacccacctctatgcatgtgggactcacgccttccagcccctctgtgcagccattgatgctgaggccttcaccttgccaaccagcttcgaggaggggaaggagaagtgtccttatgacccagcccgtggctt

SEQ ID NO: 80312 - protein, 316 aa, Artificial Sequence
  derived and/or modified sequence
MLRALQQRKREAGIGDTPSLEDEAAGHVTQARMVSKSKDGTGSDDKKAKGADGKTKIATPRGAAPPGQKGQANATRIPAKTPPAPKTPPSSGEPPKSGDRSGYSSPGSPGTPGSRSRTPSLPTPPTREPKKVAVVRTPPKSPSSAKSRLQTAPVPMPDLKNVKSKIGSTENLKHQPGGGKVQIVYKPVDLSKVTSKCGSLGNIHHKPGGGQVEVKSEKLDFKDRVQSKIGSLDNITHVPGGGNKKIETHKLTFRENAKAKTDHGAEIVYKSPVVSGDTSPRHLSNVSSTGSIDMVDSPQLATLADEVSASLAKQGL

SEQ ID NO: 80313 - protein, 359 aa, Artificial Sequence
  derived and/or modified sequence
MAEPRQEFEVMEDHAGTYGLGDRKDQGGYTMHQDQEGDTDAGLKESPLQTPTEDGSEEPGSETSDAKSTPTAEARMVSKSKDGTGSDDKKAKGADGKTKIATPRGAAPPGQKGQANATRIPAKTPPAPKTPPSSGEPPKSGDRSGYSSPGSPGTPGSRSRTPSLPTPPTREPKKVAVVRTPPKSPSSAKSRLQTAPVPMPDLKNVKSKIGSTENLKHQPGGGKVQIVYKPVDLSKVTSKCGSLGNIHHKPGGGQVEVKSEKLDFKDRVQSKIGSLDNITHVPGGGNKKIETHKLTFRENAKAKTDHGAEIVYKSPVVSGDTSPRHLSNVSSTGSIDMVDSPQLATLADEVSASLAKQGL

SEQ ID NO: 80314 - DNA, 1080 bp, Artificial Sequence
  derived and/or modified sequence
atggccgaacccaggcaggaattcgaggtaatggaggaccacgccgggacctatggactcggcgaccggaaggatcagggaggctacactatgcatcaagatcaagaaggtgacaccgatgccggcttgaaggagagccccctacagactcccactgaggatggctccgaggagcctggctcggaaacgtctgacgcaaagtccacacccaccgcagaagcccgtatggtctcaaaatctaaagatggcacaggcagcgatgacaaaaaggccaagggtgctgatggcaaaactaaaatcgccactcctcgaggcgctgctccgccagggcaaaaggggcaagctaatgctactaggattcctgccaaaacaccacccgcccctaagaccccaccaagctcaggggagcccccaaagagcggagatcgctctggttactcctcccccgggagtcctggtacacctggcagtcggtctcgcaccccaagtttacccaccccccctacacgggaaccaaaaaaggttgcagtggtacggaccccccccaagtctccttcatcagcaaaatcaagactgcagaccgctccggtgcccatgcctgatctgaagaacgtgaaaagtaagatcggaagcacagaaaaccttaagcatcaaccaggcgggggcaaggtgcagattgtctataaacctgtagacttgtctaaggtcaccagcaaatgcggcagtctgggcaatatccatcacaagcccggaggtgggcaagtggaggttaaatcggaaaaactggatttcaaagaccgggtacaaagcaaaataggctcactggataacatcacccatgtcccagggggcgggaataagaaaatcgagacccacaaactgactttccgtgagaacgctaaagccaaaaccgaccatggagccgaaattgtgtataagtctcctgtcgtctccggcgatacctcccccagacacctgtccaacgtgagctcaacgggcagtatcgacatggtcgatagcccccagctggcaaccttggcagacgaggtgtccgccagcctcgctaagcaggggctttag

SEQ ID NO: 80315 - DNA, 1080 bp, Artificial Sequence
  derived and/or modified sequence
atggccgagccccggcaggagtttgaggtgatggaggaccatgctggcacctacggcctgggggacaggaaggaccagggcggctacaccatgcaccaggaccaggagggggacacagatgctggcctgaaggagagccccctgcagacccccacagaagatggcagcgaggagcccggcagcgagaccagtgatgccaagagcacccccacagctgaggccaggatggtgtccaagagcaaggatggcaccggcagtgatgacaagaaggccaagggagcagatggcaagaccaagatcgccacccccaggggggccgcccctcctggccagaagggccaggccaatgccacccgcatcccagccaagaccccaccagcccccaagaccccacccagcagcggggagccccccaagagcggggacaggagcggctacagcagccctggcagccctggcaccccaggcagccgcagcaggacccccagcctgcccaccccacccacccgggagcccaagaaggtggccgtggtgaggaccccacccaagagccccagcagcgccaagagccggctgcagacagcccctgtgcccatgccagacctgaagaatgtgaagagcaagattggcagcacagagaacctgaagcaccagcccggcggcggcaaggtgcagatcgtgtacaagcctgtggacctgagcaaggtgaccagcaaatgtggcagcctgggcaacatccaccacaagccaggcggcggccaggtggaggtgaagtctgagaagctggacttcaaggacagagtgcagagcaagattggcagcctggacaacatcacccacgtgcctgggggcggcaacaagaagattgagacccacaagctgaccttccgggagaatgccaaggccaagacagaccacggggctgagatcgtgtacaagagccctgtggtgtctggggacaccagccccaggcacctgagcaatgtgagcagcacaggcagcattgacatggtggacagcccccagctggccaccctggctgatgaggtgtctgccagcctggccaagcagggcctgtag

SEQ ID NO: 80316 - DNA, 5629 bp, Artificial Sequence
  derived and/or modified sequence
ggacggccgagcggcagggcgctcgcgcgcgcccactagtggccggaggagaaggctcccgcggaggccgcgctgcccgccccctcccctggggaggctcgcgttcccgctgctcgcgcctgcgccgcccgccggcctcaggaacgcgccctcttcgccggcgcgcgccctcgcagtcaccgccacccaccagctccggcaccaacagcagcgccgctgccaccgcccaccttctgccgccgccaccacagccaccttctcctcctccgctgtcctctcccgtcctcgcctctgtcgactatcaggtgaactttgaaccaggatggctgagccccgccaggagttcgaagtgatggaagatcacgctgggacgtacgggttgggggacaggaaagatcaggggggctacaccatgcaccaagaccaagagggtgacacggacgctggcctgaaagaatctcccctgcagacccccactgaggacggatctgaggaaccgggctctgaaacctctgatgctaagagcactccaacagcggaagcgtgaagcaggcattggagacacccccagcctggaagacgaagctgctggtcacgtgacccaagctcgcatggtcagtaaaagcaaagacgggactggaagcgatgacaaaaaagccaagggggctgatggtaaaacgaagatcgccacaccgcggggagcagcccctccaggccagaagggccaggccaacgccaccaggattccagcaaaaaccccgcccgctccaaagacaccacccagctctggtgaacctccaaaatcaggggatcgcagcggctacagcagccccggctccccaggcactcccggcagccgctcccgcaccccgtcccttccaaccccacccacccgggagcccaagaaggtggcagtggtccgtactccacccaagtcgccgtcttccgccaagagccgcctgcagacagcccccgtgcccatgccagacctgaagaatgtcaagtccaagatcggctccactgagaacctgaagcaccagccgggaggcgggaaggtgcaaatagtctacaaaccagttgacctgagcaaggtgacctccaagtgtggctcattaggcaacatccatcataaaccaggaggtggccaggtggaagtaaaatctgagaagcttgacttcaaggacagagtccagtcgaagattgggtccctggacaatatcacccacgtccctggcggaggaaataaaaagattgaaacccacaagctgaccttccgcgagaacgccaaagccaagacagaccacggggcggagatcgtgtacaagtcgccagtggtgtctggggacacgtctccacggcatctcagcaatgtctcctccaccggcagcatcgacatggtagactcgccccagctcgccacgctagctgacgaggtgtctgcctccctggccaagcagggtttgtgatcaggcccctggggcggtcaataattgtggagaggagagaatgagagagtgtggaaaaaaaaagaataatgacccggcccccgccctctgcccccagctgctcctcgcagttcggttaattggttaatcacttaacctgcttttgtcactcggctttggctcgggacttcaaaatcagtgatgggagtaagagcaaatttcatctttccaaattgatgggtgggctagtaataaaatatttaaaaaaaaacattcaaaaacatggccacatccaacatttcctcaggcaattccttttgattcttttttcttccccctccatgtagaagagggagaaggagaggctctgaaagctgcttctgggggatttcaagggactgggggtgccaaccacctctggccctgttgtgggggtgtcacagaggcagtggcagcaacaaaggatttgaaacttggtgtgttcgtggagccacaggcagacgatgtcaaccttgtgtgagtgtgacgggggttggggtggggcgggaggccacgggggaggccgaggcaggggctgggcagaggggagaggaagcacaagaagtgggagtgggagaggaagccacgtgctggagagtagacatccccctccttgccgctgggagagccaaggcctatgccacctgcagcgtctgagcggccgcctgtccttggtggccgggggtgggggcctgctgtgggtcagtgtgccaccctctgcagggcagcctgtgggagaagggacagcgggtaaaaagagaaggcaagctggcaggagggtggcacttcgtggatgacctccttagaaaagactgaccttgatgtcttgagagcgctggcctcttcctccctccctgcagggtagggggcctgagttgaggggcttccctctgctccacagaaaccctgttttattgagttctgaaggttggaactgctgccatgattttggccactttgcagacctgggactttagggctaaccagttctctttgtaaggacttgtgcctcttgggagacgtccacccgtttccaagcctgggccactggcatctctggagtgtgtgggggtctgggaggcaggtcccgagccccctgtccttcccacggccactgcagtcaccccgtctgcgccgctgtgctgttgtctgccgtgagagcccaatcactgcctatacccctcatcacacgtcacaatgtcccgaattcccagcctcaccaccccttctcagtaatgaccctggttggttgcaggaggtacctactccatactgagggtgaaattaagggaaggcaaagtccaggcacaagagtgggaccccagcctctcactctcagttccactcatccaactgggaccctcaccacgaatctcatgatctgattcggttccctgtctcctcctcccgtcacagatgtgagccagggcactgctcagctgtgaccctaggtgtttctgccttgttgacatggagagagccctttcccctgagaaggcctggccccttcctgtgctgagcccacagcagcaggctgggtgtcttggttgtcagtggtggcaccaggatggaagggcaaggcacccagggcaggcccacagtcccgctgtcccccacttgcaccctagcttgtagctgccaacctcccagacagcccagcccgctgctcagctccacatgcatagtatcagccctccacacccgacaaaggggaacacacccccttggaaatggttcttttcccccagtcccagctggaagccatgctgtctgttctgctggagcagctgaacatatacatagatgttgccctgccctccccatctgcaccctgttgagttgtagttggatttgtctgtttatgcttggattcaccagagtgactatgatagtgaaaagaaaaaaaaaaaaaaaaaaggacgcatgtatcttgaaatgcttgtaaagaggtttctaacccaccctcacgaggtgtctctcacccccacactgggactcgtgtggcctgtgtggtgccaccctgctggggcctcccaagttttgaaaggctttcctcagcacctgggacccaacagagaccagcttctagcagctaaggaggccgttcagctgtgacgaaggcctgaagcacaggattaggactgaagcgatgatgtccccttccctacttccccttggggctccctgtgtcagggcacagactaggtcttgtggctggtctggcttgcggcgcgaggatggttctctctggtcatagcccgaagtctcatggcagtcccaaaggaggcttacaactcctgcatcacaagaaaaaggaagccactgccagctggggggatctgcagctcccagaagctccgtgagcctcagccacccctcagactgggttcctctccaagctcgccctctggaggggcagcgcagcctcccaccaagggccctgcgaccacagcagggattgggatgaattgcctgtcctggatctgctctagaggcccaagctgcctgcctgaggaaggatgacttgacaagtcaggagacactgttcccaaagccttgaccagagcacctcagcccgctgaccttgcacaaactccatctgctgccatgagaaaagggaagccgcctttgcaaaacattgctgcctaaagaaactcagcagcctcaggcccaattctgccacttctggtttgggtacagttaaaggcaaccctgagggacttggcagtagaaatccagggcctcccctggggctggcagcttcgtgtgcagctagagctttacctgaaaggaagtctctgggcccagaactctccaccaagagcctccctgccgttcgctgagtcccagcaattctcctaagttgaagggatctgagaaggagaaggaaatgtggggtagatttggtggtggttagagatatgcccccctcattactgccaacagtttcggctgcatttcttcacgcacctcggttcctcttcctgaagttcttgtgccctgctcttcagcaccatgggccttcttatacggaaggctctgggatctcccccttgtggggcaggctcttggggccagcctaagatcatggtttagggtgatcagtgctggcagataaattgaaaaggcacgctggcttgtgatcttaaatgaggacaatccccccagggctgggcactcctcccctcccctcacttctcccacctgcagagccagtgtccttgggtgggctagataggatatactgtatgccggctccttcaagctgctgactcactttatcaatagttccatttaaattgacttcagtggtgagactgtatcctgtttgctattgcttgttgtgctatggggggaggggggaggaatgtgtaagatagttaacatgggcaaagggagatcttggggtgcagcacttaaactgcctcgtaacccttttcatgatttcaaccacatttgctagagggagggagcagccacggagttagaggcccttggggtttctcttttccactgacaggctttcccaggcagctggctagttcattccctccccagccaggtgcaggcgtaggaatatggacatctggttgctttggcctgctgccctctttcaggggtcctaagcccacaatcatgcctccctaagaccttggcatccttccctctaagccgttggcacctctgtgccacctctcacactggctccagacacacagcctgtgcttttggagctgagatcactcgcttcaccctcctcatctttgttctccaagtaaagccacgaggtcggggcgagggcagaggtgatcacctgcgtgtcccatctacagacctgcagcttcataaaacttctgatttctcttcagctttgaaaagggttaccctgggcactggcctagagcctcacctcctaatagacttagccccatgagtttgccatgttgagcaggactatttctggcacttgcaagtcccatgatttcttcggtaattctgagggtggggggagggacatgaaatcatcttagcttagctttctgtctgtgaatgtctatatagtgtattgtgtgttttaacaaatgatttacactgactgttgctgtaaaagtgaatttggaaataaagttattactctgattaaa

SEQ ID NO: 80317 - DNA, 1499 bp, Artificial Sequence
  derived and/or modified sequence
ttcgccggcgcgcgccctcgcagtcaccgccacccaccagctccggcaccaacagcagcgccgctgccaccgcccaccttctgccgccgccaccacagccaccttctcctcctccgctgtcctctcccgtcctcgcctctgtcgactatcaggtgaactttgaaccaggatggctgagccccgccaggagttcgaagtgatggaagatcacgctgggacgtacgggttgggggacaggaaagatcaggggggctacaccatgcaccaagaccaagagggtgacacggacgctggcctgaaagaatctcccctgcagacccccactgaggacggatctgaggaaccgggctctgaaacctctgatgctaagagcactccaacagcggaagctcgcatggtcagtaaaagcaaagacgggactggaagcgatgacaaaaaagccaagggggctgatggtaaaacgaagatcgccacaccgcggggagcagcccctccaggccagaagggccaggccaacgccaccaggattccagcaaaaaccccgcccgctccaaagacaccacccagctctggtgaacctccaaaatcaggggatcgcagcggctacagcagccccggctccccaggcactcccggcagccgctcccgcaccccgtcccttccaaccccacccacccgggagcccaagaaggtggcagtggtccgtactccacccaagtcgccgtcttccgccaagagccgcctgcagacagcccccgtgcccatgccagacctgaagaatgtcaagtccaagatcggctccactgagaacctgaagcaccagccgggaggcgggaaggtgcaaatagtctacaaaccagttgacctgagcaaggtgacctccaagtgtggctcattaggcaacatccatcataaaccaggaggtggccaggtggaagtaaaatctgagaagcttgacttcaaggacagagtccagtcgaagattgggtccctggacaatatcacccacgtccctggcggaggaaataaaaagattgaaacccacaagctgaccttccgcgagaacgccaaagccaagacagaccacggggcggagatcgtgtacaagtcgccagtggtgtctggggacacgtctccacggcatctcagcaatgtctcctccaccggcagcatcgacatggtagactcgccccagctcgccacgctagctgacgaggtgtctgcctccctggccaagcagggtttgtgatcaggcccctggggcggtcaataattgtggagaggagagaatgagagagtgtggaaaaaaaaagaataatgacccggcccccgccctctgcccccagctgctcctcgcagttcggttaattggttaatcacttaacctgcttttgtcactcggctttggctcgggacttcaaaatcagtgatgggagtaagagcaaatttcatctttccaaattgatgggtgggctagtaataaaatatttaaaaaaaaa

SEQ ID NO: 80318 - DNA, 1080 bp, Artificial Sequence
  derived and/or modified sequence
atggccgagccccggcaggagttcgaggtgatggaggaccacgccggaacctacggcctgggggatcgtaaagaccaaggaggatacaccatgcaccaagatcaggaaggtgacacagacgccggattgaaagaatcaccactccaaacgccaacagaagacggttccgaagaaccgggatctgaaacctccgacgccaagagtacaccaacggcggaagctcggatggtgtcaaagtcgaaagatgggactggatcagatgacaagaaggcaaaaggtgccgacggtaaaacaaagatcgcgacccctcgcggcgcggccccccccggtcaaaaggggcaggcgaatgctacacggattcccgccaagacaccgcctgcacctaagaccccaccatcctctggggaacccccaaagagtggcgatcgttctggatacagctcccccggtagcccaggaacccccggaagtcggagtcgaacgccctccctccccaccccccctacccgcgagcctaaaaaagtggccgtcgtgagaacgccacccaagagcccttctagtgccaagtcaaggctgcagactgcgcccgtccccatgccagatttaaaaaatgtaaaatctaagatcggctcaacagagaatctcaagcaccagccaggcggcggaaaggtgcagatcgtctacaagccagtcgatctgtccaaagtgacgtcaaagtgcggatccttgggtaacattcaccataagcctggcgggggacaggtggaggtgaagtccgaaaagttggacttcaaagacagagtgcagagtaagattggaagcctggacaatatcactcacgtcccaggggggggcaataaaaaaatagaaacccacaagctcacgttccgcgaaaatgccaaagctaaaaccgaccacggcgctgagattgtttacaagagtccagttgttagtggtgacacgtctccccgccacctgtccaacgtgtcctcgaccgggtctatcgacatggtcgactccccacagttggccacactggcagatgaggtgtcggcttcattagcaaagcagggcttatag

SEQ ID NO: 80319 - DNA, 1080 bp, Artificial Sequence
  derived and/or modified sequence
atggcggagcctagacaggagtttgaagtgatggaagaccacgccggaacctacgggctaggtgaccgaaaagaccagggtgggtataccatgcaccaagatcaggagggtgatactgacgccggtctcaaggagtcacctctccagacccctaccgaggatggcagcgaggagcctggcagcgagacatccgatgctaagtcaactcctaccgctgaagctcggatggtgtcaaagtccaaggatgggaccggctcagacgataagaaagcaaaaggagcagatggtaagaccaagatagccacacccaggggggcagccccacccggacagaaaggccaggcaaatgctacacgtattcccgcaaaaactccccctgctccaaagacaccaccatccagcggtgagccacccaaatcgggtgacaggtcaggatattcctccccagggtccccaggcactcctggctctagaagtaggacccctagtctgccaacgccccctactcgcgaacccaagaaggtagccgtggtgagaaccccccctaaatccccatccagcgcaaaatcccggctccagaccgcacccgtacctatgcccgacctgaagaacgtgaaatccaagattggatctaccgaaaacctgaagcaccagccaggtgggggtaaggtccagatcgtgtacaagcctgtagatttgtccaaagtcacctcgaaatgcggtagcttgggcaacattcaccacaaacccggaggcggacaagtggaggtcaagagcgaaaaactcgacttcaaggaccgggtgcagagcaaaattgggtccctggataatatcactcacgttccaggcggtggcaataagaaaattgagactcacaagttgacatttcgtgaaaacgccaaggccaagacagatcacggcgctgagatcgtgtacaaatccccagtcgtgagcggggacaccagtccacgacatctgtcaaatgtgtcatcaacagggagcattgacatggtggattcgccacagctcgccaccctggccgacgaagtctcagcatcactcgctaaacaggggctctag

SEQ ID NO: 80320 - DNA, 1080 bp, Artificial Sequence
  derived and/or modified sequence
atggccgagcccagacaggagttcgaggtgatggaggaccacgccggcacctacggcctgggcgacagaaaggaccagggcggctacaccatgcaccaggaccaggagggcgacaccgacgccggcctgaaggagagccccctgcagacccccaccgaggacggcagcgaggagcccggcagcgagaccagcgacgccaagagcacccccaccgccgaggccagaatggtgagcaagagcaaggacggcaccggcagcgacgacaagaaggccaagggcgccgacggcaagaccaagatcgccacccccagaggcgccgccccccccggccagaagggccaggccaacgccaccagaatccccgccaagaccccccccgcccccaagaccccccccagcagcggcgagccccccaagagcggcgacagaagcggctacagcagccccggcagccccggcacccccggcagcagaagcagaacccccagcctgcccaccccccccaccagagagcccaagaaggtggccgtggtgagaaccccccccaagagccccagcagcgccaagagcagactgcagaccgcccccgtgcccatgcccgacctgaagaacgtgaagagcaagatcggcagcaccgagaacctgaagcaccagcccggcggcggcaaggtgcagatcgtgtacaagcccgtggacctgagcaaggtgaccagcaagtgcggcagcctgggcaacatccaccacaagcccggcggcggccaggtggaggtgaagagcgagaagctggacttcaaggacagagtgcagagcaagatcggcagcctggacaacatcacccacgtgcccggcggcggcaacaagaagatcgagacccacaagctgaccttcagagagaacgccaaggccaagaccgaccacggcgccgagatcgtgtacaagagccccgtggtgagcggcgacaccagccccagacacctgagcaacgtgagcagcaccggcagcatcgacatggtggacagcccccagctggccaccctggccgacgaggtgagcgccagcctggccaagcagggcctgtag

SEQ ID NO: 80321 - protein, 264 aa, Artificial Sequence
  derived and/or modified sequence
TREAEGADGKTKIATPKGQANATRIPAKTPPAPKTPPSSGEPPKSGDRSGYSSPGSPGTPGSRSRTPSLPTPPTREPKKVAVVRTPPKSPSSAKSRLQTAPVPMPDLKNVKSKIGSTENLKHQPGGGKVQIVYKPVDLSKVTSKCGSLGNIHHKPGGGQVEVKSEKLDFKDRVQSKIGSLDNITHVPGGGNKKIETHKLTFRENAKAKTDHGAEIVYKSPVVSGDTSPRHLSNVSSTGSIDMVDSPQLATLADEVSASLAKQGL

SEQ ID NO: 80322 - protein, 410 aa, Artificial Sequence
  derived and/or modified sequence
MAEPRQEFEVMEDHAGTYGLGDRKDQGGYTMHQDQEGDTDAGLKESPLQTPTEDGSEEPGSETSDAKSTPTAEDVTAPLVDEGAPGKQAAAQPHTEIPEGTTAEEAGIGDTPSLEDEAAGHVTQARMVSKSKDGTGSDDKKAKGADGKTKIATPRGAAPPGQKGQANATRIPAKTPPAPKTPPSSGEPPKSGDRSGYSSPGSPGTPGSRSRTPSLPTPPTREPKKVAVVRTPPKSPSSAKSRLQTAPVPMPDLKNVKSKIGSTENLKHQPGGGKVQIVYKPVDLSKVTSKCGSLGNIHHKPGGGQVEVKSEKLDFKDRVQSKIGSLDNITHVPGGGNKKIETHKLTFRENAKAKTDHGAEIVYKSPVVSGDTSPRHLSNVSSTGSIDMVDSPQLATLADEVSASLAKQGL

SEQ ID NO: 80323 - DNA, 1233 bp, Artificial Sequence
  derived and/or modified sequence
atggccgagcccagacaggagttcgaggtgatggaggaccacgccggcacctacggcctgggcgacagaaaggaccagggcggctacaccatgcaccaggaccaggagggcgacaccgacgccggcctgaaggagagccccctgcagacccccaccgaggacggcagcgaggagcccggcagcgagaccagcgacgccaagagcacccccaccgccgaggacgtgaccgcccccctggtggacgagggcgcccccggcaagcaggccgccgcccagccccacaccgagatccccgagggcaccaccgccgaggaggccggcatcggcgacacccccagcctggaggacgaggccgccggccacgtgacccaggccagaatggtgagcaagagcaaggacggcaccggcagcgacgacaagaaggccaagggcgccgacggcaagaccaagatcgccacccccagaggcgccgccccccccggccagaagggccaggccaacgccaccagaatccccgccaagaccccccccgcccccaagaccccccccagcagcggcgagccccccaagagcggcgacagaagcggctacagcagccccggcagccccggcacccccggcagcagaagcagaacccccagcctgcccaccccccccaccagagagcccaagaaggtggccgtggtgagaaccccccccaagagccccagcagcgccaagagcagactgcagaccgcccccgtgcccatgcccgacctgaagaacgtgaagagcaagatcggcagcaccgagaacctgaagcaccagcccggcggcggcaaggtgcagatcgtgtacaagcccgtggacctgagcaaggtgaccagcaagtgcggcagcctgggcaacatccaccacaagcccggcggcggccaggtggaggtgaagagcgagaagctggacttcaaggacagagtgcagagcaagatcggcagcctggacaacatcacccacgtgcccggcggcggcaacaagaagatcgagacccacaagctgaccttcagagagaacgccaaggccaagaccgaccacggcgccgagatcgtgtacaagagccccgtggtgagcggcgacaccagccccagacacctgagcaacgtgagcagcaccggcagcatcgacatggtggacagcccccagctggccaccctggccgacgaggtgagcgccagcctggccaagcagggcctgtag

SEQ ID NO: 80324 - DNA, 1233 bp, Artificial Sequence
  derived and/or modified sequence
atggctgaaccaaggcaggagttcgaggtgatggaggatcacgcgggaacttatggcctaggcgacaggaaagatcagggtggatatactatgcaccaggatcaggaaggcgacactgacgctgggttaaaagagtccccactgcagacacctacagaggacggatccgaggaacctggttctgaaaccagcgatgccaagagcactcccactgccgaggacgttaccgcacctctcgtggacgaaggtgcccctggcaaacaagctgccgcacagccccatactgaaattcccgaggggaccactgccgaagaagccggcatcggggataccccctcgctcgaggacgaagctgctggacatgttacccaggctcgtatggtgtccaaaagtaaggatggcacaggatcggatgacaaaaaggccaaaggcgcagacgggaagactaagattgccacgccacgcggagccgcaccccctggccagaagggacaggctaacgctacacgaattcccgctaaaactcctcctgcgcccaaaacaccaccgagttcaggcgagccacctaaatccggggacaggagtggatactcctctccaggttcgcccggtacgccaggaagccgatcaaggactccaagcctgccaacacccccaacccgcgaaccaaagaaggtggccgtggtcagaacacccccaaagtctccttcatctgcaaagtcgagattgcagaccgcaccagtgccaatgccggacctgaaaaatgtcaagagtaaaattggcagcacagagaatctgaagcatcaacccggcggtggtaaagtgcaaatcgtgtataaacccgtggatctgagtaaagtgacatctaaatgcggcagcttggggaatattcaccacaagcccgggggaggccaggtggaggttaagtccgagaagttggactttaaagatcgagtccagagcaagattggatccctcgataatattacacacgtgccaggaggcgggaataagaagatagagacacacaaactcacgttcagagagaatgcaaaagctaaaactgaccacggcgctgaaatagtttacaaatctcccgtggtgtccggtgacacctcaccgcggcacctttccaacgtgtcatctaccgggtccattgatatggttgactcgccgcagctggccacactagctgatgaagtctccgccagcctggctaaacaggggttatag

SEQ ID NO: 80325 - DNA, 1233 bp, Artificial Sequence
  derived and/or modified sequence
atggccgagccccggcaggagtttgaggtgatggaggaccatgctggcacctacggcctgggggacaggaaggaccagggcggctacaccatgcaccaggaccaggagggggacacagatgctggcctgaaggagagccccctgcagacccccacagaagatggcagcgaggagcccggcagcgagaccagtgatgccaagagcacccccacagcagaagatgtgacagcccccctggtggatgaaggagcccctgggaagcaggccgccgcccagccccacacagagatccctgagggcaccacagctgaggaggccggcatcggggacacccccagcctggaggatgaggccgccggccacgtgacccaggccaggatggtgtccaagagcaaggatggcactggaagtgatgacaagaaggccaagggagcagatggcaagaccaagatcgccaccccaagaggagctgcccctcctggccagaagggccaggccaatgccacccgcatcccagccaagaccccaccagcccccaagaccccacccagcagtggagagccccccaagagcggggacagaagtggctacagcagccctggcagccctggcaccccaggcagccgcagcaggacccccagcctgcccaccccacccacccgggagcccaagaaggtggccgtggtgaggaccccacccaagagccccagcagcgccaagagccggctgcagacagcccctgtgcccatgccagacctgaagaatgtgaagagcaagattggcagcacagagaacctgaagcaccagcccggcggcggcaaggtgcagatcgtgtacaagcctgtggacctgagcaaggtgaccagcaaatgtggcagcctgggcaacatccaccacaagccaggcggcggccaggtggaggtgaagtctgagaagctggacttcaaggacagagtgcagagcaagattggcagcctggacaacatcacccacgtgcctgggggcggcaacaagaagattgagacccacaagctgaccttcagagaaaatgccaaggccaagacagaccatggagctgagatcgtgtacaagagccctgtggtgtctggggacaccagccccaggcacctgagcaatgtgagcagcacaggcagcattgacatggtggacagcccccagctggccaccctggctgatgaggtgtctgccagcctggccaagcagggcctgtag

SEQ ID NO: 80326 - DNA, 1233 bp, Artificial Sequence
  derived and/or modified sequence
atggccgagccccggcaggagttcgaggtgatggaggaccacgccggaacctacggactgggtgatcgaaaggatcagggtggatacactatgcaccaggatcaggagggagatacggatgctggacttaaagaaagccctctgcaaaccccaactgaggacggtagtgaggaacccggttccgagacgtcggatgcaaagtccaccccaacggctgaggacgtgacagctccactcgtggacgagggggcccccggtaaacaagctgccgcacagccccacacagagatccctgagggaacaacagccgaagaggccggaatcggcgataccccttcactggaagacgaggccgcagggcacgtgactcaggcgcgcatggtttctaaaagcaaagacggcaccggatccgatgataaaaaggctaaaggggccgacgggaaaaccaaaattgcaactccgcgcggcgccgctccacctgggcagaaagggcaagcgaacgctacgaggatacctgcaaaaacacccccagcaccaaagactccaccttcttctggggagcccccaaagagcggcgatcgttccggctatagcagccccgggagccctgggacaccaggttcccgaagtcgcaccccctctttacctacacctcccacaagagaacctaagaaggtggcagtggttaggaccccgcccaaaagcccgagcagcgccaagtcacgactccagaccgcccctgtgccaatgcccgatctgaaaaatgtcaagagtaaaatcgggagtactgaaaatctgaagcatcagccaggaggcgggaaggtacagattgtgtacaagcctgtggatctcagcaaggtaactagcaaatgcggctcacttggtaacatccaccacaagcccggagggggccaggttgaagttaaatcagaaaagttggatttcaaggatcgcgttcaatcgaaaattggctcactcgataatataactcacgtgccagggggtggcaataaaaagatcgaaacccataagctgaccttccgggaaaatgcaaaggctaagaccgaccacggggccgagatcgtctacaaaagtcccgtggtgtcaggcgacacttccccgaggcacctttcaaacgtgagttcaaccggatcaattgacatggtagactctccacagctcgctaccctcgccgacgaggtgtctgcttctctggccaagcaaggactctag

SEQ ID NO: 80327 - DNA, 2432 bp, Artificial Sequence
  derived and/or modified sequence
caggtgagctttgaaccaggatggctgagccccgccaggagttcgaagtgatggaagatcacgctgggacgtacgggttgggggacaggaaagatcaggggggctacaccatgcaccaagaccaagagggtgacacggacgctggcctgaaagaatctcccctgcagacccccactgaggacggatctgaggaaccgggctctgaaacctctgatgctaagagcactccaacagcggaagatgtgacagcacccttagtggatgagggagctcccggcaagcaggctgccgcgcagccccacacggagatcccagaaggaaccacagctgaagaagcaggcattggagacacccccagcctggaagacgaagctgctggtcacgtgacccaagctcgcatggtcagtaaaagcaaagacgggactggaagcgatgacaaaaaagccaagggggctgatggtaaaacgaagatcgccacaccgcggggagcagcccctccaggccagaagggccaggccaacgccaccaggattccagcaaaaaccccacccgctccaaagacaccacccagctctggtgaacctccaaaatcaggggatcgcagcggctacagcagccccggctccccaggcactcccggcagccgctcccgcaccccgtcccttccaaccccacccacccgggagcccaagaaggtggcggtggtccgtactccacccaagtcgccgtcttccgccaagagccgcctgcagacagcccccgtgcccatgccagacctgaagaacgtcaagtccaagatcggctccactgagaacctgaagcaccagccgggaggcgggaaggtgcaaatagtctacaaaccagttgacctgagcaaggtgacctccaagtgtggctcattaggcaacatccatcataaaccaggaggtggccaggtggaagtaaaatctgagaagcttgacttcaaggacagagtccagtcgaagattgggtccctggacaatatcacccacgtccctggcggaggaaataaaaagattgaaacccacaagctgaccttccgcgagaacgccaaagccaagacagaccacggggcggagatcgtgtacaagtcgccagtggtgtctggggacacgtctccacggcatctcagcaatgtctcctccaccggcagcatcgacatggtagactcgccccagctcgccacgctagctgacgaggtgtctgcctccctggccaagcagggtttgtgatcaggcccctggggcggtcaataatcgtggagaggagagaatgagagagtgtggaaaaaaaaagaataatgacccggcccccgccctctgcccccagctgctcctcgcagttcggttaattggttaatcacttaacctgcttttgtcactcggctttggctcgggacttcaaaatcagtgatgggagtaagagcaaatttcatctttccaaattgatgggtgggctagtaataaaatattttaaaaaaaaacattcaaaaacatggccacatccaacatttcctcaggcaattccttttgattcttttttcttcccccctccatgtagaagagggggaaggagaggctctgaaagctgcttctgggggatttcaagggactgggggtgccaaccacctctggccctgttgtgggggtgtcacagaggcagtggcagcaacaaaggatttgaaacttggtgtgttcgtggagccacaggcagacgatgtcaaccttgtgtgagtgtgacgggggttggggtggggcgggaggccacgggggaggccgaggcaggggctgggcagaggggagaggaagcacaagaagtgggagtgggagaggaagccacgtgctggagagtagacatccccctccttgccgctgggagagccaaggcctatgccacctgcagcgtctgagcggccgcctgtccttggtggccgggggtgggggcctgctgtgggtcagtgtgccaccctctgcagggcagcctgtgggagaagggacagcgggtaaaaagagaaggcaagctggcaggagggtggcacttcgtggatgacctccttagaaaagactgaccttgatgtcttgagagcgctggcctcttcctccctccctgcagggtagggggcctgagttgaggggcttccctctctgctccacagaaaccctgttttattgagttctgaaggttggaactgctgccatgattttggccactttgcagacctgggactttagggctaaccagttctctttgtaaggacttgtgcctcttgggagacgtccacccgtttccaagcctgggccaccggcatctctggagtgtgtgggggtctgggaggcgggtcccgagccccctgtccttcccacggccactgcagtcacccctgtctgccccgctgtgctgttgtctgccgt

SEQ ID NO: 80328 - DNA, 1233 bp, Artificial Sequence
  derived and/or modified sequence
atggctgaacctcgccaggaatttgaggttatggaggaccacgctggaacttatgggctcggcgaccgtaaggatcagggaggctacaccatgcatcaagatcaagagggtgacaccgacgctggtctaaaagaaagccctctgcagacccctaccgaagatgggagcgaagagcccggatcagaaaccagtgatgcaaagagtacccccaccgctgaggacgtgaccgcccctcttgttgacgaaggcgctcccggtaaacaggctgctgcccagcctcatactgagattcctgaggggactactgctgaagaagctggcatcggcgacacgccttcgctggaagacgaggccgcaggacacgtgactcaggcgcgaatggtgagcaaatccaaagacgggaccggttcagatgacaagaaggctaaaggcgcagacggcaagacaaaaatcgcaacgccacggggagctgctccccctggccaaaaaggccaggcgaacgccacacggataccagcaaagaccccccctgcaccaaagacccctccttcttcaggggagccacccaaaagcggcgataggtccgggtactcatcccccggttcccctgggacacccggtagcagaagtaggactccaagcctccccaccccccctacgagggaaccgaaaaaggtagcggtggttaggacaccccctaagtccccatctagcgctaagtctcgcctccaaacggcccctgtacccatgcccgatctcaagaatgtcaagtctaaaataggctctacagaaaatctcaagcaccaaccgggaggcggtaaggtgcagatcgtgtataagcccgttgatctcagtaaagtgacttccaagtgcgggagtctagggaatatccaccataaacctggcggaggacaggtggaggtgaaatccgaaaaactggactttaaggaccgtgtgcagtccaagataggctctttggataacataacccacgtccccggaggaggcaacaagaagatagagacacacaaattgacgtttagagaaaatgctaaagcaaaaaccgatcacggggctgagatcgtgtataagtccccggttgtctcaggagacaccagcccgaggcatctgtccaatgttagctccacaggatctatcgacatggtggacagcccacagctggccactttagctgacgaggtgtctgctagcctcgccaagcaggggctgtag

SEQ ID NO: 80329 - DNA, 1233 bp, Artificial Sequence
  derived and/or modified sequence
atggcagaaccaaggcaggaattcgaagttatggaagatcacgctggaacatacggactgggcgaccgcaaagatcagggcggctacacaatgcatcaggatcaggaaggcgatactgatgcagggttgaaagagtctcccctgcagactcccacagaggacggttccgaagaaccaggctcagagaccagcgatgcaaagagtacaccaactgccgaggatgtgacggcaccgctggtggatgaaggtgcaccaggaaaacaagctgccgctcagccccataccgagatccccgaggggactactgccgaggaggcaggcattggcgacacgcctagtctcgaagacgaggccgccgggcatgtgacccaggcaaggatggtgtcaaaatcaaaggatggcaccggctccgacgacaaaaaggctaaaggcgccgatggaaagacgaagattgctacacctcgtggtgccgctcccccaggtcaaaaagggcaagcaaatgcaaccaggatccccgccaagactccgcccgcaccaaagacgcctccctcaagcggagagcctcctaaatctggagacagaagcggttacagcagccctgggtcacctggcacgcctggatcccgttctcggacccctagcctgccgacccctcctactagagagccaaaaaaggtggctgttgtgcgcacaccaccaaagagccccagtagcgcgaagagtcgtctgcagacagctcccgttcccatgcctgacctgaagaacgtcaagtcaaaaattgggagcactgaaaatctgaaacatcagccagggggcgggaaggtgcaaatagtctacaagcccgtggacctgtccaaggtgacatccaaatgcggcagtctgggaaatatccatcataagcctggagggggtcaggtcgaagtgaagtcggaaaaactagacttcaaggatagggtccagtctaagatcggctccttagataatatcacccatgtccctgggggcggcaataaaaagattgagacacacaaattaaccttcagagagaacgccaaagctaaaacagatcacggtgcagaaatagtctataaatcaccagtcgtgagtggggacacgtctcctcgtcacctgtccaatgttagctctaccggaagcattgacatggtcgattctcctcagctcgcgactcttgccgatgaggtgagtgccagcctagccaagcaaggcctgtag

SEQ ID NO: 80330 - DNA, 5718 bp, Artificial Sequence
  derived and/or modified sequence
ggacggccgagcggcagggcgctcgcgcgcgcccactagtggccggaggagaaggctcccgcggaggccgcgctgcccgccccctcccctggggaggctcgcgttcccgctgctcgcgcctgcgccgcccgccggcctcaggaacgcgccctcttcgccggcgcgcgccctcgcagtcaccgccacccaccagctccggcaccaacagcagcgccgctgccaccgcccaccttctgccgccgccaccacagccaccttctcctcctccgctgtcctctcccgtcctcgcctctgtcgactatcaggtgaactttgaaccaggatggctgagccccgccaggagttcgaagtgatggaagatcacgctgggacgtacgggttgggggacaggaaagatcaggggggctacaccatgcaccaagaccaagagggtgacacggacgctggcctgaaagaatctcccctgcagacccccactgaggacggatctgaggaaccgggctctgaaacctctgatgctaagagcactccaacagcggaagatgtgacagcacccttagtggatgagggagctcccggcaagcaggctgccgcgcagccccacacggagatcccagaaggaaccacagctgaagaagcaggcattggagacacccccagcctggaagacgaagctgctggtcacgtgacccaagctcgcatggtcagtaaaagcaaagacgggactggaagcgatgacaaaaaagccaagggggctgatggtaaaacgaagatcgccacaccgcggggagcagcccctccaggccagaagggccaggccaacgccaccaggattccagcaaaaaccccgcccgctccaaagacaccacccagctctggtgaacctccaaaatcaggggatcgcagcggctacagcagccccggctccccaggcactcccggcagccgctcccgcaccccgtcccttccaaccccacccacccgggagcccaagaaggtggcagtggtccgtactccacccaagtcgccgtcttccgccaagagccgcctgcagacagcccccgtgcccatgccagacctgaagaatgtcaagtccaagatcggctccactgagaacctgaagcaccagccgggaggcgggaaggtgcaaatagtctacaaaccagttgacctgagcaaggtgacctccaagtgtggctcattaggcaacatccatcataaaccaggaggtggccaggtggaagtaaaatctgagaagcttgacttcaaggacagagtccagtcgaagattgggtccctggacaatatcacccacgtccctggcggaggaaataaaaagattgaaacccacaagctgaccttccgcgagaacgccaaagccaagacagaccacggggcggagatcgtgtacaagtcgccagtggtgtctggggacacgtctccacggcatctcagcaatgtctcctccaccggcagcatcgacatggtagactcgccccagctcgccacgctagctgacgaggtgtctgcctccctggccaagcagggtttgtgatcaggcccctggggcggtcaataattgtggagaggagagaatgagagagtgtggaaaaaaaaagaataatgacccggcccccgccctctgcccccagctgctcctcgcagttcggttaattggttaatcacttaacctgcttttgtcactcggctttggctcgggacttcaaaatcagtgatgggagtaagagcaaatttcatctttccaaattgatgggtgggctagtaataaaatatttaaaaaaaaacattcaaaaacatggccacatccaacatttcctcaggcaattccttttgattcttttttcttccccctccatgtagaagagggagaaggagaggctctgaaagctgcttctgggggatttcaagggactgggggtgccaaccacctctggccctgttgtgggggtgtcacagaggcagtggcagcaacaaaggatttgaaacttggtgtgttcgtggagccacaggcagacgatgtcaaccttgtgtgagtgtgacgggggttggggtggggcgggaggccacgggggaggccgaggcaggggctgggcagaggggagaggaagcacaagaagtgggagtgggagaggaagccacgtgctggagagtagacatccccctccttgccgctgggagagccaaggcctatgccacctgcagcgtctgagcggccgcctgtccttggtggccgggggtgggggcctgctgtgggtcagtgtgccaccctctgcagggcagcctgtgggagaagggacagcgggtaaaaagagaaggcaagctggcaggagggtggcacttcgtggatgacctccttagaaaagactgaccttgatgtcttgagagcgctggcctcttcctccctccctgcagggtagggggcctgagttgaggggcttccctctgctccacagaaaccctgttttattgagttctgaaggttggaactgctgccatgattttggccactttgcagacctgggactttagggctaaccagttctctttgtaaggacttgtgcctcttgggagacgtccacccgtttccaagcctgggccactggcatctctggagtgtgtgggggtctgggaggcaggtcccgagccccctgtccttcccacggccactgcagtcaccccgtctgcgccgctgtgctgttgtctgccgtgagagcccaatcactgcctatacccctcatcacacgtcacaatgtcccgaattcccagcctcaccaccccttctcagtaatgaccctggttggttgcaggaggtacctactccatactgagggtgaaattaagggaaggcaaagtccaggcacaagagtgggaccccagcctctcactctcagttccactcatccaactgggaccctcaccacgaatctcatgatctgattcggttccctgtctcctcctcccgtcacagatgtgagccagggcactgctcagctgtgaccctaggtgtttctgccttgttgacatggagagagccctttcccctgagaaggcctggccccttcctgtgctgagcccacagcagcaggctgggtgtcttggttgtcagtggtggcaccaggatggaagggcaaggcacccagggcaggcccacagtcccgctgtcccccacttgcaccctagcttgtagctgccaacctcccagacagcccagcccgctgctcagctccacatgcatagtatcagccctccacacccgacaaaggggaacacacccccttggaaatggttcttttcccccagtcccagctggaagccatgctgtctgttctgctggagcagctgaacatatacatagatgttgccctgccctccccatctgcaccctgttgagttgtagttggatttgtctgtttatgcttggattcaccagagtgactatgatagtgaaaagaaaaaaaaaaaaaaaaaaggacgcatgtatcttgaaatgcttgtaaagaggtttctaacccaccctcacgaggtgtctctcacccccacactgggactcgtgtggcctgtgtggtgccaccctgctggggcctcccaagttttgaaaggctttcctcagcacctgggacccaacagagaccagcttctagcagctaaggaggccgttcagctgtgacgaaggcctgaagcacaggattaggactgaagcgatgatgtccccttccctacttccccttggggctccctgtgtcagggcacagactaggtcttgtggctggtctggcttgcggcgcgaggatggttctctctggtcatagcccgaagtctcatggcagtcccaaaggaggcttacaactcctgcatcacaagaaaaaggaagccactgccagctggggggatctgcagctcccagaagctccgtgagcctcagccacccctcagactgggttcctctccaagctcgccctctggaggggcagcgcagcctcccaccaagggccctgcgaccacagcagggattgggatgaattgcctgtcctggatctgctctagaggcccaagctgcctgcctgaggaaggatgacttgacaagtcaggagacactgttcccaaagccttgaccagagcacctcagcccgctgaccttgcacaaactccatctgctgccatgagaaaagggaagccgcctttgcaaaacattgctgcctaaagaaactcagcagcctcaggcccaattctgccacttctggtttgggtacagttaaaggcaaccctgagggacttggcagtagaaatccagggcctcccctggggctggcagcttcgtgtgcagctagagctttacctgaaaggaagtctctgggcccagaactctccaccaagagcctccctgccgttcgctgagtcccagcaattctcctaagttgaagggatctgagaaggagaaggaaatgtggggtagatttggtggtggttagagatatgcccccctcattactgccaacagtttcggctgcatttcttcacgcacctcggttcctcttcctgaagttcttgtgccctgctcttcagcaccatgggccttcttatacggaaggctctgggatctcccccttgtggggcaggctcttggggccagcctaagatcatggtttagggtgatcagtgctggcagataaattgaaaaggcacgctggcttgtgatcttaaatgaggacaatccccccagggctgggcactcctcccctcccctcacttctcccacctgcagagccagtgtccttgggtgggctagataggatatactgtatgccggctccttcaagctgctgactcactttatcaatagttccatttaaattgacttcagtggtgagactgtatcctgtttgctattgcttgttgtgctatggggggaggggggaggaatgtgtaagatagttaacatgggcaaagggagatcttggggtgcagcacttaaactgcctcgtaacccttttcatgatttcaaccacatttgctagagggagggagcagccacggagttagaggcccttggggtttctcttttccactgacaggctttcccaggcagctggctagttcattccctccccagccaggtgcaggcgtaggaatatggacatctggttgctttggcctgctgccctctttcaggggtcctaagcccacaatcatgcctccctaagaccttggcatccttccctctaagccgttggcacctctgtgccacctctcacactggctccagacacacagcctgtgcttttggagctgagatcactcgcttcaccctcctcatctttgttctccaagtaaagccacgaggtcggggcgagggcagaggtgatcacctgcgtgtcccatctacagacctgcagcttcataaaacttctgatttctcttcagctttgaaaagggttaccctgggcactggcctagagcctcacctcctaatagacttagccccatgagtttgccatgttgagcaggactatttctggcacttgcaagtcccatgatttcttcggtaattctgagggtggggggagggacatgaaatcatcttagcttagctttctgtctgtgaatgtctatatagtgtattgtgtgttttaacaaatgatttacactgactgttgctgtaaaagtgaatttggaaataaagttattactctgattaaa

SEQ ID NO: 80331 - DNA, 1233 bp, Artificial Sequence
  derived and/or modified sequence
atggccgagccccggcaggagttcgaggtgatggaggaccacgccggaacttacggtcttggtgatagaaaggatcaaggcggctacaccatgcaccaggatcaggagggagataccgacgccgggttaaaggagtctccactccagacgcctacggaagatggcagtgaggagcccggctccgagacctctgatgcgaagtcaacccccactgcagaggacgtgactgccccactagtagatgagggagctccaggaaagcaggccgcagcgcagccacacaccgagattccagaaggcaccacagccgaagaggccgggatcggagatacaccatcactcgaggacgaggctgccgggcatgtgacacaggctcgcatggtgtccaaatcaaaagacggcacgggtagtgatgataaaaaggcaaagggcgctgatggcaagacaaagatcgccacccccaggggcgcagccccacctggacaaaagggacaagctaatgccaccaggatacccgccaagacaccccccgcacctaagacaccccccagtagcggcgaaccacctaaatccggcgaccgctcaggttactcctccccggggtcccctggtacccctggtagccgctcacggacaccttccctccctacacccccaacccgcgagcccaagaaagtggctgtggtaaggacccctcctaagagtccaagtagtgcaaagtctagactccaaactgcaccggtgcctatgcccgatttaaagaacgtcaagtctaaaataggttccacagagaacctcaaacatcagcccggagggggcaaagtgcagattgtgtataaacccgtggacctgagtaaggtgacctctaaatgtggcagcctcggtaacatacaccacaagcccggcggaggccaggtggaggtgaaatccgaaaaattagactttaaggatcgagtgcagtccaaaattggaagcctcgacaatatcacacacgttcccggtggaggaaataagaaaattgagactcataagttaacctttagggaaaatgccaaagctaagactgatcacggagcggagatcgtatataaaagtcctgtggtgtccggtgacaccagcccacgccatttaagcaatgtttctagcacgggatcaatcgacatggtggattcgccacagctcgctaccctggctgacgaagtctccgcctcactcgccaagcagggtttatag

SEQ ID NO: 80332 - DNA, 1233 bp, Artificial Sequence
  derived and/or modified sequence
atggcggagccacgacaggagttcgaagtgatggaggatcacgccggaacgtacggactgggcgaccggaaagaccagggcggatatacaatgcaccaggatcaggagggtgacacagatgcgggattaaaggagtccccactacagacgcctacagaggatggctccgaagagcccggaagcgagaccagcgacgccaaaagcactcccacagccgaggatgtgacagcgccactggtggacgagggtgcccctggaaagcaggctgctgcccagccacacacagaaattccggagggaaccactgccgaggaggctggcatcggggacaccccctctttagaagatgaagccgctgggcatgtaacgcaggcccgtatggtatcgaagagtaaggatggtactggctccgacgataagaaggctaagggggctgacggaaagaccaaaattgcaacccctagaggcgcagctcctcctgggcagaagggccaagccaatgctacgagaatccccgcaaagacacccccagctcctaaaacccctccctcgagtggcgagccccctaagagcggtgaccgatcaggctacagttcccctggcagtcccggtacaccagggagtcggtctcggaccccttcactgccaacacctcctacacgcgagccaaagaaggtcgcggtagtgagaacaccaccaaaatccccatcttccgccaaaagccgacttcagaccgcacctgttccaatgcccgatctcaagaacgtgaagtccaaaatcggctccacggagaacctaaaacatcagccaggcggagggaaagtgcaaatcgtgtataagccggtagacttatctaaagtgacgtcaaaatgtggcagtctcggaaatatacatcacaaaccaggaggcggtcaggtcgaagtgaaaagcgaaaagcttgactttaaggacagggtacagtctaaaattggtagcctggacaacattactcatgtcccagggggtggcaataaaaaaattgagactcataaactgacctttagggaaaacgccaaggctaaaacagatcacggcgcagaaattgtatacaagagcccagtagtgtctggtgacaccagccctcgtcatctctccaacgtgtcctcgaccggatcaatcgatatggtggacagtccccagctagccactctcgccgatgaggtatccgcctctctggcaaagcaaggcctctag

SEQ ID NO: 80333 - protein, 430 aa, Artificial Sequence
  derived and/or modified sequence
MAANMYRVGDYVYFENSSSNPYLIRRIEELNKTANGNVEAKVVCFYRRRDISSTLIALADKHATLSVCYKAGPGADNGEEGEIEEEMENPEMVDLPEKLKHQLRHRELFLSRQLESLPATHIRGKCSVTLLNETESLKSYLEREDFFFYSLVYDPQQKTLLADKGEIRVGNRYQADITDLLKEGEEDGRDQSRLETQVWEAHNPLTDKQIDQFLVVARSVGTFARALDCSSSVRQPSLHMSAAAASRDITLFHAMDTLHKNIYDISKAISALVPQGGPVLCRDEMEEWSASEANLFEEALEKYGKDFTDIQQDFLPWKSLTSIIEYYYMWKTTDRYVQQKRLKAAEAESKLKQVYIPNYNKPNPNQISVNNVKAGVVNGTGAPGQSPGAGRACESCYMSSLRILLDILEEIWWLENANPVRWREARTKPQ

SEQ ID NO: 80334 - DNA, 1293 bp, Artificial Sequence
  derived and/or modified sequence
atggccgccaacatgtacagagtgggcgactacgtgtacttcgagaacagcagcagcaacccctacctgatcagaagaatcgaggagctgaacaagaccgccaacggcaacgtggaggccaaggtggtgtgcttctacagaagaagagacatcagcagcaccctgatcgccctggccgacaagcacgccaccctgagcgtgtgctacaaggccggccccggcgccgacaacggcgaggagggcgagatcgaggaggagatggagaaccccgagatggtggacctgcccgagaagctgaagcaccagctgagacacagagagctgttcctgagcagacagctggagagcctgcccgccacccacatcagaggcaagtgcagcgtgaccctgctgaacgagaccgagagcctgaagagctacctggagagagaggacttcttcttctacagcctggtgtacgacccccagcagaagaccctgctggccgacaagggcgagatcagagtgggcaacagataccaggccgacatcaccgacctgctgaaggagggcgaggaggacggcagagaccagagcagactggagacccaggtgtgggaggcccacaaccccctgaccgacaagcagatcgaccagttcctggtggtggccagaagcgtgggcaccttcgccagagccctggactgcagcagcagcgtgagacagcccagcctgcacatgagcgccgccgccgccagcagagacatcaccctgttccacgccatggacaccctgcacaagaacatctacgacatcagcaaggccatcagcgccctggtgccccagggcggccccgtgctgtgcagagacgagatggaggagtggagcgccagcgaggccaacctgttcgaggaggccctggagaagtacggcaaggacttcaccgacatccagcaggacttcctgccctggaagagcctgaccagcatcatcgagtactactacatgtggaagaccaccgacagatacgtgcagcagaagagactgaaggccgccgaggccgagagcaagctgaagcaggtgtacatccccaactacaacaagcccaaccccaaccagatcagcgtgaacaacgtgaaggccggcgtggtgaacggcaccggcgcccccggccagagccccggcgccggcagagcctgcgagagctgctacatgagcagcctgagaatcctgctggacatcctggaggagatctggtggctggagaacgccaaccccgtgagatggagagaggccagaaccaagccccagtag

SEQ ID NO: 80335 - DNA, 1293 bp, Artificial Sequence
  derived and/or modified sequence
atggccgctaacatgtaccgggtgggggattatgtgtacttcgaaaactcgagtagcaatccttacttaatcagaaggattgaggaactgaataaaaccgctaacggcaacgttgaggcaaaagtcgtgtgcttttatcgcaggagggacatttccagcacattaattgctttagctgataaacacgccactctgagcgtctgttacaaggctgggccaggcgctgacaatggagaggagggagagattgaggaggagatggagaatccagaaatggtggatctccctgaaaaactgaagcaccagctgaggcaccgagagctgtttctttcgcgacaacttgaaagtctaccagcgactcacatacgcggcaagtgctctgtaaccttactgaatgaaacagagagcctcaagagctacctcgaacgggaagatttcttcttctactccttagtctatgacccacagcagaagacactcctcgccgataagggtgagatcagggtcggtaacagatatcaggccgatatcacagacttgttgaaagagggagaagaggatggccgcgatcagtcacgcctcgagacacaggtgtgggaggcccataacccattgaccgataagcagatagaccaatttttagttgtggctcggtctgtggggaccttcgctagagctctggactgttctagcagcgttagacaacccagcctacacatgtcagctgcagctgccagtcgcgacatcaccctctttcacgccatggacactcttcacaagaacatatacgatattagcaaggctatctccgccctcgttccgcaaggagggcctgttttatgccgtgacgagatggaggagtggagcgccagtgaggccaacctttttgaggaagctctcgagaagtatggcaaggactttactgacatccaacaagactttctcccttggaaatctctcacgagcattatcgagtactattatatgtggaagacaacagatcggtatgtccagcaaaaacggctcaaggccgcggaagcagaaagcaagcttaagcaggtgtatatcccgaactacaacaagcctaatcctaatcaaattagtgtgaacaatgtgaaagctggtgttgttaacgggactggcgcgccgggccagtcccctggcgcggggagagcctgcgagtcttgttatatgtcaagcctccgcatcctcttagacattctagaggagatttggtggctggagaatgccaacccagtgcgctggcgcgaggctcgaacgaaaccccagtag

SEQ ID NO: 80336 - DNA, 1293 bp, Artificial Sequence
  derived and/or modified sequence
atggccgccaacatgtacagagtgggggactatgtgtactttgagaacagcagcagcaacccctacctgatcagaagaattgaggagctgaacaagacagccaatggaaatgtggaggccaaggtggtgtgcttctacagaagaagagacatcagcagcaccctcatcgccctggccgacaagcacgccaccctgtctgtgtgctacaaggccggccctggagctgacaatggagaggagggggagattgaggaggagatggagaaccctgagatggtggacctgcctgagaagctgaagcaccagctgcggcaccgggagctgttcctgagccggcagctggagagcctgcctgccacccacatccggggcaaatgttctgtgaccctgctgaatgaaacagagagcctgaagagctacctggagcgggaggacttcttcttctacagcctggtgtatgacccccagcagaagaccctgctggccgacaagggggagatccgggtgggcaaccgctaccaggccgacatcacagacctgctgaaggagggggaggaggatggccgggaccagagccggctggagacccaggtgtgggaggcccacaaccccctgacagacaagcagattgaccagttcctggtggtggcccggtctgtgggcacctttgcccgggccctggactgcagcagctctgtgcggcagcccagcctgcacatgtctgctgctgctgccagccgggacatcaccctcttccacgccatggacaccctgcacaagaacatctatgacatcagcaaggccatcagcgccctggtgccccagggcggccctgtgctgtgcagagatgagatggaggagtggagcgccagcgaggccaacctgtttgaggaggccctggagaagtatggcaaggacttcacagacatccagcaggacttcctgccctggaagagcctgaccagcatcatcgagtactactacatgtggaagaccacagaccgctacgtgcagcagaagaggctgaaggctgctgaggccgagagcaagctgaagcaggtgtacatccccaactacaacaagcccaaccccaaccagatctctgtgaacaacgtgaaggccggcgtggtgaatggcaccggggcccctggccagagccctggagctggccgggcctgtgagagctgctacatgagcagcctgcgcatcctgctggacatcctggaggagatctggtggctggagaatgccaaccctgtgcgctggagggaggcccggaccaagccccagtag

SEQ ID NO: 80337 - DNA, 1293 bp, Artificial Sequence
  derived and/or modified sequence
atggccgccaacatgtaccgggtgggcgactacgtgtacttcgagaatagctcctctaacccctatctgataaggcggattgaggagttgaataagactgcaaacggtaatgtcgaggctaaagtcgtgtgtttctacaggcggcgcgatatctcaagtacactgattgcacttgccgataagcacgccacgcttagtgtttgctacaaggcaggcccgggggcagacaatggagaagaaggtgagattgaagaggaaatggagaaccctgagatggtcgatctgcccgagaagcttaaacatcagctcaggcacagggaactatttctgagtaggcaactggagtcccttcctgcaactcatatcagaggcaaatgttccgtcactttgctgaacgaaaccgagtcccttaagtcctacctcgaacgggaggacttctttttctactccctggtgtacgacccccagcaaaagactttactggccgataagggagaaattagggtgggaaatagataccaggcagacatcaccgatctgcttaaagagggtgaggaggatggtcgtgaccagtcccgcttagagacacaagtgtgggaggcacacaatccgctgaccgacaagcagattgatcaattcctggttgtggccaggagtgtcgggacattcgcacgcgctctcgactgcagctcttctgtcagacaaccatcattgcatatgagtgcagctgcagcgagtagagacatcactttgttccacgcaatggatacgctgcataaaaacatctatgatatcagcaaggctattagtgcactggtgcctcagggtggccccgttctgtgtcgcgacgagatggaggagtggtcagcctcagaagcaaatttgtttgaggaagcgctggagaaatatggaaaggacttcacggatatacaacaagacttcttgccctggaagagtctcacttccataatagaatattattacatgtggaaaaccactgacaggtacgtgcagcagaagcgtctgaaggccgcggaggctgagtcaaaactgaaacaggtctacatcccaaattacaataaacctaatcccaaccagatttcagtgaacaacgtgaaggccggcgtcgtgaatggaaccggcgcccctgggcagtcacccggtgccggccgcgcctgcgagagctgttatatgtcaagtctgcgcatactgctggacatactcgaagaaatctggtggctcgagaacgccaacccagtccggtggagggaggcccgtaccaagcctcaatag

SEQ ID NO: 80338 - DNA, 1293 bp, Artificial Sequence
  derived and/or modified sequence
atggctgcaaatatgtatcgagttggcgactacgtctatttcgagaatagctcctctaacccatacctgattaggcggattgaggagctaaataagaccgctaatggcaatgttgaagcaaaggtggtctgcttctataggcgcagagatatctccagtacactgatcgctctggctgacaagcacgctacgctgtcagtctgctacaaagccggaccaggggcagacaatggggaggaaggagaaatagaagaagaaatggaaaatcccgagatggtcgatctgcccgagaaactcaagcaccagctgaggcaccgcgagctgtttcttagcaggcagcttgagtcacttcccgcaacccacattaggggcaaatgctccgtcacactgctgaacgagaccgaaagtcttaagtcctatctggaacgcgaggacttcttcttttactctttggtgtacgatcctcagcagaagaccctacttgcagacaaaggcgagatccgcgtgggaaataggtaccaggccgacattactgacttgttgaaggaaggcgaagaggatggcagagatcaatccaggctagaaacgcaggtgtgggaagcgcacaatcctctaactgataagcaaattgaccaattcttagtggtcgctcgaagcgtcggaacattcgccagagctttggattgcagctcctcagttagacagccgagcctgcacatgtcagcggctgccgcttctcgagatattaccctcttccacgccatggacactcttcacaagaacatctacgatatcagcaaggcgatatccgctctggttcctcagggtggacctgtgttatgtcgcgatgaaatggaggaatggtccgcttcagaagctaatttgtttgaggaagccctggagaagtatggcaaagactttacggatatccagcaggactttttgccatggaagtctctgaccagcatcattgaatattactacatgtggaaaaccactgacagatacgtgcagcagaaacgattaaaagctgccgaggctgaatccaaactgaagcaggtgtacattcccaactacaacaagcccaaccctaaccagatcagcgtgaataatgtgaaggccggagtggtgaacggcactggtgcccctggccagtcccccggagctggaagggcctgtgaaagttgttatatgtcttcccttagaatactcctggacatcctggaggaaatttggtggctggaaaacgcgaatccggtgagatggcgggaggctaggacaaagccacagtag

SEQ ID NO: 80339 - protein, 707 aa, Artificial Sequence
  derived and/or modified sequence
MPVPWFLLSLALGRSPVVLSLERLVGPQDATHCSPGLSCRLWDSDILCLPGDIVPAPGPVLAPTHLQTELVLRCQKETDCDLCLRVAVHLAVHGHWEEPEDEEKFGGAADSGVEEPRNASLQAQVVLSFQAYPTARCVLLEVQVPAALVQFGQSVGSVVYDCFEAALGSEVRIWSYTQPRYEKELNHTQQLPDCRGLEVWNSIPSCWALPWLNVSADGDNVHLVLNVSEEQHFGLSLYWNQVQGPPKPRWHKNLTGPQIITLNHTDLVPCLCIQVWPLEPDSVRTNICPFREDPRAHQNLWQAARLQLLTLQSWLLDAPCSLPAEAALCWRAPGGDPCQPLVPPLSWENVTVDKVLEFPLLKGHPNLCVQVNSSEKLQLQECLWADSLGPLKDDVLLLETRGPQDNRSLCALEPSGCTSLPSKASTRAARLGEYLLQDLQSGQCLQLWDDDLGALWACPMDKYIHKRWALVWLACLLFAAALSLILLLKKDHAKAAARGRAALLLYSADDSGFERLVGALASALCQLPLRVAVDLWSRRELSAQGPVAWFHAQRRQTLQEGGVVVLLFSPGAVALCSEWLQDGVSGPGAHGPHDAFRASLSCVLPDFLQGRAPGSYVGACFDRLLHPDAVPALFRTVPVFTLPSQLPDFLGALQQPRAPRSGRLQERAEQVSRALQPALDSYFHPPGTPAPGRGVGPGAGPGAGDGT

SEQ ID NO: 80340 - DNA, 2124 bp, Artificial Sequence
  derived and/or modified sequence
atgcctgtaccttggttcctgctgtctctagcactgggtcggtcacctgttgtattgtcccttgagcgcttagtggggccccaggacgctacacattgcagtccaggtttaagctgtaggttgtgggacagtgacattctttgtttacccggtgatatcgtgccagctcctgggcctgtgctggctcccactcacctccaaacagaactggtgctccggtgtcaaaaggaaactgattgtgacctctgtctgagggtggctgtacacctagctgtgcacggacattgggaagaacctgaagatgaggagaagtttgggggtgccgccgactcgggtgtggaggagcccagaaatgccagcctccaggctcaagttgtcttatcgttccaggcttaccctacggccagatgcgtgcttcttgaggtgcaggtgccagcggctctcgtccagttcggacaatcagtggggtccgtcgtttacgattgctttgaagctgctctaggcagcgaggtgcgcatttggtcctatacacagccacgctacgagaaggaactgaatcacacacagcaactcccggactgcagaggtttggaggtatggaatagtatcccctcgtgctgggccctgccttggttgaatgtgagcgccgatggagataatgtccatctggtcctcaatgtgtccgaagagcagcactttggtttgtcactgtattggaatcaagtccaagggccacctaaacctagatggcataagaacctgaccggtccacagattatcacacttaatcatacagacctggtcccctgcctttgcatccaggtgtggccacttgagcccgactccgttcgaaccaacatctgcccattcagggaggatcctcgagcacatcaaaatttatggcaggccgctagactacagctcttgaccctgcaaagttggctcctggatgcgccttgttctctccccgcagaggctgctctctgttggcgtgcaccgggtggggatccctgccagcccctggtccctcccctgagttgggagaatgtcactgtagacaaggtgctcgaatttccgttattaaaggggcatcccaacctctgcgtgcaggtaaacagctccgagaagctacagctgcaagagtgcctatgggccgactcgctggggccactgaaggacgatgtccttctgctggaaacccgaggtcctcaagataaccgctctctgtgcgcgctggagccaagcgggtgtacctccctgccaagcaaagcatccacacgcgcggccaggcttggtgagtatctgctgcaggatctgcagagcgggcagtgccttcagctgtgggatgacgatctcggcgctctatgggcctgccctatggataaatatatccacaagcgttgggcattggtgtggctggcatgtctcctgttcgccgcggcactctctttaattcttctgttaaagaaagatcacgccaaggctgcggctaggggcagggccgcccttctgctatatagtgccgacgactccggttttgagagactggtgggcgcgctggccagtgccctctgtcaactgcccttgcgcgtggccgtcgatctatggtcccgaagagagctgagcgcccaaggaccagtagcatggttccacgcccagagacgccaaaccctccaggaaggcggagtagtcgtcctgttgtttagtcctggcgcggtagccctttgctccgagtggctacaggacggtgtttctgggcctggggcccacggcccgcacgacgcattcagagcatccctttcctgcgtcctgccagactttctacagggccgcgccccaggttcatacgtgggagcctgtttcgataggttgcttcacccagacgccgtgcctgccctgttccggaccgtacccgtcttcacactccccagtcagcttccggatttcctcggggccctacagcaaccacgggccccccgctctggtcggctacaggagcgcgctgaacaagtgtctcgtgctctgcagcccgccttggatagctactttcacccacctggcactccagcccctggtcggggtgtaggaccaggcgcaggaccaggggcaggtgatggaacatag

SEQ ID NO: 80341 - DNA, 2147 bp, Artificial Sequence
  derived and/or modified sequence
atgcctgtgccctggttcttgctgtccttggcactgggccgaagcccagtggtcctttctctggagaggcttgtggggcctcaggacgctacccactgctctccgggcctctcctgccgcctctgggacagtgacatactctgcctgcctggggacatcgtgcctgctccgggccccgtgctggcgcctacgcacctgcagacagagctggtgctgaggtgccagaaggagaccgactgtgacctctgtctgcgtgtggctgtccacttggccgtgcatgggcactgggaagagcctgaagatgaggaaaagtttggaggagcagctgactcaggggtggaggagcctaggaatgcctctctccaggcccaagtcgtgctctccttccaggcctaccctactgcccgctgcgtcctgctggaggtgcaagtgcctgctgcccttgtgcagtttggtcagtctgtgggctctgtggtatatgactgcttcgaggctgccctagggagtgaggtacgaatctggtcctatactcagcccaggtacgagaaggaactcaaccacacacagcagctgcctgactgcagggggctcgaagtctggaacagcatcccgagctgctgggccctgccctggctcaacgtgtcagcagatggtgacaacgtgcatctggttctgaatgtctctgaggagcagcacttcggcctctccctgtactggaatcaggtccagggccccccaaaaccccggtggcacaaaaacctgactggaccgcagatcattaccttgaaccacacagacctggttccctgcctctgtattcaggtgtggcctctggaacctgactccgttaggacgaacatctgccccttcagggaggacccccgcgcacaccagaacctctggcaagccgcccgactgcaactgctgaccctgcagagctggctgctggacgcaccgtgctcgctgcccgcagaagcggcactgtgctggcgggctccgggtggggacccctgccagccactggtcccaccgctttcctgggagaacgtcactgtggacaaggttctcgagttcccattgctgaaaggccaccctaacctctgtgttcaggtgaacagctcggagaagctgcagctgcaggagtgcttgtgggctgactccctggggcctctcaaagacgatgtgctactgttggagacacgaggcccccaggacaacagatccctctgtgccttggaacccagtggctgtacttcactacccagcaaagcctccacgagggcagctcgccttggagagtacttactacaagacctgcagtcaggccagtgtctgcagctatgggacgatgacttgggagcgctatgggcctgccccatggacaaatacatccacaagcgctgggccctcgtgtggctggcctgcctactctttgccgctgcgctttccctcatcctccttctcaaaaaggatcacgcgaaagcggccgccaggggccgcgcggctctgctcctctactcagccgatgactcgggtttcgagcgcctggtgggcgccctggcgtcggccctgtgccagctgccgctgcgcgtggccgtagacctgtggagccgtcgtgaactgagcgcgcaggggcccgtggcttggtttcacgcgcagcggcgccagaccctgcaggagggcggcgtggtggtcttgctcttctctcccggtgcggtggcgctgtgcagcgagtggctacaggatggggtgtccgggcccggggcgcacggcccgcacgacgccttccgcgcctcgctcagctgcgtgctgcccgacttcttgcagggccgggcgcccggcagctacgtgggggcctgcttcgacaggctgctccacccggacgccgtacccgcccttttccgcaccgtgcccgtcttcacactgccctcccaactgccagacttcctgggggccctgcagcagcctcgcgccccgcgttccgggcggctccaagagagagcggagcaagtgtcccgggcccttcagccagccctggatagctacttccatcccccggggactcccgcgccgggacgcggggtgggaccaggcgcgggacctggggcgggggacgggacttaaataaaggcagacgctgtttttct

SEQ ID NO: 80342 - DNA, 2124 bp, Artificial Sequence
  derived and/or modified sequence
atgcctgtgccctggttcctgctgagcctggccctgggccgcagccctgtggtgctgagcctggagcggctggtgggcccccaggatgccacccactgcagccctggcctgagctgccgcctgtgggacagcgacatcctgtgcctgcccggggacatcgtgcctgcccctggccctgtgctggcccccacccacctgcagacagagctggtgctgcgctgccagaaggagacagactgtgacctgtgcctgcgggtggccgtgcacctggccgtgcacggccactgggaggagccagaagatgaggagaagtttggaggagctgctgacagcggcgtggaggagcccagaaatgccagcctgcaggcccaggtggtgctgtccttccaggcctaccccacagcccgctgtgtgctgctggaggtgcaggtgcctgctgccctggtgcagtttggccagagcgtgggctctgtggtgtatgactgctttgaagctgccctgggcagcgaggtgcgcatctggagctacacccagcccaggtatgagaaggagctgaaccacacccagcagctgcctgactgccggggcctggaggtgtggaacagcatccccagctgctgggccctgccctggctgaatgtgtctgcagatggagacaacgtgcacctggtgctgaatgtgtctgaggagcagcacttcggcctgagcctgtactggaaccaggtgcagggcccccccaagccccgctggcacaagaacctgaccggcccccagatcatcaccctgaaccacacagacctggtgccctgcctgtgcatccaggtgtggcccctggagccagacagcgtgaggaccaacatctgccccttccgggaggacccccgggcccaccagaacctgtggcaggccgcccggctgcagctgctgaccctgcagagctggctgctggatgccccctgcagcctgcctgctgaggccgccctgtgctggagggcccctggaggagacccctgccagcccctggtgccccccctgtcctgggagaatgtgacagtggacaaggtgctggagttccccctgctgaagggccaccccaacctgtgtgtgcaggtgaacagcagcgagaagctgcagctgcaggagtgcctgtgggccgacagcctgggccccctgaaggatgatgtgctgctgctggagacccggggcccccaggacaacagaagcctgtgtgccctggagcccagcggctgcaccagcctgcccagcaaggccagcacccgggccgcccggctgggggagtacctgctgcaggacctgcagagcggccagtgcctgcagctgtgggatgatgacctgggcgccctgtgggcctgccccatggacaagtacatccacaagcgctgggccctggtgtggctggcctgcctgctgtttgctgctgccctgagcctcatcctgctgctgaagaaggaccacgccaaggccgccgcccggggccgggccgccctgctgctgtacagcgcagatgattctggctttgagcggctggtgggcgccctggccagcgccctgtgccagctgcccctgcgggtggccgtggacctgtggagccggcgggagctgagcgcccagggccctgtggcctggttccacgcccagaggcggcagaccctgcaggagggcggcgtggtggtgctgctcttcagccctggagctgtggccctgtgcagcgagtggctgcaggatggagtgtctggccctggggcccacggcccccatgatgccttccgggccagcctgagctgtgtgctgcctgacttcctgcagggccgggcccctggcagctatgtgggcgcctgctttgaccggctgctgcacccagatgctgtgcctgccctcttcagaacagtgcctgtgttcaccctgcccagccagctgcctgacttcctgggcgccctgcagcagccccgggcccccaggagcggccgcctgcaggagcgggcagagcaggtgtcccgggccctgcagcctgccctggacagctacttccaccccccaggcaccccagcccctggccggggcgtgggccctggagctggccctggagctggagatggcacctag

SEQ ID NO: 80343 - DNA, 2124 bp, Artificial Sequence
  derived and/or modified sequence
atgcccgtgccctggttcctgctgagcctggccctgggccggagcccagtggtcctgtctctcgaacggttggtggggccccaggatgctacccattgttctccaggcctttcatgtcggctctgggactccgatatcctgtgtctacccggtgatatagtgccggcgccaggcccggtgctggcacccacgcaccttcaaactgaacttgtgctaagatgtcaaaaagagactgactgcgatctctgcctgcgggtggctgtgcatctggccgtccacggccactgggaagagcccgaagacgaggagaaatttgggggagccgccgactcaggtgtggaggagccaagaaacgcctccctccaggcccaggtggtactgtcttttcaagcttaccctaccgctcgatgcgtattgctcgaggtacaagtaccggccgctctggtgcagttcggccagtcagtagggagtgttgtgtatgactgcttcgaagccgctctcggatctgaggtgcgcatttggtcctacacacagccccgatacgagaaggagctgaatcatactcagcagctgcctgactgcaggggcctggaagtgtggaactccatcccctcttgctgggcactcccatggctgaacgttagcgccgatggagacaacgtgcatctagtattgaacgtgagtgaggaacaacacttcggactgtccctatactggaaccaggtacaggggccccctaaacctcgatggcataagaatctgacaggtccgcagattatcacgctgaatcacacagatctggtgccttgtttgtgcatccaagtatggcccttggagcccgatagtgtgaggacaaacatatgcccattccgcgaggacccacgggctcaccagaacctctggcaggccgccaggctccagttgctcactctccagtcctggttgctggacgccccctgctctctgccagctgaagctgcactatgttggcgggcgccgggcggagacccatgtcaaccccttgtgccaccactctcctgggaaaatgtcaccgtggataaagtgctggaatttcccctcttaaagggacaccctaatctatgcgtccaagtcaattcttcggagaagctgcagctgcaggagtgtctttgggccgattcgctgggcccactcaaggatgacgttctgctgttagaaacacgtgggccccaggacaaccggagcttgtgtgcacttgagccttcagggtgtacgtcgctaccatcaaaagcatccaccagagcagcccggcttggagagtacctgctccaggatttgcagagtggacagtgtcttcagttgtgggacgatgacctcggagccctatgggcttgtcccatggacaaatatattcataagcggtgggccctggtttggctggcctgtctgctcttcgccgccgcattgtctttaatactgctcctgaagaaagatcacgcgaaggcagccgcccgcggtagagctgccctgctcttgtactctgcagacgattctggttttgagcggctcgtgggtgcccttgcatcggctctttgccagctgccactgcgggttgcggtggacctctggagtcgcagagagctgtccgcacagggccccgtcgcctggttccacgcccaacgccgacaaacactccaagaggggggggtggtggtgctgctgttctcccctggggccgtggctctctgttccgaatggctgcaagatggcgtgagcgggcctggcgcccatggaccacatgacgcatttcgggcttcattgtcctgtgtacttcccgacttcctgcaaggacgtgcccccggcagctacgttggtgcctgttttgataggctcctgcacccggacgctgtacccgcactgtttaggacagtccctgttttcactttgccatctcagttgcccgactttttaggggccctccaacagcctagagcaccgcgcagtggaagactgcaggagcgcgccgaacaagtatctcgcgccctgcagcccgctctggactcttattttcacccaccagggacccctgcgccaggccgcggtgtgggccccggcgcagggccaggcgcgggcgacggcacttag

SEQ ID NO: 80344 - DNA, 2124 bp, Artificial Sequence
  derived and/or modified sequence
atgccagtgccatggttcctgctgtcactggctctgggtaggtctccagtggtactgtcactggagcgcctggtggggcctcaggatgctacacactgcagccccggactgtcttgccgactttgggattcagacatactttgtctccctggtgacatcgtgcctgcacccggaccagtgctcgctcccacacacctgcaaacagaactggtgcttcgatgccagaaagaaacagactgcgatctgtgcctaagggtggcagtccacctcgccgtgcatggtcactgggaagaacccgaggatgaagaaaagttcggcggagctgccgacagtggggtagaggaaccgaggaatgcatctttgcaggcccaggtcgtcctcagctttcaagcctacccgacagcacgatgtgtactacttgaagtgcaggtgcctgctgctcttgtgcagtttggacaaagcgttggaagcgtagtgtatgattgctttgaagcagcactgggaagcgaagtcagaatctggtcctatacccagccacggtacgagaaagaactcaaccacacccaacagctccccgactgtagaggattggaggtgtggaattcaatcccatcgtgttgggctctcccatggctgaatgtgagtgctgatggagataacgtccatttggttttgaatgtcagtgaagagcaacacttcggacttagcctctattggaaccaagtgcagggccctcccaaaccacgctggcataagaatcttacgggtccccagatcatcacattgaatcataccgaccttgtgccttgtctgtgcattcaagtgtggcctctggaaccagactcggtgcgcacaaacatttgtccatttagggaagaccctcgagcgcatcagaatctgtggcaggctgccaggctccagcttctgacgctgcagtcttggctgctggacgccccatgctctctgcccgcagaggctgctctttgctggcgtgcccctgggggtgacccatgtcagcccctggtgccccctctgtcctgggagaatgttacagtcgacaaagttttagagtttccgttgttaaagggccaccccaatctgtgcgtccaggtcaatagctctgaaaagctgcaactgcaggagtgtttatgggccgacagtcttgggccactgaaggatgacgtactgttgctcgaaactcgaggccctcaagataacaggagcctctgcgctttagaaccttctggctgcacctccctcccttctaaggcaagcacacgtgctgcaagactgggcgaatatttacttcaggatctccagagcggccagtgcctacaattgtgggatgacgatctaggcgctctctgggcttgcccgatggataagtatatccacaaacgatgggccctggtgtggttagcgtgcctgctcttcgctgccgctctgagtctaatcttgctactgaagaaagatcatgccaaagcagccgcaagaggccgtgccgctctgcttttgtactccgccgacgattctgggttcgaacggttagtgggggctcttgcttccgccttgtgtcagcttcctttacgagtcgctgttgatctgtggtcaagacgggagttgtctgcacagggccctgtcgcttggttccatgcccagagacgacaaaccctgcaggagggtggcgtggttgtcttgctcttcagcccaggcgctgtggctctttgtagcgagtggctccaggacggggttagcggaccaggcgcacatggcccacacgatgccttcagggcatccttatcatgcgtcttgcctgactttctgcagggacgggctcccggaagctatgtgggggcttgctttgatcgcctgttgcaccccgatgccgttcccgcactgttcaggaccgtaccagtgttcacactgccaagtcagctccctgatttcttgggtgctcttcagcaaccacgtgcgccaagatccgggagactgcaagaacgggctgaacaggtgagcagagccctccagccagctttggatagttattttcatccgcctggcacccccgcacccggtcgcggagtggggccaggcgcaggccctggagcgggagacggaacctag

SEQ ID NO: 80345 - DNA, 2124 bp, Artificial Sequence
  derived and/or modified sequence
atgcccgtgccctggttcctgctgagcctggccctgggcagaagccccgtggtgctgagcctggagagactggtgggcccccaggacgccacccactgcagccccggcctgagctgcagactgtgggacagcgacatcctgtgcctgcccggcgacatcgtgcccgcccccggccccgtgctggcccccacccacctgcagaccgagctggtgctgagatgccagaaggagaccgactgcgacctgtgcctgagagtggccgtgcacctggccgtgcacggccactgggaggagcccgaggacgaggagaagttcggcggcgccgccgacagcggcgtggaggagcccagaaacgccagcctgcaggcccaggtggtgctgagcttccaggcctaccccaccgccagatgcgtgctgctggaggtgcaggtgcccgccgccctggtgcagttcggccagagcgtgggcagcgtggtgtacgactgcttcgaggccgccctgggcagcgaggtgagaatctggagctacacccagcccagatacgagaaggagctgaaccacacccagcagctgcccgactgcagaggcctggaggtgtggaacagcatccccagctgctgggccctgccctggctgaacgtgagcgccgacggcgacaacgtgcacctggtgctgaacgtgagcgaggagcagcacttcggcctgagcctgtactggaaccaggtgcagggcccccccaagcccagatggcacaagaacctgaccggcccccagatcatcaccctgaaccacaccgacctggtgccctgcctgtgcatccaggtgtggcccctggagcccgacagcgtgagaaccaacatctgccccttcagagaggaccccagagcccaccagaacctgtggcaggccgccagactgcagctgctgaccctgcagagctggctgctggacgccccctgcagcctgcccgccgaggccgccctgtgctggagagcccccggcggcgacccctgccagcccctggtgccccccctgagctgggagaacgtgaccgtggacaaggtgctggagttccccctgctgaagggccaccccaacctgtgcgtgcaggtgaacagcagcgagaagctgcagctgcaggagtgcctgtgggccgacagcctgggccccctgaaggacgacgtgctgctgctggagaccagaggcccccaggacaacagaagcctgtgcgccctggagcccagcggctgcaccagcctgcccagcaaggccagcaccagagccgccagactgggcgagtacctgctgcaggacctgcagagcggccagtgcctgcagctgtgggacgacgacctgggcgccctgtgggcctgccccatggacaagtacatccacaagagatgggccctggtgtggctggcctgcctgctgttcgccgccgccctgagcctgatcctgctgctgaagaaggaccacgccaaggccgccgccagaggcagagccgccctgctgctgtacagcgccgacgacagcggcttcgagagactggtgggcgccctggccagcgccctgtgccagctgcccctgagagtggccgtggacctgtggagcagaagagagctgagcgcccagggccccgtggcctggttccacgcccagagaagacagaccctgcaggagggcggcgtggtggtgctgctgttcagccccggcgccgtggccctgtgcagcgagtggctgcaggacggcgtgagcggccccggcgcccacggcccccacgacgccttcagagccagcctgagctgcgtgctgcccgacttcctgcagggcagagcccccggcagctacgtgggcgcctgcttcgacagactgctgcaccccgacgccgtgcccgccctgttcagaaccgtgcccgtgttcaccctgcccagccagctgcccgacttcctgggcgccctgcagcagcccagagcccccagaagcggcagactgcaggagagagccgagcaggtgagcagagccctgcagcccgccctggacagctacttccacccccccggcacccccgcccccggcagaggcgtgggccccggcgccggccccggcgccggcgacggcacctag

SEQ ID NO: 80346 - DNA, 2284 bp, Artificial Sequence
  derived and/or modified sequence
aggaggagagtcaggactcccaggacagagagtgcacaaactacccagcacagccccctccgccccctctggaggctgaagagggattccagcccctgccacccacagacacgggctgactggggtgtctgccccccttgggggggggcagcacagggcctcaggcctgggtgccacctggcacctagaagatgcctgtgccctggttcttgctgtccttggcactgggccgaagcccagtggtcctttctctggagaggcttgtggggcctcaggacgctacccactgctctccgggcctctcctgccgcctctgggtgacatactctgcctgcctggggacatcgtgcctgctccgggccccgtgctggcgcctacgcacctgcagacagagctggtgctgaggtgccagaaggagaccgactgtgacctctgtctgcgtgtggctgtccacttggccgtgcatgggcactgggaagagcctgaagatgaggaaaagtttggaggagcagctgactcaggggtggaggagcctaggaatgcctctctccaggcccaagtcgtgctctccttccaggcctaccctactgcccgctgcgtcctgctggaggtgcaagtgcctgctgcccttgtgcagtttggtcagtctgtgggctctgtggtatatgactgcttcgaggctgccctagggagtgaggtacgaatctggtcctatactcagcccaggtacgagaaggaactcaaccacacacagcagctgcctgactgcagggggctcgaagtctggaacagcatcccgagctgctgggccctgccctggctcaacgtgtcagcagatggtgacaacgtgcatctggttctgaatgtctctgaggagcagcacttcggcctctccctgtactggaatcaggtccagggccccccaaaaccccggtggcacaaaaacctgactggaccgcagatcattaccttgaaccacacagacctggttccctgcctctgtattcaggtgtggcctctggaacctgactccgttaggacgaacatctgccccttcagggaggacccccgcgcacaccagaacctctggcaagccgcccgactgcaactgctgaccctgcagagctggctgctggacgcaccgtgctcgctgcccgcagaagcggcactgtgctggcgggctccgggtggggacccctgccagccactggtcccaccgctttcctgggagaacgtcactgtggacgtgaacagctcggagaagctgcagctgcaggagtgcttgtgggctgactccctggggcctctcaaagacgatgtgctactgttggagacacgaggcccccaggacaacagatccctctgtgccttggaacccagtggctgtacttcactacccagcaaagcctccacgagggcagctcgccttggagagtacttactacaagacctgcagtcaggccagtgtctgcagctatgggacgatgacttgggagcgctatgggcctgccccatggacaaatacatccacaagcgctgggccctcgtgtggctggcctgcctactctttgccgctgcgctttccctcatcctccttctcaaaaaggatcacgcgaaagcggccgccaggggccgcgcggctctgctcctctactcagccgatgactcgggtttcgagcgcctggtgggcgccctggcgtcggccctgtgccagctgccgctgcgcgtggccgtagacctgtggagccgtcgtgaactgagcgcgcaggggcccgtggcttggtttcacgcgcagcggcgccagaccctgcaggagggcggcgtggtggtcttgctcttctctcccggtgcggtggcgctgtgcagcgagtggctacaggatggggtgtccgggcccggggcgcacggcccgcacgacgccttccgcgcctcgctcagctgcgtgctgcccgacttcttgcagggccgggcgcccggcagctacgtgggggcctgcttcgacaggctgctccacccggacgccgtacccgcccttttccgcaccgtgcccgtcttcacactgccctcccaactgccagacttcctgggggccctgcagcagcctcgcgccccgcgttccgggcggctccaagagagagcggagcaagtgtcccgggcccttcagccagccctggatagctacttccatcccccggggactcccgcgccgggacgcggggtgggaccaggcgcgggacctggggcgggggacgggacttaaataaaggcagacgctgtttttcta

SEQ ID NO: 80347 - protein, 546 aa, Artificial Sequence
  derived and/or modified sequence
MAYPTARCVLLEVQVPAALVQFGQSVGSVVYDCFEAALGSEVRIWSYTQPRYEKELNHTQQLPALPWLNVSADGDNVHLVLNVSEEQHFGLSLYWNQVQGPPKPRWHKNLTGPQIITLNHTDLVPCLCIQVWPLEPDSVRTNICPFREDPRAHQNLWQAARLQLLTLQSWLLDAPCSLPAEAALCWRAPGGDPCQPLVPPLSWENVTVDVNSSEKLQLQECLWADSLGPLKDDVLLLETRGPQDNRSLCALEPSGCTSLPSKASTRAARLGEYLLQDLQSGQCLQLWDDDLGALWACPMDKYIHKRWALVWLACLLFAAALSLILLLKKDHAKAAARGRAALLLYSADDSGFERLVGALASALCQLPLRVAVDLWSRRELSAQGPVAWFHAQRRQTLQEGGVVVLLFSPGAVALCSEWLQDGVSGPGAHGPHDAFRASLSCVLPDFLQGRAPGSYVGACFDRLLHPDAVPALFRTVPVFTLPSQLPDFLGALQQPRAPRSGRLQERAEQVSRALQPALDSYFHPPGTPAPGRGVGPGAGPGAGDGT

SEQ ID NO: 80348 - protein, 688 aa, Artificial Sequence
  derived and/or modified sequence
MPVPWFLLSLALGRSPVVLSLERLVGPQDATHCSPGLSCRLWDSDILCLPGDIVPAPGPVLAPTHLQTELVLRCQKETDCDLCLRVAVHLAVHGHWEEPEDEEKFGGAADSGVEEPRNASLQAQVVLSFQAYPTARCVLLEVQVPAALVQFGQSVGSVVYDCFEAALGSEVRIWSYTQPRYEKELNHTQQLPALPWLNVSADGDNVHLVLNVSEEQHFGLSLYWNQVQGPPKPRWHKNLTGPQIITLNHTDLVPCLCIQVWPLEPDSVRTNICPFREDPRAHQNLWQAARLQLLTLQSWLLDAPCSLPAEAALCWRAPGGDPCQPLVPPLSWENVTVDVNSSEKLQLQECLWADSLGPLKDDVLLLETRGPQDNRSLCALEPSGCTSLPSKASTRAARLGEYLLQDLQSGQCLQLWDDDLGALWACPMDKYIHKRWALVWLACLLFAAALSLILLLKKDHAKGWLRLLKQDVRSGAAARGRAALLLYSADDSGFERLVGALASALCQLPLRVAVDLWSRRELSAQGPVAWFHAQRRQTLQEGGVVVLLFSPGAVALCSEWLQDGVSGPGAHGPHDAFRASLSCVLPDFLQGRAPGSYVGACFDRLLHPDAVPALFRTVPVFTLPSQLPDFLGALQQPRAPRSGRLQERAEQVSRALQPALDSYFHPPGTPAPGRGVGPGAGPGAGDGT

SEQ ID NO: 80349 - DNA, 1641 bp, Artificial Sequence
  derived and/or modified sequence
atggcttatcccaccgcgcggtgcgttctcttggaggtgcaggttcccgcagccctggtgcagttcggacagtccgtggggtcggtagtctacgattgtttcgaggcagcgctgggcagcgaagttcggatttggtcctatactcagccaagatatgagaaagaactgaaccatacccagcagctgcccgcactgccatggttaaacgtgtctgctgatggggacaacgtgcatttggttctgaatgtgtcagaggaacagcatttcggcctgagcctgtattggaatcaggtgcagggacccccaaaaccccgctggcacaagaatctcaccgggccgcaaattataacactcaatcatactgatctggtgccttgcctttgtattcaagtatggcccctcgagcccgacagcgttagaacaaacatatgtccatttcgtgaggatcccagagcacaccagaacctatggcaagcagctagactacagttgctgaccctccagtcctggctactggacgctccatgttcccttcccgcagaagcagcactctgttggcgcgcccctggtggggatccttgccagccgctggttccccccctttcctgggagaacgtgactgttgatgtgaactcctccgaaaagctacagctgcaggaatgtttgtgggcggacagcctgggccctctgaaagatgatgtgcttcttctagaaacccggggacctcaggataatcggtccctgtgcgccctggaaccgagtggatgtaccagcctgccctctaaggcctccacccgtgccgcccggctgggagagtatcttcttcaggatctacagtcaggccagtgcctgcagctctgggacgacgatctcggcgccttgtgggcatgtcctatggacaagtacattcataaaaggtgggcgttagtttggctggcctgcctcctttttgctgcagcattgtccctgatattgttactgaagaaagaccacgcaaaggctgcggctagaggcagggccgccttactcctttattcggccgatgacagtggatttgagcggcttgttggagcactggcttcagccctgtgtcaactccctctcagagtggccgttgacttgtggagcaggagggaactgtccgcccagggaccagtcgcatggttccatgcccagagaagacagaccctgcaagaggggggggtagtggtcctgctgtttagcccgggcgctgtcgcattgtgcagcgaatggctccaagatggagtttctgggccaggagcacatggcccacatgatgccttccgggccagtttgagctgtgtgctgcccgattttttgcagggcagagcgcctggttcttatgtcggcgcttgtttcgacagactgttgcaccctgacgctgttcctgcgctctttcgcaccgtgccggtatttacactaccctctcaactgcctgacttcctgggcgccctgcagcagccaagggctccccggtcgggaaggctgcaggaaagggccgagcaagtgtctagggccttgcagcccgccctcgacagctattttcatcctcctggtacaccagcccctggcaggggagtgggccccggcgcgggccccggcgctggggacggcacatag

SEQ ID NO: 80350 - DNA, 213 bp, Artificial Sequence
  derived and/or modified sequence
atgcctgtcccttggtttctgttatcgctggcgttgggtcgctctcccgtggtgctatccctggagcgcttggtgggacctcaggatgcgactcactgctccccagggctgagctgtcgcctgtgggtcacatattctgcctgtttggggacttcatgtctgttacgcgccccatgctggaggctgcgaacctgtcggcagtcatggtgttag

SEQ ID NO: 80351 - DNA, 2067 bp, Artificial Sequence
  derived and/or modified sequence
atgccagtcccgtggtttttgttgtccctggcattgggaagaagtcctgtggtcctgtccttggaaagactcgtaggaccccaggatgccactcactgcagtcccggacttagctgccgactgtgggattccgatatcttatgtttaccaggagatattgtgccagcacccggaccagtcctggccccaacccatctgcagactgagctagtattacgatgccagaaagagaccgattgcgatctgtgcctgcgggtggctgtgcaccttgccgtgcacgggcattgggaggagcctgaagatgaagagaaatttggcggcgctgctgattccggtgtggaagagccccgcaacgcctccctgcaggcacaggtggttctgtcatttcaggcataccccacagctcgttgcgttctgctggaggtccaggtgccagccgctctggtacagttcggacaatctgtagggtccgtggtatatgattgtttcgaggctgccctcgggagtgaagtacgcatctggagttatactcaacccaggtacgagaaagagttgaatcacacccagcaactgcccgccctcccgtggctcaatgtctccgccgacggagataatgtacatttagttctcaatgtaagcgaagaacagcactttggtctctctctatactggaaccaggtgcagggaccacctaagcctagatggcacaagaacctgacagggcctcagataatcactctgaaccatactgacctggtgccctgcttgtgtatacaggtgtggccactggagcctgattcagttcgcaccaacatctgccctttccgggaggacccccgcgctcaccaaaatctgtggcaggctgcacgcctacagttactcactctgcagagctggctacttgacgccccctgctccttacccgccgaagcagccctatgttggcgagcccctggaggtgacccttgccagcccttagtgccccccctgtcttgggagaacgtcacagtggacgtgaattccagcgagaagctgcagctgcaggaatgcctatgggccgactcactcgggcctctgaaggatgacgtcttgctgttggagaccaggggcccacaagataaccggtctctgtgtgccctggaaccatctggatgtaccagtctgccctctaaagcaagtacaagggccgcgcggcttggagaatacctcttacaggaccttcagagcgggcagtgtttacagctttgggacgatgacctcggcgctttatgggcctgtcccatggacaagtatatccacaaaaggtgggcccttgtctggctggcatgtctcctgttcgccgccgcattgtcgctgatcctgctgctgaagaaggatcatgcaaaggggtggttgcgtttactcaagcaagacgttcggagcggcgccgccgcccggggccgggcagccctcttgctctactctgccgatgattcaggcttcgaaaggcttgtgggagccctcgcaagtgccctctgccagctgcctctgcgagtggcagttgatctgtggagccggagagagctttctgcccaagggccggttgcttggttccatgctcagcgcaggcagacgcttcaggaagggggtgttgttgtgctcctgttctcccctggcgccgttgcgctgtgcagcgaatggctgcaggatggagtcagtggccccggagcccacgggccacatgatgcatttagggcctccctgtcatgtgtgttacccgactttctgcaagggagagctcccggttcctatgtgggagcctgctttgacaggctgctccaccccgacgccgtgccagctctgttccgcacagtccccgtgtttactctgccatcccaactgcctgattttctcggggctctccaacagcccagggcccctaggtctggacgcctccaggagcgggccgagcaagtctcgagggcactgcaaccagctctagattcctacttccatccgcccggtacccctgctcccggccgaggagtggggccaggagctggtcctggggccggagatggtacgtag

SEQ ID NO: 80352 - DNA, 2108 bp, Artificial Sequence
  derived and/or modified sequence
agagtgcacaaactacccagcacagccccctccgccccctctggaggctgaagagggattccagcccctgccacccacagacacgggctgactggggtgtctgccccccttgggggggggcagcacagggcctcaggcctgggtgccacctggcacctagaagatgcctgtgccctggttcttgctgtccttggcactgggccgaagcccagtggtcctttctctggagaggcttgtggggcctcaggacgctacccactgctctccgggcctctcctgccgcctctgggacagtgacatactctgcctgcctggggacatcgtgcctgctccgggccccgtgctggcgcctacgcacctgcagacagagctggtgctgaggtgccagaaggagaccgactgtgacctctgtctgcgtgtggctgtccacttggccgtgcatggcctaccctactgcccgctgcgtcctgctggaggtgcaagtgcctgctgcccttgtgcagtttggtcagtctgtgggctctgtggtatatgactgcttcgaggctgccctagggagtgaggtacgaatctggtcctatactcagcccaggtacgagaaggaactcaaccacacacagcagctgcctgccctgccctggctcaacgtgtcagcagatggtgacaacgtgcatctggttctgaatgtctctgaggagcagcacttcggcctctccctgtactggaatcaggtccagggccccccaaaaccccggtggcacaaaaacctgactggaccgcagatcattaccttgaaccacacagacctggttccctgcctctgtattcaggtgtggcctctggaacctgactccgttaggacgaacatctgccccttcagggaggacccccgcgcacaccagaacctctggcaagccgcccgactgcaactgctgaccctgcagagctggctgctggacgcaccgtgctcgctgcccgcagaagcggcactgtgctggcgggctccgggtggggacccctgccagccactggtcccaccgctttcctgggagaacgtcactgtggacgtgaacagctcggagaagctgcagctgcaggagtgcttgtgggctgactccctggggcctctcaaagacgatgtgctactgttggagacacgaggcccccaggacaacagatccctctgtgccttggaacccagtggctgtacttcactacccagcaaagcctccacgagggcagctcgccttggagagtacttactacaagacctgcagtcaggccagtgtctgcagctatgggacgatgacttgggagcgctatgggcctgccccatggacaaatacatccacaagcgctgggccctcgtgtggctggcctgcctactctttgccgctgcgctttccctcatcctccttctcaaaaaggatcacgcgaaagcggccgccaggggccgcgcggctctgctcctctactcagccgatgactcgggtttcgagcgcctggtgggcgccctggcgtcggccctgtgccagctgccgctgcgcgtggccgtagacctgtggagccgtcgtgaactgagcgcgcaggggcccgtggcttggtttcacgcgcagcggcgccagaccctgcaggagggcggcgtggtggtcttgctcttctctcccggtgcggtggcgctgtgcagcgagtggctacaggatggggtgtccgggcccggggcgcacggcccgcacgacgccttccgcgcctcgctcagctgcgtgctgcccgacttcttgcagggccgggcgcccggcagctacgtgggggcctgcttcgacaggctgctccacccggacgccgtacccgcccttttccgcaccgtgcccgtcttcacactgccctcccaactgccagacttcctgggggccctgcagcagcctcgcgccccgcgttccgggcggctccaagagagagcggagcaagtgtcccgggcccttcagccagccctggatagctacttccatcccccggggactcccgcgccgggacgcggggtgggaccaggcgcgggacctggggcgggggacgggacttaaataaaggcagacgctgtttttctaccc

SEQ ID NO: 80353 - DNA, 2244 bp, Artificial Sequence
  derived and/or modified sequence
aactacccagcacagccccctccgccccctctggaggctgaagagggattccagcccctgccacccacagacacgggctgactggggtgtctgccccccttgggggggggcagcacagggcctcaggcctgggtgccacctggcacctagaagatgcctgtgccctggttcttgctgtccttggcactgggccgaagcccagtggtcctttctctggagaggcttgtggggcctcaggacgctacccactgctctccgggcctctcctgccgcctctgggacagtgacatactctgcctgcctggggacatcgtgcctgctccgggccccgtgctggcgcctacgcacctgcagacagagctggtgctgaggtgccagaaggagaccgactgtgacctctgtctgcgtgtggctgtccacttggccgtgcatgggcactgggaagagcctgaagatgaggaaaagtttggaggagcagctgactcaggggtggaggagcctaggaatgcctctctccaggcccaagtcgtgctctccttccaggcctaccctactgcccgctgcgtcctgctggaggtgcaagtgcctgctgcccttgtgcagtttggtcagtctgtgggctctgtggtatatgactgcttcgaggctgccctagggagtgaggtacgaatctggtcctatactcagcccaggtacgagaaggaactcaaccacacacagcagctgcctgccctgccctggctcaacgtgtcagcagatggtgacaacgtgcatctggttctgaatgtctctgaggagcagcacttcggcctctccctgtactggaatcaggtccagggccccccaaaaccccggtggcacaaaaacctgactggaccgcagatcattaccttgaaccacacagacctggttccctgcctctgtattcaggtgtggcctctggaacctgactccgttaggacgaacatctgccccttcagggaggacccccgcgcacaccagaacctctggcaagccgcccgactgcaactgctgaccctgcagagctggctgctggacgcaccgtgctcgctgcccgcagaagcggcactgtgctggcgggctccgggtggggacccctgccagccactggtcccaccgctttcctgggagaacgtcactgtggacgtgaacagctcggagaagctgcagctgcaggagtgcttgtgggctgactccctggggcctctcaaagacgatgtgctactgttggagacacgaggcccccaggacaacagatccctctgtgccttggaacccagtggctgtacttcactacccagcaaagcctccacgagggcagctcgccttggagagtacttactacaagacctgcagtcaggccagtgtctgcagctatgggacgatgacttgggagcgctatgggcctgccccatggacaaatacatccacaagcgctgggccctcgtgtggctggcctgcctactctttgccgctgcgctttccctcatcctccttctcaaaaaggatcacgcgaaagggtggctgaggctcttgaaacaggacgtccgctcgggggcggccgccaggggccgcgcggctctgctcctctactcagccgatgactcgggtttcgagcgcctggtgggcgccctggcgtcggccctgtgccagctgccgctgcgcgtggccgtagacctgtggagccgtcgtgaactgagcgcgcaggggcccgtggcttggtttcacgcgcagcggcgccagaccctgcaggagggcggcgtggtggtcttgctcttctctcccggtgcggtggcgctgtgcagcgagtggctacaggatggggtgtccgggcccggggcgcacggcccgcacgacgccttccgcgcctcgctcagctgcgtgctgcccgacttcttgcagggccgggcgcccggcagctacgtgggggcctgcttcgacaggctgctccacccggacgccgtacccgcccttttccgcaccgtgcccgtcttcacactgccctcccaactgccagacttcctgggggccctgcagcagcctcgcgccccgcgttccgggcggctccaagagagagcggagcaagtgtcccgggcccttcagccagccctggatagctacttccatcccccggggactcccgcgccgggacgcggggtgggaccaggcgcgggacctggggcgggggacgggacttaaataaaggcagacgctgtttttcta

SEQ ID NO: 80354 - DNA, 1641 bp, Artificial Sequence
  derived and/or modified sequence
atggcctaccccacagcccgctgtgtgctgctggaggtgcaggtgcctgctgccctggtgcagtttggccagagcgtgggctctgtggtgtatgactgctttgaggccgccctgggcagcgaggtgcgcatctggagctacacccagcccaggtatgagaaggagctgaaccacacccagcagctgcctgccctgccctggctgaatgtgtctgcagatggagacaacgtgcacctggtgctgaatgtgtctgaggagcagcacttcggcctgagcctgtactggaaccaggtgcagggcccccccaagccccgctggcacaagaacctgaccggcccccagatcatcaccctgaaccacacagacctggtgccctgcctgtgcatccaggtgtggcccctggagccagacagcgtgaggaccaacatctgccccttccgggaggacccccgggcccaccagaacctgtggcaggccgcccggctgcagctgctgaccctgcagagctggctgctggatgccccctgcagcctgcctgctgaggccgccctgtgctggagggcccctggaggagacccctgccagcccctggtgccccccctgtcctgggagaatgtgacagtggatgtgaacagcagcgagaagctgcagctgcaggagtgcctgtgggccgacagcctgggccccctgaaggatgatgtgctgctgctggagacccggggcccccaggacaacagaagcctgtgtgccctggagcccagcggctgcaccagcctgcccagcaaggccagcaccagggctgcccggctgggggagtacctgctgcaggacctgcagagcggccagtgcctgcagctgtgggatgatgacctgggcgccctgtgggcctgccccatggacaagtacatccacaagcgctgggccctggtgtggctggcctgcctgctgtttgctgctgccctgagcctcatcctgctgctgaagaaggaccacgccaaggctgctgcccggggccgggccgccctgctgctgtacagcgcagatgacagcggctttgagcggctggtgggcgccctggccagcgccctgtgccagctgcccctgcgggtggccgtggacctgtggagcagaagagagctgagcgcccagggccctgtggcctggttccacgcccagaggcggcagaccctgcaggagggcggcgtggtggtgctgctcttcagccctggagctgtggccctgtgcagcgagtggctgcaggatggagtgtctggccctggggcccacggcccccatgatgccttccgggccagcctgagctgtgtgctgcctgacttcctgcagggccgggcccctggcagctatgtgggcgcctgctttgaccggctgctgcacccagatgctgtgcctgccctcttcagaacagtgcctgtgttcaccctgcccagccagctgcctgacttcctgggcgccctgcagcagccccgggcccccaggagcggccgcctgcaggagagagctgagcaggtgtcccgggccctgcagcctgccctggacagctacttccaccccccaggcaccccagcccctggccggggcgtgggccctggggccggccctggagctggagatggcacctag

SEQ ID NO: 80355 - DNA, 213 bp, Artificial Sequence
  derived and/or modified sequence
atgcctgtgccctggttcctgctgagcctggccctgggccgcagccctgtggtgctgagcctggagcggctggtgggcccccaggatgccacccactgcagccctggcctgagctgccgcctgtgggtgacctacagcgcctgcctgggcaccagctgcctgctgcgggccccctgctggaggctgcggacctgccggcagagctggtgctag

SEQ ID NO: 80356 - DNA, 2067 bp, Artificial Sequence
  derived and/or modified sequence
atgcctgtgccctggttcctgctgagcctggccctgggccgcagccctgtggtgctgagcctggagcggctggtgggcccccaggatgccacccactgcagccctggcctgagctgccgcctgtgggacagcgacatcctgtgcctgcccggggacatcgtgcctgcccctggccctgtgctggcccccacccacctgcagacagagctggtgctgcgctgccagaaggagacagactgtgacctgtgcctgcgggtggccgtgcacctggccgtgcacggccactgggaggagccagaagatgaggagaagtttggaggagctgctgacagcggcgtggaggagcccagaaatgccagcctgcaggcccaggtggtgctgtccttccaggcctaccccacagcccgctgtgtgctgctggaggtgcaggtgcctgctgccctggtgcagtttggccagagcgtgggctctgtggtgtatgactgctttgaagctgccctgggcagcgaggtgcgcatctggagctacacccagcccaggtatgagaaggagctgaaccacacccagcagctgcctgccctgccctggctgaatgtgtctgcagatggagacaacgtgcacctggtgctgaatgtgtctgaggagcagcacttcggcctgagcctgtactggaaccaggtgcagggcccccccaagccccgctggcacaagaacctgaccggcccccagatcatcaccctgaaccacacagacctggtgccctgcctgtgcatccaggtgtggcccctggagccagattctgtgaggaccaacatctgccccttccgggaggacccccgggcccaccagaacctgtggcaggccgcccggctgcagctgctgaccctgcagagctggctgctggatgccccctgcagcctgcctgctgaggccgccctgtgctggagggcccctggaggagacccctgccagcccctggtgccccccctgtcctgggagaatgtgacagtggatgtgaacagcagcgagaagctgcagctgcaggagtgcctgtgggccgacagcctgggccccctgaaggatgatgtgctgctgctggagacccggggcccccaggacaacagaagcctgtgtgccctggagcccagcggctgcaccagcctgcccagcaaggccagcacccgggccgcccggctgggggagtacctgctgcaggacctgcagagcggccagtgcctgcagctgtgggatgatgacctgggcgccctgtgggcctgccccatggacaagtacatccacaagcgctgggccctggtgtggctggcctgcctgctgtttgctgctgccctgagcctcatcctgctgctgaagaaggaccacgccaagggctggctgcggctgctgaagcaggatgtgcgcagcggggctgctgcccggggccgggccgccctgctgctgtacagcgcagatgacagcggctttgagcggctggtgggcgccctggccagcgccctgtgccagctgcccctgcgggtggccgtggacctgtggagcagaagagagctgagcgcccagggccctgtggcctggttccacgcccagaggcggcagaccctgcaggagggcggcgtggtggtgctgctcttcagccctggagctgtggccctgtgcagcgagtggctgcaggatggagtgtctggccctggggcccacggcccccatgatgccttccgggccagcctgagctgtgtgctgcctgacttcctgcagggccgggcccctggcagctatgtgggcgcctgctttgaccggctgctgcacccagatgctgtgcctgccctcttcagaacagtgcctgtgttcaccctgcccagccagctgcctgacttcctgggcgccctgcagcagccccgggcccccaggagcggccgcctgcaggagagagctgagcaggtgtcccgggccctgcagcctgccctggacagctacttccaccccccaggcaccccagcccctggccggggcgtgggccctggggccggccctggagctggagatggcacctag

SEQ ID NO: 80357 - DNA, 1641 bp, Artificial Sequence
  derived and/or modified sequence
atggcctaccccaccgcccggtgcgtgctgctggaggtgcaggtgcccgccgccctggtgcagttcggccagtccgtggggagcgttgtgtacgactgctttgaggccgctctcggcagcgaagtccgaatatggagttacacacaaccacgctatgagaaagagcttaaccatacccagcagcttccggccctgccgtggctgaatgtatcagcagatggggataatgtgcatctggtgctgaacgtgtcagaggaacagcacttcggtctcagtctttattggaatcaggtgcagggcccccccaagcctcggtggcataagaacctgaccggaccacagattatcactctgaatcataccgacttagtgccatgtctgtgtatccaagtttggcctctggagcccgactccgttagaaccaatatctgcccctttagagaagatccccgagctcatcaaaacctttggcaagcggctcgccttcaactgctgacactacaaagctggcttctagacgccccctgttcactacctgcagaggctgcactgtgctggagggcacccggcggggatccctgccagcctcttgtcccacctctctcatgggaaaatgtaacagttgatgtcaacagctccgaaaagcttcagctgcaggagtgtttatgggcagattctttgggtccgctgaaagacgacgtgctgctgctggagacccgcggtcctcaggataacaggtcactgtgcgccctggagccttccgggtgcacgtctctgccctctaaggccagcacccgggctgctcgccttggagagtaccttctgcaggacctgcagagcgggcagtgtcttcaattgtgggatgatgatctcggagctctgtgggcctgtcccatggataaatatatccacaaaagatgggccctagtctggctggcatgtttgctgtttgcagctgctttgtccctgatcctgctgcttaaaaaggaccatgccaaagccgcagcacgggggcgggcagctctgctcctttattcagctgacgacagtggcttcgagaggctggtgggcgctctggcaagcgcgttgtgtcagttacccctgcgggtggcagttgacctctggagtcgtagagagttatctgctcaaggtccggttgcatggtttcacgcccagcggcgacagaccctgcaggagggcggtgttgtagtgctgttgttctctcccggcgccgtggccctgtgcagtgaatggctgcaagatggtgtgagcggccccggtgcccacggccctcacgatgccttcagggcctccctcagttgtgttctgcccgatttcctgcagggccgggctccaggctcctacgttggtgcatgttttgataggctgctccaccctgacgccgtgcctgccctttttaggactgtgcccgtgtttacactgcccagtcagttgcccgatttcctgggcgccctgcagcagccgcgcgccccccgctccggacgtctgcaggagcgggcggagcaggtgtcacgagcactgcagcccgcactcgattcatattttcacccccccggcacgcccgccccaggcaggggagtgggcccaggcgcagggccgggtgccggagacggcacgtag

SEQ ID NO: 80358 - DNA, 213 bp, Artificial Sequence
  derived and/or modified sequence
atgcccgtgccctggttcctgctgagcctggccctgggccggagcccagtggtgttatcacttgaaaggctagtgggaccccaagacgccactcattgtagtcctgggcttagctgccgcctgtgggttacttactccgcttgccttggcaccagttgcctactccgggccccctgctggcgtctgcggacatgtcgccagagctggtgctag

SEQ ID NO: 80359 - DNA, 2067 bp, Artificial Sequence
  derived and/or modified sequence
atgcccgtgccctggttcctgctgagcctggccctgggccggagccccgtagtgctgtccttagagaggctcgttggaccccaagacgcaacccattgctcccccggcctgtcttgcaggctgtgggactcagacattctctgcctcccaggcgatattgtccctgcgcccgggccagtgctcgctccaacgcatctgcaaacagaactggtgctccggtgccagaaggagacagactgtgacctgtgcctacgtgtagccgtccacctggcggtacatgggcattgggaggaacccgaggatgaagaaaaattcggaggggccgccgactcaggcgttgaggagccgaggaatgcgtctctacaggcacaggtggtactatctttccaggcctatccaactgccaggtgtgtcctgctcgaggtgcaggttccggcagccctcgttcagttcggccaatctgtggggtccgtagtgtacgactgttttgaagccgctcttggtagtgaggtgcgcatttggtcatatacacaacctcgatatgagaaggagctaaaccacactcaacaactgcccgctttgccctggctgaatgtgtctgctgacggtgataatgtgcacctggttcttaacgtgtctgaagaacagcatttcggtctctcactatattggaaccaggtgcaggggccccccaaaccaagatggcacaagaacctcacaggtccacaaattattaccctgaaccacaccgacctcgtcccctgtctctgcatccaggtatggcctctggagcccgattctgtgcgaactaatatttgtccctttagggaggacccaagagctcaccagaatttatggcaagcagctcgtttgcagctcttaacactccagtcctggctgctcgatgccccttgttcactccctgccgaagcagcgctatgttggagggcacccggcggcgatccttgtcagcctttagtaccccctctctcttgggagaacgttaccgtggatgtgaattctagcgagaagcttcagcttcaagagtgtctgtgggctgattccctggggccactcaaggacgacgtgctgctgttggaaactagaggcccacaggataataggtcgctttgcgctcttgagcctagtggatgtacctcactcccatccaaagctagtacccgggccgccagactgggtgagtatctcctgcaagacttgcagagtggacagtgcctgcagctgtgggacgacgacttaggagccctctgggcttgtccaatggacaagtatatccacaaaaggtgggccttggtctggctcgcttgcctgctgtttgccgccgctctgtcactgattctgctgctgaagaaagaccacgctaaggggtggctcagactcctgaaacaggatgtacgatccggtgccgctgcacggggccgggcagccttactcctctatagtgccgatgacagcggtttcgaacggctggtgggagcgcttgcctcagccctgtgtcagcttcctctgcgagtggctgttgacctctggagcagacgggagctctcagcccaggggcctgtggcttggtttcacgctcagcggcgacaaacacttcaggaggggggtgtggttgttctgctgttttcccctggcgctgtggcgctgtgcagtgagtggcttcaggacggagtgtctggacccggggcccatggtccgcacgatgctttccgcgcaagcctctcatgcgtgctgcctgatttcctacagggccgcgctcctggttcatatgtgggtgcttgttttgatagactccttcaccctgatgcggtgcccgcactgttccgcacagttcccgtgtttacattgcctagtcagctgccagatttcctcggagcattacagcaacctcgagcacctcgttctggccgtttgcaggaacgcgccgagcaggtttcacgcgctctgcagccagcgctcgattcctattttcaccctccaggaactcccgcccctggaaggggcgtgggccccggggctgggcccggcgctggcgatggaacctag

SEQ ID NO: 80360 - DNA, 1641 bp, Artificial Sequence
  derived and/or modified sequence
atggcctatccaactgcaaggtgtgtgctgctggaggtgcaggtgcctgccgctctggtacagttcggtcaatccgtcggctccgtggtgtacgattgtttcgaggcagcccttgggagcgaagttcggatctggtcctacacacagccacgatacgagaaagaactaaatcatactcaacagctgccggcactgccctggctcaacgtgagtgccgatggagacaacgtacacctcgtattgaacgtgtctgaggagcaacattttggactttccttgtattggaatcaggtacaaggaccaccaaaacccagatggcacaaaaacttaaccggcccacagatcatcacattaaatcacactgatttagtcccatgcctttgtatacaggtgtggcctctggagccagacagtgtgcggactaatatctgtccatttagagaagacccacgtgcccaccagaatttgtggcaggccgcaagactgcagctgctgactttgcagtcttggctgcttgacgccccatgtagcttgccagctgaagctgccctgtgttggagagcccctgggggtgacccgtgtcagcctttggtgcctcccttgtcgtgggaaaatgtcacagtagatgttaactcctccgagaaacttcagttgcaggagtgtctgtgggccgacagtctgggtcctctgaaggacgacgtgctccttttggagacccgaggtccacaagacaatcgatctttgtgtgcccttgagccttctggttgcacatccctaccctccaaagcatccacacgggctgcgcgtcttggcgagtatctgctgcaggatcttcagtctggccagtgccttcagctgtgggatgatgacctgggtgctttgtgggcttgtcccatggacaagtacatacataagcgctgggcactggtgtggctcgcgtgtttattgttcgcagccgcactgagtctgatcctgctcctgaaaaaagaccacgctaaggccgctgccagggggcgagcagctttgctactctatagcgccgatgactctggatttgagaggctcgtgggggctctggccagtgccctttgccagttgccacttcgggtcgctgtggacctatggagtagaagagagctttctgcccaggggcctgtggcctggttccacgctcagcggagacagacattgcaggaaggtggagtggtcgtgttgctgttctctccaggagctgtcgcactctgcagcgaatggctgcaggacggtgtgtccgggcctggcgctcatggaccccatgacgcctttagagccagcctgtcttgtgttctgcccgatttccttcagggcagagcacctgggagttacgtaggagcctgttttgatcgtctcttgcaccctgacgccgtgccggctctcttccggaccgtgcctgtgttcaccctgccatctcaactgcctgatttcctgggcgctttgcagcagccacgggctcctagatctggacgtctgcaggagagagccgaacaagtcagtcgagcactacagcccgcactggactcctactttcacccgcctgggacccctgcccctggaaggggtgtcggaccaggcgctggcccaggagccggagatggcacttag

SEQ ID NO: 80361 - DNA, 213 bp, Artificial Sequence
  derived and/or modified sequence
atgccagtaccctggtttctgctatctttggctctgggacgctcccccgtggtcctctcactggaacggctggtggggccacaggacgccactcactgctcacccggtcttagctgtcgtctgtgggttacatatagtgcctgtctcggcacctcatgtctcctgcgagccccttgctggagactacgcacctgtcgacagtcgtggtgttag

SEQ ID NO: 80362 - DNA, 2067 bp, Artificial Sequence
  derived and/or modified sequence
atgcccgtgccatggttcctcctctctcttgccctcggacgaagtcccgtggttctgtcactggagcggttggtggggcctcaggatgccactcattgctctcccggactatcctgtcggctctgggactcggacatcttatgcctccctggcgatattgttcccgctcccggaccggttttggccccaacccacttacagacagaactagttctgcggtgtcagaaggagactgattgcgatctgtgcctccgtgtcgccgtccatctggctgtgcatgggcattgggaggagcctgaggatgaggagaaattcggcggtgccgcagatagtggcgttgaagagcccaggaacgcctccctacaggcgcaagtcgtgctgtctttccaggcttaccctactgccagatgcgtgctgctagaagtgcaggtgcccgcagccctggtccaatttgggcagtctgtgggttcagtggtgtatgactgcttcgaggcggcacttgggtctgaggtacgcatttggagctacacgcagccaagatacgagaaggaactgaatcacacccagcaattgccagccctcccatggctcaatgtgtccgccgacggcgataatgtccatcttgtgctgaacgtttctgaagaacagcactttggattgtccctgtattggaaccaagtgcagggacccccaaagccaagatggcacaaaaatctaacagggccacagattattactctgaatcatactgatttagtcccatgcctctgcattcaagtatggcccctggaaccggactctgtccgcacaaatatctgccctttcagggaagacccccgagctcaccaaaatctgtggcaagccgctcggttgcagctgctgaccctgcaatcctggttgttagacgcgccttgtagcctgcctgcagaggccgctctgtgttggagagccccaggtggcgatccctgtcagcctctggtacccccattgtcttgggagaatgtgaccgtggacgtaaactcgtctgagaaactgcaactccaggaatgcttgtgggcggattccttaggcccactaaaagacgatgtgcttctgttagaaacccggggaccgcaggacaaccgttcactgtgcgctctcgagcccagcgggtgcacatcacttccatccaaggcgtctactagagcagcccgtctgggagaatacctgttgcaagacttgcagtctggtcagtgcttgcaactgtgggatgatgatctcggagccctgtgggcctgccccatggacaagtacatccacaaacgctgggccttggtctggttagcgtgtttgctatttgccgcagcattatcccttatcttgctcctcaaaaaagatcatgcgaaaggatggctccgactgcttaaacaggacgttagatccggggctgcagctagggggcgagcagctctgctcctgtatagcgccgatgatagcggctttgagagactggtaggagccctcgcctctgccctgtgtcagcttcccctcagagtcgccgttgacctttggtctaggagagaactttccgcacagggcccagtggcttggttccatgcccagaggagacagacgcttcaggaggggggtgtcgtggtgttactcttctccccaggtgcagtagcactgtgctccgaatggctccaggacggtgtcagcggccctggggctcacggcccacacgacgccttccgggcttctctgtcatgcgtgctccccgatttccttcaaggtcgtgctccaggctcttacgtaggagcttgcttcgatcgtctgctccaccccgacgccgtgccagcccttttccggaccgtcccagtgttcacgttgcccagccagctgccagactttcttggcgcactccaacagcctagggcacccagaagtggtagactgcaggaaagagctgaacaggtgtctagggctctacagccagccttggactcgtactttcaccccccagggacgcccgctcccggacggggagtaggacctggagctggcccaggagccggagatgggacctag

SEQ ID NO: 80363 - DNA, 1641 bp, Artificial Sequence
  derived and/or modified sequence
atggcctaccccaccgccagatgcgtgctgctggaggtgcaggtgcccgccgccctggtgcagttcggccagagcgtgggcagcgtggtgtacgactgcttcgaggccgccctgggcagcgaggtgagaatctggagctacacccagcccagatacgagaaggagctgaaccacacccagcagctgcccgccctgccctggctgaacgtgagcgccgacggcgacaacgtgcacctggtgctgaacgtgagcgaggagcagcacttcggcctgagcctgtactggaaccaggtgcagggcccccccaagcccagatggcacaagaacctgaccggcccccagatcatcaccctgaaccacaccgacctggtgccctgcctgtgcatccaggtgtggcccctggagcccgacagcgtgagaaccaacatctgccccttcagagaggaccccagagcccaccagaacctgtggcaggccgccagactgcagctgctgaccctgcagagctggctgctggacgccccctgcagcctgcccgccgaggccgccctgtgctggagagcccccggcggcgacccctgccagcccctggtgccccccctgagctgggagaacgtgaccgtggacgtgaacagcagcgagaagctgcagctgcaggagtgcctgtgggccgacagcctgggccccctgaaggacgacgtgctgctgctggagaccagaggcccccaggacaacagaagcctgtgcgccctggagcccagcggctgcaccagcctgcccagcaaggccagcaccagagccgccagactgggcgagtacctgctgcaggacctgcagagcggccagtgcctgcagctgtgggacgacgacctgggcgccctgtgggcctgccccatggacaagtacatccacaagagatgggccctggtgtggctggcctgcctgctgttcgccgccgccctgagcctgatcctgctgctgaagaaggaccacgccaaggccgccgccagaggcagagccgccctgctgctgtacagcgccgacgacagcggcttcgagagactggtgggcgccctggccagcgccctgtgccagctgcccctgagagtggccgtggacctgtggagcagaagagagctgagcgcccagggccccgtggcctggttccacgcccagagaagacagaccctgcaggagggcggcgtggtggtgctgctgttcagccccggcgccgtggccctgtgcagcgagtggctgcaggacggcgtgagcggccccggcgcccacggcccccacgacgccttcagagccagcctgagctgcgtgctgcccgacttcctgcagggcagagcccccggcagctacgtgggcgcctgcttcgacagactgctgcaccccgacgccgtgcccgccctgttcagaaccgtgcccgtgttcaccctgcccagccagctgcccgacttcctgggcgccctgcagcagcccagagcccccagaagcggcagactgcaggagagagccgagcaggtgagcagagccctgcagcccgccctggacagctacttccacccccccggcacccccgcccccggcagaggcgtgggccccggcgccggccccggcgccggcgacggcacctag

SEQ ID NO: 80364 - DNA, 213 bp, Artificial Sequence
  derived and/or modified sequence
atgcccgtgccctggttcctgctgagcctggccctgggcagaagccccgtggtgctgagcctggagagactggtgggcccccaggacgccacccactgcagccccggcctgagctgcagactgtgggtgacctacagcgcctgcctgggcaccagctgcctgctgagagccccctgctggagactgagaacctgcagacagagctggtgctag

SEQ ID NO: 80365 - DNA, 2067 bp, Artificial Sequence
  derived and/or modified sequence
atgcccgtgccctggttcctgctgagcctggccctgggcagaagccccgtggtgctgagcctggagagactggtgggcccccaggacgccacccactgcagccccggcctgagctgcagactgtgggacagcgacatcctgtgcctgcccggcgacatcgtgcccgcccccggccccgtgctggcccccacccacctgcagaccgagctggtgctgagatgccagaaggagaccgactgcgacctgtgcctgagagtggccgtgcacctggccgtgcacggccactgggaggagcccgaggacgaggagaagttcggcggcgccgccgacagcggcgtggaggagcccagaaacgccagcctgcaggcccaggtggtgctgagcttccaggcctaccccaccgccagatgcgtgctgctggaggtgcaggtgcccgccgccctggtgcagttcggccagagcgtgggcagcgtggtgtacgactgcttcgaggccgccctgggcagcgaggtgagaatctggagctacacccagcccagatacgagaaggagctgaaccacacccagcagctgcccgccctgccctggctgaacgtgagcgccgacggcgacaacgtgcacctggtgctgaacgtgagcgaggagcagcacttcggcctgagcctgtactggaaccaggtgcagggcccccccaagcccagatggcacaagaacctgaccggcccccagatcatcaccctgaaccacaccgacctggtgccctgcctgtgcatccaggtgtggcccctggagcccgacagcgtgagaaccaacatctgccccttcagagaggaccccagagcccaccagaacctgtggcaggccgccagactgcagctgctgaccctgcagagctggctgctggacgccccctgcagcctgcccgccgaggccgccctgtgctggagagcccccggcggcgacccctgccagcccctggtgccccccctgagctgggagaacgtgaccgtggacgtgaacagcagcgagaagctgcagctgcaggagtgcctgtgggccgacagcctgggccccctgaaggacgacgtgctgctgctggagaccagaggcccccaggacaacagaagcctgtgcgccctggagcccagcggctgcaccagcctgcccagcaaggccagcaccagagccgccagactgggcgagtacctgctgcaggacctgcagagcggccagtgcctgcagctgtgggacgacgacctgggcgccctgtgggcctgccccatggacaagtacatccacaagagatgggccctggtgtggctggcctgcctgctgttcgccgccgccctgagcctgatcctgctgctgaagaaggaccacgccaagggctggctgagactgctgaagcaggacgtgagaagcggcgccgccgccagaggcagagccgccctgctgctgtacagcgccgacgacagcggcttcgagagactggtgggcgccctggccagcgccctgtgccagctgcccctgagagtggccgtggacctgtggagcagaagagagctgagcgcccagggccccgtggcctggttccacgcccagagaagacagaccctgcaggagggcggcgtggtggtgctgctgttcagccccggcgccgtggccctgtgcagcgagtggctgcaggacggcgtgagcggccccggcgcccacggcccccacgacgccttcagagccagcctgagctgcgtgctgcccgacttcctgcagggcagagcccccggcagctacgtgggcgcctgcttcgacagactgctgcaccccgacgccgtgcccgccctgttcagaaccgtgcccgtgttcaccctgcccagccagctgcccgacttcctgggcgccctgcagcagcccagagcccccagaagcggcagactgcaggagagagccgagcaggtgagcagagccctgcagcccgccctggacagctacttccacccccccggcacccccgcccccggcagaggcgtgggccccggcgccggccccggcgccggcgacggcacctag

SEQ ID NO: 80366 - DNA, 1196 bp, Artificial Sequence
  derived and/or modified sequence
actacattgcccagtaacctcctgggctccgctgtgtttttctattctggggtgtaaggggcagctggaccactccagctgggactgctaggaaggttgcgggtccacccggccgagccgaacgagggaaatggtcctcacccggccactcgccggttgaaaaggggccgccctggcagggaagcggccgccgcggcgcggtgcagcgcagcggcgagaaggagtgcgttatcgtcttgcgctactgctgaatgtccgtcccggaggaggaggagaggcttttgccgctgacccagagatggccccgagcgagcaaattcctactgtccggctgcgcggctaccgtggccgagctagcaacctttcccctggatctcacaaaaactcgactccaaatgcaaggagaagcagctcttgctcggttgggagacggtgcaagagaatctgccccctataggggaatggtgcgcacagctctagggatcattgaagaggaaggctttctaaagctttggcaaggagtgacacccgccatttacagacacgtagtgtattctggaggtcgaatggtcacatatgaacatctccgagaggttgtgtttggcaaaagtgaagatgagcattatcccctttggaaatcagtcattggagggatgatggctggtgttattggccagtttttagccaatccaactgacctagtgaaggttcagatgcaaatggaaggaaaaaggaaactggaaggaaaaccattgcgatttcgtggtgtacatcatgcatttgcaaaaatcttagctgaaggaggaatacgagggctttgggcaggctgggtacccaatatacaaagagcagcactggtgaatatgggagatttaaccacttatgatacagtgaaacactacttggtattgaatacaccacttgaggacaatatcatgactcacggtttatcaagtttatgttctggactggtagcttctattctgggaacaccagccgatgtcatcaaaagcagaataatgaatcaaccacgagataaacaaggaaggggacttttgtataaatcatcgactgactgcttgattcaggctgttcaaggtgaaggattcatgagtctatataaaggctttttaccatcttggctgagaatggctgctgtgattgtcaacagcagcaggagccagttgaaggtttga

SEQ ID NO: 80367 - protein, 245 aa, Artificial Sequence
  derived and/or modified sequence
MSVPEEEERLLPLTQRWPRASKFLLSGCAATVAELATFPLDLTKTRLQMQGEAALARLGDGARESAPYRGMVRTALGIIEEEGFLKLWQGVTPAIYRHVVYSGGRMVTYEHLREVVFGKSEDEHYPLWKSVIGGMMAGVIGQFLANPTDLVKVQMQMEGKRKLEGKPLRFRGVHHAFAKILAEGGIRGLWAGWVPNIQRAALVNMGDLTTYDTVKHYLVLNTPLEDNIMTHGLSSDLVGSHKAIQ

SEQ ID NO: 80368 - DNA, 738 bp, Artificial Sequence
  derived and/or modified sequence
atgtctgtcccagaagaggaagaacgtttgctgccactgacccagcggtggccccgagccagcaaatttctcctgagcgggtgtgcagctacagtcgccgaactagcgacttttccgcttgaccttaccaaaacgcgtctccagatgcaaggtgaggccgcattggctcgattaggggacggggctcgagaaagcgctccgtataggggtatggttcggacggccctggggataatcgaggaggagggcttcctcaagctgtggcagggcgtaacgccagctatttataggcacgtagtgtacagcggggggaggatggttacttacgaacaccttagagaggtggtcttcggcaaatccgaggacgagcactacccactgtggaaatctgtgatcggcgggatgatggcaggagtcattgggcagtttctggctaatcctactgatttggtaaaagtccagatgcagatggagggaaaacgaaagctggaaggcaagcctctcagatttcggggagtgcatcacgctttcgccaagattctggctgagggagggatcagaggcctgtgggccgggtgggtgcctaatatccagagagcagccttggtgaatatgggggacttaacaacatatgataccgtaaaacactacttagtactgaatactccattagaagacaacatcatgacccatgggctgagctcagatctcgttggttctcacaaagctatccagtag

SEQ ID NO: 80369 - DNA, 450 bp, Artificial Sequence
  derived and/or modified sequence
atgtcggagtgccccctcattctttatattcataagcatatagacacttattctcagtcctacctgtttaatgacctgttctaccccgtgtatagtgggggcaggatggtcacttacgaacaccttcgggaggttgtgtttggaaagtccgaggatgaacactatcccctgtggaagtccgttataggaggcatgatggccggagtgattgggcagtttcttgccaatccaaccgacctggtgaaggttcaaatgcagatggagggaaagcggaagttagaaggtaagccacttaggttccggggcgtacaccatgcgtttgctaagatcttggcagagggggggatacgaggtctgtgggcaggatgggtccctaatattcaaagggccgcccttgttaacatgggtgatctcactacgtacgacaccgtcaagcactatctggtttag

SEQ ID NO: 80370 - DNA, 738 bp, Artificial Sequence
  derived and/or modified sequence
atgtctgtgcctgaggaggaggagcggctgctgcccctgacccagcgctggccccgggccagcaagttcctgctgagcggctgtgccgccaccgtggccgagctggccaccttccccctggacctgaccaagacccggctgcagatgcagggcgaggccgccctggcccggctgggagatggagcccgggagagcgccccctaccggggcatggtgaggacagccctgggcatcatcgaggaggagggcttcctgaagctgtggcagggcgtgaccccagccatctaccgccacgtggtgtacagcggcggccgcatggtgacctatgagcacctgcgggaggtggtgtttgggaagtcagaagatgagcactaccccctgtggaagagcgtcatcggcggcatgatggccggggtcatcggccagttcctggccaaccccacagacctggtgaaggtgcagatgcagatggagggcaagaggaagctggagggcaagcccctgcgcttccggggcgtgcaccacgcctttgccaagatcctggccgagggcggcatccggggcctgtgggccggctgggtgcccaacatccagagagctgccctggtgaacatgggagacctgaccacctatgacacagtgaagcactacctggtgctgaacacccccctggaggacaacatcatgacccacggcctgagcagtgacctggtgggcagccacaaggccatccagtag

SEQ ID NO: 80371 - DNA, 450 bp, Artificial Sequence
  derived and/or modified sequence
atgtctgaatgtcccctcatcctgtacatccacaagcacatcgacacctacagccagagctacctgttcaatgacctcttctaccctgtgtacagcggcggccgcatggtgacctatgagcacctgcgggaggtggtgtttgggaagtcagaagatgagcactaccccctgtggaagagcgtcatcggcggcatgatggccggggtcatcggccagttcctggccaaccccacagacctggtgaaggtgcagatgcagatggagggcaagaggaagctggagggcaagcccctgcgcttccggggcgtgcaccacgcctttgccaagatcctggccgagggcggcatccggggcctgtgggccggctgggtgcccaacatccagagagctgccctggtgaacatgggagacctgaccacctatgacacagtgaagcactacctggtgtag

SEQ ID NO: 80372 - DNA, 738 bp, Artificial Sequence
  derived and/or modified sequence
atgagcgtgcccgaggaggaggagcggctgctgcccctgacccagaggtggccaagggcatcgaaatttctacttagcggatgtgcggccaccgtggcagagcttgccaccttcccactagatctcactaagacccgcctgcaaatgcagggagaggcagccctggcccgtttgggtgatggggctcgggaatctgctccctacagggggatggtccggacagccctgggaatcattgaggaagagggattccttaagttgtggcagggcgtgacccccgctatctacaggcatgtcgtgtactcaggaggccgtatggtcacgtacgaacatctccgagaggtagtatttggaaaatctgaggacgagcactacccgttgtggaagagtgttattggcggaatgatggcaggagtaattggccaatttctcgccaacccaaccgacttggtcaaggttcagatgcagatggagggaaagaggaaactggaaggcaagccgctccgctttagaggagttcatcatgctttcgcgaagattttggccgagggcggcatcaggggactctgggccggctgggtgccaaatatccagcgtgctgccttggtaaacatgggtgacttgaccacatacgatacagtgaagcactatttagtgctgaacacaccgctggaggataatattatgacgcatggcctatcctccgatctagtggggagccataaagcaatacagtag

SEQ ID NO: 80373 - DNA, 450 bp, Artificial Sequence
  derived and/or modified sequence
atgagcgagtgccccctgatcctgtacatccacaagcacatcgacacctactcacaaagttacctgttcaacgatttgttttatcctgtctactcaggaggacgcatggtcacatatgaacacttacgggaggtggtgttcgggaaatcagaagacgagcactacccgctgtggaagtccgtaattggtgggatgatggctggagtcatagggcagtttctggccaaccccaccgatctagttaaagttcagatgcagatggaaggaaagcgaaagctggagggtaaaccactcaggttcagaggcgtacatcacgctttcgccaagattttagccgagggaggtattcggggcctctgggctggctgggtgcccaacattcaaagggccgccctcgtcaacatgggagatctcactacgtatgacacggtcaagcactatctagtgtag

SEQ ID NO: 80374 - DNA, 738 bp, Artificial Sequence
  derived and/or modified sequence
atgagtgtacctgaggaggaagaacggctcctgcctctcacccagagatggcctcgcgcttctaagtttctcctttctggttgtgccgcaaccgtggcagagttagctacctttcccctggacttgactaagaccagactgcaaatgcaaggggaggccgcattagctcgcctaggtgatggcgcacgggaatcggccccttaccgtggaatggtgagaaccgctttgggaatcatagaggaggagggattcttgaagctctggcaaggtgtaacacctgcaatctacagacacgtggtgtactctggaggcagaatggtaacttatgaacaccttcgcgaagtggtcttcggcaagtcagaggatgagcattatcctctctggaagtcagtgatagggggaatgatggccggagttataggccagtttttagccaatcctacagacctggtcaaggtgcagatgcagatggagggaaagcgcaagctggaaggaaaacccctgcggttcaggggtgtgcaccacgcctttgcaaagatcctggccgaaggtggaattagaggcttatgggctggttgggtgcccaacattcaacgcgctgctctcgtgaacatgggagatctgaccacctatgatacagtgaagcactatctggtcttgaatacgcccctggaagataacatcatgactcacggcctcagctctgatttggtggggtcccataaagcaatccagtag

SEQ ID NO: 80375 - DNA, 450 bp, Artificial Sequence
  derived and/or modified sequence
atgtccgaatgcccacttatcctttacatccacaaacacatcgatacttactcccagagttacctctttaacgacctgttttatcccgtctactcgggagggcgaatggtgacatatgagcatcttagagaagtcgtgttcggcaaatctgaagatgagcactatcccttgtggaaatccgtgatcggcggaatgatggccggagtgatcggccagttcctggcaaatcccactgacctcgtgaaggtccagatgcaaatggagggcaaacgaaagctggaaggcaagcccctaagattccggggagtgcaccacgctttcgctaagattctggccgaagggggaattaggggactgtgggctggctgggtacccaacatccagcgcgctgctctggtgaatatgggcgacctcaccacttacgacactgtcaagcattatctggtgtag

SEQ ID NO: 80376 - DNA, 1322 bp, Artificial Sequence
  derived and/or modified sequence
actacattgcccagtaacctcctgggctccgctgtgtttttctattctggggtgtaaggggcagctggaccactccagctgggactgctaggaaggttgcgggtccacccggccgagccgaacgagggaaatggtcctcacccggccactcgccggttgaaaaggggccgccctggcagggaagcggccgccgcggcgcggtgcagcgcagcggcgagaaggagtgcgttatcgtcttgcgctactgctgaatgtccgtcccggaggaggaggagaggcttttgccgctgacccagagatggccccgagcgagcaaattcctactgtccggctgcgcggctaccgtggccgagctagcaacctttcccctggatctcacaaaaactcgactccaaatgcaaggagaagcagctcttgctcggttgggagacggtgcaagagaatctgccccctataggggaatggtgcgcacagctctagggatcattgaagaggaaggctttctaaagctttggcaaggagtgacacccgccatttacagacacgtagtgtattctggaggtcgaatggtcacatatgaacatctccgagaggttgtgtttggcaaaagtgaagatgagcattatcccctttggaaatcagtcattggagggatgatggctggtgttattggccagtttttagccaatccaactgacctagtgaaggttcagatgcaaatggaaggaaaaaggaaactggaaggaaaaccattgcgatttcgtggtgtacatcatgcatttgcaaaaatcttagctgaaggaggaatacgagggctttgggcaggctgggtacccaatatacaaagagcagcactggtgaatatgggagatttaaccacttatgatacagtgaaacactacttggtattgaatacaccacttgaggacaatatcatgactcacggtttatcaagtgatctggtcggatctcacaaggccatccaatgagaccccgcacagcattttctaaagaagaatcgaagcctgaccactttcaccttgggcaagaaggtttggcctttgagttgctattctatgctgaagagcctgcttagaggaggagtaccaggagggagccagcatttcagatctgaagtagacgataggaatgtggaagaacacatacatagtgcttaagaaatacatttaacctgttatgtcagtatttatcaatgaagtttgataattcacttttctgtcattgttaaagcgtacatactgtaaattaaagggaggtgaatggaaattaatgaataaacattttgagtttccctagtgttg

SEQ ID NO: 80377 - DNA, 659 bp, Artificial Sequence
  derived and/or modified sequence
ctgaaaaacatgtttttgagttgagtcctgaaagacaaggagatgttagtaaagcagagaagggagaattcattctagaaagatcagacagtgtgtgggaagggcagagtctgaaaagagcatgccccatttggagaagcatcaagaagcccacgtgttagaagcaccggccccatgagacaaagacacagctagagagattgactaggccatgtcggaatgtcctcttattttatacatacataagcatatagatacatatagccaaagttacctttttaatgatcttttttacccagtgtattctggaggtcgaatggtcacatatgaacatctccgagaggttgtgtttggcaaaagtgaagatgagcattatcccctttggaaatcagtcattggagggatgatggctggtgttattggccagtttttagccaatccaactgacctagtgaaggttcagatgcaaatggaaggaaaaaggaaactggaaggaaaaccattgcgatttcgtggtgtacatcatgcatttgcaaaaatcttagctgaaggaggaatacgagggctttgggcaggctgggtacccaatatacaaagagcagcactggtgaatatgggagatttaaccacttatgatacagtgaaacactacttggtat

SEQ ID NO: 80378 - DNA, 738 bp, Artificial Sequence
  derived and/or modified sequence
atgagcgtgcccgaggaggaggagagactgctgcccctgacccagagatggcccagagccagcaagttcctgctgagcggctgcgccgccaccgtggccgagctggccaccttccccctggacctgaccaagaccagactgcagatgcagggcgaggccgccctggccagactgggcgacggcgccagagagagcgccccctacagaggcatggtgagaaccgccctgggcatcatcgaggaggagggcttcctgaagctgtggcagggcgtgacccccgccatctacagacacgtggtgtacagcggcggcagaatggtgacctacgagcacctgagagaggtggtgttcggcaagagcgaggacgagcactaccccctgtggaagagcgtgatcggcggcatgatggccggcgtgatcggccagttcctggccaaccccaccgacctggtgaaggtgcagatgcagatggagggcaagagaaagctggagggcaagcccctgagattcagaggcgtgcaccacgccttcgccaagatcctggccgagggcggcatcagaggcctgtgggccggctgggtgcccaacatccagagagccgccctggtgaacatgggcgacctgaccacctacgacaccgtgaagcactacctggtgctgaacacccccctggaggacaacatcatgacccacggcctgagcagcgacctggtgggcagccacaaggccatccagtag

SEQ ID NO: 80379 - DNA, 450 bp, Artificial Sequence
  derived and/or modified sequence
atgagcgagtgccccctgatcctgtacatccacaagcacatcgacacctacagccagagctacctgttcaacgacctgttctaccccgtgtacagcggcggcagaatggtgacctacgagcacctgagagaggtggtgttcggcaagagcgaggacgagcactaccccctgtggaagagcgtgatcggcggcatgatggccggcgtgatcggccagttcctggccaaccccaccgacctggtgaaggtgcagatgcagatggagggcaagagaaagctggagggcaagcccctgagattcagaggcgtgcaccacgccttcgccaagatcctggccgagggcggcatcagaggcctgtgggccggctgggtgcccaacatccagagagccgccctggtgaacatgggcgacctgaccacctacgacaccgtgaagcactacctggtgtag

SEQ ID NO: 80380 - protein, 88 aa, Artificial Sequence
  derived and/or modified sequence
MIARRNPEPLRFLPDEARSLPPPKLTDPRLLYIGFLGYCSGLIDNLIRRRPIATAGLHRQLLYITAFFFAGYYLVKLEAYANLYVDTL

SEQ ID NO: 80381 - DNA, 267 bp, Artificial Sequence
  derived and/or modified sequence
atgatcgccagaagaaaccccgagcccctgagattcctgcccgacgaggccagaagcctgcccccccccaagctgaccgaccccagactgctgtacatcggcttcctgggctactgcagcggcctgatcgacaacctgatcagaagaagacccatcgccaccgccggcctgcacagacagctgctgtacatcaccgccttcttcttcgccggctactacctggtgaagctggaggcctacgccaacctgtacgtggacaccctgtag

SEQ ID NO: 80382 - DNA, 231 bp, Artificial Sequence
  derived and/or modified sequence
atgatcgccagaagaaaccccgagcccctgagattcctgcccgacgaggccagaagcctgcccccccccaagctgaccgaccccagactgctgtacatcggcttcctgggctactgcagcggcctgatcgacaacctgatcagaagaagacccatcgccaccgccggcctgcacagacagctgctgtacatcaccgccttcttctgctggatcctgagctgcaagacctag

SEQ ID NO: 80383 - DNA, 267 bp, Artificial Sequence
  derived and/or modified sequence
atgatcgcccgccggaacccggaacctctgagatttctgcccgacgaggcccggtctcttccccctcctaagctgaccgatccaagactgctatacatcggtttcctgggctactgttctgggcttatcgacaatctgattagacgcaggccgattgccacagccggcttacacaggcagttgttgtacatcacagcattctttttcgccggttactatctggtcaaacttgaagcatacgcgaatctgtatgtcgatactctgtag

SEQ ID NO: 80384 - DNA, 231 bp, Artificial Sequence
  derived and/or modified sequence
atgatcgcgcgcaggaaccctgaaccacttagattccttccagacgaggcccgaagcctgcccccacccaaattgacagaccctaggctcctgtatatagggttcctcggttattgctcaggcttaattgacaatcttatccgcagaaggccaatagccactgctggactacaccgacaactgctgtacattacggcattcttttgttggatcctatcatgtaagacttag

SEQ ID NO: 80385 - DNA, 267 bp, Artificial Sequence
  derived and/or modified sequence
atgattgccaggagaaatcctgagcccctgcgcttcctgcctgatgaggcccggagcctgcccccacccaagctgacagacccccggctgctgtacatcggcttcctgggctactgcagcggcctgattgacaacctgatcagaagaagacccatcgccacagctggcctgcaccggcagctgctgtacatcacagccttcttctttgctggctactacctggtgaagctggaggcctatgccaacctgtatgtggacaccctgtag

SEQ ID NO: 80386 - DNA, 231 bp, Artificial Sequence
  derived and/or modified sequence
atgattgccaggagaaatcctgagcccctgcgcttcctgcctgatgaggcccggagcctgcccccacccaagctgacagacccccggctgctgtacatcggcttcctgggctactgcagcggcctgattgacaacctgatcagaagaagacccatcgccacagctggcctgcaccggcagctgctgtacatcacagccttcttctgctggatcctgagctgcaagacctag

SEQ ID NO: 80387 - DNA, 1888 bp, Artificial Sequence
  derived and/or modified sequence
aggagaaagctgaccgcttaggccggggtagtggtcgtcgtggttttccttgtagttcgtggtctgagaccaggcctcaagtggaaacggcgtcaccatgatcgcacggcggaacccagaacccttacggtttctgccggatgaggcccggagcctgcccccgcccaagctgaccgacccgcggctcctctacatcggcttcttgggctactgctccggcctgattgataacctaatccggcggaggccgatcgcgacggctggtttgcatcgccagcttctatatattacggcctttttttttgctggatattatcttgtaaaacttgaagcttatgctaatctgtatgttgacaccttgtaattaaaatacgtaccatgagtactctgactctttattgttgtaagaaaaatagttcatcatcagagaatggtcagtttccattcacccatctgaaagattttaagatgaggttgaattctagtttagagttagcagactacccaaatctggcccactgccaataaagtctcattggaacacagccatgctcatttgtttacatgttgtttatggcgactgccatgctgcaagagcagaattgagtagttgtgatagagacctatggcctgcaaagcctaattaatatgtagccctttcagaaaaggtttgcctgcccctgtcctagtgcaaagtgaatttagagtgagccagattatggaggattctgtgactcttgccaaataattttgacttcatcctgtaggtattaagtcattaaggcgttttaaatcatacagtcaggtttgtatttctgagctgtctataatgaatgatatagaaggtggtttcgaaggaggagactccagacaaggaaaacagaaatcttatgttgccaagttgtctttgctcttaggtgggttatcctggagaaaatggactcaggagctaatactgtctacagtggagcttggtgcaattagaagcaaaagactgtacctaactggaatgaggttactttttatggcttatcaaatgcttgtcctggcccgatgcagtggctcatgcctgtaatcccagcactttgagaggctgaggcagggcagattgcatgagcccaggagttcgagaccaacttgggcaacatggtgaaacactgtctctacataaaatacaaaaattagctgggcgtggtggcacgttcctgcaatcccagctactcataaggctgaggtgggaggatctattgagccctggaattcgaggatgcaattaattgtggttgtgtcacagttcactgcagcctgggtgacactccagcctgggtgacaaaggagaccccgtcaaaaaaaaaagtacttgtcccaaaagtttttgtttcctagcttagaatttataatcagattaggttttggagataaagtatatgtggtatttttttttttttttttgagacgacagtcttgctctgtcatcaggctggagtgcagtggcgcaatttcggctcactgcaacctccacctcctgggttcaagcaattctcctgcctcagcctcccgagtagctgggactacaggtgcatgccacgacgcccagctgatttttgtgtttttagtagagacggggtttcaccatgttggccaagatggtctcaatctcttgaccttgtgatccacctgccttggccttccaaagtgttggaattacaggcgtgagccaccgcgcctggtctatatgtgatttcaaattaggtggccttataaatataagcagatggtttctgggcaaaatcaaatgatttctgtctctattttcttgagtaccaattgtaaaaactgaaattaggttgaggaaagtgctttagaaataataaagatgtacaaatac

SEQ ID NO: 80388 - DNA, 267 bp, Artificial Sequence
  derived and/or modified sequence
atgatcgcccggcggaaccccgagcccctgcggttcctgcccgacgaagccaggtctctgcctccacctaagctcactgacccaaggctgctgtatatcggctttctggggtactgcagcgggctgattgataatctaatcagaagacgaccaatcgctacagcaggacttcacaggcagctcttgtacattaccgcctttttttttgctggctactatctggtgaagctcgaggcttatgctaatttgtatgtggatactttgtag

SEQ ID NO: 80389 - DNA, 231 bp, Artificial Sequence
  derived and/or modified sequence
atgatcgcccggcggaaccccgagcccctgcggttcctgcccgacgaggccaggtccctgcctccacccaaactgacagacccgagactgctgtacattggtttcctcgggtactgctcaggtctgatagacaatctgatacgacggcggccaattgccaccgctggcctgcaccggcagttactgtacatcaccgctttcttttgttggatcttgagttgcaaaacatag

SEQ ID NO: 80390 - DNA, 267 bp, Artificial Sequence
  derived and/or modified sequence
atgatcgcaaggaggaatcccgaacccctgagattcctgccggatgaagccagaagcctgccccctcccaaactcactgacccacgcctcctgtacattgggttcctgggctactgcagcggtctcattgacaacctgatcagacggagaccgatcgccactgcgggtttgcataggcagctgctttatatcactgcctttttcttcgccggatactacctagtaaagctagaggcctacgctaacctatatgtggacaccctgtag

SEQ ID NO: 80391 - DNA, 231 bp, Artificial Sequence
  derived and/or modified sequence
atgatcgcgcgacggaaccctgaaccactcaggttcctgccagatgaagcgagatcactcccaccccctaagctgaccgacccaagactgctgtatatcggctttctaggctactgttccggattgatcgacaatctgattaggagacggcctattgccaccgcaggacttcacaggcagctgctgtacattacagccttcttttgttggatcctgtcctgcaagacgtag

SEQ ID NO: 80392 - protein, 96 aa, Artificial Sequence
  derived and/or modified sequence
MIARRNPEPLRFLPDEARSLPPPKLTDPRLLYIGFLGYCSGLIDNLIRRRPIATADYLYAVRDREMFGYMKLHPEDFPEEDKKTYGEIFEKFHPIR

SEQ ID NO: 80393 - DNA, 291 bp, Artificial Sequence
  derived and/or modified sequence
atgatcgccagaagaaaccccgagcccctgagattcctgcccgacgaggccagaagcctgcccccccccaagctgaccgaccccagactgctgtacatcggcttcctgggctactgcagcggcctgatcgacaacctgatcagaagaagacccatcgccaccgccgactacctgtacgccgtgagagacagagagatgttcggctacatgaagctgcaccccgaggacttccccgaggaggacaagaagacctacggcgagatcttcgagaagttccaccccatcagatag

SEQ ID NO: 80394 - DNA, 291 bp, Artificial Sequence
  derived and/or modified sequence
atgatagcccggcggaaccccgaacctctacgttttcttcctgatgaggccaggagcttgcctcccccaaagttaacagaccctaggctcttatacattgggttcctgggctattgcagtggtctgatagataatctgataagacgccgtccaatcgctaccgctgattatttatacgcagtgagggatagggagatgttcggatatatgaagttgcacccagaggattttcccgaagaggacaaaaaaacctacggggaaatcttcgagaaattccaccctatccgatag

SEQ ID NO: 80395 - DNA, 291 bp, Artificial Sequence
  derived and/or modified sequence
atgattgccaggagaaatcctgagcccctgcgcttcctgcctgatgaggcccggagcctgcccccacccaagctgacagacccccggctgctgtacatcggcttcctgggctactgcagcggcctgattgacaacctgatcagaagaagacccatcgccacagctgactacctgtatgctgtgcgggaccgggagatgtttggctacatgaagctgcaccctgaggacttccctgaggaggacaagaagacctatggagagatctttgagaagttccaccccatcagatag

SEQ ID NO: 80396 - DNA, 495 bp, Artificial Sequence
  derived and/or modified sequence
ccggggtagtggtcgtcgtggttttccttgtagttcgtggtctgagaccaggcctcaagtggaaacggcgtcaccatgatcgcacggcggaacccagaacccttacggtttctgccggatgaggcccggagcctgcccccgcccaagctgaccgacccgcggctcctctacatcggcttcttgggctactgctccggcctgattgataacctaatccggcggaggccgatcgcgacggctgactacctgtatgctgtgagggaccgtgaaatgtttggatatatgaaattacatccagaggattttcctgaagaagataagaaaacatatggtgaaatttttgaaaaattccatccaatacgttgaagtcttcaaaatgcttgctccagtttcactgatacctgctgtttctgaatttgatggaacatgtttcttatgacagttgaagcttatgctaatctgtatgttgacaccttgtaattaaaatacgtacca

SEQ ID NO: 80397 - DNA, 588 bp, Artificial Sequence
  derived and/or modified sequence
cgcgcagaggaggaggagaaagctgaccgcttaggccggggtagtggtcgtcgtggttttccttgtagttcgtggtctgagaccaggcctcaagtggaaacggcgtcaccatgatcgcacggcggaacccagaacccttacggtttctgccggatgaggcccggagcctgcccccgcccaagctgaccgacccgcggctcctctacatcggcttcttgggctactgctccggcctgattgataacctaatccggcggaggccgatcgcgacggctggtttgcatcgccagcttctatatattacggcctttttttgctggatattatcttgtaaaacgtgaagactacctgtatgctgtgagggaccgtgaaatgtttggatatatgaaattacatccagaggattttcctgaagaagataagaaaacatatggtgaaatttttgaaaaattccatccaatacgttgaagtcttcaaaatgcttgctccagtttcactgatacctgctgtttctgaatttgatggaacatgtttcttatgacagttgaagcttatgctaatctgtatgttgacaccttgtaattaaaa

SEQ ID NO: 80398 - DNA, 291 bp, Artificial Sequence
  derived and/or modified sequence
atgatcgcccggcggaaccccgagcccctgcggttcctgcccgacgaggccagaagcctccctccacctaaattgacagacccccgcctcctctacattggctttctgggttactgctctggcctgattgacaaccttatcagacggcgcccgatcgccacggctgattacctgtacgctgtgagagaccgcgaaatgttcgggtatatgaaactgcatccagaggactttccggaggaggataaaaagacgtacggcgaaatctttgagaaattccacccgatacgatag

SEQ ID NO: 80399 - DNA, 291 bp, Artificial Sequence
  derived and/or modified sequence
atgatcgccagaagaaaccccgagccccttcgcttcttgccagatgaagcacgcagcctgcccccacctaaactgactgacccacgccttctatacatcggcttcctgggctattgttctggactcatcgataacttgatcagacgacggccaattgccacagctgactatctgtatgcggtgcgggaccgcgagatgttcggttatatgaagctccatcctgaggacttccccgaagaggacaaaaagacgtacggcgagatcttcgaaaagtttcaccccatccgatag

SEQ ID NO: 80400 - protein, 2039 aa, Artificial Sequence
  derived and/or modified sequence
MPKSGFTKPIQSENSDSDSNMVEKPYGRKSKDKIASYSKTPKIERSDVSKEMKEKSSMKRKLPFTISPSRNEERDSDTEKEGPEKKKTKKEAGNKKSTPVSILFGYPLSERKQMALLMQMTARDNSPDSTPNHPSQTTPAQKKTPSSSSRQKDKVNKRNERGETPLHMAAIRGDVKQVKELISLGANVNVKDFAGWTPLHEACNVGYYDVAKILIAAGADVNTQGLDDDTPLHDSASSGHRDIVKLLLRHGGNPFQANKHGERPVDVAETEELELLLKREVPLSDDDESYTDSEEAQSVNPSSVDENIDSETEKDSLICESKQILPSKTPLPSALDEYEFKDDDDEEINKMIDDRHILRKEQRKENEPEAEKTHLFAKQEKAFYPKSFKSKKQKPSRVLYSSTESSDEEALQNKKISTSCSVIPETSNSDMQTKKEYVVSGEHKQKGKVKRKLKNQNKNKENQELKQEKEGKENTRITNLTVNTGLDCSEKTREEGNFRKSFSPKDDTSLHLFHISTGKSPKHSCGLSEKQSTPLKQEHTKTCLSPGSSEMSLQPDLVRYDNTESEFLPESSSVKSCKHKEKSKHQKDFHLEFGEKSNAKIKDEDHSPTFENSDCTLKKMDKEGKTLKKHKLKHKEREKEKHKKEIEGEKEKYKTKDSAKELQRSVEFDREFWKENFFKSDETEDLFLNMEHESLTLEKKSKLEKNIKDDKSTKEKHVSKERNFKEERDKIKKESEKSFREEKIKDLKEERENIPTDKDSEFTSLGMSAIEESIGLHLVEKEIDIEKQEKHIKESKEKPEKRSQIKEKDIEKMERKTFEKEKKIKHEHKSEKDKLDLSECVDKIKEKDKLYSHHTEKCHKEGEKSKNTAAIKKTDDREKSREKMDRKHDKEKPEKERHLAESKEKHLMEKKNKQSDNSEYSKSEKGKNKEKDRELDKKEKSRDKESINITNSKHIQEEKKSSIVDGNKAQHEKPLSLKEKTKDEPLKTPDGKEKDKKDKDIDRYKERDKHKDKIQINSLLKLKSEADKPKPKSSPASKDTRPKEKRLVNDDLMQTSFERMLSLKDLEIEQWHKKHKEKIKQKEKERLRNRNCLELKIKDKEKTKHTPTESKNKELTRSKSSEVTDAYTKEKQPKDAVSNRSQSVDTKNVMTLGKSSFVSDNSLNRSPRSENEKPGLSSRSVSMISVASSEDSCHTTVTTPRPPVEYDSDFMLESSESQMSFSQSPFLSIAKSPALHERELDSLADLPERIKPPYANRLSTSHLRSSSVEDVKLIISEGRPTIEVRRCSMPSVICEHTKQFQTISEESNQGSLLTVPGDTSPSPKPEVFSNVPERDLSNVSNIHSSFATSPTGASNSKYVSADRNLIKNTAPVNTVMDSPVHLEPSSQVGVIQNKSWEMPVDRLETLSTRDFICPNSNIPDQESSLQSFCNSENKVLKENADFLSLRQTELPGNSCAQDPASFMPPQQPCSFPSQSLSDAESISKHMSLSYVANQEPGILQQKNAVQIISSALDTDNESTKDTENTFVLGDVQKTDAFVPVYSDSTIQEASPNFEKAYTLPVLPSEKDFNGSDASTQLNTHYAFSKLTYKSSSGHEVENSTTDTQVISHEKENKLESLVLTHLSRCDSDLCEMNAGMPKGNLNEQDPKHCPESEKCLLSIEDEESQQSILSSLENHSQQSTQPEMHKYGQLVKVELEENAEDDKTENQIPQRMTRNKANTMANQSKQILASCTLLSEKDSESSSPRGRIRLTEDDDPQIHHPRKRKVSRVPQPVQVSPSLLQAKEKTQQSLAAIVDSLKLDEIQPYSSERANPYFEYLHIRKKIEEKRKLLCSVIPQAPQYYDEYVTFNGSYLLDGNPLSKICIPTITPPPSLSDPLKELFRQQEVVRMKLRLQHSIEREKLIVSNEQEVLRVHYRAARTLANQTLPFSACTVLLDAEVYNVPLDSQSDDSKTSVRDRFNARQFMSWLQDVDDKFDKLKTCLLMRQQHEAAALNAVQRLEWQLKLQELDPATYKSISIYEIQEFYVPLVDVNDDFELTPI

SEQ ID NO: 80401 - protein, 371 aa, Artificial Sequence
  derived and/or modified sequence
MPKSGFTKPIQSENSDSDSNMVEKPYGRKSKDKIASYSKTPKIERSDVSKEMKEKSSMKRKLPFTISPSRNEERDSDTEKEGPEKKKTKKEAGNKKSTPVSILFGYPLSERKQMALLMQMTARDNSPDSTPNHPSQTTPAQKKTPSSSSRQKDKVNKRNERGETPLHMAAIRGDVKQVKELISLGANVNVKDFAGWTPLHEACNVGYYDVAKILIAAGADVNTQGLDDDTPLHDSASSGHRDIVKLLLRHGGNPFQANKHGERPVDVAETEELELLLKREVPLSDDDESYTDSEEAQSVNPSSVDENIDSETEKDSLICESKQILPSKTPLPSALDEYEFKDDDDEEINKMIDDRHILRKEQRKKKRKEKK

SEQ ID NO: 80402 - DNA, 6120 bp, Artificial Sequence
  derived and/or modified sequence
atgcctaaaagcggatttacaaagccaattcaatctgagaatagcgactcggactctaacatggtggagaagccctatggcagaaaatcaaaggacaaaattgcatcctattctaagacacctaaaatcgaaaggtccgacgtgagcaaggaaatgaaggagaaaagttcaatgaagcgcaaacttccatttacaatctcgccttcaagaaacgaagagcgggacagcgacaccgaaaaggaaggacccgagaagaaaaagactaaaaaagaagctggcaataaaaaaagcacaccagtgagtatcttattcggctaccctttatctgaacgcaaacagatggccctccttatgcaaatgaccgcgagggataactccccggatagtaccccgaatcatccctctcagacaacccccgcgcagaagaaaacgccttcttcatcaagcagacagaaagacaaggtgaacaaaaggaatgaacggggagaaacccctctgcacatggcagctattaggggcgatgtcaagcaggtcaaagaactgataagtttgggcgctaatgtgaacgtgaaggattttgctgggtggacccctttgcatgaagcctgtaacgtcggatattatgacgtggctaagattttgatcgccgctggcgccgacgtcaatacccagggtctcgacgacgatacccccctccatgactctgccagctcggggcatcgagacattgtgaagctgttgttgaggcatgggggaaatccctttcaagctaataagcatggtgagaggcctgtcgacgtcgctgagaccgaagaactggagctcctgttaaaaagagaagtgccactgagcgacgacgatgagtcgtatactgattctgaggaggctcagtccgtgaatccttctagcgtggatgaaaatattgactctgaaaccgaaaaggactcccttatctgtgagagcaaacagatcctgccctctaaaacaccactcccaagcgcactcgacgaatatgagttcaaggatgacgatgatgaagaaattaataagatgatcgacgacagacatatccttagaaaagagcaacggaaggaaaacgaaccagaggcagagaaaacccatctgtttgccaagcaggaaaaagccttttaccctaaatcttttaagtccaaaaagcagaaaccatctagagtcttgtattctagcaccgagtcttccgatgaagaggctctccagaataaaaagataagcacatcttgtagtgtaatccccgaaacaagcaactcggacatgcagaccaagaaagagtatgttgtgtcaggtgaacacaagcagaagggaaaagttaagaggaagttaaagaaccagaacaaaaataaagagaatcaggaactcaaacaagaaaaagaagggaaagaaaacacccgcatcactaaccttaccgtgaatacgggtctggattgcagcgagaaaacaagggaagaggggaattttcgaaaatcatttagtccaaaggatgatacgtcactgcacctcttccacatctcgaccggaaagagcccaaaacactcctgtggactatccgaaaagcagagcacccctctcaaacaagagcacacaaaaacatgcctgtcgccagggagctcagaaatgtcactccagcccgacctggtccggtacgacaacacagaatccgaatttctgcctgaatcctctagtgtcaaatcttgcaaacacaaagaaaagtctaagcatcagaaggacttccatcttgagttcggagaaaagagtaacgcaaagatcaaagacgaggatcattcacccacttttgagaattccgactgtactctaaaaaagatggacaaggaggggaagacgctgaagaagcacaagttaaagcacaaagaaagggaaaaggagaagcataagaaggaaatagaaggcgagaaggaaaaatacaaaactaaggactctgccaaggagctccagcgctccgtggagtttgatagagaattttggaaagaaaacttctttaaaagtgacgaaaccgaagacctgttcttaaacatggagcacgagtcactcaccttggagaagaagtcaaagctggaaaagaatatcaaagatgacaagagtacaaaggagaagcacgtgagcaaggaacgcaacttcaaagaggagagagacaaaataaagaaagagtccgagaaaagctttcgggaagaaaagattaaagacctgaaagaggaacgcgaaaacatccctaccgataaagactctgaattcaccagtctcgggatgagcgctattgaggagagcattggcctgcatctggtcgagaaagaaattgatattgaaaaacaggaaaagcacataaaagaatccaaagaaaagcctgaaaagcgctctcagatcaaagagaaagacattgaaaagatggaacgaaaaacctttgagaaggaaaaaaagattaagcatgagcacaaaagcgaaaaagacaagttagacctaagcgagtgcgtcgacaaaattaaggagaaggacaaattgtatagccaccacaccgagaaatgccataaagagggcgaaaaaagtaaaaacaccgctgccattaagaagacggacgatcgggaaaaaagcagggagaagatggataggaagcatgataaggaaaagccagagaaggaacggcatctcgccgaatcaaaggaaaaacatcttatggagaagaaaaacaaacagtccgacaacagtgagtacagcaaatccgagaagggcaaaaataaggaaaaggatagggaattggataaaaaagagaaatcacgcgacaaagagtccattaatattaccaactccaagcatattcaggaagagaagaagtcctcaatagttgatggcaacaaggctcagcacgagaaacctctcagcctgaaagagaagacaaaggatgaacccctgaaaacacccgacgggaaggagaaggacaaaaaggataaagatatcgatcgttacaaagagcgcgataagcacaaggacaagattcaaatcaacagtctgctcaaactgaaatccgaggccgataaaccgaagcctaagtcttcacctgcttctaaggacactcggcccaaggagaaacgccttgttaatgatgatctaatgcagacatccttcgagagaatgctgtccctcaaagatctggagatcgagcagtggcataagaaacacaaagagaagatcaagcaaaaggaaaaggagaggctacgaaacagaaactgtttagagttgaagatcaaggacaaggaaaagaccaaacacactcccacggagtcaaagaataaggagttgactagatctaaatcctctgaagtgactgacgcctacactaaagaaaagcaacccaaagatgccgtcagtaatcggagccaaagcgttgacaccaaaaacgtcatgaccttggggaagagttcctttgtttcagacaatagcctcaacaggagtccacggtccgaaaacgaaaaacccggcctgtcctctaggtctgtgtccatgatcagtgtggctagttcagaagatagctgccacaccaccgttactaccccgcgcccgcccgtggagtacgactctgattttatgcttgagtcctccgaatcccaaatgtctttctcacagagtccattcttaagcatcgccaaaagccccgccttgcatgaaagggagctcgacagccttgctgacctgccagagcggattaagcccccttacgcgaatagactgtccactagtcacctgcgctcaagttccgttgaggatgtcaaattaatcatcagcgaggggaggcctacaatcgaagtacgcaggtgctccatgccctccgtgatctgtgagcacaccaagcagttccaaacaatttccgaagaatccaatcaaggaagcctgctcaccgtgcctggtgatacctcaccatctccgaagccagaagtcttcagtaatgtccctgagcgcgacctctcgaacgtgagcaacatacactcttcattcgccactagtccgaccggtgcttcgaacagcaaatacgtgtctgccgatcgtaacctgattaagaacacggcaccagttaatactgtgatggactcacctgtgcatcttgagccgagtagccaggtgggtgtcatacagaacaaatcatgggaaatgccagttgaccgcttggagacattgagtacaagagacttcatttgcccgaattctaacattcctgatcaggagagctcgcttcagagtttttgcaactcagagaataaggtgttgaaggagaatgccgacttcttgtctctacgccagactgagctccccggaaatagttgtgcccaagatccggccagctttatgccgccccagcagccttgctcctttcctagccagagcctctcagacgctgagtctatttctaagcatatgtccttgagctacgtggctaaccaggaacccggcatccttcagcagaagaatgccgtccagattatcagttccgcactggacaccgacaatgagtctaccaaagacacagaaaacactttcgttctgggggacgtgcagaagacagacgcctttgtccctgtctattccgattccacaatccaggaggcatctcctaatttcgagaaggcctatacattgccagtgctgcctagcgaaaaagatttcaatgggtccgatgcctctacccaactgaacacgcattacgcatttagcaagctcacctataagagttcatctggtcacgaagtcgagaatagtactactgacactcaggttatttctcacgaaaaagaaaacaaactggagtcactcgtgctgactcatttgtcccgatgtgatagtgatctgtgcgagatgaatgccggtatgcctaagggcaacctgaacgagcaggatccgaaacactgccccgagagtgaaaagtgccttcttagcatcgaagacgaggaatcacagcaaagcatcctgtctagtcttgaaaaccattcccaacagagcactcagcccgaaatgcacaaatatggacaattggtgaaagtagagctggaagagaatgcggaggatgataaaacagagaaccagatcccacagcgcatgactcgtaataaagccaacacaatggccaatcagagtaagcagatcttggcttcctgcacactgctctccgagaaagatagtgaatcatccagcccacgagggagaattagactgacagaggacgatgacccacagatccaccatccacgtaagcgtaaggtgagcagggtgccgcagccagttcaagtcagccccagcctgctccaggccaaggaaaagacacaacaatctttggctgctatcgtagatagcttaaaattagacgaaatccaaccttactcctccgagcgcgcaaatccgtactttgagtatctccacatccgaaagaagatcgaggaaaaaagaaaactgctatgcagtgtgattccacaggcacctcagtattacgacgagtacgttactttcaatggctcgtacctgctggatggaaatcctctgtccaaaatctgtatccccactattacacctcctccttcgctgagtgatccactcaaggagctcttccggcaacaggaggtggtgagaatgaagctcagactccagcactccatcgaacgggaaaagcttatcgttagtaacgagcaggaagtactgagagttcactatagggctgccagaactcttgctaaccagactctgcccttcagtgcctgcacagtgctgctggatgccgaagtatataatgttcctctggactcccagagcgatgattctaaaacttccgtgcgcgatcgctttaatgcacgccaattcatgtcctggctccaggacgtggacgacaaattcgacaagctgaagacatgtttactgatgcgtcagcagcacgaagccgccgccctgaatgctgtccaaaggctggagtggcaactgaagctccaggaactcgatcccgccacatacaagtctatctcaatctatgaaattcaggagttctatgtccccttagtcgatgtgaatgacgattttgagttaactcctatctag

SEQ ID NO: 80403 - DNA, 1116 bp, Artificial Sequence
  derived and/or modified sequence
atgcctaagagtggctttactaaacccatccagtctgagaatagcgatagcgactccaatatggtggagaagccttatggacgcaaatccaaagacaagatcgcttcttactccaaaacacccaagatcgagcgctcagacgtctctaaagagatgaaggagaagagcagcatgaagagaaagctgccgttcaccatctcgccgagtcgcaatgaggaacgggactctgacactgagaaggagggcccggagaagaagaagacaaaaaaggaggctgggaataaaaaatcaacccccgtgagcatcttgttcggatatccactctctgagcgcaagcagatggctctgctgatgcaaatgacggcccgagataactctccagacagcacacctaatcacccaagtcaaacgactcccgcacagaagaaaacaccttcctcctcatcacggcagaaggacaaggttaataaacggaatgaaagaggtgagacacctctacacatggccgctatcagaggtgatgtcaaacaagtgaaagaactgatttctctcggggcaaacgtgaatgtaaaagacttcgcggggtggactcctctccatgaagcctgtaacgtgggatactacgacgtggccaagatccttatcgctgccggggcagatgttaacacacagggtctggacgacgacaccccacttcacgacagtgcgagttcaggtcacagagacatcgtcaaactgctgttgcgacacggtggtaacccttttcaggccaataagcatggagagaggcctgtggatgtcgctgagactgaggaactggagctcctactgaaaagagaagtgcctctcagtgatgacgatgaatcatacacagattcagaagaggctcagagcgtcaatccttcatctgttgacgagaatatcgactctgaaaccgagaaagattctttgatatgtgagagcaaacaaattctgccaagtaaaactccacttcccagcgccttggatgagtatgagttcaaggatgacgatgacgaagagatcaataagatgatagacgatcgacacatcctgcgcaaggaacaacggaagaagaaacgtaaagagaagaagtag

SEQ ID NO: 80404 - DNA, 6120 bp, Artificial Sequence
  derived and/or modified sequence
atgcccaagagcggcttcaccaagcccatccagagtgaaaattctgacagcgacagcaacatggtggagaagccctacggcaggaagagcaaggacaagatcgccagctacagcaagacccccaagattgaaagaagtgatgtgtccaaggagatgaaggagaagagctccatgaagaggaagctgcccttcaccatcagccccagcagaaatgaggagcgggacagcgacacagagaaggagggccctgagaagaagaagaccaagaaggaggccggcaacaagaagagcacccctgtgtccatcctgtttggctaccccctgtctgagaggaagcagatggccctgctgatgcagatgacagcccgggacaacagcccagacagcacccccaaccaccccagccagaccaccccagcccagaagaagacccccagcagcagcagccggcagaaggacaaggtgaacaagagaaatgaaagaggagagacccccctgcacatggccgccatcagaggagatgtgaagcaggtgaaggagctgatcagcctgggcgccaacgtgaatgtgaaggactttgctggctggacccccctgcacgaggcctgcaatgtgggctactatgatgtggccaagatcctgattgctgctggagcagatgtgaacacccagggcctggatgatgacacccccctgcatgattctgccagcagcggccaccgggacatcgtgaagctgctgctgcggcacggcggcaaccccttccaggccaacaagcacggggagaggcctgtggatgtggccgagacagaggagctggagctgctgctgaagcgggaggtgcccctgagtgatgatgatgagagctacacagattctgaggaggcccagagcgtgaaccccagctctgtggatgagaacatcgacagcgagacagagaaggacagcctcatctgtgagagcaagcagatcctgcccagcaagacccccctgcccagcgccctggatgaatatgagttcaaggatgatgatgatgaggagatcaacaagatgattgatgacagacacatcctgaggaaggagcagaggaaagaaaatgaacctgaggccgagaagacccacctgtttgccaagcaggagaaggccttctaccccaagagcttcaagagcaagaagcagaagcccagccgggtgctgtacagcagcacagagagcagtgatgaggaggccctgcagaacaagaagatcagcaccagctgcagcgtcatccctgagaccagcaacagcgacatgcagaccaagaaggagtatgtggtgtctggagagcacaagcagaagggcaaggtgaagaggaagctgaagaaccagaacaagaacaaggagaaccaggagctgaagcaggagaaggagggcaaggagaacacccgcatcaccaacctgactgtgaacacaggcctggactgcagcgagaagacccgggaggagggcaacttcaggaagagcttcagccccaaggatgacaccagcctgcacctgttccacatcagcacaggcaagagccccaagcacagctgtggcctgtctgagaagcagagcacccccctgaagcaggagcacaccaagacctgcctgagccctggcagcagcgagatgagcctgcagcctgacctggtgcgctatgacaacacagaaagtgagttcctgcctgagagcagctctgtgaagagctgcaagcacaaggagaagagcaagcaccagaaggacttccacctggagtttggagagaagagcaatgccaagatcaaggatgaggaccacagccccacctttgaaaattctgactgcaccctgaagaagatggacaaggagggcaagaccctgaagaagcacaagctgaagcacaaggagcgggagaaggagaagcacaagaaggagattgaaggagagaaggagaagtacaagaccaaggacagcgccaaggagctgcagaggtctgtggagtttgaccgggagttctggaaggagaacttcttcaagagtgatgaaacagaggacctcttcctgaacatggagcacgagagcctgaccctggagaagaagagcaagctggagaagaacatcaaggatgacaagagcaccaaggagaagcacgtgtccaaggagaggaacttcaaggaggagcgggacaagatcaagaaggagagcgagaagagcttccgggaggagaagatcaaggacctgaaggaggagcgggagaacatccccacagacaaggacagcgagttcaccagcctgggcatgtctgccatcgaggagagcatcggcctgcacctggtggagaaggagattgatattgagaagcaggagaagcacatcaaggagagcaaggagaagccagagaagaggagccagatcaaggagaaggacatcgagaagatggagaggaagacctttgagaaggagaagaagatcaagcatgagcacaagtctgagaaggacaagctggacctgtctgaatgtgtggacaagatcaaggagaaggacaagctgtacagccaccacacagagaagtgccacaaggagggggagaagagcaagaacacagctgccatcaagaagacagatgaccgggagaagagccgggagaagatggacaggaagcatgacaaggagaagccagagaaggagcggcacctggccgagagcaaggagaagcacctgatggagaagaagaacaagcagagcgacaacagcgagtacagcaagtctgagaagggcaagaacaaggagaaggaccgggagctggacaagaaggagaagagccgggacaaggagagcatcaacatcaccaacagcaagcacatccaggaggagaagaagagcagcatcgtggatggcaacaaggcccagcacgagaagcccctgagcctgaaggagaagaccaaggatgagcccctgaagaccccagatggcaaggagaaggacaagaaggacaaggacatcgaccgctacaaggagcgggacaagcacaaggacaagatccagatcaacagcctgctgaagctgaagtctgaggccgacaagcccaagcccaagagcagccctgccagcaaggacacccggcccaaggagaagaggctggtgaatgatgacctgatgcagaccagctttgagaggatgctgagcctgaaggacctggagattgagcagtggcacaagaagcacaaggagaagatcaagcagaaggagaaggagcggctgaggaacagaaactgcctggagctgaagatcaaggacaaggagaagaccaagcacacccccacagagagcaagaacaaggagctgaccaggagcaagagcagcgaggtgacagatgcctacaccaaggagaagcagcccaaggatgctgtgagcaacagaagccagagcgtggacaccaagaatgtgatgaccctgggcaagagcagctttgtgtctgacaacagcctgaacagaagccccaggagtgaaaatgagaagccaggcctgagcagccgctctgtgtccatgatctctgtggccagcagcgaggacagctgccacaccaccgtgaccaccccccggccccctgtggagtatgacagcgacttcatgctggagagcagcgagagccagatgtccttcagccagagccccttcctgagcatcgccaagagccctgccctgcacgagcgggagctggacagcctggccgacctgcctgagcgcatcaagccaccctatgccaaccggctgagcaccagccacctgcggagcagctctgtggaggatgtgaagctgatcatcagcgagggccggcccaccatcgaggtgcggcgctgcagcatgcccagcgtcatctgtgagcacaccaagcagttccagaccatcagcgaggagagcaaccagggcagcctgctgactgtgcctggggacaccagccccagccccaagccagaggtgttcagcaatgtgcctgagcgggacctgagcaatgtgagcaacatccacagcagctttgccaccagccccactggagccagcaacagcaaatatgtgtctgctgacaggaacctgatcaagaacacagcccctgtgaacacagtgatggacagccctgtgcacctggagcccagcagccaggtgggcgtcatccagaacaagtcctgggagatgcctgtggaccggctggagaccctgagcacccgggacttcatctgccccaacagcaacatcccagaccaggagagcagcctgcagagcttctgcaacagcgagaacaaggtgctgaaggaaaatgctgacttcctgagcctgcggcagacagagctgcccggcaacagctgtgcccaggaccctgccagcttcatgccaccccagcagccctgcagcttccccagccagagcctgagtgatgctgagagcatcagcaagcacatgagcctgtcctatgtggccaaccaggagcccggcatcctgcagcagaagaatgctgtgcagatcatcagcagcgccctggacacagacaatgaaagcaccaaggacacagagaacacctttgtgctgggagatgtgcagaagacagatgcctttgtgcctgtgtacagcgacagcaccatccaggaggccagccccaactttgagaaggcctacaccctgcctgtgctgcccagcgagaaggacttcaatggaagtgatgccagcacccagctgaacacccactacgccttcagcaagctgacctacaagagcagcagcggccacgaggtggagaacagcaccacagacacccaggtgatcagccatgagaaggagaacaagctggagagcctggtgctgacccacctgagccgctgtgacagcgacctgtgtgagatgaatgccggcatgcccaagggcaacctgaatgagcaggaccccaagcactgcccagagagcgagaagtgcctgctgagcattgaagatgaggagagccagcagagcatcctgagcagcctggagaaccacagccagcagagcacccagcctgagatgcacaagtatggccagctggtgaaggtggagctggaggagaatgcagaagatgacaagacagagaaccagatcccccagaggatgaccaggaacaaggccaacaccatggccaaccagagcaagcagatcctggccagctgcaccctgctgtctgagaaggacagcgagagcagcagcccccggggccgcatccggctgacagaagatgatgacccccagatccaccaccccaggaagaggaaggtgtcccgggtgccccagcctgtgcaggtgagccccagcctgctgcaggccaaggagaagacccagcagagcctggccgccatcgtggacagcctgaagctggatgagatccagccctacagcagcgagcgggccaacccctactttgagtacctgcacatcaggaagaagattgaggagaagaggaagctgctgtgcagcgtcatcccccaggccccccagtactatgatgaatatgtgaccttcaacggcagctacctgctggatggcaaccccctgagcaagatctgcatccccaccatcaccccaccacccagcctgagtgaccccctgaaggagctgttccggcagcaggaggtggtgaggatgaagctgcggctgcagcacagcattgaaagagagaagctgattgtgtccaatgagcaggaggtgctgcgggtgcactaccgggccgcccggaccctggccaaccagaccctgcccttcagcgcctgcaccgtgctgctggatgctgaggtgtacaacgtgcccctggacagccagagtgatgacagcaagacctctgtgcgggaccgcttcaatgcccggcagttcatgtcctggctgcaggatgtggatgacaagtttgacaagctgaagacctgcctgctgatgaggcagcagcatgaagctgctgccctgaatgctgtgcagaggctggagtggcagctgaagctgcaggagctggaccctgccacctacaagagcatcagcatctatgagatccaggagttctacgtgcccctggtggatgtgaatgatgactttgagctgacccccatctag

SEQ ID NO: 80405 - DNA, 1116 bp, Artificial Sequence
  derived and/or modified sequence
atgcccaagagcggcttcaccaagcccatccagagtgaaaattctgacagcgacagcaacatggtggagaagccctacggcaggaagagcaaggacaagatcgccagctacagcaagacccccaagattgaaagaagtgatgtgtccaaggagatgaaggagaagagctccatgaagaggaagctgcccttcaccatcagccccagcagaaatgaggagcgggacagcgacacagagaaggagggccctgagaagaagaagaccaagaaggaggccggcaacaagaagagcacccctgtgtccatcctgtttggctaccccctgtctgagaggaagcagatggccctgctgatgcagatgacagcccgggacaacagcccagacagcacccccaaccaccccagccagaccaccccagcccagaagaagacccccagcagcagcagccggcagaaggacaaggtgaacaagagaaatgaaagaggagagacccccctgcacatggccgccatcagaggagatgtgaagcaggtgaaggagctgatcagcctgggcgccaacgtgaatgtgaaggactttgctggctggacccccctgcacgaggcctgcaatgtgggctactatgatgtggccaagatcctgattgctgctggagcagatgtgaacacccagggcctggatgatgacacccccctgcatgattctgccagcagcggccaccgggacatcgtgaagctgctgctgcggcacggcggcaaccccttccaggccaacaagcacggggagaggcctgtggatgtggccgagacagaggagctggagctgctgctgaagcgggaggtgcccctgagtgatgatgatgagagctacacagattctgaggaggcccagagcgtgaaccccagctctgtggatgagaacatcgacagcgagacagagaaggacagcctcatctgtgagagcaagcagatcctgcccagcaagacccccctgcccagcgccctggatgaatatgagttcaaggatgatgatgatgaggagatcaacaagatgattgatgacagacacatcctgaggaaggagcagaggaagaagaagaggaaggagaagaagtag

SEQ ID NO: 80406 - DNA, 6120 bp, Artificial Sequence
  derived and/or modified sequence
atgcccaagagcggcttcaccaagcccatccagagcgagaacagcgattcagactcaaatatggtcgagaagccgtacggcagaaagagcaaggataagatagcctcttattctaaaacacccaagatcgaaaggagcgatgtaagcaaggaaatgaaggagaagtcttctatgaagcgcaaactgcccttcactatctccccttcccgtaacgaggaaagggactccgacacagaaaaggagggccccgagaaaaaaaaaaccaagaaagaagcaggtaataagaaatcaacacccgtttcaattctttttggctaccccctgtccgagcggaaacagatggccctgctcatgcaaatgacagcccgcgacaactcccccgactctacacctaaccaccccagtcaaaccacgcctgctcaaaaaaagacaccctcttcctcctcacgccaaaaggacaaggtgaacaagaggaacgagcgcggcgagaccccactccacatggcagcgattaggggcgacgtgaagcaagtcaaggagttgatcagcctcggagccaacgtgaatgttaaggacttcgctgggtggactcccctgcatgaggcctgtaacgtcggttattatgacgtggctaagatattgatagctgctggcgcggatgttaacacacaggggctggacgatgatacccccctgcatgattccgcttcgagtgggcatagagatattgtgaaacttcttctccgacatggcggtaacccttttcaagctaataagcatggggagcgccctgttgacgtcgccgagacggaggagctggagttgctcttgaagagggaagtgcccctttccgatgatgatgagagctacaccgatagtgaggaggctcagagcgtcaacccctcttccgttgatgagaacatagattctgagacagagaaggactccttaatatgtgaaagtaaacaaatcctccccagcaaaacccccctgcctagcgccctcgacgagtatgaatttaaggatgacgatgacgaggagattaacaaaatgatcgatgacaggcacattctgagaaaagagcagaggaaagagaacgagcctgaagcggagaagacccacttgttcgccaagcaggagaaagcattttaccccaagagtttcaagtccaagaagcaaaaaccatctagagttttatactccagtacggaatcaagcgatgaggaagcacttcagaacaagaaaattagcacttcatgcagtgtcattcctgaaacctctaatagtgacatgcaaacgaagaaggagtatgtggtctcgggggaacataagcagaagggaaaagtcaaacggaagttgaaaaatcaaaacaagaacaaagagaaccaggagttgaagcaggaaaaagagggtaaggaaaatacacgcattaccaacctgaccgtgaacaccggccttgactgctccgagaaaacacgggaggagggaaatttcagaaagtctttttcccctaaagatgatacgagtctccatcttttccatataagcacaggaaaatcacccaagcactcatgcggcttatcagagaaacaatcaacccccctcaagcaggaacacacaaagacatgcctctcccctgggtcttctgaaatgtccctccagcctgacctcgtgcggtacgataataccgagagcgagttcttgccagagtcatcctcagtgaagagctgcaaacacaaggagaaaagcaaacaccagaaagatttccacctggagttcggcgagaaaagtaatgccaagattaaagacgaggaccatagccctaccttcgagaatagcgactgtaccctaaagaagatggacaaggaggggaagacacttaagaaacataaactgaaacacaaggagagggaaaaagaaaagcacaagaaagagatcgagggtgagaaggagaagtataaaacaaaagattccgctaaagaacttcagcggagcgtggagttcgatagagagttttggaaagaaaattttttcaaaagcgacgagactgaagatctcttccttaacatggagcatgagtccctgaccctggaaaaaaaaagcaagctggaaaaaaatatcaaagacgataagtccaccaaggaaaaacacgtatccaaagagcgcaatttcaaggaggaaagagataaaatcaaaaaggagagcgagaagtccttcagggaagagaaaataaaggatcttaaggaagagagggaaaacatccccactgacaaggacagtgagttcaccagcctggggatgagcgcaatcgaggagtctatcggcttgcatctcgttgagaaggagatcgatatcgagaagcaggaaaagcatatcaaagagagcaaagagaaacccgaaaaaaggtcccaaattaaagagaaggacatcgaaaagatggagcggaagacatttgagaaggagaaaaagattaaacacgaacataagagcgaaaaagataagctggatctgagtgagtgcgttgataaaattaaagagaaggacaaattgtattctcatcataccgaaaaatgccacaaggaaggggaaaagtccaagaatacagccgccattaagaaaacggatgaccgggagaagtcccgagagaagatggatagaaaacatgataaggagaagcccgaaaaagagaggcatctggccgagtccaaggagaagcatctgatggagaaaaaaaataagcagtcagataatagtgagtacagcaagtccgagaaaggaaagaataaagagaaggatcgcgagctcgacaaaaaggaaaagagtcgagacaaagagagtataaacatcaccaactccaagcacatccaggaggaaaagaaatcgagcatagtggacgggaataaggcccagcacgagaaacctctgtcgctaaaggaaaagacaaaagacgagcctctaaagacccccgacggtaaggagaaagacaaaaaagataaggatatcgacaggtacaaggagagagacaagcataaagacaagatccaaataaacagtctgttgaagctgaagtctgaggccgacaaacctaagccaaaatcgtcacctgcttccaaagacacgcggccgaaagagaaacgactggttaacgatgacctgatgcagacctcattcgagcgaatgttatctcttaaggatctggagatagagcaatggcataagaaacataaggagaagattaaacagaaagaaaaagaacgtctgcgaaacaggaactgtctggaactcaaaatcaaggacaaagaaaagactaagcacactccgaccgaatctaagaataaggagcttaccaggtcaaagagtagcgaggtgacggacgcctacacaaaagaaaaacagcctaaagacgctgttagtaatagaagtcagtcagtggacaccaagaacgttatgacgctagggaagtcatcattcgtatccgataattcccttaaccggtcacctcggagcgaaaatgaaaaacctggcctgtcctcccggtctgtgagtatgatttccgttgcgtcatccgaggactcgtgtcatactaccgtgactacaccaaggcccccagtcgaatacgatagcgacttcatgctggaatcctcggaatctcagatgagcttcagccagtccccttttctcagcatcgcaaaatcccctgcactgcatgaacgagagctcgattccctagctgatctgcctgaacgcatcaagccgccctacgctaatagactgtcaacttcccacctacgtagctcatccgtagaagatgtgaaactgatcatttctgagggccgacccactattgaagtgagacgctgtagcatgccctctgtgatctgcgagcacaccaaacagtttcaaactatcagtgaggaaagcaatcaaggcagtttactgaccgtccccggggatacttctcccagtccaaagccggaagtattctctaatgttccagagcgggatctgtcaaacgtatcaaatattcactcgagctttgcaacgagccctaccggcgcaagtaattcaaaatatgtctcagcggacaggaatctgatcaaaaatacagcacctgtgaatacggtgatggactctcccgtgcacctggagccatcctctcaggtgggggtaatccagaacaaatcgtgggagatgcccgtggatcggttggaaactctgtctactagagattttatatgcccgaactccaatattccagaccaggagtcctctctgcaaagcttttgtaatagtgagaacaaggtattgaaggagaatgccgatttcctgtccttacgacagacagagcttcccggaaattcctgcgcccaggaccccgcctcttttatgccacctcagcagccctgttcgttcccatctcagagtctctcagatgccgaatcaataagcaagcatatgtcgctgtcatacgtcgccaaccaggaaccaggtatcttgcagcagaaaaatgctgtgcagatcatttcaagtgcactggatacagataacgagtctaccaaggacaccgaaaacacatttgtgttaggagacgtccagaagacagatgcctttgtgcctgtctacagcgattccaccattcaagaggcctcgccaaatttcgaaaaggcctatactctgccagtgttgccatccgagaaagattttaatggctcagacgcaagcacacagctgaacacacactacgcattctccaagctgacttacaagagcagcagcggccacgaggtggagaatagcaccaccgacacacaggtcatctctcacgagaaggaaaacaagctcgaatcacttgttctgacacacctgagtcgatgcgattctgacctttgcgaaatgaatgcgggaatgcctaaaggcaatctaaacgagcaggatccgaaacactgtcccgagtctgagaagtgcctactaagtatcgaagatgaagaaagtcagcaatctatcctgtcatctttggagaaccactcacagcagagcacccagcccgaaatgcataaatacggccagctggtgaaggtcgagctggaagaaaacgctgaagacgacaaaacggagaaccagatcccacaaaggatgactcggaacaaagcaaatacaatggccaaccagagcaaacagattctggccagctgcaccttgctctccgagaaggacagcgagagctcaagcccccggggacggatccgactgaccgaggacgatgatcctcagatccaccacccgcggaaacgaaaggtctcaagggtgccacaaccagtgcaagtcagtccctcccttctacaggctaaggagaagacccaacagagtctcgccgccatcgttgattccttaaaattagacgagatccaaccctacagttcggagcgggccaatccctacttcgagtacctccacattcggaagaagatcgaggaaaaacgaaagcttttgtgctccgtcatcccacaggctccccagtattatgacgagtatgttaccttcaacgggtcatacctgctggacggcaacccactgtcgaagatctgtattcccaccatcactcctccaccgtcgctgtcagaccctttgaaggaactctttcgccaacaggaagtggttcgcatgaagttaaggctacagcatagtatcgagcgagaaaagctgattgtatccaatgagcaggaggttttgagggttcactatcgggcagcacgaacacttgccaatcagaccctccccttttctgcctgcactgtgctgctcgatgccgaggtgtataacgtgcccctggattctcagagcgacgactccaagacatccgtgagagaccgctttaatgcacgacagtttatgagttggctccaggacgttgatgacaagttcgacaagctgaaaacttgcttgctgatgagacaacagcacgaggccgccgctctgaacgctgtccagagactcgagtggcaactcaaactccaggagctggatcctgcaacttataagtccatttctatttacgaaattcaagaattctacgtgccactggttgacgtaaacgacgatttcgagctgacaccgatctag

SEQ ID NO: 80407 - DNA, 1116 bp, Artificial Sequence
  derived and/or modified sequence
atgcccaagagcggcttcaccaagcccatccagagcgagaacagcgattccgacagcaatatggtggagaaaccctacgggagaaagagcaaagataaaatagctagttatagcaaaactcccaagattgagagatccgatgtcagcaaggagatgaaggagaagtcgagcatgaaacgcaagctgccttttaccatctcgccatccagaaatgaagagcgcgatagtgacaccgagaaggagggacctgaaaaaaagaaaactaaaaaggaggctggcaacaagaagtcaacccctgttagcatcctgttcggttaccctctgtccgagcgaaagcagatggcattgctgatgcagatgaccgccagagacaacagccccgattctacaccaaatcacccgagtcagacaacacccgctcaaaaaaagactcctagtagttcctccaggcagaaggacaaagtgaacaagcggaacgagcggggtgagacacccctgcatatggcggccattaggggagacgtgaagcaggtgaaagagctgatatctttaggggctaatgtgaacgtgaaggactttgccggctggacaccgctccatgaagcctgtaatgtgggctactacgacgtcgccaaaatccttattgctgctggagccgatgtaaacactcaagggttggacgacgacacaccgctgcatgatagcgcctctagtggacatcgggacattgtcaagttgctactgcgacacggaggaaaccctttccaggccaacaagcatggggagagaccagtcgatgtcgctgaaactgaagagttggaactgctactcaaaagggaggtgccactgtccgacgacgacgagagctacacagactctgaggaagcacaaagcgtgaatccaagctcagtggatgaaaacatcgacagcgaaacagaaaaggattccctcatttgtgaaagtaaacaaatcctgccctcgaagacacctctgccaagtgccctggacgagtacgagtttaaggatgacgatgacgaggagatcaacaagatgatcgatgatcggcatattctgaggaaggaacagaggaagaagaagcgaaaagagaaaaagtag

SEQ ID NO: 80408 - DNA, 10459 bp, Artificial Sequence
  derived and/or modified sequence
gtgctcgcgtcgcagccaatcgcggggcgacgctgtcctgggagcgaggaggctgtggtgagagacggaccgagaccggagatgttttcaagcccggctccggcggctttacaggcggctgcagcggcgacgaagacaacgacagcgacggctacgccgaagcactcgttccgggggtgaagcctcctgcgccggccttgcctcggatccaggatgagaagactgataaaagaagaagctagctgaacagctgtaaaatgcccaaatctgggttcacaaaaccaattcagagtgaaaattctgacagtgacagcaatatggtagagaaaccatatggaagaaagagtaaagacaagattgcatcctacagcaaaactccaaaaattgaacgaagtgatgtgagcaaggagatgaaagagaaatcatccatgaaacgtaaacttccttttactattagcccatcaagaaatgaagaacgagattcagacacagagaaagaaggtccagaaaagaagaagacaaaaaaggaagctggaaataagaaatccacaccagttagcattctttttggttatccactctctgagcgaaaacagatggcacttcttatgcagatgacagcaagagacaacagtccagattccacaccaaatcatccatcacaaacaacgcctgcccaaaagaaaactcccagttcttcatctcgacagaaagataaagttaataaaagaaatgaacgtggtgaaactcctttacacatggctgctattcgaggagatgtgaaacaagttaaagaattaataagtttaggggcaaatgtgaatgtgaaagattttgcaggttggacaccactgcatgaagcttgcaatgttggatattacgatgttgctaagatacttatagcagctggagcagatgttaacacacaaggattagatgatgacactccactccatgattctgctagtagtgggcacagagatatagtaaagctgttacttcgtcacggtggaaatccatttcaagctaataaacatggggagcgtccagtggatgtagcagaaacagaggagttggagttgctactaaaaagagaggtgcctttatctgatgatgatgaaagttacacagattccgaagaggctcaatctgtaaatccttctagtgttgatgaaaatattgactctgaaacagagaaagactctctcatctgtgaaagtaaacagatacttcccagtaaaacacctcttccatctgcccttgatgagtatgagttcaaagatgatgatgatgaagaaattaataagatgattgatgataggcatattcttaggaaagaacaacgaaaagaaaatgaacctgaagcagaaaaaactcatttatttgcaaaacaggagaaagccttctatcctaaatcatttaaaagtaaaaaacaaaagccatctagggtcttatattcaagtactgaaagttctgatgaagaagctcttcagaataaaaagatttctacttcatgttccgtcatccctgaaacatcaaattctgatatgcaaaccaaaaaggaatatgtagtttcaggtgaacacaaacagaaaggcaaagttaaaagaaaattgaaaaatcagaataaaaataaagagaaccaagagctaaagcaagaaaaggaaggaaaagaaaatacaagaataacaaacttgacagtaaatactggactagattgttcagaaaagaccagagaggaggggaactttaggaaatcttttagcccaaaagatgatacttcattacatttatttcatatttccactggtaaatctcccaaacattcttgtggattaagtgaaaaacagtcaacaccactaaaacaagaacatactaaaacatgtttatcaccaggaagttctgaaatgtcattacagcctgatcttgttcggtatgataatacagaatctgaattcttgccagaaagttcaagtgtaaaatcttgtaagcataaggaaaaaagcaaacatcagaaagatttccacttagaatttggtgaaaaatcaaatgccaaaataaaggatgaagatcatagtccaacatttgaaaattcagattgcacactgaaaaaaatggataaagaaggtaaaacattaaaaaaacataaattgaagcataaagagagggaaaaagaaaagcataaaaaagaaattgaaggtgaaaaggaaaaatacaaaactaaggatagtgccaaagaactgcagaggagtgtggaatttgatagagaattttggaaagagaatttttttaaaagtgatgaaactgaagatctctttttaaatatggaacatgaatccttaacattagaaaaaaaatcaaaattggaaaaaaacatcaaagatgataaatcaaccaaggaaaagcatgtgtcaaaagagaggaactttaaagaggaacgagacaagattaaaaaggaaagcgagaaatcttttagggaggaaaaaataaaagatctaaaagaagagagagaaaacatacccacagataaagactcagaatttacttctttgggtatgagtgccattgaggaatctatagggcttcatttagtggaaaaggaaatagacattgaaaaacaagaaaagcatataaaggaaagtaaagaaaaacctgagaagcgatctcaaattaaagaaaaggacattgagaagatggaaagaaaaacctttgaaaaagaaaagaagataaaacatgagcataagtcagaaaaagacaaattagatcttagtgaatgtgttgataaaataaaagaaaaggacaagctatattcgcatcacacagaaaaatgccataaagaaggtgagaagagcaaaaatactgctgctattaaaaaaactgacgacagagagaaaagtagagaaaagatggataggaaacatgacaaagaaaagcctgaaaaagagaggcatctagcagaaagcaaagaaaagcacttgatggagaaaaaaaataaacaatcagataatagtgaatacagtaaatcagaaaaaggcaaaaataaagaaaaagacagggagctagataaaaaggaaaaatctagagataaagaaagtataaatataactaactccaaacacatacaggaagaaaaaaaatcaagtatagtagacggtaataaagcacaacatgaaaaacccttatcccttaaagaaaaaacaaaagatgaacctttgaaaactccagatggaaaagaaaaagataaaaaagataaagatatagatagatacaaagaacgagacaaacataaagataaaattcaaataaatagcttactcaaactaaaatctgaagcagataagcctaaacctaagtcatcaccagcatcaaaagatacccgacctaaagaaaagaggttagtgaatgatgatttaatgcagacaagttttgaacgaatgctaagccttaaagacctagaaatagaacagtggcacaaaaaacataaggaaaaaattaagcaaaaagaaaaggaacggttgagaaaccgaaactgtttagaacttaaaataaaagataaagaaaaaacaaagcatacaccaactgaatccaaaaataaagaacttactaggtcaaagagttcagaagtgactgatgcatataccaaggagaaacaacctaaagatgctgtaagtaacagatcacaatctgttgacaccaaaaatgtaatgactttagggaagtcatcttttgtttcagataatagcttaaacaggtctcctagatcagaaaatgaaaagccgggtctcagctccagatctgtatccatgatttctgttgctagttcagaagattcctgccatactacagtgacaaccccaaggcctccagttgagtatgactctgactttatgttagagagttcagaatcccaaatgtccttttcccagtcaccttttttgtcaattgccaaatctcctgctcttcatgaaagggaattggacagcctggctgacttgccggagcggattaaaccaccatatgcaaacagactttcaacatcccatcttaggtcatcttctgtagaagatgttaaactaattataagcgaggggagacctaccatagaagttcgaagatgtagcatgccttctgtcatttgtgaacataccaaacaattccaaacaatatcagaagagagcaatcaaggtagcttattaactgtgccaggagatactagtccttctcccaaacctgaggtattctcaaatgtgcctgaaagagacctttcaaatgtatctaacatacattccagttttgcaacttctccaactggagcttcaaacagcaagtatgtttcagctgatagaaatctcatcaagaatactgccccagtgaacactgtaatggacagtccagtgcatttagagccatctagtcaggttggtgtgatccagaataaatcatgggagatgcctgttgatagactagagacattaagcaccagagactttatctgcccaaattctaacatacctgatcaagaatcctctcttcagagtttttgtaattctgaaaataaggtattgaaagaaaatgctgattttttatccctgcgccagactgaactgccaggaaactcttgtgctcaggatccggcatcctttatgcctccacagcagccttgctctttccccagccaatcactttcagatgctgaatcgatttctaaacatatgtctttgtcatatgttgctaatcaagagccaggtattttacaacaaaaaaatgcagttcagattattagttctgctttagatactgataatgaatctacaaaagatacagaaaatacttttgtcctaggagatgttcaaaaaacagatgcctttgtcccagtgtactctgacagcactattcaagaagcatcaccaaactttgagaaagcttatactttacctgtgttaccatcagaaaaggactttaatggaagtgatgcctctacccagctaaatacacattatgcatttagcaaactaacttacaagtcttccagtggccatgaagttgagaatagcacaactgatactcaggtcatttcacatgaaaaagaaaacaaactggagagtttggttttaactcatttgagtaggtgtgattctgatttatgtgaaatgaatgcagggatgccaaaaggaaacctaaatgaacaagatccaaaacattgtcctgaaagtgaaaagtgtttgctttccatagaagatgaggaatctcaacaaagcattttatcaagtctggaaaaccattcacagcagtcaactcaaccagaaatgcataaatatggtcagttagttaaagtagaattagaagaaaatgccgaagatgataaaactgaaaaccaaatccctcaaagaatgactagaaacaaagcaaatacaatggcaaatcaaagcaaacagattcttgctagctgtacactattatcagaaaaagacagtgaatcctcatctcctagaggaagaataagattaactgaagatgacgatcctcaaattcaccatccacggaaaaggaaagtgtcacgtgtacctcagcctgtgcaagtgagtccctctttactacaagcaaaagagaaaactcagcaatctctggcagccattgtagattctctaaaactagatgagattcagccatacagttcagagagagcaaatccatattttgaatacttgcacataaggaaaaaaatagaagaaaaacgcaaattactgtgtagtgtgattcctcaagcacctcagtactatgacgaatatgtaacatttaacggatcatatctcctggatggaaaccccttaagcaagatttgtattcccacaattacaccaccaccttcactgtcagatccacttaaagagctttttcgacaacaggaagttgtaaggatgaaactacgtttgcaacacagtattgaaagggaaaaactcattgtatccaacgaacaagaagttttgcgagttcattacagagctgcaagaacattggcaaatcaaacactgccatttagtgcttgtactgttttgctggatgccgaagtatacaatgtaccattggactctcagtctgatgacagtaaaacttctgtgagggatcgctttaatgcaagacaattcatgtcttggttacaagatgtggatgataaatttgacaaattaaagacctgtcttttaatgaggcaacaacatgaagctgcggctttaaatgctgtccagaggttagaatggcagctcaaactccaggaacttgatcctgccacctataaatctatcagcatttacgaaatccaggagttttatgttccccttgttgatgttaacgacgactttgaattgactcctatatagcagtcagtacttcctgatggtattgtcctaaactggtgatgctcaagcattatactgtggaatactgccttttgacaaaaatactcatgcctttacaattgttagtaaagttcgattatagttggttatgtagtaaacactgtcattttataaaaaatgagaattattttggatcttagatccaaacacagtttctaatagaaaactattatttatattgggaaaggtaactattgcattagagcatgttggcagactggtaggtatttaaaaagttgagaatctgctaacagcgctggaagttgttagcgctctaagtaataagataaccactagtattcaaatctctttcaggttttattaaaaaatatatatcaataaactaaaaggttcaattcctaccaaatagtttctaatgtgggagaaaaacttggcacaaaatttcttcagtttattatctgtaaattgtacagttttctttttgaaagttttaatattgtcttcctttttaataacttattttatacatattgtgcagatgtaaatcttgtaattaatggtcaaactgtataaagggattggtagtcaaaacatgtacaaagaaatacctgtaaaactgttttgtctcatgttttattggaccaaagttgtggtttgtatggagtgtagtagtagtgtgtacaggtagaaaacttttaaatacagcatgcaggtgtttcagttagcttgttttcatcaccataactgcaaagatgtggcttagttgtattgcatgcttcctataatttaactctccataattgatgcctgcagtagtgtaaggcatttcatactagtctcctctagtagacctgtgacttactgtgttggacatattatttagacttagtcatacaaagaaacttagctcttttttcatctcacagtaaagcctatttccccaggaaaaaaataaatgcctttgaatgaaaattctgaaattgtaaatgtctattttaatattcacctatgaaagaatctgtgaatatatgtaaatacgtttaataaattttattggtcatgttaaatcattgtaaaacttttttacattgcttaatgttttaagcttaatagcctttgcacttttaaaataaaaaccaagtatgcaaatcaaagatatttggtagtcaaaataagtaaaagaaatataggaatattccagtcaatctctgaaatgtttatgaaaaacaggttaatatgttgtatttttttccttgtatcaagatgcaaaacataatttgcaaaattttataattgaaataaaacttggtatgctgttttataataaattagcaatatactttaaaaaaaatccagtttctcctataacatgatgtaaattaaatattcaggaatatttcaggtctgaaatctgctgctgaacttgttagacatttttgaaaggaaaattaggttagcgtacaatttatcataaatatatgaggtaaaatttgcaaaactttccacagtactttcttgaattataatactgaatgttttctgttccgatagagaaaagtgaagcaaatatgtgaggaatgaagtgatctagtgcaagttggtaattccagctaatgggagagaatgtaaatgtgcaaaggtacatattaagcttagggatttttgaatttttacgtcagtttatattttaattcttactgtacttggcatgcgcaataaagcagcacatgtaaaaaaaaaatacacagtgcaaggactttattataaaggttggatgtagttttccttagaaatttaggtgagagattttggccttttttattggataaattgggccagaaaggcagggtagatttcgaagcactggttctgttgaagttaagtttattaagcctgggaacattaaaagctaatttataaaagcaatactttttaatatgaaaacttactgcaaagtttgtttatacttttgcctaaaaaggaaattggatgggatactgtggcaaatcataaaaaaccagataattgaactttgaagttatagaaaatcagagaggggtaagtttatagggcattttgttctgatggttcaaccagaggtctgggaaatagcactgttggcccaaacagaacaggcttttagaagataaaagcgacaagaaggaatctggtgaattttagtcatcccagctttttagtcttaaccacagttctcactctcttaaatggtacctcaaaaagctggagcctctctgccatgattatgcttctacaaatttcttttataaagagactcaaagctaatgatagcttaaaagaaaagttaatgccttctcattggaaatgtataatcaaataagtagttaagggcttttggtattaaagatattctgaagctctgaaatgctagaaaaaaatttggaatggagtatatgcctgaaaaggttttggattcagaaagaaaaaggatggttagtttaatcagtgattctttttaaactcttcaaatatcatgaacaagatactaaattgtacctaaggatttgtatttctttacaatttgttctaaatatctgtttaatgactagttgatatttgtgcatgttatttaataaagagttatatttttatagaaaaaaagagtgaaatgtgtgctaactgtttttttacttaattttacttgggcagctagcaaaattgcagaaatatgcatcctgggaaaagaaacagcctttgaagaattagcctttcaagttcaaatctatttaataatgagaagtctcacaagtgaatttttaagtacaggcatacctcagacgtactttaggttccagaccatctcagtaaagcaaataccacaacaaagcgagtcaggaggaattttttggtttcccagtgcatataaaagttttgtttatactatattaagtgtgcaatagcattatgtctaaaaatatgtacataagtttaaaaatattttattgctaaaaatggtaacaaagtgagcacatgctgttggaaaaagagcaccaatagacttgcttgaagcagggttgccacaaaccttcaatttgtaaaaaacgccaatatgtacaaagcacaataaagcaaagcacaatagaacaggattgcctgtattagacatgctacaaacttcataactggaaacatctcaaagaccccatgaagctcatttgaatgggacttaacaattagacagttattttagaaattgagtgcagacctaaatacatagttttccaaaaagaaaattattgtctctgatatcttaaaacataaaaacccaaaattttatatagaagaaattgactctgtaaaacgcaatgaaatagtcctctttttaaacagtttaaaggaagcattttcaccgtttgtaaaaattatttttaaatatttagggcaaaatttttgttagataataatggaaaagcttgtgtgagtttagtggttaaaatatcttgtaattcatcattatttaagtgacttcttgggagccgtctttgtacctaaaatggagtttttttttaagcctccacagagatagtcacccaaagtatttccagtcagtaaaagtagaattcatagaaaaaactgaggcaaattaaaacaattccattaatcaaaatggctttaaacaaattaagtattagcataaaaatagcaaaaagtacaactaaaaaaatggttgggttttcccagtggttaaatgctatataataactgcaaataaaagtttttttgtacatggacagcgtcctcataaaagaaaataggccaggccaggcgcagtggctcgcgcctgtaatcccagcactttgggaggccaaggcgggcggatcacgaggtcaggagatcgagaccatcctggctaacacggtgaaaccccgtctctactaaacaaaatgcaaaaaatcagccgggtgtggccgcgggcgcctgtagttccagctactcgggaggctgaggcaggagaatggcgtgagcctgggaggcggagcttgcagtgagccgagatcgtgccactgcactccagcctgggcgacagagcgagactccgtctc

SEQ ID NO: 80409 - DNA, 1370 bp, Artificial Sequence
  derived and/or modified sequence
gtgctcgcgtcgcagccaatcgcggggcgacgctgtcctgggagcgaggaggctgtggtgagagacggaccgagaccggagatgttttcaagcccggctccggcggctttacaggcggctgcagcggcgacgaagacaacgacagcgacggctacgccgaagcactcgttccgggggtgaagcctcctgcgccggccttgcctcggatccaggatgagaagactgataaaagaagaagctagctgaacagctgtaaaatgcccaaatctgggttcacaaaaccaattcagagtgaaaattctgacagtgacagcaatatggtagagaaaccatatggaagaaagagtaaagacaagattgcatcctacagcaaaactccaaaaattgaacgaagtgatgtgagcaaggagatgaaagagaaatcatccatgaaacgtaaacttccttttactattagcccatcaagaaatgaagaacgagattcagacacagagaaagaaggtccagaaaagaagaagacaaaaaaggaagctggaaataagaaatccacaccagttagcattctttttggttatccactctctgagcgaaaacagatggcacttcttatgcagatgacagcaagagacaacagtccagattccacaccaaatcatccatcacaaacaacgcctgcccaaaagaaaactcccagttcttcatctcgacagaaagataaagttaataaaagaaatgaacgtggtgaaactcctttacacatggctgctattcgaggagatgtgaaacaagttaaagaattaataagtttaggggcaaatgtgaatgtgaaagattttgcaggttggacaccactgcatgaagcttgcaatgttggatattacgatgttgctaagatacttatagcagctggagcagatgttaacacacaaggattagatgatgacactccactccatgattctgctagtagtgggcacagagatatagtaaagctgttacttcgtcacggtggaaatccatttcaagctaataaacatggggagcgtccagtggatgtagcagaaacagaggagttggagttgctactaaaaagagaggtgcctttatctgatgatgatgaaagttacacagattccgaagaggctcaatctgtaaatccttctagtgttgatgaaaatattgactctgaaacagagaaagactctctcatctgtgaaagtaaacagatacttcccagtaaaacacctcttccatctgcccttgatgagtatgagttcaaagatgatgatgatgaagaaattaataagatgattgatgataggcatattcttaggaaagaacaacgaaaaaagaaaaggaaggaaaagaaa

SEQ ID NO: 80410 - DNA, 6119 bp, Artificial Sequence
  derived and/or modified sequence
atgccgaagtccggttttactaaacctatccagtcggagaacagcgatagcgatagtaacatggtcgaaaagccatacggacgaaaatcaaaagacaagatagcctcttacagcaagaccccaaagatcgagcggagtgatgtgtctaaggagatgaaagaaaaatcttctatgaagcgaaaacttccatttactatatccccatcgcgaaatgaggagcgggattctgacacagagaaggaaggcccagaaaagaaaaaaactaagaaggaggctggaaataaaaagtcgacacccgtgtcaatcctctttgggtaccccctgagtgagcgcaaacagatggctctcctgatgcagatgaccgctcgcgacaattcgccagactccacacccaaccatccttctcaaacgacccccgctcaaaagaagactccctcatctagtagtcgccaaaaggacaaagtaaacaaaagaaacgaaaggggcgagacaccacttcacatggcggctatcagaggcgatgtgaagcaggtcaaggaacttatctcactcggagcaaacgtcaatgttaaggactttgcaggttggaccccccttcacgaggcctgtaatgtgggctattacgatgttgctaaaattctgatagcagcaggcgctgacgtgaatacacaggggctggatgatgacactccattacacgactcagcttcctcggggcaccgagacatcgtgaagctgctcctccgccatggaggtaacccgtttcaggcaaacaagcatggagaacgccctgtcgacgtggcagagacggaggaactggagctactgctaaaaagagaggtacccttatcggatgatgatgagtcatacaccgacagcgaggaggcacaaagcgttaacccgtcttcagtagatgaaaacatcgacagtgagaccgaaaaggatagcctgatatgtgagagcaaacagatcctcccctctaagactcctcttccatcagcgctggatgaatatgagtttaaggatgatgacgacgaagagataaataaaatgattgacgaccggcacatcctgaggaaagagcaacgcaaggaaaacgaacctgaggccgagaagactcatcttttcgctaaacaggagaaggcattctacccgaaatcctttaagtcaaagaaacaaaaaccctctcgagtcttgtactcatcgaccgagtcgtccgacgaggaggctcttcaaaacaaaaaaatatccacctcttgctcggtcattcctgagacatcaaactcagacatgcagacgaaaaaggaatatgtggtatctggagagcataaacagaaaggcaaagtaaagaggaagctgaaaaaccagaacaaaaacaaggagaatcaggaattgaagcaggaaaaagaggggaaagagaacactaggatcaccaacctaacagtgaatacaggtctggactgttccgagaaaacgagggaggaaggaaactttaggaaatcattttccccgaaggatgacacctccctgcacctgtttcatatttcaaccggaaagtctccaaaacacagctgcgggctgagcgagaagcaatcaaccccactgaagcaggaacacaccaaaacctgtttgagtcccggttcctcggaaatgagcctgcagccagatttggtgcgctacgataacacagagtccgagtttctccccgagtccagctcagtgaaatcttgcaagcataaggagaagtcaaaacaccagaaagattttcatctcgaatttggtgagaagtccaatgcgaagatcaaagatgaggaccattctccaacattcgagaattcagattgtacccttaaaaagatggataaggagggtaagacactgaagaagcacaaactcaaacacaaagaacgtgagaaggagaaacacaaaaaagagatagaaggggaaaaggaaaaatataaaacaaaggacagcgccaaggaactgcagcgctctgtggagtttgacagggaattctggaaagagaatttttttaagtccgatgagaccgaggacttatttctgaacatggaacatgaatccctgaccctggagaagaagagtaaactggagaagaacatcaaggacgacaaatcaactaaggagaagcatgtgtccaaggaaaggaacttcaaggaagagcgggataaaatcaagaaggagagtgagaagagctttcgtgaggagaagataaaggacctaaaggaggagagggagaatatccccaccgacaaggatagtgagttcacaagccttggcatgtccgcgatagaggagagcattggactgcacctcgtcgagaaagaaattgacatcgaaaaacaggagaaacatatcaaggagtcaaaggagaaacccgaaaagagaagtcagatcaaagaaaaggacatcgaaaagatggagcgtaagacattcgagaaagagaaaaaaattaagcacgaacataagagtgaaaaagataagctggacctgtccgaatgcgtcgataaaataaaagagaaggacaagctttatagtcaccacaccgaaaaatgccacaaggaaggggaaaaatccaaaaacactgcagctatcaaaaagacagatgatagggaaaaaagtcgggagaagatggacaggaagcacgacaaagaaaaacccgaaaaagagaggcacctggcggagagcaaggagaagcatcttatggaaaagaaaaacaagcagtccgacaacagcgagtacagtaaaagtgagaagggaaaaaataaagaaaaagatcgcgaactcgacaagaaggaaaagtctagagataaggagtccattaatatcaccaattctaagcacatccaggaggagaagaaaagttccatcgttgacgggaacaaggctcagcacgagaagcccctgtccctaaaagagaaaacgaaagatgaacctctgaaaacaccagatggaaaggagaaggacaagaaggacaaggacatcgatcggtacaaggagcgggacaaacacaaggataagatccagattaactcattgctgaagctgaagtccgaagcagacaaacccaaaccaaagtcttctcctgcttctaaggataccaggcctaaggagaaacgactggtgaacgacgatctgatgcagacctccttcgagagaatgctgagcctcaaagacctggagatcgagcaatggcataaaaagcacaaggaaaagataaagcagaaggaaaaggagcggctccggaacaggaattgcctggagctgaaaattaaggataaggaaaaaacaaagcacactcctactgagtcaaaaaataaggaactgactcgctctaaatccagcgaagtcaccgatgcttacacaaaagagaaacagcctaaggacgccgtaagcaatagatcccagtctgtggataccaaaaatgtgatgacactggggaaatcttcctttgtgtctgacaattcactcaacaggtctcctagatccgagaatgaaaagcccggattgtcatcccgatctgtctccatgatatctgtcgcctccagcgaagatagctgccacacaactgttacaacacccaggccgcctgtcgagtacgactcagacttcatgctagaatcttcagagtcccagatgagcttcagccagagcccatttctgagtatcgctaagtcgccagcgctgcatgagcgggagctagactcgctcgccgatctgcctgagcggatcaaacccccatacgcaaacaggctttctactagtcatctgagatcaagtagcgtggaggacgtgaaactgatcatttctgagggcagacctactatcgaggtccgccgttgttccatgccatcagttatctgtgagcatactaagcaattccagactatatccgaggaatctaaccagggatcattgttgacagtgcccggagacacatccccttccccaaagcccgaagttttctctaatgtgcctgaacgagatttgtctaatgtatcgaacatccatagttcgtttgcaacaagccctaccggagcatccaactcaaagtacgtgtctgccgacaggaacctcatcaagaatactgcgccagtaaacacggtgatggatagccctgtgcacctggagccgagctcacaggtgggagtaattcagaacaaatcatgggagatgcctgtggatcgactcgagaccttatccacccgcgattttatttgtcctaatagcaacatcccggatcaggaaagttcgttgcagagcttttgtaacagtgagaataaggttctgaaagagaatgccgactttcttagcctgagacaaacagagcttcctggtaactcctgtgcacaggaccccgcttccttcatgcccccacagcagccatgttcgttccctagccaaagtctgtccgacgccgaatccatttctaagcatatgtctcttagttacgtcgcaaaccaggagcccggaatacttcagcagaagaatgctgtgcagatcatttcgtcagccctggatactgacaatgagtcaacaaaagacaccgaaaacacatttgtgctgggcgatgtgcagaaaaccgacgcttttgtacccgtgtattcagattctactatccaggaggctagccccaacttcgagaaggcatatacactaccagtgctgccctctgagaaagacttcaacggcagtgacgcaagcacccaattgaacactcactatgccttctcaaaactaacttacaagagctctagcggacacgaagtggaaaattctaccacagacacgcaggtcatatcacacgagaaggagaataagctcgaatcccttgtactgacccatttgtctcgctgtgactctgatctgtgtgaaatgaatgctgggatgcctaaagggaatttaaatgaacaggatccaaagcattgtcctgagtccgagaaatgcctgttaagcatcgaggacgaagagtctcagcaatccattctgagtagcttggagaaccacagtcagcagtccactcaacccgagatgcacaaatacgggcagctcgtgaaggttgaactggaggagaatgcagaggatgataaaaccgaaaaccagatcccacagaggatgacgcgtaataaggcaaataccatggccaaccagtcaaagcaaatcctggcttcttgtacattgctgtcagagaaggattctgagtcgagcagcccacgtggcagaatacggctgactgaagatgacgacccacagattcaccatcccagaaaacggaaagtctcccgcgtcccacagcctgtgcaagtgtctccaagtttattacaggccaaggaaaaaacgcagcagagcttggctgctatcgtcgacagcctgaagctcgacgagatccagccttactcctcagagagggccaacccgtatttcgagtatttacacatccggaaaaagattgaggaaaagcgtaagcttttgtgctctgtgattcctcaggccccacagtactacgacgagtatgtgacgtttaacgggtcctatcttcttgatggtaacccactgtcaaagatttgtatcccaaccattacacccccaccatctctctcggacccattgaaagagctttttagacagcaggaagtggttaggatgaagctacgcctccagcactcaatcgaacgtgagaaattgattgtttccaatgagcaggaggtcctacgcgtgcattacagggctgccagaactctcgcgaatcaaacactccctttcagtgcctgtactgttttgctggatgccgaggtgtataacgtacctctcgattcacagagtgacgactctaaaacctccgtccgggatcgcttcaacgctcggcagttcatgagctggctgcaggatgtggatgacaagttcgataagctgaaaacctgcttactaatgaggcagcaacacgaggccgcagctctgaacgccgtgcagaggctggagtggcagctgaagctgcaagagctggaccccgcaacatataagagcatatctatctacgagattcaagagttttatgttccactagtcgacgtcaatgacgactttgaactgacacctatcta

SEQ ID NO: 80411 - DNA, 1116 bp, Artificial Sequence
  derived and/or modified sequence
atgcctaaatccggattcaccaagccaatccagtcagagaatagcgactctgacagcaatatggtggagaagccctatggacgcaagtccaaagacaaaatagcctcttatagtaagacgccaaagattgaacgaagtgatgtgtcaaaggaaatgaaagaaaaaagcagtatgaagcggaaactaccgttcacgataagtcctagtaggaacgaagaacgggattccgatacagaaaaggaggggccagagaagaaaaagaccaagaaggaagccggtaacaaaaaaagcacgcctgtatccatactgttcggctaccccctgtcagagcggaagcagatggcattgctaatgcagatgacggccagagataattctccggacagtacccccaaccatccatcacagactacccctgcacagaagaaaacaccctccagttcaagtagacaaaaggataaagtcaacaaacggaatgagcggggagagacccctctgcatatggctgcgatacgcggtgacgttaaacaggtgaaagagctcatcagcttgggcgcaaacgtgaatgtgaaggacttcgctggttggacccctctgcatgaagcatgtaacgtaggttattacgacgttgcaaagatcctgattgcggcaggcgcagacgtgaatacacaggggttggacgacgacactcctttacatgattctgccagcagcggccaccgagatattgttaaactcctgctccggcatggaggcaatcccttccaggctaacaagcacggagagcgcccagtcgatgttgccgaaactgaagagctagagctgcttttgaaacgagaggtcccactcagtgatgacgacgagtcctatactgacagcgaggaagcccaaagtgtaaatccatcaagcgtggatgagaacatcgactctgagacggagaaggactcactgatttgtgaatccaagcaaattctgcctagcaaaacacccttaccttctgcccttgacgaatacgagttcaaggacgacgacgacgaggaaatcaacaagatgatcgacgatcgccacattctcaggaaagaacaacggaagaaaaagcgcaaggagaagaagtag

SEQ ID NO: 80412 - DNA, 6120 bp, Artificial Sequence
  derived and/or modified sequence
atgcccaagagcggcttcaccaagcccatccagagcgagaacagcgacagcgacagcaacatggtggagaagccctacggcagaaagagcaaggacaagatcgccagctacagcaagacccccaagatcgagagaagcgacgtgagcaaggagatgaaggagaagagcagcatgaagagaaagctgcccttcaccatcagccccagcagaaacgaggagagagacagcgacaccgagaaggagggccccgagaagaagaagaccaagaaggaggccggcaacaagaagagcacccccgtgagcatcctgttcggctaccccctgagcgagagaaagcagatggccctgctgatgcagatgaccgccagagacaacagccccgacagcacccccaaccaccccagccagaccacccccgcccagaagaagacccccagcagcagcagcagacagaaggacaaggtgaacaagagaaacgagagaggcgagacccccctgcacatggccgccatcagaggcgacgtgaagcaggtgaaggagctgatcagcctgggcgccaacgtgaacgtgaaggacttcgccggctggacccccctgcacgaggcctgcaacgtgggctactacgacgtggccaagatcctgatcgccgccggcgccgacgtgaacacccagggcctggacgacgacacccccctgcacgacagcgccagcagcggccacagagacatcgtgaagctgctgctgagacacggcggcaaccccttccaggccaacaagcacggcgagagacccgtggacgtggccgagaccgaggagctggagctgctgctgaagagagaggtgcccctgagcgacgacgacgagagctacaccgacagcgaggaggcccagagcgtgaaccccagcagcgtggacgagaacatcgacagcgagaccgagaaggacagcctgatctgcgagagcaagcagatcctgcccagcaagacccccctgcccagcgccctggacgagtacgagttcaaggacgacgacgacgaggagatcaacaagatgatcgacgacagacacatcctgagaaaggagcagagaaaggagaacgagcccgaggccgagaagacccacctgttcgccaagcaggagaaggccttctaccccaagagcttcaagagcaagaagcagaagcccagcagagtgctgtacagcagcaccgagagcagcgacgaggaggccctgcagaacaagaagatcagcaccagctgcagcgtgatccccgagaccagcaacagcgacatgcagaccaagaaggagtacgtggtgagcggcgagcacaagcagaagggcaaggtgaagagaaagctgaagaaccagaacaagaacaaggagaaccaggagctgaagcaggagaaggagggcaaggagaacaccagaatcaccaacctgaccgtgaacaccggcctggactgcagcgagaagaccagagaggagggcaacttcagaaagagcttcagccccaaggacgacaccagcctgcacctgttccacatcagcaccggcaagagccccaagcacagctgcggcctgagcgagaagcagagcacccccctgaagcaggagcacaccaagacctgcctgagccccggcagcagcgagatgagcctgcagcccgacctggtgagatacgacaacaccgagagcgagttcctgcccgagagcagcagcgtgaagagctgcaagcacaaggagaagagcaagcaccagaaggacttccacctggagttcggcgagaagagcaacgccaagatcaaggacgaggaccacagccccaccttcgagaacagcgactgcaccctgaagaagatggacaaggagggcaagaccctgaagaagcacaagctgaagcacaaggagagagagaaggagaagcacaagaaggagatcgagggcgagaaggagaagtacaagaccaaggacagcgccaaggagctgcagagaagcgtggagttcgacagagagttctggaaggagaacttcttcaagagcgacgagaccgaggacctgttcctgaacatggagcacgagagcctgaccctggagaagaagagcaagctggagaagaacatcaaggacgacaagagcaccaaggagaagcacgtgagcaaggagagaaacttcaaggaggagagagacaagatcaagaaggagagcgagaagagcttcagagaggagaagatcaaggacctgaaggaggagagagagaacatccccaccgacaaggacagcgagttcaccagcctgggcatgagcgccatcgaggagagcatcggcctgcacctggtggagaaggagatcgacatcgagaagcaggagaagcacatcaaggagagcaaggagaagcccgagaagagaagccagatcaaggagaaggacatcgagaagatggagagaaagaccttcgagaaggagaagaagatcaagcacgagcacaagagcgagaaggacaagctggacctgagcgagtgcgtggacaagatcaaggagaaggacaagctgtacagccaccacaccgagaagtgccacaaggagggcgagaagagcaagaacaccgccgccatcaagaagaccgacgacagagagaagagcagagagaagatggacagaaagcacgacaaggagaagcccgagaaggagagacacctggccgagagcaaggagaagcacctgatggagaagaagaacaagcagagcgacaacagcgagtacagcaagagcgagaagggcaagaacaaggagaaggacagagagctggacaagaaggagaagagcagagacaaggagagcatcaacatcaccaacagcaagcacatccaggaggagaagaagagcagcatcgtggacggcaacaaggcccagcacgagaagcccctgagcctgaaggagaagaccaaggacgagcccctgaagacccccgacggcaaggagaaggacaagaaggacaaggacatcgacagatacaaggagagagacaagcacaaggacaagatccagatcaacagcctgctgaagctgaagagcgaggccgacaagcccaagcccaagagcagccccgccagcaaggacaccagacccaaggagaagagactggtgaacgacgacctgatgcagaccagcttcgagagaatgctgagcctgaaggacctggagatcgagcagtggcacaagaagcacaaggagaagatcaagcagaaggagaaggagagactgagaaacagaaactgcctggagctgaagatcaaggacaaggagaagaccaagcacacccccaccgagagcaagaacaaggagctgaccagaagcaagagcagcgaggtgaccgacgcctacaccaaggagaagcagcccaaggacgccgtgagcaacagaagccagagcgtggacaccaagaacgtgatgaccctgggcaagagcagcttcgtgagcgacaacagcctgaacagaagccccagaagcgagaacgagaagcccggcctgagcagcagaagcgtgagcatgatcagcgtggccagcagcgaggacagctgccacaccaccgtgaccacccccagaccccccgtggagtacgacagcgacttcatgctggagagcagcgagagccagatgagcttcagccagagccccttcctgagcatcgccaagagccccgccctgcacgagagagagctggacagcctggccgacctgcccgagagaatcaagcccccctacgccaacagactgagcaccagccacctgagaagcagcagcgtggaggacgtgaagctgatcatcagcgagggcagacccaccatcgaggtgagaagatgcagcatgcccagcgtgatctgcgagcacaccaagcagttccagaccatcagcgaggagagcaaccagggcagcctgctgaccgtgcccggcgacaccagccccagccccaagcccgaggtgttcagcaacgtgcccgagagagacctgagcaacgtgagcaacatccacagcagcttcgccaccagccccaccggcgccagcaacagcaagtacgtgagcgccgacagaaacctgatcaagaacaccgcccccgtgaacaccgtgatggacagccccgtgcacctggagcccagcagccaggtgggcgtgatccagaacaagagctgggagatgcccgtggacagactggagaccctgagcaccagagacttcatctgccccaacagcaacatccccgaccaggagagcagcctgcagagcttctgcaacagcgagaacaaggtgctgaaggagaacgccgacttcctgagcctgagacagaccgagctgcccggcaacagctgcgcccaggaccccgccagcttcatgcccccccagcagccctgcagcttccccagccagagcctgagcgacgccgagagcatcagcaagcacatgagcctgagctacgtggccaaccaggagcccggcatcctgcagcagaagaacgccgtgcagatcatcagcagcgccctggacaccgacaacgagagcaccaaggacaccgagaacaccttcgtgctgggcgacgtgcagaagaccgacgccttcgtgcccgtgtacagcgacagcaccatccaggaggccagccccaacttcgagaaggcctacaccctgcccgtgctgcccagcgagaaggacttcaacggcagcgacgccagcacccagctgaacacccactacgccttcagcaagctgacctacaagagcagcagcggccacgaggtggagaacagcaccaccgacacccaggtgatcagccacgagaaggagaacaagctggagagcctggtgctgacccacctgagcagatgcgacagcgacctgtgcgagatgaacgccggcatgcccaagggcaacctgaacgagcaggaccccaagcactgccccgagagcgagaagtgcctgctgagcatcgaggacgaggagagccagcagagcatcctgagcagcctggagaaccacagccagcagagcacccagcccgagatgcacaagtacggccagctggtgaaggtggagctggaggagaacgccgaggacgacaagaccgagaaccagatcccccagagaatgaccagaaacaaggccaacaccatggccaaccagagcaagcagatcctggccagctgcaccctgctgagcgagaaggacagcgagagcagcagccccagaggcagaatcagactgaccgaggacgacgacccccagatccaccaccccagaaagagaaaggtgagcagagtgccccagcccgtgcaggtgagccccagcctgctgcaggccaaggagaagacccagcagagcctggccgccatcgtggacagcctgaagctggacgagatccagccctacagcagcgagagagccaacccctacttcgagtacctgcacatcagaaagaagatcgaggagaagagaaagctgctgtgcagcgtgatcccccaggccccccagtactacgacgagtacgtgaccttcaacggcagctacctgctggacggcaaccccctgagcaagatctgcatccccaccatcacccccccccccagcctgagcgaccccctgaaggagctgttcagacagcaggaggtggtgagaatgaagctgagactgcagcacagcatcgagagagagaagctgatcgtgagcaacgagcaggaggtgctgagagtgcactacagagccgccagaaccctggccaaccagaccctgcccttcagcgcctgcaccgtgctgctggacgccgaggtgtacaacgtgcccctggacagccagagcgacgacagcaagaccagcgtgagagacagattcaacgccagacagttcatgagctggctgcaggacgtggacgacaagttcgacaagctgaagacctgcctgctgatgagacagcagcacgaggccgccgccctgaacgccgtgcagagactggagtggcagctgaagctgcaggagctggaccccgccacctacaagagcatcagcatctacgagatccaggagttctacgtgcccctggtggacgtgaacgacgacttcgagctgacccccatctag

SEQ ID NO: 80413 - DNA, 1116 bp, Artificial Sequence
  derived and/or modified sequence
atgcccaagagcggcttcaccaagcccatccagagcgagaacagcgacagcgacagcaacatggtggagaagccctacggcagaaagagcaaggacaagatcgccagctacagcaagacccccaagatcgagagaagcgacgtgagcaaggagatgaaggagaagagcagcatgaagagaaagctgcccttcaccatcagccccagcagaaacgaggagagagacagcgacaccgagaaggagggccccgagaagaagaagaccaagaaggaggccggcaacaagaagagcacccccgtgagcatcctgttcggctaccccctgagcgagagaaagcagatggccctgctgatgcagatgaccgccagagacaacagccccgacagcacccccaaccaccccagccagaccacccccgcccagaagaagacccccagcagcagcagcagacagaaggacaaggtgaacaagagaaacgagagaggcgagacccccctgcacatggccgccatcagaggcgacgtgaagcaggtgaaggagctgatcagcctgggcgccaacgtgaacgtgaaggacttcgccggctggacccccctgcacgaggcctgcaacgtgggctactacgacgtggccaagatcctgatcgccgccggcgccgacgtgaacacccagggcctggacgacgacacccccctgcacgacagcgccagcagcggccacagagacatcgtgaagctgctgctgagacacggcggcaaccccttccaggccaacaagcacggcgagagacccgtggacgtggccgagaccgaggagctggagctgctgctgaagagagaggtgcccctgagcgacgacgacgagagctacaccgacagcgaggaggcccagagcgtgaaccccagcagcgtggacgagaacatcgacagcgagaccgagaaggacagcctgatctgcgagagcaagcagatcctgcccagcaagacccccctgcccagcgccctggacgagtacgagttcaaggacgacgacgacgaggagatcaacaagatgatcgacgacagacacatcctgagaaaggagcagagaaagaagaagagaaaggagaagaagtag

SEQ ID NO: 80414 - protein, 326 aa, Artificial Sequence
  derived and/or modified sequence
MHRTTRIKITELNPHLMCVLCGGYFIDATTIIECLHSFCKTCIVRYLETSKYCPICDVQVHKTRPLLNIRSDKTLQDIVYKLVPGLFKNEMKRRRDFYAAHPSADAANGSNEDRGEVADEDKRIITDDEIISLSIEFFDQNRLDRKVNKDKEKSKEEVNDKRYLRCPAAMTVMHLRKFLRSKMDIPNTFQIDVMYEEEPLKDYYTLMDIAYIYTWRRNGPLPLKYRVRPTCKRMKISHQRDGLTNAGELESDSGSDKANSPAGGIPSTSSCLPSPSTPVQSPHPQFPHISSTMNGTSNSPSGNHQSSFANRPRKSSVNGSSATSSG

SEQ ID NO: 80415 - protein, 238 aa, Artificial Sequence
  derived and/or modified sequence
MCVLCGGYFIDATTIIECLHSFCKTCIVRYLETSKYCPICDVQVHKTRPLLNIRLDRKVNKDKEKSKEEVNDKRYLRCPAAMTVMHLRKFLRSKMDIPNTFQIDVMYEEEPLKDYYTLMDIAYIYTWRRNGPLPLKYRVRPTCKRMKISHQRDGLTNAGELESDSGSDKANSPAGGIPSTSSCLPSPSTPVQSPHPQFPHISSTMNGTSNSPSGNHQSSFANRPRKSSVNGSSATSSG

SEQ ID NO: 80416 - protein, 105 aa, Artificial Sequence
  derived and/or modified sequence
MHRTTRIKITELNPHLMCVLCGGYFIDATTIIECLHSFCKTCIVRYLETSKYCPICDVQVHKTRPLLNIRSDKTLQDIVYKLVPGLFKNEMKRRRDFYAAHPSAD

SEQ ID NO: 80417 - protein, 207 aa, Artificial Sequence
  derived and/or modified sequence
MHRTTRIKITELNPHLMCVLCGGYFIDATTIIECLHSFCKTCIVRYLETSKYCPICDVQVHKTRPLLNIRSDKTLQDIVYKLVPGLFKNEMKRRRDFYAAHPSADAANGSNEDRGEVADEDKRIITDDEIISLSIEFFDQNRLDRKVNKDKEKSKEEVNDKRYLRCPAAMTVMHLRKFLRSKMDIPNTFQIDVMYEEEPLKDYYTLM

SEQ ID NO: 80418 - protein, 150 aa, Artificial Sequence
  derived and/or modified sequence
MHRTTRIKITELNPHLMCVLCGGYFIDATTIIECLHSFCKTCIVRYLETSKYCPICDVQVHKTRPLLNIRSDKTLQDIVYKLVPGLFKNEMKRRRDFYAAHPSADAANGSNEDRGEVADEDKRIITDDEIISLSIEFFDQNRLDRKVNKD

SEQ ID NO: 80419 - protein, 184 aa, Artificial Sequence
  derived and/or modified sequence
YFIDATTIIECLHSFCKTCIVRYLETSKYCPICDVQVHKTRPLLNIRLDRKVNKDKEKSKEEVNDKRYLRCPAAMTVMHLRKFLRSKMDIPNTFQIDVMYEEEPLKDYYTLMDIAYIYTWRRNGPLPLKYRVRPTCKRMKISHQRDGLTNAGELESDSGSDKANSPAGGIPSTSSCLPSPSTPV

SEQ ID NO: 80420 - protein, 92 aa, Artificial Sequence
  derived and/or modified sequence
MHRTTRIKITELNPHLMCVLCGGYFIDATTIIECLHSFCKTCIVRYLETSKYCPICDVQVHKTRPLLNIRSDKTLQDIVYKLVPGLFTANGS

SEQ ID NO: 80421 - protein, 177 aa, Artificial Sequence
  derived and/or modified sequence
MELSESVQKGFQMLADPRSFDSNAFTLLLRAAFQSLLDAQADEAVLDHPDLKHIDPVVLKHCHAAAATYILEAGKHRADKSTLSTYLEDCKFDRERIELFCTEYQNNKNSLEILLGRTLIPHPIQRLVLVAAWNNYRTWWGNLKMLRKAWKEQLSCNLGKLTIRPSAEENQKRLAFS

SEQ ID NO: 80422 - protein, 177 aa, Artificial Sequence
  derived and/or modified sequence
  misc_feature (1)..(1): Xaa can be any naturally occurring amino acid
XELSESVQKGFQMLADPRSFDSNAFTLLLRAAFQSLLDAQADEAVLDHPDLKHIDPVVLKHCHAAAATYILEAGKHRADKSTLSTYLEDCKFDRERIELFCTEYQNNKNSLEILLGRTLIPHPIQRLVLVAAWNNYRTWWGNLKMLRKAWKEQLSCNLGKLTIRPSAEENQKRLAFS

SEQ ID NO: 80423 - DNA, 3568 bp, Artificial Sequence
  derived and/or modified sequence
gagccattttggagccggtgtcagtttccactctgccttcagcggtgcatttttttccaccctcccctccccctcctcccctccccccgctcgcacgcacacacacggcgccccccgcccgcccgcctcccccacagcaactatgaaataatcgtagtatgagaggcagagatcggggcgagacaatggggatgtgggcgcgggagccccgttccggcttagcagcacctcccagccccgcagaataaaaccgatcgcgccccctccgcgcgcgccctcccccgagtgcggagcgggaggaggcggcggcggccgaggaggaggaggaggaggccccggaggaggaggcgttggaggtcgaggcggaggcggaggaggaggaggccgaggcgccggaggaggccgaggcgccggagcaggaggaggccggccggaggcggcatgagacgagcgtggcggccgcggctgctcggggccgcgctggttgcccattgacagcggcgtctgcagctcgcttcaagatggccgcttggctcgcattcattttctgctgaacgacttttaactttcattgtcttttccgcccgcttcgatcgcctcgcgccggctgctctttccgggattttttatcaagcagaaatgcatcgaacaacgagaatcaagatcactgagctaaatccccacctgatgtgtgtgctttgtggagggtacttcattgatgccacaaccataatagaatgtctacattccttctgtaaaacgtgtattgttcgttacctggagaccagcaagtattgtcctatttgtgatgtccaagttcacaagaccagaccactactgaatataaggtcagataaaactctccaagatattgtatacaaattagttccagggcttttcaaaaatgaaatgaagagaagaagggatttttatgcagctcatccttctgctgatgctgccaatggctctaatgaagatagaggagaggttgcagatgaagataagagaattataactgatgatgagataataagcttatccattgaattctttgaccagaacagattggatcggaaagtaaacaaagacaaagagaaatctaaggaggaggtgaatgataaaagatacttacgatgcccagcagcaatgactgtgatgcacttaagaaagtttctcagaagtaaaatggacatacctaatactttccagattgatgtcatgtatgaggaggaacctttaaaggattattatacactaatggatattgcctacatttatacctggagaaggaatggtccacttccattgaaatacagagttcgacctacttgtaaaagaatgaagatcagtcaccagagagatggactgacaaatgctggagaactggaaagtgactctgggagtgacaaggccaacagcccagcaggaggtattccctccacctcttcttgtttgcctagccccagtactccagtgcagtctcctcatccacagtttcctcacatttccagtactatgaatggaaccagcaacagccccagcggtaaccaccaatcttcttttgccaatagacctcgaaaatcatcagtaaatgggtcatcagcaacttcttctggttgatacctgagactgttaaggaaaaaaattttaaacccctgatttatatagatatcttcatgccattacagctttctagatgctaatacatgtgactatcgtccaatttgctttcttttgtagtgacattaaatttggctataaaagatggactacatgtgatactcctatggacgttaattgaaaagaaagattgttgttataaagaattggtttcttggaaagcaggcaagactttttctctgtgttaggaaagatgggaaatggtttctgtaaccattgtttggatttggaagtactctgcagtggacataagcattgggccatagtttgttaatctcaactaacgcctacattacattctccttgatcgttcttgttattacgctgttttgtgaacctgtagaaaacaagtgctttttatcttgaaattcaaccaacggaaagaatatgcatagaataatgcattctatgtagccatgtcactgtgaataacgatttcttgcatatttagccattttgattcctgtttgatttatacttctctgttgctacgcaaaaccgatcaaagaaaagtgaacttcagttttacaatctgtatgcctaaaagcgggtactaccgtttattttactgacttgtttaaatgattcgcttttgtaagaatcagatggcattatgcttgttgtacaatgccatattggtatatgacataacaggaaacagtattgtatgatatatttataaatgctataaagaaatattgtgtttcatgcattcagaaatgattgttaaaattctcccaactggttcgacctttgcagatacccataacctatgttgagccttgcttaccagcaaagaatatttttaatgtggatatctaattctaaagtctgttccattagaagcaattggcacatctttctatactttatatacttttctccagtaatacatgtttactttaaagattgttgcagtgaagaaaaacctttaactgagaaatatggaaaccgtcttaattttccattggctatgatggaattaatattgtattttaaaaatgcatattgatcactataattctaaaacaattttttaaataaaccagcaggttgctaaaagaaggcattttatctaaagttattttaataggtggtatagcagtaattttaaatttaagagttgcttttacagttaacaatggaatatgccttctctgctatgtctgaaaatagaagctatttattatgagcttctacaggtatttttaaatagagcaagcatgttgaatttaaaatatgaataaccccacccaacaattttcagtttattttttgctttggtcgaacttggtgtgtgttcatcacccatcagttatttgtgagggtgtttattctatatgaatattgtttcatgtttgtatgggaaaattgtagctaaacatttcattgtccccagtctgcaaaagaagcacaattctattgctttgtcttgcttatagtcattaaatcattacttttacatatattgctgttacttctgctttctttaaaaatatagtaaaggatgttttatgaagtcacaagatacatatatttttattttgacctaaatttgtacagtcccattgtaagtgttgtttctaattatagatgtaaaatgaaatttcatttgtaattggaaaaaatccaataaaaaggatattcatttagaaaatagctaagatctttaataaaaatttgatatgaaaagcacaatgtgcagaagttatggaaaacctatagaggattacaacaggtaaacgttaaagagaatacattgctgacttatagtgatgtggctaagaagtacatgctttgttgtaaaattgcttgaaagcccattgaaagatgtatctgtttatttacagtctttgaagtaaaagttaccaatgtttgccaataaaaa

SEQ ID NO: 80424 - DNA, 3428 bp, Artificial Sequence
  derived and/or modified sequence
cagcaactatgaaataatcgtagtatgagaggcagagatcggggcgagacaatggggatgtgggcgcgggagccccgttccggcttagcagcacctcccagccccgcagaataaaaccgatcgcgccccctccgcgcgcgccctcccccgagtgcggagcgggaggaggcggcggcggccgaggaggaggaggaggaggccccggaggaggaggcgttggaggtcgaggcggaggcggaggaggaggaggccgaggcgccggaggaggccgaggcgccggagcaggaggaggccggccggaggcggcatgagacgagcgtggcggccgcggctgctcggggccgcgctggttgcccattgacagcggcgtctgcagctcgcttcaagatggccgcttggctcgcattcattttctgctgaacgacttttaactttcattgtcttttccgcccgcttcgatcgcctcgcgccggctgctctttccgggattttttatcaagcagaaatgcatcgaacaacgagaatcaagatcactgagctaaatccccacctgatgtgtgtgctttgtggagggtacttcattgatgccacaaccataatagaatgtctacattccttctgtaaaacgtgtattgttcgttacctggagaccagcaagtattgtcctatttgtgatgtccaagttcacaagaccagaccactactgaatataaggtcagataaaactctccaagatattgtatacaaattagttccagggcttttcaaaaatgaaatgaagagaagaagggatttttatgcagctcatccttctgctgatgctgccaatggctctaatgaagatagaggagaggttgcagatgaagataagagaattataactgatgatgagataataagcttatccattgaattctttgaccagaacagattggatcggaaagtaaacaaagacaaagagaaatctaaggaggaggtgaatgataaaagatacttacgatgcccagcagcaatgactgtgatgcacttaagaaagtttctcagaagtaaaatggacatacctaatactttccagattgatgtcatgtatgaggaggaacctttaaaggattattatacactaatggatattgcctacatttatacctggagaaggaatggtccacttccattgaaatacagagttcgacctacttgtaaaagaatgaagatcagtcaccagagagatggactgacaaatgctggagaactggaaagtgactctgggagtgacaaggccaacagcccagcaggaggtattccctccacctcttcttgtttgcctagccccagtactccagtgcagtctcctcatccacagtttcctcacatttccagtactatgaatggaaccagcaacagccccagcggtaaccaccaatcttcttttgccaatagacctcgaaaatcatcagtaaatgggtcatcagcaacttcttctggttgatacctgagactgttaaggaaaaaaattttaaacccctgatttatatagatatcttcatgccattacagctttctagatgctaatacatgtgactatcgtccaatttgctttcttttgtagtgacattaaatttggctataaaagatggactacatgtgatactcctatggacgttaattgaaaagaaagattgttgttataaagaattggtttcttggaaagcaggcaagactttttctctgtgttaggaaagatgggaaatggtttctgtaaccattgtttggatttggaagtactctgcagtggacataagcattgggccatagtttgttaatctcaactaacgcctacattacattctccttgatcgttcttgttattacgctgttttgtgaacctgtagaaaacaagtgctttttatcttgaaattcaaccaacggaaagaatatgcatagaataatgcattctatgtagccatgtcactgtgaataacgatttcttgcatatttagccattttgattcctgtttgatttatacttctctgttgctacgcaaaaccgatcaaagaaaagtgaacttcagttttacaatctgtatgcctaaaagcgggtactaccgtttattttactgacttgtttaaatgattcgcttttgtaagaatcagatggcattatgcttgttgtacaatgccatattggtatatgacataacaggaaacagtattgtatgatatatttataaatgctataaagaaatattgtgtttcatgcattcagaaatgattgttaaaattctcccaactggttcgacctttgcagatacccataacctatgttgagccttgcttaccagcaaagaatatttttaatgtggatatctaattctaaagtctgttccattagaagcaattggcacatctttctatactttatatacttttctccagtaatacatgtttactttaaagattgttgcagtgaagaaaaacctttaactgagaaatatggaaaccgtcttaattttccattggctatgatggaattaatattgtattttaaaaatgcatattgatcactataattctaaaacaattttttaaataaaccagcaggttgctaaaagaaggcattttatctaaagttattttaataggtggtatagcagtaattttaaatttaagagttgcttttacagttaacaatggaatatgccttctctgctatgtctgaaaatagaagctatttattatgagcttctacaggtatttttaaatagagcaagcatgttgaatttaaaatatgaataaccccacccaacaattttcagtttattttttgctttggtcgaacttggtgtgtgttcatcacccatcagttatttgtgagggtgtttattctatatgaatattgtttcatgtttgtatgggaaaattgtagctaaacatttcattgtccccagtctgcaaaagaagcacaattctattgctttgtcttgcttatagtcattaaatcattacttttacatatattgctgttacttctgctttctttaaaaatatagtaaaggatgttttatgaagtcacaagatacatatatttttattttgacctaaatttgtacagtcccattgtaagtgttgtttctaattatagatgtaaaatgaaatttcatttgtaattggaaaaaatccaataaaaaggatattcatttagaaaatagctaagatctttaataaaaatttgatatgaaaagcacaatgtgcagaagttatggaaaacctatagaggattacaacaggtaaacgttaaagagaatacattgctgacttatagtgatgtggctaagaagtacatgctttgttgtaaaattgcttgaaagcccattgaaagatgtatctgtttatttacagtctttgaagtaaaagttaccaatgtttgccaa

SEQ ID NO: 80425 - DNA, 406 bp, Artificial Sequence
  derived and/or modified sequence
gcccgccgaggctcggggctcgggccgggctccgcgcggagttgcagcggtggccggatgccaagtgtaagtgattttttatcaagcagaaatgcatcgaacaacgagaatcaagatcactgagctaaatccccacctgatgtgtgtgctttgtggagggtacttcattgatgccacaaccataatagaatgtctacattccttctgtaaaacgtgtattgttcgttacctggagaccagcaagtattgtcctatttgtgatgtccaagttcacaagaccagaccactactgaatataaggtcagataaaactctccaagatattgtatacaaattagttccagggcttttcaaaaatgaaatgaagagaagaagggatttttatgcagctcatccttctgctgat

SEQ ID NO: 80426 - DNA, 745 bp, Artificial Sequence
  derived and/or modified sequence
agatgctggcggatccccgctccttcgactccaacgccttcacgcttctcctccgggcggcattccagagtctgctggacgcccaggcggacgaggccgtgttaggattttttatcaagcagaaatgcatcgaacaacgagaatcaagatcactgagctaaatccccacctgatgtgtgtgctttgtggagggtacttcattgatgccacaaccataatagaatgtctacattccttctgtaaaacgtgtattgttcgttacctggagaccagcaagtattgtcctatttgtgatgtccaagttcacaagaccagaccactactgaatataaggtcagataaaactctccaagatattgtatacaaattagttccagggcttttcaaaaatgaaatgaagagaagaagggatttttatgcagctcatccttctgctgatgctgccaatggctctaatgaagatagaggagaggttgcagatgaagataagagaattataactgatgatgagataataagcttatccattgaattctttgaccagaacagattggatcggaaagtaaacaaagacaaagagaaatctaaggaggaggtgaatgataaaagatacttacgatgcccagcagcaatgactgtgatgcacttaagaaagtttctcagaagtaaaatggacatacctaatactttccagattgatgtcatgtatgaggaggaacctttaaaggattattatacactaatg

SEQ ID NO: 80427 - DNA, 536 bp, Artificial Sequence
  derived and/or modified sequence
ccgagaggagtactggtatttccagcctcggcggctctcccggccgcagcgccctttgttgagaggattttttatcaagcagaaatgcatcgaacaacgagaatcaagatcactgagctaaatccccacctgatgtgtgtgctttgtggagggtacttcattgatgccacaaccataatagaatgtctacattccttctgtaaaacgtgtattgttcgttacctggagaccagcaagtattgtcctatttgtgatgtccaagttcacaagaccagaccactactgaatataaggtcagataaaactctccaagatattgtatacaaattagttccagggcttttcaaaaatgaaatgaagagaagaagggatttttatgcagctcatccttctgctgatgctgccaatggctctaatgaagatagaggagaggttgcagatgaagataagagaattataactgatgatgagataataagcttatccattgaattctttgaccagaacagattggatcggaaagtaaacaaagacaa

SEQ ID NO: 80428 - DNA, 378 bp, Artificial Sequence
  derived and/or modified sequence
ccgccccgcacgcccgccgaggctcggggctcgggccgggctccgcgcggagttgcagcggtggccggatgccaagtgtaagtgattttttatcaagcagaaatgcatcgaacaacgagaatcaagatcactgagctaaatccccacctgatgtgtgtgctttgtggagggtacttcattgatgccacaaccataatagaatgtctacattccttctgtaaaacgtgtattgttcgttacctggagaccagcaagtattgtcctatttgtgatgtccaagttcacaagaccagaccactactgaatataaggtcagataaaactctccaagatattgtatacaaattagttccagggcttttcactgccaatggctct

SEQ ID NO: 80429 - DNA, 534 bp, Artificial Sequence
  derived and/or modified sequence
atggagctgagcgagagcgtgcagaagggcttccagatgctggccgaccccagaagcttcgacagcaacgccttcaccctgctgctgagagccgccttccagagcctgctggacgcccaggccgacgaggccgtgctggaccaccccgacctgaagcacatcgaccccgtggtgctgaagcactgccacgccgccgccgccacctacatcctggaggccggcaagcacagagccgacaagagcaccctgagcacctacctggaggactgcaagttcgacagagagagaatcgagctgttctgcaccgagtaccagaacaacaagaacagcctggagatcctgctgggcagaaccctgatcccccaccccatccagagactggtgctggtggccgcctggaacaactacagaacctggtggggcaacctgaagatgctgagaaaggcctggaaggagcagctgagctgcaacctgggcaagctgaccatcagacccagcgccgaggagaaccagaagagactggccttcagctag

SEQ ID NO: 80430 - DNA, 534 bp, Artificial Sequence
  derived and/or modified sequence
tgagagctgagcgagagcgtgcagaagggcttccagatgctggccgaccccagaagcttcgacagcaacgccttcaccctgctgctgagagccgccttccagagcctgctggacgcccaggccgacgaggccgtgctggaccaccccgacctgaagcacatcgaccccgtggtgctgaagcactgccacgccgccgccgccacctacatcctggaggccggcaagcacagagccgacaagagcaccctgagcacctacctggaggactgcaagttcgacagagagagaatcgagctgttctgcaccgagtaccagaacaacaagaacagcctggagatcctgctgggcagaaccctgatcccccaccccatccagagactggtgctggtggccgcctggaacaactacagaacctggtggggcaacctgaagatgctgagaaaggcctggaaggagcagctgagctgcaacctgggcaagctgaccatcagacccagcgccgaggagaaccagaagagactggccttcagctag

SEQ ID NO: 80431 - DNA, 784 bp, Artificial Sequence
  derived and/or modified sequence
gcgctcacaatggagctctcggagtctgtgcagaaaggcttccagatgctggcggatccccgctccttcgactccaacgccttcacgcttctcctccgggcggcattccagagtctgctggacgcccaggcggacgaggccgtgttagatcatccagacttgaaacatatcgacccagtggttttaaaacattgtcatgcagcagctgcaacttacatactagaggcaggaaagcaccgagctgacaagtcaactctaagcacttatctagaagactgtaaatttgacagagagcgaatagaactgttttgcacggaatatcagaataataagaattccctagaaatcctactgggaagaacactgattccccatcctatccagagattagttttagttgcagcatggaacaattacaggacttggtggggaaacttaaagatgcttcgaaaagcctggaaagagcaactcagttgtaacttggggaagttaacgatccgcccgagtgcagaggaaaaccagaaacgccttgccttcagctgaaccaccgtttgtgcgagctggatgtccttttcagtagaaaagaattttccttttgaatttataccattcatcaattttgacactttaaaaacgtgtgaaagggttaagagggaaagatactgcccaagtatttgaatcgtttagtagtaactgtccatttatcctattttgatctttttcaagtcttctgaaaggaagtagacagtattacaccctgaataaataaggtgttgttttccac

SEQ ID NO: 80432 - DNA, 757 bp, Artificial Sequence
  derived and/or modified sequence
ggagctctcggagtctgtgcagaaaggcttccagatgctggcggatccccgctccttcgactccaacgccttcacgcttctcctccgggcggcattccagagtctgctggacgcccaggcggacgaggccgtgttagatcatccagacttgaaacatatcgacccagtggttttaaaacattgtcatgcagcagctgcaacttacatactagaggcaggaaagcaccgagctgacaagtcaactctaagcacttatctagaagactgtaaatttgacagagagcgaatagaactgttttgcacggaatatcagaataataagaattccctagaaatcctactgggaagaacactgattccccatcctatccagagattagttttagttgcagcatggaacaattacaggacttggtggggaaacttaaagatgcttcgaaaagcctggaaagagcaactcagttgtaacttggggaagttaacgatccgcccgagtgcagaggaaaaccagaaacgccttgccttcagctgaaccaccgtttgtgcgagctggatgtccttttcagtagaaaagaattttccttttgaatttataccattcatcaattttgacactttaaaaacgtgtgaaagggttaagagggaaagatactgcccaagtatttgaatcgtttagtagtaactgtccatttatcctattttgatctttttcaagtcttctgaaaggaagtagacagtattacaccctgaataaata

SEQ ID NO: 80433 - DNA, 534 bp, Artificial Sequence
  derived and/or modified sequence
atggaattatccgagagcgtgcagaagggtttccagatgttagcagatcctagaagtttcgactcgaatgcgtttaccctgctccttagagccgcgttccaatctctgcttgacgcccaagcggatgaagccgtactcgatcatcctgacctcaaacacatcgatcccgtggtgttaaagcattgccacgccgccgctgccacgtacattctcgaagcaggcaagcacagggcagacaaatctactctgtctacatatctggaagattgcaaatttgatcgagagcgcatcgagttattttgcactgagtatcaaaataataagaattctcttgagatcctattgggccgcacactgattccacaccctattcaaaggttggtactggtagcagcctggaacaattaccgaacatggtggggaaacctgaaaatgctccgcaaagcatggaaagagcagttgtcctgtaacttgggtaaactcactattaggcccagcgcagaggagaaccagaagcggttggctttcagctag

SEQ ID NO: 80434 - DNA, 534 bp, Artificial Sequence
  derived and/or modified sequence
taggagctctccgagtccgtgcagaaaggattccagatgctcgccgatcccagatcttttgattctaatgctttcacgctcctgttacgcgctgcttttcagtctttattagatgcacaggccgacgaagccgtcctggaccatcccgatctgaaacatatcgatcccgtggtgcttaaacactgtcacgccgctgctgccacctatatcctggaggcaggtaagcacagagctgacaagtccacattaagcacctacctcgaagactgcaaatttgacagggaacggatcgagctattttgcactgaatatcagaataataaaaattcactggaaatcctgctgggacgcaccttgatcccccatcccatccagagattagtgctggttgcagcctggaacaactaccggacgtggtggggaaatctgaaaatgctccggaaggcctggaaggaacagctttcatgtaatttaggcaaactgacgatccgtccatctgctgaggaaaatcaaaagcggctcgccttttcctag

SEQ ID NO: 80435 - DNA, 534 bp, Artificial Sequence
  derived and/or modified sequence
atggagctgtctgagagcgtgcagaagggcttccagatgctggccgaccccaggagctttgacagcaatgccttcaccctgctgctgcgggccgccttccagagcctgctggatgcccaggctgatgaggccgtgctggaccacccagacctgaagcacatcgaccctgtggtgctgaagcactgccacgccgccgccgccacctacatcctggaggccggcaagcacagagctgacaagagcaccctgagcacctacctggaggactgcaagtttgaccgggagagaattgagctgttctgcacagagtaccagaacaacaagaacagcctggagatcctgctgggccgcaccctcatcccccaccccatccagaggctggtgctggtggccgcctggaacaactaccgcacctggtggggcaacctgaagatgctgaggaaggcctggaaggagcagctgagctgcaacctgggcaagctgaccatccggcccagcgctgaggagaaccagaagaggctggccttctcctag

SEQ ID NO: 80436 - DNA, 534 bp, Artificial Sequence
  derived and/or modified sequence
tgagagctgtctgagagcgtgcagaagggcttccagatgctggccgaccccaggagctttgacagcaatgccttcaccctgctgctgcgggccgccttccagagcctgctggatgcccaggctgatgaggccgtgctggaccacccagacctgaagcacatcgaccctgtggtgctgaagcactgccacgccgccgccgccacctacatcctggaggccggcaagcacagagctgacaagagcaccctgagcacctacctggaggactgcaagtttgaccgggagagaattgagctgttctgcacagagtaccagaacaacaagaacagcctggagatcctgctgggccgcaccctcatcccccaccccatccagaggctggtgctggtggccgcctggaacaactaccgcacctggtggggcaacctgaagatgctgaggaaggcctggaaggagcagctgagctgcaacctgggcaagctgaccatccggcccagcgctgaggagaaccagaagaggctggccttctcctag

SEQ ID NO: 80437 - DNA, 534 bp, Artificial Sequence
  derived and/or modified sequence
atggagctgagcgagagcgtgcagaagggcttccagatgctggccgacccccgttcctttgattcaaatgccttcactttgctcttacgggctgcttttcaaagcttactggacgctcaggctgatgaagctgtgttagatcacccggatttgaagcacatcgatcccgtggtgttaaaacattgccatgctgcagcagcgacctacatcctcgaagctggcaagcatcgcgcagacaaatccacactgagtacttacctggaggactgtaagtttgatcgcgagaggatcgaacttttctgtacggaataccaaaataataagaacagcctggagattctgctgggacgcactctaataccccatccaatccagcggctggtgttggtcgcggcttggaataattacagaacgtggtggggcaacctgaaaatgcttcgcaaggcctggaaggaacaactctcctgtaatttggggaagctaacaatcagacctagcgccgaggagaatcagaagcggctggccttttcttag

SEQ ID NO: 80438 - DNA, 534 bp, Artificial Sequence
  derived and/or modified sequence
tgagagctgagcgagagcgtgcagaagggcttccagatgctggccgatcctcgctctttcgattccaacgctttcaccctgttactcagagcagcgtttcagagcctcctcgatgcacaggctgatgaggctgtgctcgatcaccctgatttgaagcacatagatcctgtggtgctcaagcactgccacgcagcggccgctacatacatcctggaagccggcaagcatcgtgcagataaatccaccttatcaacttatctcgaggactgcaagttcgaccgcgagagaatcgagctattttgcaccgagtaccaaaataacaagaattctctcgagatcctgctgggcagaacgttgatcccgcacccgatacagcgattggtgttagttgccgcgtggaacaactacagaacatggtggggcaatcttaaaatgctgaggaaagcttggaaagagcaactttcatgcaatttaggaaaactcacaattcgtccgagtgcggaagagaaccagaagcgtctggcgttcagctag

SEQ ID NO: 80439 - DNA, 534 bp, Artificial Sequence
  derived and/or modified sequence
atggagctgtcagagtctgtgcagaaagggtttcagatgctggccgacccacggtcttttgatagcaatgcgttcacacttttgcttcgggctgcttttcagagtttactcgatgctcaggccgatgaggcggtcctggaccaccccgatctcaaacacattgaccccgtcgttctcaaacattgccacgctgccgcagccacatatatcttggaggccggtaagcacagggctgacaaatcaaccctcagcacttatttggaggactgcaaattcgaccgtgagaggatcgagcttttttgtacggaataccaaaacaacaagaattctctggagatcttgctggggagaactctgatcccacaccccatccaaagattagtgctcgtggctgcgtggaacaattacagaacttggtggggcaacttgaaaatgttgagaaaggcttggaaggagcagctctcttgcaacctgggaaaactaactatcaggccgtccgcggaggagaaccaaaaaagactggcattctcatag

SEQ ID NO: 80440 - DNA, 534 bp, Artificial Sequence
  derived and/or modified sequence
tgagagttgtcggaaagcgtgcagaaaggctttcagatgcttgccgacccccgttctttcgactcaaacgcatttacattgcttctgagggctgcatttcaatcccttttggatgctcaggccgacgaagccgtgctcgatcacccagacctaaaacacattgatccagtggtgcttaaacattgtcacgcggctgctgccacctacatccttgaagccggaaaacaccgggctgacaagtccaccttgtctacgtaccttgaggactgcaaattcgaccgcgagcggatcgagctcttctgtacggagtatcaaaacaataagaatagtctggaaatactccttggcaggacgctcattcctcatcctatccagcgcctggtgctggtcgctgcatggaacaactataggacctggtgggggaacctgaaaatgcttagaaaagcctggaaggaacagttgtcatgtaatcttggtaagctcactatccgcccatccgcagaggagaaccagaagagattagccttctcatag

SEQ ID NO: 80441 - protein, 139 aa, Artificial Sequence
  derived and/or modified sequence
MRQPYLSSREVSSSRKRWRTFPVDCVAMCGDCVEKEYPNRGNTCLENGSFLLNFTGCAVCSKRDFMLITNKSLKEEDGEEIVTYDHLCKNCHHVIARHEYTFSIMDEFQEYTMLCLLCGKAEDTISILPDDPRQMTLLF

SEQ ID NO: 80442 - DNA, 420 bp, Artificial Sequence
  derived and/or modified sequence
atgagacagccctacctgagcagcagagaggtgagcagcagcagaaagagatggagaaccttccccgtggactgcgtggccatgtgcggcgactgcgtggagaaggagtaccccaacagaggcaacacctgcctggagaacggcagcttcctgctgaacttcaccggctgcgccgtgtgcagcaagagagacttcatgctgatcaccaacaagagcctgaaggaggaggacggcgaggagatcgtgacctacgaccacctgtgcaagaactgccaccacgtgatcgccagacacgagtacaccttcagcatcatggacgagttccaggagtacaccatgctgtgcctgctgtgcggcaaggccgaggacaccatcagcatcctgcccgacgaccccagacagatgaccctgctgttctag

SEQ ID NO: 80443 - DNA, 2629 bp, Artificial Sequence
  derived and/or modified sequence
agacttcggctcggttcccgagacggaatacccaggagtcgagtacttgggcgcatgcggcaaccgtatctcagttctcgcgaggtttcgtcttcccggaagcgttggaggacattccctgttgactgcgtcgcgatgtgtggcgactgtgtggagaaggaatatcccaaccggggtaatacctgcctggagaatggatctttcttactgaactttacaggctgtgcagtgtgcagtaagcgggattttatgctgatcacaaacaaatccttgaaagaagaagatggagaagaaatagttacctatgatcatttgtgtaagaattgtcatcatgtaatagccagacatgagtatacattcagtatcatggatgaatttcaggagtataccatgctgtgtctgttatgcggcaaagccgaagatactatcagtattctccctgatgacccccgacaaatgactctcttattctaaggatccttctacagatctgttataactatattgtgttggtttacaatacagcaagcctgatggtttgtcttatttcattcatactgaaaattctttgcatattttttttctgcttagacttacttattctttgaggaaaaaaggtaatgtaggagctcattgttctctagagctgagctcttctgctaaagttcaaagttcacatcagtgtagccagagtgaagcatctttgttagcagttatgtggtcagaaaacaactagaatgggagcacacctggtgcccagattttggtttccaataaaaggaaccaggactccttagaaaatgaactgattctagaactgggatatgaactgtacaagatgagcctagagtatcttgtgccacagaaaaatgaagtactgaaattaaaaaaaaaaaatcatagtgattgggagtatgtcagcatgatcgaactgaaggatctctgaaaggccacagctggagcaatttgagtaacaaaataaagtagtattgggttataacccaaactatataataaatatttacaagcccaaactaatataaatgattgaatgggaacaaatctcttgtgcagaagaatttcaaataatttatgtagatactccccacttagtgggctctgcatagtgacttccttgcagagtataatatggaaaggggggaaaagagtaactttacagtggagaaatctgacagacaccagctcagccaggtgattgaggttaacatcatccatgataagcccttttgatagcatgtatccttgatagcatcacatcatacagaatgtgataagaatggcactttacctctgtggtcctcctccccagaactcagaacccaagtctgatcaggagaaaaacatcacacaaattccaattgagaagcattctttaaaatacctaaccagtacttctcaaaactatcaaggccataaaaaacaaggaaaatctgagacatggtcacagccaagaggagcctgagaagacatgactgctagatgtaatgtggtatcctacatggaattatataccacgaaaagaaaaaaaggtcatttggtagaaactagggaaatctgaatacagtgtggacttcagttaatataaatgagaaaatggtttcattggctttaaagggattttagaatatcttactttgcatagtttcatgagcactggccaggaggttataaactggcatttaggcctctctgccatttagtagcagtatagtcattaagcaaagcattactctggactttattgtcctgtttctatcaaattggactaacaaaaattgatataatacattcatcacagtattgttaggagatttaaatgaattagtgaatgtaagatactttagaaagcatgtaaagtactagaaacaatgaggtggcttcaattagtgctcattctgagacctaaatttaaagggtcaggcattagaaacaaaagtgtttcttcatatctaggagatttggaaattctgaactaaggtcttataagaacaagaaatgagcaaagtgttcattgtagatactagggaaaagctttgttgaataacagtaatgatgataatatctgagctttattaagtacttactacatgctaagagctttttaagcacttatttaatcctcattaacaaattcataaggtaggtgctattgatagtttagccataaccagatatggcttgttatttgtaagttatcatgaaaaggtttatattcactattctttatttcagtgtagcacttttagagccaaaaaaactcaggcacaaagaagttaaataacttgccgggtgcggtggctcacccctgtaatcccagcactttgggaggccaaagcaggcggatcacctgaggtcaggagtttgagaccagccgggccaacatggtgcaacctcgtctttactaaaaatacaaaaacaaaaattagccaggggtggtggtatgcacctgcagtcccagcaacatgggaggctgaacaggagaatcgcttgaacccgcgacagggaggttgtgatgagccaaggtcatgccactgcactccagcctgggagacagagcaagactccatctcaaaaacaaaaacaaaacaaaacaacaacaaaaaaagaa

SEQ ID NO: 80444 - DNA, 420 bp, Artificial Sequence
  derived and/or modified sequence
atgagacagccatatctaagcagccgtgaggtgtcttcatcccggaaacgctggcgaacatttccagttgattgtgtggccatgtgcggggattgcgtggagaaggagtaccccaaccgcggaaacacctgtttggagaatggttccttcctgctaaatttcacaggctgcgccgtatgctctaagcgggactttatgctgatcaccaataaatcgttaaaagaagaggatggagaagaaattgttacatacgaccacctgtgcaaaaactgtcaccacgttatcgcaaggcatgagtatacgttcagcattatggatgagttccaggagtatacaatgctttgtctattgtgcggcaaagctgaggacacaatctcaatcctgccggacgaccccagacaaatgacactcctgttctag

SEQ ID NO: 80445 - DNA, 420 bp, Artificial Sequence
  derived and/or modified sequence
atgaggcagccctacctgagcagccgggaggtgagcagcagcaggaagcgctggaggaccttccctgtggactgtgtggccatgtgtggggactgtgtggagaaggagtaccccaacagaggcaacacctgcctggagaatggcagcttcctgctgaacttcaccggctgtgctgtgtgcagcaagagggacttcatgctgatcaccaacaagagcctgaaggaggaggatggagaggagatcgtgacctatgaccacctgtgcaagaactgccaccacgtgattgcccggcatgagtacaccttcagcatcatggatgagttccaggagtacaccatgctgtgcctgctgtgtgggaaggccgaggacaccatcagcatcctgcctgatgacccccggcagatgaccctgctcttctag

SEQ ID NO: 80446 - DNA, 420 bp, Artificial Sequence
  derived and/or modified sequence
atgcggcagccctacctgagcagccgggaggtgagcagcagccggaagcgatggcgcactttccctgtggactgcgttgcgatgtgcggggactgtgttgagaaggagtacccaaatcggggcaatacctgcctggagaacggctcattcctgctgaactttaccggctgcgcggtctgcagcaaacgggacttcatgctcatcactaacaagagtctaaaagaagaagatggggaggagattgtcacatacgaccacctttgcaaaaattgtcaccatgtgattgctcgccatgaatacaccttcagcatcatggatgagttccaggagtataccatgctgtgcttactgtgtggcaaggccgaggatacgataagcatcttacctgatgacccccgtcagatgaccctgttattctag

SEQ ID NO: 80447 - DNA, 420 bp, Artificial Sequence
  derived and/or modified sequence
atgcgtcaaccctacctatcatcaagggaggtgagttcctcccggaaaaggtggcgtacgttccctgtcgactgtgtcgcaatgtgtggggattgtgtggagaaggagtacccaaacagaggaaatacatgtcttgagaacggcagctttttactgaactttaccggatgtgccgtgtgcagcaaacgcgactttatgctgattaccaacaagtcattgaaagaggaggatggagaagagatcgtgacgtatgaccacctgtgcaaaaactgccatcatgtgatcgccagacatgagtatactttcagcatcatggacgagtttcaggagtacacgatgctctgcctgctgtgcggtaaggcagaggacactatcagcatactaccagacgacccaagacaaatgaccctgctgttctag

SEQ ID NO: 80448 - protein, 105 aa, Artificial Sequence
  derived and/or modified sequence
MRQPYLSSREVSSSRKRWRTFPVDCVAMCGDCVEKEYPNRGNTCLENGSFLLNFTGCAVCSKRDFMLITNKSLKEEDGEEIVTYDRVYHAVSVMRQSRRYYQYSP

SEQ ID NO: 80449 - DNA, 318 bp, Artificial Sequence
  derived and/or modified sequence
atgagacagccctacctgagcagcagagaggtgagcagcagcagaaagagatggagaaccttccccgtggactgcgtggccatgtgcggcgactgcgtggagaaggagtaccccaacagaggcaacacctgcctggagaacggcagcttcctgctgaacttcaccggctgcgccgtgtgcagcaagagagacttcatgctgatcaccaacaagagcctgaaggaggaggacggcgaggagatcgtgacctacgacagagtgtaccacgccgtgagcgtgatgagacagagcagaagatactaccagtacagcccctag

SEQ ID NO: 80450 - DNA, 439 bp, Artificial Sequence
  derived and/or modified sequence
atgcggcaaccgtatctcagttctcgcgaggtttcgtcttcccggaagcgttggaggacattccctgttgactgcgtcgcgatgtgtggcgactgtgtggagaaggaatatcccaaccggggtaatacctgcctggagaatggatctttcttactgaactttacaggctgtgcagtgtgcagtaagcgggattttatgctgatcacaaacaaatccttgaaagaagaagatggagaagaaatagttacctatgatcgagtataccatgctgtgtctgttatgcggcaaagccgaagatactatcagtattctccctgatgacccccgacaaatgactctcttattctaaggatccttctacagatctgttataactatattgtgttggtttacaatacagcaagcctgatggtttgtcttatttcattcatactgaaaa

SEQ ID NO: 80451 - DNA, 318 bp, Artificial Sequence
  derived and/or modified sequence
atgcggcaaccctacttgtccagtcgtgaggtgagttcctcccgtaagcgctggcgaacattcccggttgactgtgttgctatgtgcggagactgtgtggagaaagagtatcccaatcggggcaacacatgcctggagaacggcagtttcctgctgaactttaccggatgcgctgtttgttctaagcgggatttcatgctcatcaccaataagtccctgaaggaggaagatggcgaagagattgtaacctacgacagggtttatcacgcagtttctgtaatgaggcaaagccggcggtattatcagtactcaccatag

SEQ ID NO: 80452 - DNA, 318 bp, Artificial Sequence
  derived and/or modified sequence
atgaggcagccctacctgagcagccgggaggtgagcagcagcaggaagcgctggaggaccttccctgtggactgtgtggccatgtgtggggactgtgtggagaaggagtaccccaacagaggcaacacctgcctggagaatggcagcttcctgctgaacttcaccggctgtgctgtgtgcagcaagagggacttcatgctgatcaccaacaagagcctgaaggaggaggatggagaggagatcgtgacctatgacagagtgtaccacgctgtgtctgtgatgaggcagagccgccgctactaccagtacagcccctag

SEQ ID NO: 80453 - DNA, 318 bp, Artificial Sequence
  derived and/or modified sequence
atgcggcagccctacctgagcagccgggaggtgagcagcagccggaagagatggcgcacatttcctgttgactgtgtcgccatgtgtggggactgtgttgagaaagagtaccccaatagggggaatacctgcctcgaaaacgggtcatttctgttaaacttcaccggctgtgcggtgtgctctaagcgggatttcatgttaattacaaacaagagcctgaaggaggaagacggcgaggaaatagttacatacgatcgcgtgtaccacgcagtgtctgtgatgaggcaaagtcggcgctactaccagtatagtccttag

SEQ ID NO: 80454 - DNA, 318 bp, Artificial Sequence
  derived and/or modified sequence
atgcgacagccctacctgtcatcccgcgaagtcagcagctctcgaaaaaggtggcgaacgtttccggtggattgtgttgctatgtgcggggactgtgtggaaaaagagtacccgaaccgaggcaatacgtgtttggagaatggtagcttccttctcaactttaccggttgcgcagtctgctctaagagggactttatgctcattacgaataaaagccttaaagaagaggatggggaggaaattgtaacctacgaccgagtctatcatgctgtgtcagttatgaggcagagccggagatattaccagtattccccctag

SEQ ID NO: 80455 - protein, 350 aa, Artificial Sequence
  derived and/or modified sequence
VLFQGSNVMEDQDLLEIGILNSGHRQRILQAIQLLPKMRPIGHDGYHPTSVAEWLDSIELGDYTKAFLINGYTSMDLLKKIWEVELINQSSVCEIWTNQNAGFPFSAIHQVHNTGDWGEPSITLRPPNEATASTPVQYWQHHPEKLIFQSCDYKAFYLGSMLIKELRGTESTQDACAKMRANIQKSTEQMKKVPTIILSVSYKGVKFIDATNKNIIAEHEIRNISCAAQDPEDLSTFAYITKDLKSNHHYCHVFTAFDVNLAYEIILTLGQAFEVAYQLALQARKGGHSSTLPESFENKPSKPIPKPRVSIRKSVIDPSEQKTLANLPWIVEPGQEAKRGINTKYETTIF

SEQ ID NO: 80456 - protein, 357 aa, Artificial Sequence
  derived and/or modified sequence
MANGFDNVQFMGSNVMEDQDLLEIGILNSGHRQRILQAIQLLPKMRPIGHDGYHPTSVAEWLDSIELGDYTKAFLINGYTSMDLLKKIWEVELINQSSVCEIWTNQNAGFPFSAIHQVHNTGDWGEPSITLRPPNEATASTPVQYWQHHPEKLIFQSCDYKAFYLGSMLIKELRGTESTQDACAKMRANCQKSTEQMKKVPTIILSVSYKGVKFIDATNKNIIAEHEIRNISCAAQDPEDLSTFAYITKDLKSNHHYCHVFTAFDVNLAYEIILTLGQAFEVAYQLALQARKGGHSSTLPESFENKPSKPIPKPRVSIRKSVIDPSEQKTLANLPWIVEPGQEAKRGINTKYETTIF

SEQ ID NO: 80457 - DNA, 1053 bp, Artificial Sequence
  derived and/or modified sequence
gtcctcttccaggggagcaacgtgatggaagaccaggatcttcttgaaatcggtatcctgaatagcggccaccggcagcggatccttcaagctatacagctgctccccaagatgaggcctattgggcatgacggatatcaccctacttcggtcgccgagtggttggatagcatcgaattaggggactacaccaaggcctttctcattaatggatatacaagcatggaccttctcaagaagatatgggaggtggaactcattaatcagtcatcggtgtgtgaaatctggactaatcagaatgctggattccccttctcagccatccatcaggttcacaacactggggattggggggaaccgagtatcaccttaagaccccccaacgaagctacggcctccaccccagtgcaatactggcaacatcatcctgaaaaacttatctttcagtcgtgtgactataaggccttttacctgggcagcatgttgataaaagagctacgcgggactgagtcaacccaggacgcctgcgccaagatgcgtgccaacatccagaaatccaccgaacagatgaagaaggtgccaacaataatcctcagcgttagttataaaggtgtaaagttcatcgatgcaacgaataagaatatcattgccgagcatgaaatacggaatatctcatgtgccgcacaggatccagaagatctatctaccttcgcatacattaccaaagacttaaaaagtaaccaccactactgccacgtgttcacagcctttgacgtgaacctcgcctatgaaatcatcctgaccctggggcaggcgttcgaggtcgcctatcagctggcactccaggcccgcaagggcggtcacagctccaccctacctgagtccttcgagaacaagccgtcaaaacctattcctaagccaagggtttctatccgcaagagcgtgatagacccatctgagcagaaaacgcttgcaaacctgccctggatagttgaacccggacaagaagctaaacgaggcatcaatacaaagtatgaaactaccattttctag

SEQ ID NO: 80458 - DNA, 1074 bp, Artificial Sequence
  derived and/or modified sequence
atggccaatggtttcgataacgtccagttcatgggcagtaatgtaatggaggaccaggacctgctcgagattggcatactgaactccggacatcggcagcggatcctgcaagctatccagctgctgcctaaaatgagacctattggtcatgatggctatcaccctacctcagtggcagaatggctggactcaatcgagttgggggattacaccaaagcttttctgatcaatggttacacctcaatggatttgctcaaaaagatctgggaagtggagttgatcaatcagtcttcagtttgtgagatctggactaaccagaatgctgggttcccgttctccgccattcaccaggtgcataataccggcgactggggcgaaccttccatcaccctacgcccaccgaatgaagccactgcaagcacccctgtgcagtactggcagcaccacccagagaagctgatctttcagtcttgcgactacaaagcgttttatctaggctccatgctgatcaaagaattgcggggcacggaaagcacacaggacgcctgtgccaaaatgagagccaattgccagaaaagtacagaacagatgaagaaggtgccaactatcatattatcagtgtcatacaagggcgttaagtttatcgacgcaactaacaaaaatattatcgccgagcacgagattaggaacatatcatgtgctgctcaggacccagaggacctttcaaccttcgcttacataacaaaggatttaaaatcaaaccatcattactgccacgttttcaccgcattcgacgtgaacctggcatatgaaatcatcctgacattaggccaagcctttgaggtggcgtaccagctggcccttcaggcccgtaaaggaggtcattctagcaccctccccgaaagcttcgagaacaaaccttctaagccaatccccaaacctagggtcagcatccgcaaaagcgtgatcgacccttctgagcagaagacattagccaacctcccttggattgtggagcccggacaggaagctaaacgtggtatcaataccaagtacgagacgaccatcttctag

SEQ ID NO: 80459 - DNA, 1053 bp, Artificial Sequence
  derived and/or modified sequence
gtgctcttccagggcagcaatgtgatggaggaccaggacctgctggagatcggcatcctgaacagcggccaccggcagaggatcctgcaggccatccagctgctgcccaagatgaggcccatcggccatgatggctaccaccccacctctgtggccgagtggctggacagcattgagctgggggactacaccaaggccttcctgatcaatggctacacctccatggacctgctgaagaagatctgggaggtggagctgatcaaccagagctctgtgtgtgagatctggaccaaccagaatgccggcttccccttcagcgccatccaccaggtgcacaacacaggagactggggcgagcccagcatcaccctgcggcccccaaatgaggccacagccagcacccctgtgcagtactggcagcaccaccctgagaagctgatcttccagagctgtgactacaaggccttctacctgggctccatgctgatcaaggagctgcggggcacagagagcacccaggatgcctgtgccaagatgagggccaacatccagaagagcacagagcagatgaagaaggtgcccaccatcatcctgtctgtgtcctacaagggcgtgaagttcattgatgccaccaacaagaacatcatcgccgagcacgagatccggaacatcagctgtgccgcccaggaccctgaggacctgagcacctttgcctacatcaccaaggacctgaagagcaaccaccactactgccacgtgttcaccgcctttgatgtgaacctggcctatgagatcatcctgaccctgggccaggcctttgaggtggcctaccagctggccctgcaggccaggaaaggaggccacagcagcaccctgcctgagagctttgagaacaagcccagcaagcccatccccaagccccgggtgtccatcaggaagagcgtcatcgaccccagcgagcagaagaccctggccaacctgccctggatcgtggagcccggccaggaggccaagaggggcatcaacaccaagtatgagaccaccatcttctag

SEQ ID NO: 80460 - DNA, 1074 bp, Artificial Sequence
  derived and/or modified sequence
atggccaatggatttgacaacgtgcagttcatgggcagcaatgtgatggaggaccaggacctgctggagatcggcatcctgaacagcggccaccggcagaggatcctgcaggccatccagctgctgcccaagatgaggcccatcggccatgatggctaccaccccacctctgtggccgagtggctggacagcattgagctgggggactacaccaaggccttcctgatcaatggctacacctccatggacctgctgaagaagatctgggaggtggagctgatcaaccagagctctgtgtgtgagatctggaccaaccagaatgccggcttccccttcagcgccatccaccaggtgcacaacacaggagactggggcgagcccagcatcaccctgcggcccccaaatgaggccacagccagcacccctgtgcagtactggcagcaccaccctgagaagctgatcttccagagctgtgactacaaggccttctacctgggctccatgctgatcaaggagctgcggggcacagagagcacccaggatgcctgtgccaagatgagggccaactgccagaagagcacagagcagatgaagaaggtgcccaccatcatcctgtctgtgtcctacaagggcgtgaagttcattgatgccaccaacaagaacatcatcgccgagcacgagatccggaacatcagctgtgccgcccaggaccctgaggacctgagcacctttgcctacatcaccaaggacctgaagagcaaccaccactactgccacgtgttcaccgcctttgatgtgaacctggcctatgagatcatcctgaccctgggccaggcctttgaggtggcctaccagctggccctgcaggccaggaagggcggccacagcagcaccctgcctgagagctttgagaacaagcccagcaagcccatccccaagccccgggtgtccatcaggaagtctgtgattgaccccagcgagcagaagaccctggccaacctgccctggatcgtggagcccggccaggaggccaagaggggcatcaacaccaagtatgagaccaccatcttctag

SEQ ID NO: 80461 - DNA, 1053 bp, Artificial Sequence
  derived and/or modified sequence
gtgctgttccagggcagcaacgtgatggaggaccaggacctgctggaaatcggaatattgaacagtggacatagacagaggattctccaggccattcagttattgcccaaaatgcgcccgattgggcatgacgggtaccatcccacctcagttgccgaatggctagattcgatcgagctgggtgactacactaaagcattcctaataaatgggtatacaagtatggatctgctaaaaaagatttgggaggtggagctgattaatcaatcctcagtttgcgagatctggacgaaccagaacgctggctttccgttttcggccattcatcaagtccataatactggtgactggggggaaccttcaattaccttgaggccacccaatgaggcaacagcatctacacctgtacagtactggcagcatcatccagagaagctgatattccagtcctgcgactacaaagctttctacctggggtccatgcttattaaggaactgcgcggtacagaatctacccaagacgcgtgcgctaaaatgcgcgccaacattcagaagtctacggaacagatgaaaaaggtgccgacaattatactctccgtaagctataagggcgtcaagttcattgatgccacaaacaagaatattatcgcagaacatgagattaggaatatttcctgcgccgctcaggatcccgaggatcttagcactttcgcctacattaccaaggatctgaagtctaaccaccactactgccacgtcttcactgcattcgacgtaaaccttgcatatgagatcatcctaacactcggacaagcgtttgaagtggcgtaccagcttgctctgcaggctcgcaagggggggcattcatccacgctgcctgaaagtttcgagaataagccctccaaacccatccccaaacctcgagtgagtattagaaagagcgtcattgacccctcagagcagaagacgctggccaatctgccttggatcgttgagcccgggcaggaggcgaaacgggggattaacaccaagtacgaaacaacaattttttag

SEQ ID NO: 80462 - DNA, 1074 bp, Artificial Sequence
  derived and/or modified sequence
atggccaacggcttcgacaacgtgcagttcatgggcagcaacgtgatggaggatcaggatctgctggaaataggtattcttaactccggccatcgtcagcgcatcctgcaggcaatccaacttcttccaaagatgagacctattggccacgatggatatcaccctaccagtgtcgctgagtggctagatagtatagagctcggggactataccaaggcatttttgattaacggctatacctcaatggacttactgaagaagatctgggaggtagagctaattaaccagtcaagtgtatgcgaaatttggactaatcaaaacgcggggtttcctttcagcgccattcaccaggtgcacaataccggggactggggagaacctagcattactctacgcccccccaacgaagccaccgccagcactccagtgcaatactggcaacaccatccagaaaaattgatattccaatcttgcgattataaagcattttaccttggttccatgctcatcaaagaattgcgcggaaccgagtctacgcaggatgcttgcgcaaaaatgagggctaactgccaaaaatcaacagagcagatgaagaaagtgccgactattattttgagcgtaagttacaaaggcgtgaaattcattgacgccaccaataaaaacatcatcgcagaacacgaaatccgcaacatttcatgtgccgcccaggaccccgaggatctttccactttcgcatacatcaccaaggaccttaaatccaaccaccactactgtcatgtgttcaccgcttttgatgtaaacctcgcttacgaaatcattctgaccctgggccaggccttcgaggtcgcctaccaactggctctgcaggctcgtaaaggtggacactcctcaacattacccgagagctttgagaataaacctagcaagccaatcccaaagccacgcgtcagcattcgaaagtctgtgattgacccctcagaacagaaaacacttgccaacttaccatggatcgtcgaacctggccaggaggccaagaggggcataaataccaagtacgaaacaactattttctag

SEQ ID NO: 80463 - DNA, 1053 bp, Artificial Sequence
  derived and/or modified sequence
gttttgtttcagggaagcaatgttatggaagatcaggatttgttggaaattggaatccttaattctgggcacagacaaagaattctacaggcaatccagctccttccaaagatgagacccattgggcatgatggctaccatcccacctctgtagctgagtggctggattccattgaactgggcgactacaccaaagcctttctaattaatggctacacttcgatggacctgttgaaaaaaatctgggaggttgaacttattaatcagtcgtctgtctgtgaaatatggacgaatcagaacgcaggatttcctttctcagcgatccatcaggttcataatacaggagactggggagaaccttccattaccttgcgacctccgaatgaagccacagcctctaccccggtacagtactggcagcatcacccagaaaagcttatcttccagtcgtgtgattacaaagctttttatttaggttctatgctgataaaagagcttagggggacagaatcaacccaagatgcttgtgcaaaaatgcgggcaaatattcagaagtctacagagcaaatgaagaaggtccctactattattctttctgtctcatataaaggagtcaaatttattgatgcaacaaataagaacataattgctgagcatgaaattcgtaatatctcctgtgctgcccaggacccagaagacctctcaacatttgcctatatcacaaaagatttgaagtctaatcaccactactgtcatgtgtttactgcctttgatgtgaatttagcctatgaaatcatcctaaccctgggacaggcattcgaagtcgcttaccagctagcactacaagcaagaaaagggggacactcctccacacttccagaaagctttgaaaacaaaccctccaaacccatccccaagccccgcgttagcattcgcaagtccgtgatcgacccatctgagcaaaagactctggccaatctaccgtggattgtggagccgggccaagaagccaagaggggcattaataccaagtatgaaaccacgattttctga

SEQ ID NO: 80464 - DNA, 1053 bp, Artificial Sequence
  derived and/or modified sequence
gtcctgtttcagggaagcaacgtgatggaagatcaagacctgctggagataggaatcttgaactcagggcacagacagagaatcctgcaggcaatccagctcctgccaaagatgcggcctataggtcatgacggttatcatcccacaagcgtagccgagtggctggatagtatcgagctcggcgattatactaaagcctttctcatcaacggctataccagtatggacctgctcaaaaagatctgggaggttgagctgatcaaccagagctctgtatgcgaaatttggaccaatcagaacgccggttttcctttttctgcaattcatcaggtgcacaataccggggactggggtgagccaagcattactctacgtccacctaacgaggccaccgcctctacaccggtgcagtactggcaacaccatccagagaaactcatttttcagtcttgtgattacaaagccttttatctcggctccatgttgattaaggaacttcgaggaacagagtccactcaggatgcgtgtgccaagatgagggccaacatccagaagtccactgagcagatgaagaaagtaccaaccatcatcctgagtgtgtcttacaagggcgtgaagtttatcgatgccacgaacaaaaatatcattgccgagcacgaaattcggaatattagctgcgcagcacaggatcctgaagatctgagcacctttgcctacataaccaaggacctcaaaagcaaccaccattactgtcatgtgttcaccgcattcgatgtcaaccttgcttatgagattattctgacgctggggcaagctttcgaagtggcatatcagctggccctgcaggcaaggaagggcggtcatagctccacactcccagaaagttttgagaacaagccatccaaacctatccccaagccgagggtgtcgatccgtaagagcgtaatcgacccttctgagcagaagaccctcgccaatcttccatggatcgtggaacccggacaggaggctaagcgcggaatcaatactaaatatgagacaacgattttctag

SEQ ID NO: 80465 - DNA, 1074 bp, Artificial Sequence
  derived and/or modified sequence
atggctaatggatttgataacgtccagtttatgggatccaatgtaatggaggaccaggacctactggaaatagggatcttaaacagtggacacaggcagagaatcctccaggccatacagctcttgccgaaaatgaggcctatcgggcatgatggctatcaccccaccagcgtggctgagtggctggactccatcgagctgggtgattacacgaaagcttttctcattaacgggtatactagtatggatctgttaaagaagatttgggaggttgaacttattaaccagtctagcgtgtgcgaaatctggactaatcagaacgccggatttcccttttcagccatacatcaagtacataacacaggagactggggcgaaccctcaataacactgcgccctcctaacgaggccacggcctccactcctgtacagtactggcagcaccatcctgagaagctgatctttcagagttgtgactataaggcattttacttagggagtatgctcattaaagaactccggggtaccgagagtacgcaagatgcgtgtgcaaaaatgagagctaattgtcagaagagcaccgaacaaatgaagaaagtacctaccatcatcctctctgtgtcgtataagggcgtgaaatttatagatgccactaataagaatatcatagcggaacatgaaatcagaaacatttcatgcgccgcacaggatcccgaagacctctctacctttgcttacattaccaaggacttgaagtccaatcaccattattgccacgtttttacagcattcgacgttaacctcgcctacgaaattatccttaccctgggtcaggctttcgaagtggcctaccagctggccctccaagccaggaagggaggtcacagttcaactttacctgaaagctttgaaaacaaacctagcaaacctattccgaagcctcgagtgtcgattagaaagtcggttatcgaccctagtgagcagaagacattggccaaccttccatggattgtagagcccggtcaggaggctaaacggggaatcaatactaagtatgagaccactattttttag

SEQ ID NO: 80466 - DNA, 1053 bp, Artificial Sequence
  derived and/or modified sequence
gtgctgttccagggcagcaacgtgatggaggaccaggacctgctggagatcggcatcctgaacagcggccacagacagagaatcctgcaggccatccagctgctgcccaagatgagacccatcggccacgacggctaccaccccaccagcgtggccgagtggctggacagcatcgagctgggcgactacaccaaggccttcctgatcaacggctacaccagcatggacctgctgaagaagatctgggaggtggagctgatcaaccagagcagcgtgtgcgagatctggaccaaccagaacgccggcttccccttcagcgccatccaccaggtgcacaacaccggcgactggggcgagcccagcatcaccctgagaccccccaacgaggccaccgccagcacccccgtgcagtactggcagcaccaccccgagaagctgatcttccagagctgcgactacaaggccttctacctgggcagcatgctgatcaaggagctgagaggcaccgagagcacccaggacgcctgcgccaagatgagagccaacatccagaagagcaccgagcagatgaagaaggtgcccaccatcatcctgagcgtgagctacaagggcgtgaagttcatcgacgccaccaacaagaacatcatcgccgagcacgagatcagaaacatcagctgcgccgcccaggaccccgaggacctgagcaccttcgcctacatcaccaaggacctgaagagcaaccaccactactgccacgtgttcaccgccttcgacgtgaacctggcctacgagatcatcctgaccctgggccaggccttcgaggtggcctaccagctggccctgcaggccagaaagggcggccacagcagcaccctgcccgagagcttcgagaacaagcccagcaagcccatccccaagcccagagtgagcatcagaaagagcgtgatcgaccccagcgagcagaagaccctggccaacctgccctggatcgtggagcccggccaggaggccaagagaggcatcaacaccaagtacgagaccaccatcttctag

SEQ ID NO: 80467 - DNA, 1074 bp, Artificial Sequence
  derived and/or modified sequence
atggccaacggcttcgacaacgtgcagttcatgggcagcaacgtgatggaggaccaggacctgctggagatcggcatcctgaacagcggccacagacagagaatcctgcaggccatccagctgctgcccaagatgagacccatcggccacgacggctaccaccccaccagcgtggccgagtggctggacagcatcgagctgggcgactacaccaaggccttcctgatcaacggctacaccagcatggacctgctgaagaagatctgggaggtggagctgatcaaccagagcagcgtgtgcgagatctggaccaaccagaacgccggcttccccttcagcgccatccaccaggtgcacaacaccggcgactggggcgagcccagcatcaccctgagaccccccaacgaggccaccgccagcacccccgtgcagtactggcagcaccaccccgagaagctgatcttccagagctgcgactacaaggccttctacctgggcagcatgctgatcaaggagctgagaggcaccgagagcacccaggacgcctgcgccaagatgagagccaactgccagaagagcaccgagcagatgaagaaggtgcccaccatcatcctgagcgtgagctacaagggcgtgaagttcatcgacgccaccaacaagaacatcatcgccgagcacgagatcagaaacatcagctgcgccgcccaggaccccgaggacctgagcaccttcgcctacatcaccaaggacctgaagagcaaccaccactactgccacgtgttcaccgccttcgacgtgaacctggcctacgagatcatcctgaccctgggccaggccttcgaggtggcctaccagctggccctgcaggccagaaagggcggccacagcagcaccctgcccgagagcttcgagaacaagcccagcaagcccatccccaagcccagagtgagcatcagaaagagcgtgatcgaccccagcgagcagaagaccctggccaacctgccctggatcgtggagcccggccaggaggccaagagaggcatcaacaccaagtacgagaccaccatcttctag

SEQ ID NO: 80468 - DNA, 1185 bp, Artificial Sequence
  derived and/or modified sequence
atgggacctcgttgccccgtgcagaccgtggggcaatggctggaaagtatcgggctgccccagtacgagaatcacctgatggccaatggatttgataacgtgcagttcatgggcagtaacgtcatggaggatcaggacctgctcgaaatcggtattctaaactctggccaccggcagcgaatactgcaagccatccagctgctccccaaaatgaggcctattgggcatgatggctatcacccaacgtctgtcgctgagtggttagacagcatcgaactaggggactatacaaaagcttttctcattaatggctacacatccatggatctgctgaagaagatttgggaggtagaactgatcaacgttctcaagattaatcttattggacatagaaagaggattctagctagcctgggagatagactgcacgatgatccaccccagaagccaccccgttccattactctgcgtactggcgactggggcgagccgtcgattacccttagaccacccaacgaggccacggcatcaacgccagtccagtactggcaacatcatccagagaagctcattttccagtcgtgtgactataaagccttctatctggggagtatgctcattaaggaactgagagggaccgagtcaactcaggacgcctgtgctaaaatgcgagccaactgccagaagtctactgaacagatgaagaaagtgccgacgattattctcagcgtgtcctataaaggagtgaagttcattgatgctactaacaagaatatcatcgccgaacatgagatccgtaatatatcctgcgcggctcaggatccagaagaccttagcaccttcgcatacatcactaaggacctgaaatctaaccatcattattgccatgtcttcaccgcctttgacgttaacctggcctatgaaattattctgactttagggcaagcattcgaagtggcatatcagctggcactgcaagcccggaagggtggccactctagcacccttcccgaatcttttgaaaacaaaccgtctaagcccattcccaagcctagggtctccatccgtaaaagcgttatcgacccaagtgaacagaaaacgttggccaacctgccgtggatcgtggagcccggacaggaggcaaagcgaggcatcaacacaaagtacgagaccactattttctag

SEQ ID NO: 80469 - DNA, 1185 bp, Artificial Sequence
  derived and/or modified sequence
atgggcccccgctgccctgtgcagacagtgggccagtggctggagagcatcggcctgccccagtatgagaaccacctgatggccaatggatttgacaacgtgcagttcatgggcagcaatgtgatggaggaccaggacctgctggagatcggcatcctgaacagcggccaccggcagaggatcctgcaggccatccagctgctgcccaagatgaggcccatcggccatgatggctaccaccccacctctgtggccgagtggctggacagcattgagctgggggactacaccaaggccttcctgatcaatggctacacctccatggacctgctgaagaagatctgggaggtggagctgatcaacgtgctgaagatcaacctgattggccacaggaagaggatcctggccagcctgggggaccggctgcatgatgaccccccccagaagccacccaggagcatcaccctgaggactggagactggggcgagcccagcatcaccctgcggcccccaaatgaggccacagccagcacccctgtgcagtactggcagcaccaccctgagaagctgatcttccagagctgtgactacaaggccttctacctgggctccatgctgatcaaggagctgcggggcacagagagcacccaggatgcctgtgccaagatgagggccaactgccagaagagcacagagcagatgaagaaggtgcccaccatcatcctgtctgtgtcctacaagggcgtgaagttcattgatgccaccaacaagaacatcatcgccgagcacgagatccggaacatcagctgtgccgcccaggaccctgaggacctgagcacctttgcctacatcaccaaggacctgaagagcaaccaccactactgccacgtgttcaccgcctttgatgtgaacctggcctatgagatcatcctgaccctgggccaggcctttgaggtggcctaccagctggccctgcaggccaggaaaggaggccacagcagcaccctgcctgagagctttgagaacaagcccagcaagcccatccccaagccccgggtgtccatcaggaagagcgtcatcgaccccagcgagcagaagaccctggccaacctgccctggatcgtggagcccggccaggaggccaagaggggcatcaacaccaagtatgagaccaccatcttctag

SEQ ID NO: 80470 - DNA, 1185 bp, Artificial Sequence
  derived and/or modified sequence
atgggcccccggtgccccgtgcagaccgtgggccagtggctggagtcgataggcctccctcagtacgaaaaccaccttatggctaatggcttcgacaacgtgcagttcatgggttctaatgttatggaagaccaagacttgctcgagatcgggatcctgaattcaggccaccggcaaaggatactgcaggctatccagcttttacctaagatgagaccgatcggacatgacggttaccaccccacctccgtggcggaatggctcgacagcatcgaactgggggattacaccaaagcattcctgatcaacggctacacttccatggatctgctgaaaaagatctgggaagtggaactgatcaatgtactgaagatcaatctgatcggacatcggaagagaattcttgcaagtcttggagacagactgcatgacgaccctccccagaagccccccaggtctatcaccctgcgtaccggagactggggcgagccgagcattacactgcgaccccctaacgaagccacggcgtccactcccgtgcagtattggcagcaccatcccgaaaagcttatctttcaaagctgcgattacaaggccttttatctcgggagtatgcttatcaaagagcttcgtggaaccgaaagtacacaggacgcctgcgccaagatgcgggctaattgccagaagtccaccgagcagatgaagaaggtccccacgataatcctttcagtcagctacaaaggcgttaaatttatcgatgcaaccaataaaaatatcatcgcagaacacgagatacggaatatcagttgcgccgcccaagatcctgaagacctgagtacattcgcatatataactaaggatttgaaaagcaaccaccactattgccatgtattcacagctttcgacgtgaatcttgcgtatgagattatattaacactcggtcaggctttcgaggtggcgtaccaactggccctacaagcaagaaaaggaggccattccagtactttgccagaatcatttgaaaataaaccttccaagcccatcccaaagccacgagttagtatacgtaagtcagttattgacccaagcgagcagaagaccctagcaaacttaccatggattgtagaaccaggccaggaagcaaaaagaggcattaataccaagtacgagactaccatcttttag

SEQ ID NO: 80471 - DNA, 1690 bp, Artificial Sequence
  derived and/or modified sequence
gtaacgtataaccagtatgaagattcaattcagatttaagcactttggtttgcttttgaatcttgctattttctgcatttgttttgactgctctcatcattcaagattgacgcttggatgggacccagatgccctgtccaaacagtgggacaatggttggaaagcattgggctacctcagtacgagaaccacctgatggctaatggatttgacaatgtgcagtttatgggaagcaatgttatggaagatcaggatttgttggaaattggaatccttaattctgggcacagacaaagaattctacaggcaatccagctccttccaaagatgagacccattgggcatgatggctaccatcccacctctgtagctgagtggctggattccattgaactgggcgactacaccaaagcctttctaattaatggctacacttcgatggacctgttgaaaaaaatctgggaggttgaacttattaatgttttaaaaatcaatttgattggccacaggaaacgtattttggcatctctgggagacaggctgcacgacgatcccccacagaagccccctcggtccatcaccctcaggacaggagactggggagaaccttccattaccttgcgacctccgaatgaagccacagcctctaccccggtacagtactggcagcatcacccagaaaagcttatcttccagtcgtgtgattacaaagctttttatttaggttctatgctgataaaagagcttagggggacagaatcaacccaagatgcttgtgcaaaaatgcgggctaactgtcagaagtctacagagcaaatgaagaaggtccctactattattctttctgtctcatataaaggagtcaaatttattgatgcaacaaataagaacataattgctgagcatgaaattcgtaatatctcctgtgctgcccaggacccagaagacctctcaacatttgcctatatcacaaaagatttgaagtctaatcaccactactgtcatgtgtttactgcctttgatgtgaatttagcctatgaaatcatcctaaccctgggacaggcattcgaagtcgcttaccagctagcactacaagcaagaaaagggggacactcctccacacttccagaaagctttgaaaacaaaccctccaaacccatccccaagccccgcgttagcattcgcaagtccgtgatcgacccatctgagcaaaagactctggccaatctaccgtggattgtggagccgggccaagaagccaagaggggcattaataccaagtatgaaaccacgattttctgatactcgccgtcctcctgtcctcgcggtgccttgctcgccaagcggtcccggagcaggctttccttcgcgcctccgcgtccacccagcccaggaggaagactgctctgagcgtgcggccttgttacgggcgaaaggccactggccattcctggggaagttctttctgcaccagtgatggaaaacgcaagactttccagtcgcaacccctgagaggcgtgagttgagatgggttttccctgatgctcccgactcccctccccaccacctcccaaggtatttctgatgactccgccccagtacttgctttgcttcatttggggaaaataataccttttctttaaaaaaaaaaaaaaaaaaaaaaaagtaaaggggatctctaatactgcct

SEQ ID NO: 80472 - DNA, 1185 bp, Artificial Sequence
  derived and/or modified sequence
atgggccctagatgccctgtgcagactgtgggccagtggttagagagcattggactgccccagtatgaaaaccatctcatggctaacggttttgataacgtccagtttatgggctcaaacgtaatggaggaccaggatctcttggaaattggcattctgaattctgggcaccggcagagaattcttcaggcaattcagctgctccctaaaatgcggcctattggccacgatggttaccacccaacttccgtagctgagtggttagacagcatcgaactgggtgattacacgaaggcctttctgatcaacggatatacaagcatggatctgcttaaaaaaatttgggaggtagagcttattaacgtgctgaagattaatctgattggccaccggaaacggattctggcttcattaggcgaccgtctgcatgatgatcctccccagaaaccacccaggtctattacgttgcgaacaggagattggggagagccatccattacacttcggccacctaacgaagcgacagcatccacacctgtacagtattggcagcaccaccctgaaaagctgatctttcagtcttgcgattacaaggctttttatctgggtagtatgctcatcaaggaattgcgtgggaccgagtcaacccaggacgcgtgtgccaaaatgcgtgccaattgtcagaagtccacagagcagatgaaaaaagtgccaaccataattcttagcgtcagttataagggcgtcaaatttatcgacgccacaaacaagaacataatcgcagaacatgagattagaaacattagctgcgccgctcaagaccctgaagatttatccacatttgcatatatcaccaaggatcttaaatctaaccaccactactgccacgtcttcacagccttcgatgtgaacctagcttatgagatcatcctcactctggggcaggctttcgaggttgcataccagctggccctccaggccaggaaaggcggacacagctccacactcccggaatcattcgagaataagccctctaagccgatccctaagcccagggtgtccatcaggaagtccgtcatcgaccctagcgagcagaagactttagccaatctcccatggatagtagagccaggtcaggaagctaaacggggtattaatacgaagtacgagaccaccattttttag

SEQ ID NO: 80473 - DNA, 1185 bp, Artificial Sequence
  derived and/or modified sequence
atgggccccagatgccccgtgcagaccgtgggccagtggctggagagcatcggcctgccccagtacgagaaccacctgatggccaacggcttcgacaacgtgcagttcatgggcagcaacgtgatggaggaccaggacctgctggagatcggcatcctgaacagcggccacagacagagaatcctgcaggccatccagctgctgcccaagatgagacccatcggccacgacggctaccaccccaccagcgtggccgagtggctggacagcatcgagctgggcgactacaccaaggccttcctgatcaacggctacaccagcatggacctgctgaagaagatctgggaggtggagctgatcaacgtgctgaagatcaacctgatcggccacagaaagagaatcctggccagcctgggcgacagactgcacgacgaccccccccagaagccccccagaagcatcaccctgagaaccggcgactggggcgagcccagcatcaccctgagaccccccaacgaggccaccgccagcacccccgtgcagtactggcagcaccaccccgagaagctgatcttccagagctgcgactacaaggccttctacctgggcagcatgctgatcaaggagctgagaggcaccgagagcacccaggacgcctgcgccaagatgagagccaactgccagaagagcaccgagcagatgaagaaggtgcccaccatcatcctgagcgtgagctacaagggcgtgaagttcatcgacgccaccaacaagaacatcatcgccgagcacgagatcagaaacatcagctgcgccgcccaggaccccgaggacctgagcaccttcgcctacatcaccaaggacctgaagagcaaccaccactactgccacgtgttcaccgccttcgacgtgaacctggcctacgagatcatcctgaccctgggccaggccttcgaggtggcctaccagctggccctgcaggccagaaagggcggccacagcagcaccctgcccgagagcttcgagaacaagcccagcaagcccatccccaagcccagagtgagcatcagaaagagcgtgatcgaccccagcgagcagaagaccctggccaacctgccctggatcgtggagcccggccaggaggccaagagaggcatcaacaccaagtacgagaccaccatcttctag

SEQ ID NO: 80474 - protein, 460 aa, Artificial Sequence
  derived and/or modified sequence
MMWQCHLSAQDYRYYPVDGYSLLKRFPLHPLTGPRCPVQTVGQWLESIGLPQYENHLMANGFDNVQFMGSNVMEDQDLLEIGILNSGHRQRILQAIQLLPKMRPIGHDGYHPTSVAEWLDSIELGDYTKAFLINGYTSMDLLKKIWEVELINVLKINLIGHRKRILASLGDRLHDDPPQKPPRSITLREPSGNHTPPQLSPSLSQSTYTTGGSLDVPHIIMQGDARRRRNENYFDDIPRSKLERQMAQTGDWGEPSITLRPPNEATASTPVQYWQHHPEKLIFQSCDYKAFYLGSMLIKELRGTESTQDACAKMRANCQKSTEQMKKVPTIILSVSYKGVKFIDATNKNIIAEHEIRNISCAAQDPEDLSTFAYITKDLKSNHHYCHVFTAFDVNLAYEIILTLGQAFEVAYQLALQARKGGHSSTLPESFENKPSKPIPKPRVSIRKSVPFCFKADRPI

SEQ ID NO: 80475 - DNA, 1383 bp, Artificial Sequence
  derived and/or modified sequence
atgatgtggcagtgccacctttctgcccaggattatcgttactatccagtggatggctattcgctgctgaagagattcccactccatcccctgactggacctaggtgccccgttcagacagtaggacagtggttggaatccattgggctgccacagtatgaaaaccatctgatggccaatgggttcgacaacgttcaattcatggggagcaatgttatggaggaccaagacctccttgagattggcatccttaactccggacatcggcaacgcatccttcaggccattcagcttctacctaagatgcgtcctatagggcatgatgggtaccatccaacctcggtggcagaatggctcgacagtatcgaactgggggattacacaaaggccttccttattaatggctacacatcaatggacctgctgaaaaagatctgggaagtggagttgattaatgtccttaaaatcaaccttatcggacaccgtaagcggattcttgcatctcttggcgacaggttgcacgatgacccgcctcaaaaaccacctaggtccataaccctgcgcgagccttcaggaaatcacaccccaccacagttaagtccgtctttgtcgcagagtacctacaccacaggaggcagccttgacgtgcctcatattattatgcaaggcgatgcaaggagacggagaaatgaaaactactttgatgacatcccaaggagtaaattagagcggcagatggcgcagacaggcgattggggcgagccctcaatcacactgcggccaccaaatgaggcaacggcttcaacaccagtgcagtattggcaacaccacccggaaaaactcatctttcagtcctgcgactataaagccttttatctaggaagtatgttgatcaaagaactgagagggactgagtcgactcaagacgcctgcgccaagatgagggcaaactgtcaaaaaagcaccgagcaaatgaagaaagtccccacgatcatactaagcgtaagttataaaggggtgaaatttattgacgccacaaataaaaacattatcgcagaacacgaaataaggaacattagctgcgcagcgcaggatcctgaggatctatcgacattcgcctacatcactaaggatcttaagtcaaaccatcattattgccacgtatttaccgcctttgacgtcaacctcgcgtatgagatcattctcacgctgggtcaggccttcgaagtcgcctatcaactggcactacaggctcggaagggcggtcatagcagcaccctcccagaatccttcgagaacaagccctccaaaccgatacctaagccccgtgtatcaattaggaagagcgtgccattctgctttaaagcagatcgccctatctag

SEQ ID NO: 80476 - DNA, 1383 bp, Artificial Sequence
  derived and/or modified sequence
atgatgtggcagtgccacctgagcgcccaggactaccgctactaccctgtggatggctacagcctgctgaagcgcttccccctgcaccccctgaccggcccccgctgccctgtgcagacagtgggccagtggctggagagcatcggcctgccccagtatgagaaccacctgatggccaacggctttgacaacgtgcagttcatgggcagcaatgtgatggaggaccaggacctgctggagatcggcatcctgaacagcggccaccggcagaggatcctgcaggccatccagctgctgcccaagatgaggcccatcggccatgatggctaccaccccacctctgtggccgagtggctggacagcattgagctgggggactacaccaaggccttcctgatcaatggctacacctccatggacctgctgaagaagatctgggaggtggagctgatcaacgtgctgaagatcaacctgattggccacaggaagaggatcctggccagcctgggggaccggctgcatgatgatcctccccagaagcccccaagaagcatcaccctgcgggagcccagcggcaaccacaccccaccccagctgagccccagcctgagccagagcacctacaccaccggcggcagcctggatgtgccccacatcatcatgcagggagatgccaggagaagaagaaatgaaaactactttgatgacatccccaggagcaagctggagcggcagatggcccagacaggagactggggcgagcccagcatcaccctgcggcccccaaatgaggccacagccagcacccctgtgcagtactggcagcaccaccctgagaagctgatcttccagagctgtgactacaaggccttctacctgggctccatgctgatcaaggagctgcggggcacagagagcacccaggatgcctgtgccaagatgagggccaactgccagaagagcacagagcagatgaagaaggtgcccaccatcatcctgtctgtgtcctacaagggcgtgaagttcattgatgccaccaacaagaacatcatcgccgagcacgagatccggaacatcagctgtgccgcccaggaccctgaggacctgagcacctttgcctacatcaccaaggacctgaagagcaaccaccactactgccacgtgttcaccgcctttgatgtgaacctggcctatgagatcatcctgaccctgggccaggcctttgaggtggcctaccagctggccctgcaggccaggaagggcggccacagcagcaccctgcctgagagctttgagaacaagcccagcaagcccatccccaagccccgggtgtccatcaggaagtctgtgcccttctgcttcaaggctgaccggcccatctag

SEQ ID NO: 80477 - DNA, 1383 bp, Artificial Sequence
  derived and/or modified sequence
atgatgtggcagtgccacctgagcgcccaggactaccggtactaccctgtcgacggttactctctcctcaagaggtttcctttgcatcccttgaccggacctagatgtccagttcaaaccgtggggcagtggctggaatccattggattaccacagtacgagaatcatctcatggctaacggctttgataacgtgcagtttatgggctcaaacgtcatggaggaccaagacctgctggaaatcggcattcttaattccggccacagacagaggattcttcaggctatccagctgctgccaaaaatgaggcccattggacacgatggctatcatcctacttctgtagccgaatggcttgattctatcgaactgggggactacacaaaagcttttctgataaatggctacacgtctatggatctgctgaaaaaaatatgggaagtggagcttatcaacgtcctgaagataaatctgatcggccacagaaagaggatcctggcatccctgggcgaccggctgcatgatgatcccccccagaaaccacctaggtcaataactctgcgggagccaagtggaaaccacacaccgcctcagctatctcctagcctttcccagagcacttacactaccggcggtagcctcgacgtcccccatatcatcatgcagggcgatgcccggagacgcaggaatgagaattactttgatgatatcccaaggtccaaattagaacgccaaatggcacagactggcgactggggggagccttctatcacactgagaccccctaacgaggccacagcttctacacccgttcaatactggcaacatcatcccgaaaaattaatcttccagtcttgtgattataaagctttttaccttggcagtatgttgatcaaagagcttagaggtaccgagagtacgcaggatgcttgcgccaagatgcgggccaattgtcagaagagcacagagcagatgaaaaaagtccctacaattatcttgtctgtttcatataagggagtaaaatttatagacgccaccaataagaatataatcgcagaacatgaaattaggaacatctcatgcgccgcccaagacccagaagacctttcaaccttcgcctatatcacaaaagatctaaaatccaaccaccattactgtcacgttttcactgcttttgacgtcaacctggcctacgagatcattctaacactcgggcaagcgtttgaggtggcctaccagctggctcttcaagcacgcaaaggggggcactcatcgacactgcccgaaagcttcgagaataagccctctaaacctattcccaagccacgggtgagtattagaaagtccgttcccttctgctttaaggcagatcggccgatttag

SEQ ID NO: 80478 - DNA, 1383 bp, Artificial Sequence
  derived and/or modified sequence
atgatgtggcaatgccacctctcagcccaggactaccgctattaccccgtggacggctactccctgcttaaacgcttccctcttcatcctcttacaggacccagatgccctgtccaaacagtgggacaatggttggaaagcattgggctacctcagtacgagaaccacctgatggctaatggatttgacaatgtgcagtttatgggaagcaatgttatggaagatcaggatttgttggaaattggaatccttaattctgggcacagacaaagaattctacaggcaatccagctccttccaaagatgagacccattgggcatgatggctaccatcccacctctgtagctgagtggctggattccattgaactgggcgactacaccaaagcctttctaattaatggctacacttcgatggacctgttgaaaaaaatctgggaggttgaacttattaatgttttaaaaatcaatttgattggccacaggaaacgtattttggcatctctgggagacaggctgcacgacgatcccccacagaagccccctcggtccatcaccctcagggaacccagtggtaatcacactcctcctcagttgtctccatcacttagccaaagcacttacaccactggtggctccctagacgttcctcacattatcatgcagggcgatgcaaggaggagaagaaatgaaaactactttgatgatattccccgatcaaaactggagaggcagatggctcagacaggagactggggagaaccttccattaccttgcgacctccgaatgaagccacagcctctaccccggtacagtactggcagcatcacccagaaaagcttatcttccagtcgtgtgattacaaagctttttatttaggttctatgctgataaaagagcttagggggacagaatcaacccaagatgcttgtgcaaaaatgcgggctaactgtcagaagtctacagagcaaatgaagaaggtccctactattattctttctgtctcatataaaggagtcaaatttattgatgcaacaaataagaacataattgctgagcatgaaattcgtaatatctcctgtgctgcccaggacccagaagacctctcaacatttgcctatatcacaaaagatttgaagtctaatcaccactactgtcatgtgtttactgcctttgatgtgaatttagcctatgaaatcatcctaaccctgggacaggcattcgaagtcgcttaccagctagcactacaagcaagaaaagggggacactcctccacacttccagaaagctttgaaaacaaaccctccaaacccatccccaagccccgcgttagcattcgcaagtccgtgcctttctgttttaaagcagatcgacccatctga

SEQ ID NO: 80479 - DNA, 1383 bp, Artificial Sequence
  derived and/or modified sequence
atgatgtggcagtgccacctttcagcccaggactacagatattatccggtggatggctattctctgcttaagaggtttcctctgcatcctctaaccggaccgagatgcccagtgcagaccgtcggccaatggttagagtccatcggcctgccccagtatgagaatcaccttatggccaacggcttcgataatgtacagtttatgggatccaatgttatggaagaccaagatttgctggaaatcggcattctgaacagcggacaccgccaaaggatcttgcaggctattcagctgcttcctaaaatgcgcccaatcgggcatgacgggtatcatcctacctcggtggctgagtggctggacagtatcgagctgggggattacaccaaggccttccttatcaacggctacacttcgatggatcttttgaaaaaaatatgggaagtagagctcattaacgttttaaagattaatctcatagggcacagaaaacgcatcctcgccagcctgggagatagattgcatgacgacccaccgcaaaagccccctcgttccatcaccttgagagaaccgagtggcaaccacaccccaccacagctgtctccatctctctcacaaagcacatatactactgggggaagcctggacgttccacatattatcatgcaaggcgatgccagacggaggaggaatgagaattactttgacgacatccccagaagtaagctggaacggcaaatggcacaaaccggggactggggtgaacccagtatcaccctccgccctccgaacgaggccactgccagtacgcctgttcagtattggcaacaccatcctgagaaactgatctttcagtcttgcgactataaagccttttacttgggctctatgctgatcaaagaattacgaggcactgagagtacccaggacgcttgtgctaaaatgcgagccaactgccaaaagagcaccgaacagatgaagaaagtgcctaccatcatcctgtccgtctcctataagggcgtaaaattcattgatgcaacaaataaaaacatcattgcagaacacgaaatcaggaatatctcttgtgccgctcaagatcccgaggatctgagcacctttgcatacattaccaaggacctgaagagcaatcatcattattgccacgtgttcactgcattcgatgtcaacttagcctacgaaattatccttacattgggacaggcctttgaggtggcataccaactcgcacttcaggccaggaaggggggacactctagcacactccctgaatccttcgaaaataagcccagtaaaccgataccaaaaccacgggtctcaatccgcaaaagtgtccccttttgtttcaaagcagataggcccatttag

SEQ ID NO: 80480 - DNA, 1383 bp, Artificial Sequence
  derived and/or modified sequence
atgatgtggcagtgccacctgagcgcccaggactacagatactaccccgtggacggctacagcctgctgaagagattccccctgcaccccctgaccggccccagatgccccgtgcagaccgtgggccagtggctggagagcatcggcctgccccagtacgagaaccacctgatggccaacggcttcgacaacgtgcagttcatgggcagcaacgtgatggaggaccaggacctgctggagatcggcatcctgaacagcggccacagacagagaatcctgcaggccatccagctgctgcccaagatgagacccatcggccacgacggctaccaccccaccagcgtggccgagtggctggacagcatcgagctgggcgactacaccaaggccttcctgatcaacggctacaccagcatggacctgctgaagaagatctgggaggtggagctgatcaacgtgctgaagatcaacctgatcggccacagaaagagaatcctggccagcctgggcgacagactgcacgacgaccccccccagaagccccccagaagcatcaccctgagagagcccagcggcaaccacacccccccccagctgagccccagcctgagccagagcacctacaccaccggcggcagcctggacgtgccccacatcatcatgcagggcgacgccagaagaagaagaaacgagaactacttcgacgacatccccagaagcaagctggagagacagatggcccagaccggcgactggggcgagcccagcatcaccctgagaccccccaacgaggccaccgccagcacccccgtgcagtactggcagcaccaccccgagaagctgatcttccagagctgcgactacaaggccttctacctgggcagcatgctgatcaaggagctgagaggcaccgagagcacccaggacgcctgcgccaagatgagagccaactgccagaagagcaccgagcagatgaagaaggtgcccaccatcatcctgagcgtgagctacaagggcgtgaagttcatcgacgccaccaacaagaacatcatcgccgagcacgagatcagaaacatcagctgcgccgcccaggaccccgaggacctgagcaccttcgcctacatcaccaaggacctgaagagcaaccaccactactgccacgtgttcaccgccttcgacgtgaacctggcctacgagatcatcctgaccctgggccaggccttcgaggtggcctaccagctggccctgcaggccagaaagggcggccacagcagcaccctgcccgagagcttcgagaacaagcccagcaagcccatccccaagcccagagtgagcatcagaaagagcgtgcccttctgcttcaaggccgacagacccatctag

SEQ ID NO: 80481 - protein, 450 aa, Artificial Sequence
  derived and/or modified sequence
MMWQCHLSAQDYRYYPVDGYSLLKRFPLHPLTGPRCPVQTVGQWLESIGLPQYENHLMANGFDNVQFMGSNVMEDQDLLEIGILNSGHRQRILQAIQLLPKMRPIGHDGYHPTSVAEWLDSIELGDYTKAFLINGYTSMDLLKKIWEVELINVLKINLIGHRKRILASLGDRLHDDPPQKPPRSITLRSSVCEIWTNQNAGFPFSAIHQVHNTGDWGEPSITLRPPNEATASTPVQYWQHHPEKLIFQSCDYKAFYLGSMLIKELRGTESTQDACAKMRANIQKSTEQMKKVPTIILSVSYKGVKFIDATNKNIIAEHEIRNISCAAQDPEDLSTFAYITKDLKSNHHYCHVFTAFDVNLAYEIILTLGQAFEVAYQLALQARKGGHSSTLPESFENKPSKPIPKPRVSIRKSVQIDPSEQKTLANLPWIVEPGQEAKRGINTKYETTIF

SEQ ID NO: 80482 - protein, 450 aa, Artificial Sequence
  derived and/or modified sequence
MMWQCHLSAQDYRYYPVDGYSLLKRFPLHPLTGPRCPVQTVGQWLESIGLPQYENHLMANGFDNVQFMGSNVMEDQDLLEIGILNSGHRQRILQAIQLLPKMRPIGHDGYHPTSVAEWLDSIELGDYTKAFLINGYTSMDLLKKIWEVELINVLKINLIGHRKRILASLGDRLHDDPPQKPPRSITLRSSVCEIWTNQNAGFPFSAIHQVHNTGDWGEPSITLRPPNEATASTPVQYWQHHPEKLIFQSCDYKAFYLGSMLIKELRGTESTQDACAKMRANCQKSTEQMKKVPTIILSVSYKGVKFIDATNKNIIAEHEIRNISCAAQDPEDLSTFAYITKDLKSNHHYCHVFTAFDVNLAYEIILTLGQAFEVAYQLALQARKGGHSSTLPESFENKPSKPIPKPRVSIRKSVQIDPSEQKTLANLPWIVEPGQEAKRGINTKYETTIF

SEQ ID NO: 80483 - DNA, 1353 bp, Artificial Sequence
  derived and/or modified sequence
atgatgtggcagtgccatctgtctgcccaggattaccgctattatccggtggacggctactctctgcttaaacgtttccctttacatccactcacgggaccgcgctgccccgtacagacagtgggccagtggctagagtctattggtctccctcaatatgagaaccacctgatggctaatggcttcgataacgtccagtttatgggtagtaatgtgatggaggatcaggatcttctggaaatcgggattctgaactcaggtcataggcagcgaattttacaggccatccagctcctgccaaagatgcgtcccatcggacatgacggttatcatccaacttcagtggctgagtggttggactctattgaactaggcgattatacaaaggccttcctcattaacggttataccagcatggacctgctgaagaaaatctgggaggtcgaacttatcaacgtgctgaaaataaatctgattggccacagaaaaagaatattggcatcattgggagatagactccacgatgacccacctcagaagccccctaggtcaataaccctgcgctcctcagtgtgcgaaatttggaccaaccaaaacgcggggtttccgttctccgcaatccaccaggtgcataacactggcgactggggcgagcctagtataacccttcgacctcccaacgaggcaacagcgtccaccccggtgcagtactggcagcaccatccagagaaattaatttttcaatcctgcgactataaagccttctacctgggatccatgcttattaaagaactgagaggcacagagtcaacacaggatgcctgtgcaaaaatgagggccaacattcaaaaatcaacggagcaaatgaaaaaggtgcctactataatattatccgtgtcatataaaggggttaaatttattgacgcgacaaataagaacattattgcagagcatgaaatacgcaacatcagttgcgctgcccaggaccccgaagacctgagcaccttcgcatatattactaaagatctaaagtcaaaccaccactactgccacgtgtttacagctttcgacgtgaatcttgcatatgagatcattctgacgctggggcaggctttcgaagtcgcataccagctggctctgcaggcccgaaagggaggtcattcatccactctgcctgagagcttcgagaacaagccatcgaagccaattcccaagcctagagtatcaatccgtaaaagcgttcagattgatcctagtgagcagaagaccctcgccaatcttccttggatagtggagccaggacaagaagccaagcgggggatcaataccaaatatgaaacgacgatcttctag

SEQ ID NO: 80484 - DNA, 1353 bp, Artificial Sequence
  derived and/or modified sequence
atgatgtggcagtgccacctgtctgcacaagattaccgctactatcctgtagacggttactctctcctgaagcgattccccctgcatccattgacaggacccagatgcccagttcagactgtgggccagtggctggagagcatcggcttgccccagtacgaaaatcatctcatggctaatggcttcgataacgtgcagttcatggggagcaacgtgatggaagatcaagacctgctggagattgggattcttaactccggacaccgtcagcgcatcttgcaggccatacaactactgcctaagatgagacccatcggccacgatgggtaccaccccaccagtgtcgcagaatggctcgatagtatcgagctgggagactacacaaaggcgtttttgatcaacggctacacgtcgatggaccttcttaagaagatatgggaggttgaacttatcaatgttctgaagatcaatctcatcgggcatcggaaaaggatcctggcatccctgggtgaccgcctgcacgacgaccctccacagaaacctcctcggtcaatcacgctgcgctcatctgtgtgtgagatttggaccaaccaaaatgccgggtttccgttcagtgcaattcaccaggtgcataacaccggcgattggggagagccaagtatcaccctccgccctccaaacgaggccaccgcttctacaccggtgcaatattggcaacaccacccggagaaactcatatttcaatcctgcgattacaaggccttctatctaggttccatgttgataaaggaacttcgagggactgagtctacccaggacgcttgcgctaaaatgcgggccaactgccagaaaagcacagaacagatgaaaaaggtgcccaccatcatcctgtctgtgtcatacaaaggggtcaagtttatagatgccaccaataagaacattatcgcagagcacgaaatccgcaacataagctgcgcagcacaggatccagaggacttgtcaactttcgcctacatcacaaaggacctgaaaagtaaccatcactattgccatgtgtttaccgcattcgacgtgaatctcgcatatgaaataatcctcactctgggccaggcgttcgaggttgcttaccagctggcattgcaggccaggaagggtggccattccagcaccctgccagagtcttttgagaataaaccaagcaaacccataccaaagccaagggtgtccatacgcaaaagtgtgcaaattgacccatcagagcagaagactctcgcgaatcttccctggatcgtagagcccgggcaagaggccaagcgcgggattaacaccaagtacgagaccaccattttttag

SEQ ID NO: 80485 - DNA, 1353 bp, Artificial Sequence
  derived and/or modified sequence
atgatgtggcagtgccacctgagcgcccaggactaccgctactaccctgtggatggctacagcctgctgaagcgcttccccctgcaccccctgaccggcccccgctgccctgtgcagacagtgggccagtggctggagagcatcggcctgccccagtatgagaaccacctgatggccaacggctttgacaacgtgcagttcatgggcagcaatgtgatggaggaccaggacctgctggagatcggcatcctgaacagcggccaccggcagaggatcctgcaggccatccagctgctgcccaagatgaggcccatcggccatgatggctaccaccccacctctgtggccgagtggctggacagcattgagctgggggactacaccaaggccttcctgatcaatggctacacctccatggacctgctgaagaagatctgggaggtggagctgatcaacgtgctgaagatcaacctgattggccacaggaagaggatcctggccagcctgggggaccggctgcatgatgatcctccccagaagcccccaagaagcatcaccctgcggagctctgtgtgtgagatctggaccaaccagaatgccggcttccccttcagcgccatccaccaggtgcacaacacaggagactggggcgagcccagcatcaccctgcggcccccaaatgaggccacagccagcacccctgtgcagtactggcagcaccaccctgagaagctgatcttccagagctgtgactacaaggccttctacctgggctccatgctgatcaaggagctgcggggcacagagagcacccaggatgcctgtgccaagatgagggccaacatccagaagagcacagagcagatgaagaaggtgcccaccatcatcctgtctgtgtcctacaagggcgtgaagttcattgatgccaccaacaagaacatcatcgccgagcacgagatccggaacatcagctgtgccgcccaggaccctgaggacctgagcacctttgcctacatcaccaaggacctgaagagcaaccaccactactgccacgtgttcaccgcctttgatgtgaacctggcctatgagatcatcctgaccctgggccaggcctttgaggtggcctaccagctggccctgcaggccaggaagggcggccacagcagcaccctgcctgagagctttgagaacaagcccagcaagcccatccccaagccccgggtgtccatcaggaagtctgtgcagattgaccccagcgagcagaagaccctggccaacctgccctggatcgtggagcccggccaggaggccaagaggggcatcaacaccaagtatgagaccaccatcttctag

SEQ ID NO: 80486 - DNA, 1353 bp, Artificial Sequence
  derived and/or modified sequence
atgatgtggcagtgccacctgagcgcccaggactaccgctactaccctgtggatggctacagcctgctgaagcgcttccccctgcaccccctgaccggcccccgctgccctgtgcagacagtgggccagtggctggagagcatcggcctgccccagtatgagaaccacctgatggccaacggctttgacaacgtgcagttcatgggcagcaatgtgatggaggaccaggacctgctggagatcggcatcctgaacagcggccaccggcagaggatcctgcaggccatccagctgctgcccaagatgaggcccatcggccatgatggctaccaccccacctctgtggccgagtggctggacagcattgagctgggggactacaccaaggccttcctgatcaatggctacacctccatggacctgctgaagaagatctgggaggtggagctgatcaacgtgctgaagatcaacctgattggccacaggaagaggatcctggccagcctgggggaccggctgcatgatgatcctccccagaagcccccaagaagcatcaccctgcggagctctgtgtgtgagatctggaccaaccagaatgccggcttccccttcagcgccatccaccaggtgcacaacacaggagactggggcgagcccagcatcaccctgcggcccccaaatgaggccacagccagcacccctgtgcagtactggcagcaccaccctgagaagctgatcttccagagctgtgactacaaggccttctacctgggctccatgctgatcaaggagctgcggggcacagagagcacccaggatgcctgtgccaagatgagggccaactgccagaagagcacagagcagatgaagaaggtgcccaccatcatcctgtctgtgtcctacaagggcgtgaagttcattgatgccaccaacaagaacatcatcgccgagcacgagatccggaacatcagctgtgccgcccaggaccctgaggacctgagcacctttgcctacatcaccaaggacctgaagagcaaccaccactactgccacgtgttcaccgcctttgatgtgaacctggcctatgagatcatcctgaccctgggccaggcctttgaggtggcctaccagctggccctgcaggccaggaagggcggccacagcagcaccctgcctgagagctttgagaacaagcccagcaagcccatccccaagccccgggtgtccatcaggaagtctgtgcagattgaccccagcgagcagaagaccctggccaacctgccctggatcgtggagcccggccaggaggccaagaggggcatcaacaccaagtatgagaccaccatcttctag

SEQ ID NO: 80487 - DNA, 1353 bp, Artificial Sequence
  derived and/or modified sequence
atgatgtggcagtgccacctgagcgcccaggactaccggtactaccccgttgacggatactctctcctaaaaagattccccctccaccctctcacaggcccaagatgtcctgtgcagaccgttggccagtggctggagagcatcggattaccccagtacgaaaaccatctgatggccaatggattcgacaacgtgcagttcatgggtagcaacgtaatggaagatcaggacttgcttgagattgggattctgaactccggccatagacaaaggatcctgcaggccatccaactcctcccaaagatgaggccaattggtcatgatggctaccatcctacgtccgtggcagagtggcttgacagcatagaactgggcgactacactaaggccttcctgatcaacgggtacacctcaatggatctccttaaaaagatttgggaagtggagctgatcaatgtcctcaagattaatctgattggacaccgaaaacgtatcttggctagcctgggagatagattacacgacgatcctccacagaaacccccccggtcaataaccctgcggtcatccgtgtgtgaaatctggaccaaccagaatgcgggctttccatttagcgccatccatcaggttcacaatacaggcgactggggggagcccagtattacacttcgcccaccaaatgaggctactgcttccacccccgtccagtattggcagcatcacccagagaaactaatctttcagtcatgcgactacaaggccttctacctcggatccatgctaattaaagaactgaggggcactgaatctacccaggacgcgtgcgccaaaatgagggcaaatatacagaagtctacagagcagatgaagaaggtcccgacaataatcctgtcagtcagctacaaaggcgtaaagtttatcgacgctaccaataagaacataatagccgaacacgaaattagaaatatctcatgcgcggcacaggatcccgaggacctctcaacgtttgcctacatcaccaaagatctgaaaagcaaccatcattattgccacgtcttcaccgcttttgacgtcaatctggcttacgaaattatactcactctcggccaggcatttgaggttgcctaccagctagccctgcaggcacgaaagggagggcactcttctaccctcccggaatcgttcgaaaataaaccctcaaaaccaatcccaaaacctagagtatcaattcgaaagtctgtgcaaattgaccccagtgagcaaaaaaccctagccaacctgccatggatcgtcgagccaggccaggaagcaaaacgaggcatcaataccaaatacgagaccactatcttctag

SEQ ID NO: 80488 - DNA, 1353 bp, Artificial Sequence
  derived and/or modified sequence
atgatgtggcagtgccacctgagcgcccaggactaccggtactaccccgtggatggctactccctgttgaagcgattccctctgcatcctttaactggcccgcgctgcccggtccagactgtgggccaatggttagagtctattggtcttccacaatacgagaatcacctaatggctaacggtttcgataacgtgcagttcatgggctctaatgtgatggaagatcaggacctcctcgagatagggatcctcaattcagggcacagacagcgaatcctgcaggccattcagctgctccccaaaatgagaccaattggccacgacggttatcatcccacgagtgtggccgagtggctggactctatagaacttggagattacactaaagcttttcttatcaatggctatactagcatggacttgctcaagaaaatctgggaggtggaactgattaacgtgctgaagataaatctgatagggcaccgtaaacgcatcctggcaagcctgggcgacaggctgcacgatgatcctccacagaagcctcccaggagtatcactttgagaagttccgtgtgtgagatttggaccaatcagaatgctggattcccattttcagcgattcaccaggtgcacaatactggtgactggggagagccctcaattactctgaggccccccaatgaggcaacggcatccacacccgtgcagtattggcagcatcatccagaaaaattgatattccagagctgcgattacaaagccttttacctgggcagtatgcttatcaaagagctgcgcggaaccgaaagcacacaggatgcctgtgccaaaatgcgggctaattgtcaaaagtctacagagcagatgaagaaggtgcccactatcattctatccgtgagctataaaggggtgaaattcatcgacgctaccaacaagaatataattgcagaacacgaaatccgtaacatatcctgcgccgctcaagatcccgaggaccttagcaccttcgcttacatcaccaaggatctcaaaagtaaccaccattactgtcacgttttcaccgctttcgatgtcaatcttgcctatgaaataattctaaccctcggccaggcatttgaagtggcttaccagctcgcactacaggccagaaagggtgggcattccagcaccttgccggaatcttttgagaataagccatctaagcccatcccaaagcccagggtctccatccgcaagtccgtccagattgacccttctgagcagaagactctggccaatctcccatggatcgtggagccaggacaagaagccaaacggggcatcaatacaaagtatgagacaaccatcttctag

SEQ ID NO: 80489 - DNA, 1353 bp, Artificial Sequence
  derived and/or modified sequence
atgatgtggcaatgccacctctcagcccaggactaccgctattaccccgtggacggctactccctgcttaaacgcttccctcttcatcctcttacaggacccagatgccctgtccaaacagtgggacaatggttggaaagcattgggctacctcagtacgagaaccacctgatggctaatggatttgacaatgtgcagtttatgggaagcaatgttatggaagatcaggatttgttggaaattggaatccttaattctgggcacagacaaagaattctacaggcaatccagctccttccaaagatgagacccattgggcatgatggctaccatcccacctctgtagctgagtggctggattccattgaactgggcgactacaccaaagcctttctaattaatggctacacttcgatggacctgttgaaaaaaatctgggaggttgaacttattaatgttttaaaaatcaatttgattggccacaggaaacgtattttggcatctctgggagacaggctgcacgacgatcccccacagaagccccctcggtccatcaccctcaggtcgtctgtctgtgaaatatggacgaatcagaacgcaggatttcctttctcagcgatccatcaggttcataatacaggagactggggagaaccttccattaccttgcgacctccgaatgaagccacagcctctaccccggtacagtactggcagcatcacccagaaaagcttatcttccagtcgtgtgattacaaagctttttatttaggttctatgctgataaaagagcttagggggacagaatcaacccaagatgcttgtgcaaaaatgcgggcaaatattcagaagtctacagagcaaatgaagaaggtccctactattattctttctgtctcatataaaggagtcaaatttattgatgcaacaaataagaacataattgctgagcatgaaattcgtaatatctcctgtgctgcccaggacccagaagacctctcaacatttgcctatatcacaaaagatttgaagtctaatcaccactactgtcatgtgtttactgcctttgatgtgaatttagcctatgaaatcatcctaaccctgggacaggcattcgaagtcgcttaccagctagcactacaagcaagaaaagggggacactcctccacacttccagaaagctttgaaaacaaaccctccaaacccatccccaagccccgcgttagcattcgcaagtccgtgcagatcgacccatctgagcaaaagactctggccaatctaccgtggattgtggagccgggccaagaagccaagaggggcattaataccaagtatgaaaccacgattttctga

SEQ ID NO: 80490 - DNA, 2973 bp, Artificial Sequence
  derived and/or modified sequence
gggtaatgaaggggagcgagcgagggggagcaaggagcatggagctgcatactgatgagtgacccagatgccctgtccaaacagtgggacaatggttggaaagcattgggctacctcagtacgagaaccacctgatggctaatggatttgacaatgtgcagtttatgggaagcaatgttatggaagatcaggatttgttggaaattggaatccttaattctgggcacagacaaagaattctacaggcaatccagctccttccaaagatgagacccattgggcatgatggctaccatcccacctctgtagctgagtggctggattccattgaactgggcgactacaccaaagcctttctaattaatggctacacttcgatggacctgttgaaaaaaatctgggaggttgaacttattaatcagtcgtctgtctgtgaaatatggacgaatcagaacgcaggatttcctttctcagcgatccatcaggttcataatacaggagactggggagaaccttccattaccttgcgacctccgaatgaagccacagcctctaccccggtacagtactggcagcatcacccagaaaagcttatcttccagtcgtgtgattacaaagctttttatttaggttctatgctgataaaagagcttagggggacagaatcaacccaagatgcttgtgcaaaaatgcgggctaactgtcagaagtctacagagcaaatgaagaaggtccctactattattctttctgtctcatataaaggagtcaaatttattgatgcaacaaataagaacataattgctgagcatgaaattcgtaatatctcctgtgctgcccaggacccagaagacctctcaacatttgcctatatcacaaaagatttgaagtctaatcaccactactgtcatgtgtttactgcctttgatgtgaatttagcctatgaaatcatcctaaccctgggacaggcattcgaagtcgcttaccagctagcactacaagcaagaaaagggggacactcctccacacttccagaaagctttgaaaacaaaccctccaaacccatccccaagccccgcgttagcattcgcaagtccgtgatcgacccatctgagcaaaagactctggccaatctaccgtggattgtggagccgggccaagaagccaagaggggcattaataccaagtatgaaaccacgattttctgatactcgccgtcctcctgtcctcgcggtgccttgctcgccaagcggtcccggagcaggctttccttcgcgcctccgcgtccacccagcccaggaggaagactgctctgagcgtgcggccttgttacgggcgaaaggccactggccattcctggggaagttctttctgcaccagtgatggaaaacgcaagactttccagtcgcaacccctgagaggcgtgagttgagatgggttttccctgatgctcccgactcccctccccaccacctcccaaggtatttctgatgactccgccccagtacttgctttgcttcatttggggaaaataataccttttctttaaaaaaaaaaaaaaaaaaaaaaaagtaaaggggatctctaatactgcctaaaagtatgctttcactgtcagcagttttaaaggtgaaatcagagcagcactacccctcccacctccaaagcatctgtaaaatcattctatcattgagtatcgtttaatgcaaaaggacaaaaacaactcccgtgatatgattgccaggagattctgtttccccatttctatatttgtggattttatatgtaatcacctatgtcagagaaagaaaacctttcaaccaaatgattggttcaaaaggaaagaatgattcaaagcagaggaatttattatgcacagcaaaatgtgtcttgtattaaatatttttattaaaagaatgtttcattaatgcattgataagaaaactaggttagttgcgagggatgtttctggtttcatttcaaataattaaatttctactgctactaccaagaggactggctcagtggtggcaaaatactggtgatgctccctagagcaggaggcccggaagtgctgacgcagccatcagcctgccaagattgttttttaatcttcacagtgttttaaagaacatgttaaaaaaaaaaaaatctagtgctcctgctgtcaagatttctgtcatggaaaccttgtttgagaaaggtgttaataaaattctattgcaaaaatttctttttctagaaaaaataaatacaaaaaaaaaaaagaagaaattccaaagtaataaaacttttcttgagacaaacaaaaaaaaagtttgcttactatttgattaaataaaatttacttacatttctttaaggtattttaattttttaatgtctctgtggagtatttgtatgataccataatgtatatttatgtagaatcaaattatataaacagtaccaatatcattatagaaaaaaataacattttaatgtatattgttctaacaatcatattgtgaatcattttgaagttcattatagcgatattgataaattgtggaattgtcttaatgtttttttattaactgacattattttaaacctaactgagatgatcagttacattcatcagttggtgagttttgaagaataactacattttatttcaaactaacaaatgtatacggttttagttcagtgttgaagaattttaatacaatattaaattacttgaactgaacagttccttgtatatattttgcctattcactgttgatatgtatgtagcaaaatgagagttaaataacactaaaatatggtaccaggaggcaattgtataggagcaaagttaataggagctttgctgaaacagaagcatatgtgtaaataagcttgggcttccagttataaattttgtaatttttgtcattatttatatcctataaaaaaagcacacaaaaataaaacagaagttgtacagca

SEQ ID NO: 80491 - DNA, 3372 bp, Artificial Sequence
  derived and/or modified sequence
ctccaacaatcacatagaacgcagaccagcccaagctgacagcttgatatgccttcttctgctgcctggttttgggggctgtatgacgtactggtcggtagtaaagattaatatgtaagaaatgtggagctaggatcaagtcatactccacagcctgcctggcaaactatgttttacttctgactttgctctctcgctgagaacattaatctgtcaagctggcgggctcctttgatagcaactttcccaggggcatgatgtggcaatgccacctctcagcccaggactaccgctattaccccgtggacggctactccctgcttaaacgcttccctcttcatcctcttacaggacccagatgccctgtccaaacagtgggacaatggttggaaagcattgggctacctcagtacgagaaccacctgatggctaatggatttgacaatgtgcagtttatgggaagcaatgttatggaagatcaggatttgttggaaattggaatccttaattctgggcacagacaaagaattctacaggcaatccagctccttccaaagatgagacccattgggcatgatggctaccatcccacctctgtagctgagtggctggattccattgaactgggcgactacaccaaagcctttctaattaatggctacacttcgatggacctgttgaaaaaaatctgggaggttgaacttattaatgttttaaaaatcaatttgattggccacaggaaacgtattttggcatctctgggagacaggctgcacgacgatcccccacagaagccccctcggtccatcaccctcaggtcgtctgtctgtgaaatatggacgaatcagaacgcaggatttcctttctcagcgatccatcaggttcataatacaggagactggggagaaccttccattaccttgcgacctccgaatgaagccacagcctctaccccggtacagtactggcagcatcacccagaaaagcttatcttccagtcgtgtgattacaaagctttttatttaggttctatgctgataaaagagcttagggggacagaatcaacccaagatgcttgtgcaaaaatgcgggctaactgtcagaagtctacagagcaaatgaagaaggtccctactattattctttctgtctcatataaaggagtcaaatttattgatgcaacaaataagaacataattgctgagcatgaaattcgtaatatctcctgtgctgcccaggacccagaagacctctcaacatttgcctatatcacaaaagatttgaagtctaatcaccactactgtcatgtgtttactgcctttgatgtgaatttagcctatgaaatcatcctaaccctgggacaggcattcgaagtcgcttaccagctagcactacaagcaagaaaagggggacactcctccacacttccagaaagctttgaaaacaaaccctccaaacccatccccaagccccgcgttagcattcgcaagtccgtgcagatcgacccatctgagcaaaagactctggccaatctaccgtggattgtggagccgggccaagaagccaagaggggcattaataccaagtatgaaaccacgattttctgatactcgccgtcctcctgtcctcgcggtgccttgctcgccaagcggtcccggagcaggctttccttcgcgcctccgcgtccacccagcccaggaggaagactgctctgagcgtgcggccttgttacgggcgaaaggccactggccattcctggggaagttctttctgcaccagtgatggaaaacgcaagactttccagtcgcaacccctgagaggcgtgagttgagatgggttttccctgatgctcccgactcccctccccaccacctcccaaggtatttctgatgactccgccccagtacttgctttgcttcatttggggaaaataataccttttctttaaaaaaaaaaaaaaaaaaaaaaaagtaaaggggatctctaatactgcctaaaagtatgctttcactgtcagcagttttaaaggtgaaatcagagcagcactacccctcccacctccaaagcatctgtaaaatcattctatcattgagtatcgtttaatgcaaaaggacaaaaacaactcccgtgatatgattgccaggagattctgtttccccatttctatatttgtggattttatatgtaatcacctatgtcagagaaagaaaacctttcaaccaaatgattggttcaaaaggaaagaatgattcaaagcagaggaatttattatgcacagcaaaatgtgtcttgtattaaatatttttattaaaagaatgtttcattaatgcattgataagaaaactaggttagttgcgagggatgtttctggtttcatttcaaataattaaatttctactgctactaccaagaggactggctcagtggtggcaaaatactggtgatgctccctagagcaggaggcccggaagtgctgacgcagccatcagcctgccaagattgttttttaatcttcacagtgttttaaagaacatgttaaaaaaaaaaaaatctagtgctcctgctgtcaagatttctgtcatggaaaccttgtttgagaaaggtgttaataaaattctattgcaaaaatttctttttctagaaaaaataaatacaaaaaaaaaaaagaagaaattccaaagtaataaaacttttcttgagacaaacaaaaaaaaagtttgcttactatttgattaaataaaatttacttacatttctttaaggtattttaattttttaatgtctctgtggagtatttgtatgataccataatgtatatttatgtagaatcaaattatataaacagtaccaatatcattatagaaaaaaataacattttaatgtatattgttctaacaatcatattgtgaatcattttgaagttcattatagcgatattgataaattgtggaattgtcttaatgtttttttattaactgacattattttaaacctaactgagatgatcagttacattcatcagttggtgagttttgaagaataactacattttatttcaaactaacaaatgtatacggttttagttcagtgttgaagaattttaatacaatattaaattacttgaactgaacagttccttgtatatattttgcctattcactgttgatatgtatgtagcaaaatgagagttaaataacactaaaatatggtaccaggaggcaattgtataggagcaaagttaataggagctttgctgaaacagaagcatatgtgtaaataagcttgggcttccagttataaattttgtaatttttgtcattatttatatcctataaaaaaagcacacaaaaataaaacagaagttgtacagca

SEQ ID NO: 80492 - DNA, 1353 bp, Artificial Sequence
  derived and/or modified sequence
atgatgtggcagtgtcatctgagtgcacaggattatcgctactaccctgtggatggctactcccttttaaagcgtttcccgctgcacccactgaccggcccacgatgtcccgttcagactgtgggacaatggcttgaatctatcggactgccccagtacgaaaaccacctcatggccaacggattcgacaacgtgcagtttatggggtctaacgtcatggaggaccaggatctgctggaaatcggaatcctgaattctggacacaggcagagaattcttcaggccatccagttactaccaaaaatgcggccaattgggcatgacggctaccaccctacctctgtcgccgagtggctagactccatagagctgggagactacacaaaagcattcctgatcaacggatacacatcaatggacctgttaaagaagatttgggaagtggagctgattaacgtgctgaaaataaacctgattggccaccgaaaaaggatcctggccagcttgggagatcgcctgcatgacgacccccctcagaagccccctcggtctatcacacttcgttcaagcgtgtgcgagatctggacaaatcagaacgctggcttcccgttctccgccattcaccaggtccataacacaggtgattggggagaaccctctatcacactgcgccctcccaacgaggctacagcctccactcctgtccagtattggcagcaccatcccgaaaagctcatttttcagtcatgcgactacaaggctttttacctgggcagtatgcttatcaaggaattacggggtactgaaagcacacaagacgcctgtgctaagatgagagcaaatatacagaagtctacagagcaaatgaaaaaggtcccaactataatactgtccgtctcatataaaggggtaaaattcattgacgccactaataagaacatcatagccgagcacgagatccgcaatatcagctgtgccgctcaagaccctgaggacctttccaccttcgcgtacataacgaaagatctgaaatcgaaccaccactattgccatgtgttcaccgcattcgacgtaaatctggcgtacgagatcattctaaccctggggcaggcctttgaagtggcctaccagcttgccctacaggcaagaaagggcggtcactccagtacattgcccgaaagctttgagaataaaccaagtaaacctatccctaaacctagggtgtctattcggaaaagtgtccaaattgacccaagtgaacagaagacattggctaatttgccctggattgttgaacccggacaggaggcgaaacgtgggatcaacacaaaatatgagacaactatcttctag

SEQ ID NO: 80493 - DNA, 1353 bp, Artificial Sequence
  derived and/or modified sequence
atgatgtggcagtgtcacctaagcgcccaggattatcggtactacccagtagatggatacagtctcctcaagcggttcccgttgcacccattaactgggccaagatgtccagtccagactgtgggacagtggctagagagcatagggttgccacagtacgagaaccacttgatggctaacggcttcgacaacgtgcagtttatgggatcgaatgtgatggaggatcaggacctattagaaatcggtatactcaatagtggtcatagacagcggatactccaggccatacagcttcttcccaagatgcgccctattggccatgacggatatcaccctacctccgtggccgagtggcttgactcaattgagttgggcgactatactaaagctttcctcatcaatgggtacactagtatggacctcctgaagaagatatgggaagtggagctgattaacgttctgaagatcaatctcatcggccatagaaagcgtattcttgcctctctgggagatagactccacgatgaccctccccagaagccacctaggagtatcacattgcggtcttccgtgtgcgagatttggactaaccaaaacgctggtttccctttttctgctatccaccaagtgcataataccggcgattggggagaaccctctatcaccctgagaccaccgaatgaagccacagcttcaactcccgtgcaatactggcagcatcatcccgaaaaactcatttttcagagctgcgattacaaggccttttatctaggatccatgttaatcaaggaactgcgcggaaccgaatctacacaggatgcttgtgctaagatgagggctaactgtcagaagagtaccgagcagatgaagaaggtgccgaccataatactgtcagtcagttacaaaggagtgaagttcatcgatgccaccaataagaacattatagcagagcacgaaattcggaatatttcatgtgcagctcaggatccagaggacctcagcacatttgcctacatcacaaaggacctcaaatcaaatcatcattactgtcatgtctttactgcattcgatgtgaatcttgcctacgagatcattctaactctgggacaggctttcgaggtcgcctatcagttggccctccaggctcgtaaagggggtcattctagcactctgcctgaaagcttcgagaataaacccagcaagcccatcccgaagcctcgcgtgtcaattaggaagagcgtgcagattgatccatctgaacagaaaaccctggctaacctgccctggatcgtcgaacctggtcaggaggctaaaaggggaattaacactaagtacgagacaaccatcttctag

SEQ ID NO: 80494 - DNA, 1353 bp, Artificial Sequence
  derived and/or modified sequence
atgatgtggcagtgccacctgagcgcccaggactacagatactaccccgtggacggctacagcctgctgaagagattccccctgcaccccctgaccggccccagatgccccgtgcagaccgtgggccagtggctggagagcatcggcctgccccagtacgagaaccacctgatggccaacggcttcgacaacgtgcagttcatgggcagcaacgtgatggaggaccaggacctgctggagatcggcatcctgaacagcggccacagacagagaatcctgcaggccatccagctgctgcccaagatgagacccatcggccacgacggctaccaccccaccagcgtggccgagtggctggacagcatcgagctgggcgactacaccaaggccttcctgatcaacggctacaccagcatggacctgctgaagaagatctgggaggtggagctgatcaacgtgctgaagatcaacctgatcggccacagaaagagaatcctggccagcctgggcgacagactgcacgacgaccccccccagaagccccccagaagcatcaccctgagaagcagcgtgtgcgagatctggaccaaccagaacgccggcttccccttcagcgccatccaccaggtgcacaacaccggcgactggggcgagcccagcatcaccctgagaccccccaacgaggccaccgccagcacccccgtgcagtactggcagcaccaccccgagaagctgatcttccagagctgcgactacaaggccttctacctgggcagcatgctgatcaaggagctgagaggcaccgagagcacccaggacgcctgcgccaagatgagagccaacatccagaagagcaccgagcagatgaagaaggtgcccaccatcatcctgagcgtgagctacaagggcgtgaagttcatcgacgccaccaacaagaacatcatcgccgagcacgagatcagaaacatcagctgcgccgcccaggaccccgaggacctgagcaccttcgcctacatcaccaaggacctgaagagcaaccaccactactgccacgtgttcaccgccttcgacgtgaacctggcctacgagatcatcctgaccctgggccaggccttcgaggtggcctaccagctggccctgcaggccagaaagggcggccacagcagcaccctgcccgagagcttcgagaacaagcccagcaagcccatccccaagcccagagtgagcatcagaaagagcgtgcagatcgaccccagcgagcagaagaccctggccaacctgccctggatcgtggagcccggccaggaggccaagagaggcatcaacaccaagtacgagaccaccatcttctag

SEQ ID NO: 80495 - DNA, 1353 bp, Artificial Sequence
  derived and/or modified sequence
atgatgtggcagtgccacctgagcgcccaggactacagatactaccccgtggacggctacagcctgctgaagagattccccctgcaccccctgaccggccccagatgccccgtgcagaccgtgggccagtggctggagagcatcggcctgccccagtacgagaaccacctgatggccaacggcttcgacaacgtgcagttcatgggcagcaacgtgatggaggaccaggacctgctggagatcggcatcctgaacagcggccacagacagagaatcctgcaggccatccagctgctgcccaagatgagacccatcggccacgacggctaccaccccaccagcgtggccgagtggctggacagcatcgagctgggcgactacaccaaggccttcctgatcaacggctacaccagcatggacctgctgaagaagatctgggaggtggagctgatcaacgtgctgaagatcaacctgatcggccacagaaagagaatcctggccagcctgggcgacagactgcacgacgaccccccccagaagccccccagaagcatcaccctgagaagcagcgtgtgcgagatctggaccaaccagaacgccggcttccccttcagcgccatccaccaggtgcacaacaccggcgactggggcgagcccagcatcaccctgagaccccccaacgaggccaccgccagcacccccgtgcagtactggcagcaccaccccgagaagctgatcttccagagctgcgactacaaggccttctacctgggcagcatgctgatcaaggagctgagaggcaccgagagcacccaggacgcctgcgccaagatgagagccaactgccagaagagcaccgagcagatgaagaaggtgcccaccatcatcctgagcgtgagctacaagggcgtgaagttcatcgacgccaccaacaagaacatcatcgccgagcacgagatcagaaacatcagctgcgccgcccaggaccccgaggacctgagcaccttcgcctacatcaccaaggacctgaagagcaaccaccactactgccacgtgttcaccgccttcgacgtgaacctggcctacgagatcatcctgaccctgggccaggccttcgaggtggcctaccagctggccctgcaggccagaaagggcggccacagcagcaccctgcccgagagcttcgagaacaagcccagcaagcccatccccaagcccagagtgagcatcagaaagagcgtgcagatcgaccccagcgagcagaagaccctggccaacctgccctggatcgtggagcccggccaggaggccaagagaggcatcaacaccaagtacgagaccaccatcttctag

SEQ ID NO: 80496 - protein, 426 aa, Artificial Sequence
  derived and/or modified sequence
MMWQCHLSAQDYRYYPVDGYSLLKRFPLHPLTGPRCPVQTVGQWLESIGLPQYENHLMANGFDNVQFMGSNVMEDQDLLEIGILNSGHRQRILQAIQLLPKMRPIGHDGYHPTSVAEWLDSIELGDYTKAFLINGYTSMDLLKKIWEVELINVLKINLIGHRKRILASLGDRLHDDPPQKPPRSITLRTGDWGEPSITLRPPNEATASTPVQYWQHHPEKLIFQSCDYKAFYLGSMLIKELRGTESTQDACAKMRANCQKSTEQMKKVPTIILSVSYKGVKFIDATNKNIIAEHEIRNISCAAQDPEDLSTFAYITKDLKSNHHYCHVFTAFDVNLAYEIILTLGQAFEVAYQLALQARKGGHSSTLPESFENKPSKPIPKPRVSIRKSVQIDPSEQKTLANLPWIVEPGQEAKRGINTKYETTIF

SEQ ID NO: 80497 - DNA, 1281 bp, Artificial Sequence
  derived and/or modified sequence
atgatgtggcagtgtcacttgtcggcccaagactatagatattacccagttgacggatatagcctgttgaaaagatttccgctccaccctcttacaggccctaggtgcccggtgcagaccgtcggtcagtggctagagagcattggactgcctcaatacgaaaaccatctgatggccaatggtttcgacaatgtccagtttatgggctccaatgtgatggaagaccaggatttactggaaataggaatcctcaactccggacatcgtcaacgtatactacaagcaatacagctcctgccaaagatgcggcctataggtcacgatgggtatcatccgacatccgtggctgaatggctagactcaatagagctcggcgattatacgaaggcctttctgatcaatggctacaccagcatggatctgttaaaaaaaatatgggaagtcgagttgattaatgtgctcaagattaatctaatcggtcaccggaaaaggatactggcaagtttgggggataggttacatgacgacccaccacagaagcctccccggtccattacactacgtacaggagactggggcgagccatccatcacactcagaccccccaatgaagcaaccgcaagcacgcccgtgcagtactggcaacatcatcctgagaaactcatattccagagctgtgactacaaagcattctaccttgggagcatgctgatcaaagaactccggggcaccgagtctacccaagatgcatgcgcaaaaatgcgggccaactgtcaaaaaagtaccgaacagatgaaaaaggtgccaactattatcctgtctgtcagctacaagggggtcaagttcatagacgctacaaacaagaacatcatcgcagaacatgaaatccgcaatatctcgtgcgctgcgcaagaccccgaagatctgtctacgttcgcatacataacaaaggatctcaaatctaatcaccactattgccatgtctttaccgccttcgatgtgaatctcgcatacgagatcattctgacccttggacaagcctttgaggtagcttaccaactggccctccaggcccggaagggagggcattccagcacactcccagaatcttttgaaaacaagccgagtaaacccattcctaagcctcgtgtttctatacgcaagagcgtccaaattgacccctctgaacagaagacacttgctaacctgccgtggatcgtagagccagggcaagaagccaagagggggatcaataccaagtatgagactaccattttttag

SEQ ID NO: 80498 - DNA, 1281 bp, Artificial Sequence
  derived and/or modified sequence
atgatgtggcagtgccacctgagcgcccaggactaccgctactaccctgtggatggctacagcctgctgaagcgcttccccctgcaccccctgaccggcccccgctgccctgtgcagacagtgggccagtggctggagagcatcggcctgccccagtatgagaaccacctgatggccaacggctttgacaacgtgcagttcatgggcagcaatgtgatggaggaccaggacctgctggagatcggcatcctgaacagcggccaccggcagaggatcctgcaggccatccagctgctgcccaagatgaggcccatcggccatgatggctaccaccccacctctgtggccgagtggctggacagcattgagctgggggactacaccaaggccttcctgatcaatggctacacctccatggacctgctgaagaagatctgggaggtggagctgatcaacgtgctgaagatcaacctgattggccacaggaagaggatcctggccagcctgggggaccggctgcatgatgatcctccccagaagcccccaagaagcatcaccctgaggactggagactggggcgagcccagcatcaccctgcggcccccaaatgaggccacagccagcacccctgtgcagtactggcagcaccaccctgagaagctgatcttccagagctgtgactacaaggccttctacctgggctccatgctgatcaaggagctgcggggcacagagagcacccaggatgcctgtgccaagatgagggccaactgccagaagagcacagagcagatgaagaaggtgcccaccatcatcctgtctgtgtcctacaagggcgtgaagttcattgatgccaccaacaagaacatcatcgccgagcacgagatccggaacatcagctgtgccgcccaggaccctgaggacctgagcacctttgcctacatcaccaaggacctgaagagcaaccaccactactgccacgtgttcaccgcctttgatgtgaacctggcctatgagatcatcctgaccctgggccaggcctttgaggtggcctaccagctggccctgcaggccaggaagggcggccacagcagcaccctgcctgagagctttgagaacaagcccagcaagcccatccccaagccccgggtgtccatcaggaagtctgtgcagattgaccccagcgagcagaagaccctggccaacctgccctggatcgtggagcccggccaggaggccaagaggggcatcaacaccaagtatgagaccaccatcttctag

SEQ ID NO: 80499 - DNA, 1281 bp, Artificial Sequence
  derived and/or modified sequence
atgatgtggcagtgccacctgagcgcccaggactaccggtactaccccgtcgatggatactcccttctgaagaggtttccgcttcatccacttactgggccaagatgcccagtgcagaccgtgggacagtggttggagtcaatcggtctgcctcagtacgaaaatcatctgatggctaacgggtttgacaatgtgcagttcatgggtagtaatgtcatggaagatcaggatctgcttgaaatagggatcctgaactccggtcaccgccagcgcattttacaggccatacaactccttcccaagatgcgacccatagggcacgacggataccatccgacaagcgttgctgaatggttggatagcatcgagttgggggattacacgaaagcgtttttaattaatggttacacttcaatggatttgctcaagaagatctgggaggtcgagcttatcaacgtcttaaaaatcaatctgatcggccatagaaagagaatcctagcttcccttggagataggctgcacgacgatccccctcagaagccaccgagatccataacacttcggacgggtgattggggagaaccttctattacacttcgtcctcccaacgaagctacagcctcaactcccgtacagtactggcaacatcaccccgaaaaactaatctttcagtcctgcgactataaagcgttctacctgggatcaatgcttatcaaagagctgagagggaccgagtccacccaggacgcgtgcgcaaaaatgagagctaactgccaaaaatcgacagaacagatgaagaaggtgcctaccataatcctgagtgtgtcatataagggtgtcaagttcattgacgccactaacaaaaatattattgcggagcacgagatccgcaatatttcctgcgcagctcaggatccggaagatctttcaacctttgcttacattaccaaggacctgaaaagcaaccaccactattgccatgtgtttactgcattcgacgtcaatttggcctacgaaattattctgactctgggccaagccttcgaggtagcctaccagctggctctgcaggctagaaagggaggacattcatccacgctcccggaatccttcgagaacaagcctagtaagcccatacctaagcctcgggtgagcattagaaagagtgtccagatcgacccgtcagagcagaaaacattggcgaacctgccgtggatagtggaacccggacaggaggcaaaacgcggcatcaacacgaagtatgagactaccattttttag

SEQ ID NO: 80500 - DNA, 1281 bp, Artificial Sequence
  derived and/or modified sequence
atgatgtggcaatgccacctctcagcccaggactaccgctattaccccgtggacggctactccctgcttaaacgcttccctcttcatcctcttacaggacccagatgccctgtccaaacagtgggacaatggttggaaagcattgggctacctcagtacgagaaccacctgatggctaatggatttgacaatgtgcagtttatgggaagcaatgttatggaagatcaggatttgttggaaattggaatccttaattctgggcacagacaaagaattctacaggcaatccagctccttccaaagatgagacccattgggcatgatggctaccatcccacctctgtagctgagtggctggattccattgaactgggcgactacaccaaagcctttctaattaatggctacacttcgatggacctgttgaaaaaaatctgggaggttgaacttattaatgttttaaaaatcaatttgattggccacaggaaacgtattttggcatctctgggagacaggctgcacgacgatcccccacagaagccccctcggtccatcaccctcaggacaggagactggggagaaccttccattaccttgcgacctccgaatgaagccacagcctctaccccggtacagtactggcagcatcacccagaaaagcttatcttccagtcgtgtgattacaaagctttttatttaggttctatgctgataaaagagcttagggggacagaatcaacccaagatgcttgtgcaaaaatgcgggctaactgtcagaagtctacagagcaaatgaagaaggtccctactattattctttctgtctcatataaaggagtcaaatttattgatgcaacaaataagaacataattgctgagcatgaaattcgtaatatctcctgtgctgcccaggacccagaagacctctcaacatttgcctatatcacaaaagatttgaagtctaatcaccactactgtcatgtgtttactgcctttgatgtgaatttagcctatgaaatcatcctaaccctgggacaggcattcgaagtcgcttaccagctagcactacaagcaagaaaagggggacactcctccacacttccagaaagctttgaaaacaaaccctccaaacccatccccaagccccgcgttagcattcgcaagtccgtgcagatcgacccatctgagcaaaagactctggccaatctaccgtggattgtggagccgggccaagaagccaagaggggcattaataccaagtatgaaaccacgattttctga

SEQ ID NO: 80501 - DNA, 1281 bp, Artificial Sequence
  derived and/or modified sequence
atgatgtggcagtgccacctgtctgcacaggattataggtattatcccgtggatggatatagcctcctaaaacgttttcctctgcacccgctgacagggccacgttgtccagtacagaccgtagggcaatggttagagtcgattgggttaccccagtatgagaaccatctgatggccaatgggttcgacaatgtgcagttcatgggctcgaacgtgatggaggaccaggatcttcttgagataggcattttgaattccggccataggcaacgcatactgcaggccatccagttactacccaaaatgaggcctatagggcatgatggataccatcctacctccgttgcggagtggttagacagcattgaactgggagactacacaaaggcctttctgatcaacggttacacctccatggatcttctgaaaaagatctgggaagtggagctgatcaacgtcctgaagatcaacctaatcggtcatcgtaaaaggatcctcgcgagtttgggcgatcgccttcacgacgatccaccacagaagcctccaaggtcgataacccttagaacaggcgattggggcgaaccatctataaccctgcgtcccccaaacgaggcaaccgcatccacacccgtccagtattggcaacaccaccctgagaagcttattttccagtcttgcgactataaggccttttacctggggtctatgctgattaaggaactgaggggcacggagagtacccaggacgcttgcgctaagatgagagccaactgtcagaaatcaacagagcagatgaaaaaggtgcctactataattctgagtgtgtcttataaaggcgtaaaattcatcgatgccacaaacaaaaacattatagccgagcatgagataagaaacatctcttgtgccgcacaggaccccgaggacctcagcacctttgcttacatcaccaaggacctgaaatcgaaccatcactattgccacgtattcaccgcattcgatgtgaatttggcatacgagatcattctcacacttggacaggcatttgaggtcgcctatcaacttgctctgcaggctcgtaagggagggcattcttccacactgcccgagagtttcgagaacaaacctagcaagcctattccgaagcctagagtgagcattcgaaaatctgtgcagattgaccccagcgaacagaaaacactcgccaatctaccttggatcgtcgaaccaggtcaagaggctaaacgtggcatcaacacgaaatacgaaaccacaatcttctag

SEQ ID NO: 80502 - DNA, 1281 bp, Artificial Sequence
  derived and/or modified sequence
atgatgtggcagtgccacctgagcgcccaggactacagatactaccccgtggacggctacagcctgctgaagagattccccctgcaccccctgaccggccccagatgccccgtgcagaccgtgggccagtggctggagagcatcggcctgccccagtacgagaaccacctgatggccaacggcttcgacaacgtgcagttcatgggcagcaacgtgatggaggaccaggacctgctggagatcggcatcctgaacagcggccacagacagagaatcctgcaggccatccagctgctgcccaagatgagacccatcggccacgacggctaccaccccaccagcgtggccgagtggctggacagcatcgagctgggcgactacaccaaggccttcctgatcaacggctacaccagcatggacctgctgaagaagatctgggaggtggagctgatcaacgtgctgaagatcaacctgatcggccacagaaagagaatcctggccagcctgggcgacagactgcacgacgaccccccccagaagccccccagaagcatcaccctgagaaccggcgactggggcgagcccagcatcaccctgagaccccccaacgaggccaccgccagcacccccgtgcagtactggcagcaccaccccgagaagctgatcttccagagctgcgactacaaggccttctacctgggcagcatgctgatcaaggagctgagaggcaccgagagcacccaggacgcctgcgccaagatgagagccaactgccagaagagcaccgagcagatgaagaaggtgcccaccatcatcctgagcgtgagctacaagggcgtgaagttcatcgacgccaccaacaagaacatcatcgccgagcacgagatcagaaacatcagctgcgccgcccaggaccccgaggacctgagcaccttcgcctacatcaccaaggacctgaagagcaaccaccactactgccacgtgttcaccgccttcgacgtgaacctggcctacgagatcatcctgaccctgggccaggccttcgaggtggcctaccagctggccctgcaggccagaaagggcggccacagcagcaccctgcccgagagcttcgagaacaagcccagcaagcccatccccaagcccagagtgagcatcagaaagagcgtgcagatcgaccccagcgagcagaagaccctggccaacctgccctggatcgtggagcccggccaggaggccaagagaggcatcaacaccaagtacgagaccaccatcttctag

SEQ ID NO: 80503 - protein, 730 aa, Artificial Sequence
  derived and/or modified sequence
MPGVARLPLLLGLLLLPRPGRPLDLADYTYDLAEEDDSEPLNYKDPCKAAAFLGDIALDEEDLRAFQVQQAVDLRRHTARKSSIKAAVPGNTSTPSCQSTNGQPQRGACGRWRGRSRSRRAATSRPERVWPDGVIPFVIGGNFTGSQRAVFRQAMRHWEKHTCVTFLERTDEDSYIVFTYRPCGCCSYVGRRGGGPQAISIGKNCDKFGIVVHELGHVVGFWHEHTRPDRDRHVSIVRENIQPGQEYNFLKMEPQEVESLGETYDFDSIMHYARNTFSRGIFLDTIVPKYEVNGVKPPIGQRTRLSKGDIAQARKLYKCPACGETLQDSTGNFSSPEYPNGYSAHMHCVWRISVTPGEKIILNFTSLDLYRSRLCWYDYVEVRDGFWRKAPLRGRFCGSKLPEPIVSTDSRLWVEFRSSSNWVGKGFFAVYEAICGGDVKKDYGHIQSPNYPDDYRPSKVCIWRIQVSEGFHVGLTFQSFEIERHDSCAYDYLEVRDGHSESSTLIGRYCGYEKPDDIKSTSSRLWLKFVSDGSINKAGFAVNFFKEVDECSRPNRGGCEQRCLNTLGSYKCSCDPGYELAPDKRRCEAACGGFLTKLNGSITSPGWPKEYPPNKNCIWQLVAPTQYRISLQFDFFETEGNDVCKYDFVEVRSGLTADSKLHGKFCGSEKPEVITSQYNNMRVEFKSDNTVSKKGFKAHFFSEKRPALQPPRGRPHQLKFRVQKRNRTPQ

SEQ ID NO: 80504 - protein, 311 aa, Artificial Sequence
  derived and/or modified sequence
MSLLMISENVKLAREYALLGNYDSAMVYYQGVLDQMNKYLYSVKDTYLQQKWQQVWQEINVEAKHVKDIMKTLESFKLDSTPLKAAQHDLPASEGEVWSMPVPVERRPSPGPRKRQSSQYSDPKSHGNRPSTTVRVHRSSAQNVHNDRGKAVRCREKKEQNKGREEKGVLMVGPPGTGKTLLAKAVATECKTTFFNVSSSTLTSKYRGESEKLVRLLFEMARFYSPATIFIDEIDSICSRRGTSEEHEASRRVKAELLVQMDGVGGTSENDDPSKMVMVLAATNFPWDIDEALRRRLEKRIYIPLPSGMRP

SEQ ID NO: 80505 - DNA, 936 bp, Artificial Sequence
  derived and/or modified sequence
atgagtttgttgatgatcagcgaaaatgttaaactggcccgggaatatgcgctgcttggcaattacgatagtgccatggtttactaccagggcgtgttagaccagatgaataagtacctttatagcgtgaaggatacctatcttcaacaaaaatggcagcaagtctggcaagaaatcaacgtcgaagccaagcacgtgaaagatattatgaagacgttggaatctttcaagttagattctacccctctcaaagccgctcagcatgacctgcccgcatccgagggagaagtgtggtccatgccagtgcccgttgaaagacggcccagcccaggtcctcgcaagagacaatcatcccagtatagtgatccgaaaagccacggcaatcggccttccacaacggtccgggtacataggtcttcagctcaaaatgtacacaacgaccgcggcaaggccgttcgctgtagagagaagaaggaacagaataagggtcgagaggaaaagggcgtgctcatggtgggcccacctgggactggtaaaactttgttggcgaaagctgttgcaaccgagtgtaagacaacttttttcaatgtcagctcctcaacattgacgagcaagtaccgtggggaaagcgagaagctggtgaggctgctgttcgagatggcccgcttttacagcccagccactatatttattgatgagattgactccatatgcagtaggaggggaacctccgaagaacacgaggccagcaggagagtgaaagccgagcttctggttcaaatggatggcgttggcggcacaagcgagaacgatgacccctccaagatggtaatggtgttggcggccacaaattttccctgggatatcgatgaggctctcaggcggcgacttgagaagaggatatatatccccctgccatcaggcatgcggccctag

SEQ ID NO: 80506 - DNA, 1564 bp, Artificial Sequence
  derived and/or modified sequence
gggcgacgccccgcgtgcgccagagtcgccgaggtcgtccccggcaccggaagtgaccctggcgggtttgtcttcaaattctcggcgagcaggagccgcgccggcaggtggtgttgacgattgaactgggcagtactggggccgtgagcggagagcaaagtgggctggactgggtcaggccctccttcctcgctgccgggatctccactccgccaatcccctgtgcctggcgttgggcggtttcccgaggagcttgggccgccgcagcttacagttgaacatgagtcttcttatgattagtgagaatgtaaaattggctcgtgaatatgcattgctgggaaactatgactctgcgatggtctattatcagggagttcttgaccaaatgaacaagtatctgtactcagtcaaagatacatacctccagcagaaatggcaacaggtttggcaggaaataaatgtggaagctaaacatgttaaagatatcatgaaaacactagagagctttaaactggacagcactcccttgaaagcggcacagcatgaccttccagcttctgagggagaagtctggtccatgcctgtacctgttgaacgaagaccctcaccaggacctagaaaacgccaatcttctcagtacagtgaccctaaatcacatggtaatcgtccaagtacaactgtcagagttcaccgttcatctgcacagaatgttcacaatgacagagggaaagctgttcgttgtcgtgaaaagaaagaacagaataaaggaagagaggaaaagggagtactgatggtcggcccacctggcacggggaagacgctccttgctaaagcagtagctacagaatgcaagacaacattcttcaatgtctcttcatcaactttgacttccaaatacagaggagaatctgagaagcttgttcgtcttctgtttgaaatggctcgattttattctccagccaccatatttattgatgagatagactccatctgtagtcgccgagggacttctgaagaacatgaagcaagcagaagggtgaaagcggagctgctggttcagatggatggtgttggaggtacttctgaaaatgatgacccttccaaaatggttatggttctggcagctactaattttccctgggatatagatgaggctttaagacgacgccttgagaaacgaatctatattcctttgccgtcagggatgcgtccttgatggcaatgagaaggcgcattgaaggtttgactccagaggaaatccgaaatctttccaaagaagaaatgcacatgcctacaactatggaggatttcgagatggctttaaaaaaggtttctaagtcagtgtctgctgcagacattgaaagatacgagaaatggatatttgagtttggatcatgctaaattctcacatgtaaactgtgagaaatgtgccttaagtgtttgaatattaaatgcagtaattcattgtactgagtgctatattttttttaactttcataatggtaagatttttttaaaaaaacccttatgattctgaataaaggcaatatttttaagctgaaaa

SEQ ID NO: 80507 - DNA, 936 bp, Artificial Sequence
  derived and/or modified sequence
atgagcctgctgatgatcagtgaaaatgtgaagctggcccgggagtatgccctgctgggcaactatgacagcgccatggtgtactaccagggcgtgctggaccagatgaacaagtacctgtacagcgtgaaggacacctacctgcagcagaagtggcagcaggtgtggcaggagatcaacgtggaggccaagcacgtgaaggacatcatgaagaccctggagagcttcaagctggacagcacccccctgaaggccgcccagcacgacctgcctgccagcgagggggaggtgtggagcatgcctgtgcctgtggagcggcggcccagccctggccccaggaagaggcagagcagccagtacagcgaccccaagagccacggcaaccggcccagcaccaccgtgcgggtgcacaggagcagcgcccagaatgtgcacaatgaccggggcaaggctgtgcgctgccgggagaagaaggagcagaacaagggccgggaggagaagggcgtgctgatggtgggccccccaggcaccgggaagaccctgctggccaaggctgtggccacagagtgcaagaccaccttcttcaacgtgagcagcagcaccctgaccagcaagtacagaggagagagcgagaagctggtgcggctgctgtttgagatggcccgcttctacagccctgccaccatcttcattgatgaaattgacagcatctgcagccggcggggcaccagcgaggagcacgaggccagcagaagagtgaaggccgagctgctggtgcagatggatggagtgggcggcaccagtgaaaatgatgaccccagcaagatggtgatggtgctggccgccaccaacttcccctgggacattgatgaggccctgcggcggcggctggagaagaggatctacatccccctgcccagcggcatgaggccctag

SEQ ID NO: 80508 - DNA, 936 bp, Artificial Sequence
  derived and/or modified sequence
atgagcctgctgatgatcagcgagaacgtgaagctggcccgggagtatgctctgctgggcaattacgattccgcaatggtatactatcagggagttctggatcaaatgaataagtacttatacagcgtgaaggacacctatctccagcagaaatggcagcaagtgtggcaggaaattaatgttgaggcaaagcacgtgaaggacatcatgaaaaccctagaaagctttaagcttgattctacccctttgaaggctgcacagcacgacctgccagcctccgagggagaggtctggagtatgcccgtacctgtggagcgccgcccaagccctggaccaaggaaaaggcaaagttcgcaatactccgatcccaaatcccacggaaatcggccctctaccaccgtccgagtccacaggtccagcgcgcaaaacgtacataatgacaggggaaaagccgttagatgccgcgaaaaaaaggaacagaacaagggacgcgaagagaaaggtgtcctcatggtgggcccacccgggacgggcaagacattactggccaaagctgtggcaaccgaatgcaagacgaccttttttaacgtgtcttcctcgactctaacgagcaagtatagaggtgagtccgagaaactagttcgccttctgtttgagatggcccgcttctattcgcccgccaccatttttatcgacgagatcgacagtatttgttctaggcgggggacaagtgaggagcatgaggctagtagacgcgtaaaggctgagttgctcgttcaaatggacggggtaggggggaccagtgagaacgacgatccctctaaaatggtgatggtgcttgcagctacgaatttcccttgggacatcgacgaagcgcttcgccgtcgtctggaaaaacgcatttatattcccctgcctagcggtatgaggccttag

SEQ ID NO: 80509 - DNA, 936 bp, Artificial Sequence
  derived and/or modified sequence
atgtccctccttatgattagtgaaaacgtgaagctagccagagaatacgctctgctcggtaactacgactcagccatggtgtactatcagggcgtgctggatcagatgaacaagtacctctatagcgtgaaggacacatatctccagcagaaatggcagcaggtgtggcaggagattaacgttgaagctaagcacgtgaaagatatcatgaaaactctggaatccttcaaactagacagcactccactcaaggcagcccagcatgacctgcccgcaagcgaaggagaggtctggagtatgccggtccctgttgagcggcgtccaagcccaggacctcggaaacggcagagttcccaatatagcgatccaaagtcccacggcaaccgaccaagtactactgttcgtgtacaccgatcttccgctcaaaatgtgcacaacgaccgcggaaaggcagtgaggtgtagagagaagaaggagcagaacaaaggtagagaggagaagggcgtcctgatggtcggccctccgggtactggtaaaacactcctggctaaagcggtggctactgagtgcaaaactacatttttcaacgtgtcttcttccactctgacctccaagtatagaggggaatctgagaaattggtgcgtcttctgttcgaaatggctcgattctacagtcccgcaacgatcttcatcgatgaaatcgactcaatttgctcacgccgtgggacatcagaggaacatgaagcaagcaggcgggttaaggccgaactcttggtgcagatggatggtgtaggtggcacatctgagaatgatgaccccagcaaaatggtgatggtgctggctgcaaccaactttccatgggacatcgatgaggccctacggcgacgactcgagaaaagaatttacatccctctccctagtggtatgcggccttag

SEQ ID NO: 80510 - DNA, 936 bp, Artificial Sequence
  derived and/or modified sequence
atgagcctgctgatgatcagcgagaacgtgaagctggccagagagtacgccctgctgggcaactacgacagcgccatggtgtactaccagggcgtgctggaccagatgaacaagtacctgtacagcgtgaaggacacctacctgcagcagaagtggcagcaggtgtggcaggagatcaacgtggaggccaagcacgtgaaggacatcatgaagaccctggagagcttcaagctggacagcacccccctgaaggccgcccagcacgacctgcccgccagcgagggcgaggtgtggagcatgcccgtgcccgtggagagaagacccagccccggccccagaaagagacagagcagccagtacagcgaccccaagagccacggcaacagacccagcaccaccgtgagagtgcacagaagcagcgcccagaacgtgcacaacgacagaggcaaggccgtgagatgcagagagaagaaggagcagaacaagggcagagaggagaagggcgtgctgatggtgggcccccccggcaccggcaagaccctgctggccaaggccgtggccaccgagtgcaagaccaccttcttcaacgtgagcagcagcaccctgaccagcaagtacagaggcgagagcgagaagctggtgagactgctgttcgagatggccagattctacagccccgccaccatcttcatcgacgagatcgacagcatctgcagcagaagaggcaccagcgaggagcacgaggccagcagaagagtgaaggccgagctgctggtgcagatggacggcgtgggcggcaccagcgagaacgacgaccccagcaagatggtgatggtgctggccgccaccaacttcccctgggacatcgacgaggccctgagaagaagactggagaagagaatctacatccccctgcccagcggcatgagaccctag

SEQ ID NO: 80511 - protein, 1066 aa, Artificial Sequence
  derived and/or modified sequence
MTDQENNNNISSNPFAALFGSLADAKQFAAIQKEQLKQQSDELPASPDDSDNSVSESLDEFDYSVAEISRSFRSQQEICEQLNINHMIQRIFLITLDNSDPSLKSGNGIPSRCVYLEEMAVELEDQDWLDMSNVEQALFARLLLQDPGNHLINMTSSTTLNLSADRDAGERHIFCYLYSCFQRAKEEITKVPENLLPFAVQCRNLTVSNTRTVLLTPEIYVDQNIHEQLVDLMLEAIQGAHFEDVTEFLEEVIEALILDEEVRTFPEVMIPVFDILLGRIKDLELCQILLYAYLDILLYFTRQKDMAKVFVEYIQPKDPTNGQMYQKTLLGVILSISCLLKTPGVVENHGYFLNPSRSSPQEIKVQEANIHQFMAQFHEKIYQMLKNLLQLSPETKHCILSWLGNCLHANAGRTKIWANQMPEIFFQMYASDAFFLNLGAALLKLCQPFCKPRSSRLLTFNPTYCALKELNDEERKIKNVHMRGLDKETCLIPAVQEPKFPQNYNLVTENLALTEYTLYLGFHRLHDQMVKINQNLHRLQVAWRDAQQSSSPAADNLREQFERLMTIYLSTKTAMTEPQMLQNCLNLQVSMAVLLVQLAIGNEGSQPIELTFPLPDGYSSLAYVPEFFADNLGDFLIFLRRFADDILETSADSLEHVLHFITIFTGSIERMKNPHLRAKLAEVLEAVMPHLDQTPNPLVSSVFHRKRVFCNFQYAPQLAEALIKVFVDIEFTGDPHQFEQKFNYRRPMYPILRYMWGTDTYRESIKDLADYASKNLEAMNPPLFLRFLNLLMNDAIFLLDEAIQYLSKIKIQQIEKDRGEWDSLTPEARREKEAGLQMFGQLARFHNIMSNETIGTLAFLTSEIKSLFVHPFLAERIISMLNYFLQHLVGPKMGALKVKDFSEFDFKPQQLVSDICTIYLNLGDEENFCATVPKDGRSYSPTLFAQTVRVLKKINKPGNMIMAFSNLAERIKSLADLQQQEEETYADACDEFLDPIMSTLMCDPVVLPSSRVTVDRSTIARHLLSDQTDPFNRSPLTMDQIRPNTELKEKIQRWLAERKQQKEQLE

SEQ ID NO: 80512 - DNA, 3201 bp, Artificial Sequence
  derived and/or modified sequence
atgaccgaccaggagaacaacaacaacatcagcagcaaccccttcgccgccctgttcggcagcctggccgacgccaagcagttcgccgccatccagaaggagcagctgaagcagcagagcgacgagctgcccgccagccccgacgacagcgacaacagcgtgagcgagagcctggacgagttcgactacagcgtggccgagatcagcagaagcttcagaagccagcaggagatctgcgagcagctgaacatcaaccacatgatccagagaatcttcctgatcaccctggacaacagcgaccccagcctgaagagcggcaacggcatccccagcagatgcgtgtacctggaggagatggccgtggagctggaggaccaggactggctggacatgagcaacgtggagcaggccctgttcgccagactgctgctgcaggaccccggcaaccacctgatcaacatgaccagcagcaccaccctgaacctgagcgccgacagagacgccggcgagagacacatcttctgctacctgtacagctgcttccagagagccaaggaggagatcaccaaggtgcccgagaacctgctgcccttcgccgtgcagtgcagaaacctgaccgtgagcaacaccagaaccgtgctgctgacccccgagatctacgtggaccagaacatccacgagcagctggtggacctgatgctggaggccatccagggcgcccacttcgaggacgtgaccgagttcctggaggaggtgatcgaggccctgatcctggacgaggaggtgagaaccttccccgaggtgatgatccccgtgttcgacatcctgctgggcagaatcaaggacctggagctgtgccagatcctgctgtacgcctacctggacatcctgctgtacttcaccagacagaaggacatggccaaggtgttcgtggagtacatccagcccaaggaccccaccaacggccagatgtaccagaagaccctgctgggcgtgatcctgagcatcagctgcctgctgaagacccccggcgtggtggagaaccacggctacttcctgaaccccagcagaagcagcccccaggagatcaaggtgcaggaggccaacatccaccagttcatggcccagttccacgagaagatctaccagatgctgaagaacctgctgcagctgagccccgagaccaagcactgcatcctgagctggctgggcaactgcctgcacgccaacgccggcagaaccaagatctgggccaaccagatgcccgagatcttcttccagatgtacgccagcgacgccttcttcctgaacctgggcgccgccctgctgaagctgtgccagcccttctgcaagcccagaagcagcagactgctgaccttcaaccccacctactgcgccctgaaggagctgaacgacgaggagagaaagatcaagaacgtgcacatgagaggcctggacaaggagacctgcctgatccccgccgtgcaggagcccaagttcccccagaactacaacctggtgaccgagaacctggccctgaccgagtacaccctgtacctgggcttccacagactgcacgaccagatggtgaagatcaaccagaacctgcacagactgcaggtggcctggagagacgcccagcagagcagcagccccgccgccgacaacctgagagagcagttcgagagactgatgaccatctacctgagcaccaagaccgccatgaccgagccccagatgctgcagaactgcctgaacctgcaggtgagcatggccgtgctgctggtgcagctggccatcggcaacgagggcagccagcccatcgagctgaccttccccctgcccgacggctacagcagcctggcctacgtgcccgagttcttcgccgacaacctgggcgacttcctgatcttcctgagaagattcgccgacgacatcctggagaccagcgccgacagcctggagcacgtgctgcacttcatcaccatcttcaccggcagcatcgagagaatgaagaacccccacctgagagccaagctggccgaggtgctggaggccgtgatgccccacctggaccagacccccaaccccctggtgagcagcgtgttccacagaaagagagtgttctgcaacttccagtacgccccccagctggccgaggccctgatcaaggtgttcgtggacatcgagttcaccggcgacccccaccagttcgagcagaagttcaactacagaagacccatgtaccccatcctgagatacatgtggggcaccgacacctacagagagagcatcaaggacctggccgactacgccagcaagaacctggaggccatgaacccccccctgttcctgagattcctgaacctgctgatgaacgacgccatcttcctgctggacgaggccatccagtacctgagcaagatcaagatccagcagatcgagaaggacagaggcgagtgggacagcctgacccccgaggccagaagagagaaggaggccggcctgcagatgttcggccagctggccagattccacaacatcatgagcaacgagaccatcggcaccctggccttcctgaccagcgagatcaagagcctgttcgtgcaccccttcctggccgagagaatcatcagcatgctgaactacttcctgcagcacctggtgggccccaagatgggcgccctgaaggtgaaggacttcagcgagttcgacttcaagccccagcagctggtgagcgacatctgcaccatctacctgaacctgggcgacgaggagaacttctgcgccaccgtgcccaaggacggcagaagctacagccccaccctgttcgcccagaccgtgagagtgctgaagaagatcaacaagcccggcaacatgatcatggccttcagcaacctggccgagagaatcaagagcctggccgacctgcagcagcaggaggaggagacctacgccgacgcctgcgacgagttcctggaccccatcatgagcaccctgatgtgcgaccccgtggtgctgcccagcagcagagtgaccgtggacagaagcaccatcgccagacacctgctgagcgaccagaccgaccccttcaacagaagccccctgaccatggaccagatcagacccaacaccgagctgaaggagaagatccagagatggctggccgagagaaagcagcagaaggagcagctggagtag

SEQ ID NO: 80513 - DNA, 3201 bp, Artificial Sequence
  derived and/or modified sequence
atgacagatcaagagaataataacaacatttcatctaacccgtttgcagcactttttggtagcctggctgacgcaaaacagtttgctgccattcaaaaggagcagttaaaacaacagtccgacgaacttcctgcaagcccggatgactcggacaatagtgtcagcgagagtctagacgagttcgactatagtgtggccgaaatcagtcggtctttccggtcgcagcaggaaatttgtgagcagctcaatatcaaccacatgatccagagaatttttctcattacgcttgataacagtgatccctcgctgaaatctggcaacggaatccctagcaggtgcgtgtacctagaagagatggcagtagagttggaagatcaggactggctggatatgtcgaacgtggaacaagccctcttcgctagactgctgttgcaagaccccggtaaccaccttatcaacatgacctcttctaccactctaaatctgagcgccgacagagacgctggggagcggcatattttctgttacctctatagctgcttccaacgggccaaagaggaaattactaaggtacccgaaaaccttctacccttcgccgtacaatgtcggaacctcaccgtgtcgaacaccagaaccgtccttctcacgcctgagatatacgtggatcagaacatccatgagcagctggtggacctaatgctcgaggcaatccaaggcgcccactttgaggatgtgaccgaatttctggaggaggtgattgaagccctgatcctggacgaggaggtccggacatttcctgaggtaatgatccccgtatttgacattctgctcgggcggatcaaggacctcgagctttgccagatcttgctttatgcatacctagatattctgctttattttacaagacaaaaggatatggccaaagtgttcgttgagtacatacagcccaaagaccccacaaatggccagatgtatcagaaaacccttctcggcgttatcttgtccatctcctgccttcttaaaacccctggagttgtagaaaaccacggatatttcctgaacccctccaggagctccccacaggaaattaaggtgcaggaggctaacatccaccagtttatggcccaatttcacgaaaagatttaccagatgttgaagaaccttctgcagctaagtcctgagaccaagcattgcatcctgtcctggctgggcaactgtctgcatgccaacgcaggacgcaccaagatttgggcaaatcagatgcccgaaatcttttttcagatgtacgcttcggacgctttctttctgaacctgggcgcagcactgctgaaactgtgtcaaccattttgcaaacctcggtcgtccaggctgctcacgtttaaccccacctactgcgcattaaaagagctgaacgatgaggaacggaagatcaaaaatgtgcatatgagaggacttgataaagaaacctgtctgatcccagcagtgcaggaaccaaagtttccacaaaattacaacctggttaccgagaacttagctttgaccgaatatactctgtatttggggtttcataggttgcatgaccagatggtcaagatcaatcagaacctgcatcggctccaggtcgcctggcgtgatgctcaacagtcaagtagccccgcagccgacaacctgagggaacagttcgagaggctcatgactatttacctcagcaccaaaacagcaatgaccgaaccacagatgctgcagaattgtttaaatcttcaagtgtccatggccgtcctgctggttcaactagcgatagggaatgagggtagccagcccatcgagctgaccttccccctgcccgacggttatagttcactcgcctatgttccggagttcttcgcagacaatctcggcgacttcctgatcttcctgaggcgattcgccgacgatattctcgagacatccgccgattctctcgaacacgtgctgcacttcatcactatattcaccggtagcattgaaagaatgaagaacccccatctgcgggcaaagctggctgaggtgctcgaggcggttatgccacacctggatcaaaccccgaatccgctggttagtagtgtgttccatcggaagcgggtgttctgcaactttcagtacgccccacagctggcagaggccctcattaaagtgttcgtagacattgaattcactggggatccacaccagttcgaacagaagtttaattacagaaggcccatgtaccccattctgcgctacatgtggggaacagacacctacagagagtcaattaaggacttagcagattatgcctctaagaatctggaggccatgaaccccccactgttcttgcgctttctcaatctgctgatgaatgacgccatatttttgctggacgaagcaatacagtatctgtccaaaatcaaaatccagcagatcgaaaaagaccggggagaatgggactctttgacgccagaggccagaagggagaaggaggccggtctccagatgtttggccaactggctcgttttcataacatcatgtctaacgaaacgataggaaccctcgccttcctcacctccgaaattaagtcactgttcgtccacccattcctcgcagagcgcataatttccatgctgaactatttcctccagcatcttgtcggaccaaagatgggggccctgaaggtcaaggattttagcgagttcgatttcaaacctcagcagttggtgtccgacatttgcaccatctacttaaacctgggagacgaagagaatttctgtgccaccgtcccgaaagatggccgatcatatagtcccaccttgtttgctcaaactgtgcgagtcctgaaaaagatcaataagccaggcaacatgattatggctttttctaacctggctgagaggataaaaagtcttgctgatctgcaacaacaagaagaggagacatacgctgatgcatgtgacgaattcctggaccccataatgtctaccctgatgtgtgacccagttgtactgccgtcctccagggtaactgtggacaggtctacaattgcccgacacctcctatcagaccagaccgatcccttcaataggtcacctttgacaatggaccagatacgcccaaacacggaattaaaagagaaaatacagagatggctggcagaacgcaagcaacagaaggaacagctggaatag

SEQ ID NO: 80514 - DNA, 3201 bp, Artificial Sequence
  derived and/or modified sequence
atgacagaccaggagaacaacaacaacatcagcagcaacccctttgctgccctgtttggcagcctggctgatgccaagcagtttgctgccatccagaaggagcagctgaagcagcagagtgatgagctgcctgccagcccagatgacagcgacaacagcgtgtctgagagcctggatgaatttgactacagcgtggccgagatcagccgctccttccgcagccagcaggagatctgtgagcagctgaacatcaaccacatgatccagaggatcttcctgatcaccctggacaacagcgaccccagcctgaagtctggaaatggcatccccagccgctgtgtgtacctggaggagatggctgtggagctggaggaccaggactggctggacatgagcaatgtggagcaggccctgtttgcccggctgctgctgcaggaccccggcaaccacctgatcaacatgaccagcagcaccaccctgaacctgtctgctgacagagatgctggggagcggcacatcttctgctacctgtacagctgcttccagagggccaaggaggagatcaccaaggtgcctgagaacctgctgccctttgctgtgcagtgcaggaacctgactgtgagcaacaccaggacagtgctgctgaccccagagatctacgtggaccagaacatccacgagcagctggtggacctgatgctggaggccatccagggcgcccactttgaagatgtgacagagttcctggaggaggtgattgaggccctgatcctggatgaggaggtgaggaccttccctgaggtgatgatccctgtgtttgacatcctgctgggccgcatcaaggacctggagctgtgccagatcctgctgtatgcctacctggacatcctgctgtacttcacccggcagaaggacatggccaaggtgtttgtggagtacatccagcccaaggaccccaccaacggccagatgtaccagaagaccctgctgggcgtcatcctgagcatcagctgcctgctgaagaccccaggagtggtggagaaccacggctacttcctgaaccccagccgcagcagcccccaggagatcaaggtgcaggaggccaacatccaccagttcatggcccagttccacgagaagatctaccagatgctgaagaacctgctgcagctgagccctgagaccaagcactgcatcctgtcctggctgggcaactgcctgcacgccaatgccggccgcaccaagatctgggccaaccagatgcctgagatcttcttccagatgtatgccagtgatgccttcttcctgaacctgggcgccgccctgctgaagctgtgccagcccttctgcaagcccaggagcagccggctgctgaccttcaaccccacctactgtgccctgaaggagctgaatgatgaggagaggaagatcaagaatgtgcacatgaggggcctggacaaggagacctgcctgatcccagctgtgcaggagcccaagttcccccagaactacaacctggtgacagagaacctggccctgacagagtacaccctgtacctgggcttccaccggctgcatgaccagatggtgaagatcaaccagaacctgcaccggctgcaggtggcctggagagatgcccagcagagcagcagccctgctgctgacaacctgcgggagcagtttgagcggctgatgaccatctacctgagcaccaagacagccatgacagagccccagatgctgcagaactgcctgaacctgcaggtgtccatggctgtgctgctggtgcagctggccatcggaaatgaaggcagccagcccatcgagctgaccttccccctgcctgatggctacagcagcctggcctacgtgcctgagttctttgctgacaacctgggggacttcctgatcttcctgcggagatttgctgatgacatcctggagaccagcgctgacagcctggagcacgtgctgcacttcatcaccatcttcaccggcagcattgaaagaatgaagaacccccacctgcgggccaagctggccgaggtgctggaggccgtgatgccccacctggaccagacccccaaccccctggtgtcctctgtgttccacaggaagagggtcttctgcaacttccagtatgccccccagctggccgaggccctgatcaaggtgtttgtggacatcgagttcaccggggacccccaccagtttgagcagaagttcaactacagaagacccatgtaccccatcctgcgctacatgtggggcacagacacctaccgggagagcatcaaggacctggccgactatgccagcaagaacctggaggccatgaaccccccactcttcctgcgcttcctgaacctgctgatgaatgatgccatcttcctgctggatgaggccatccagtacctgagcaagatcaagatccagcagatcgagaaggacagaggagagtgggacagcctgaccccagaggcccggcgggagaaggaggccggcctgcagatgtttggccagctggcccgcttccacaacatcatgagcaatgagaccatcggcaccctggccttcctgaccagcgagatcaagagcctgtttgtgcaccccttcctggccgagcgcatcatctccatgctgaactacttcctgcagcacctggtgggccccaagatgggcgccctgaaggtgaaggacttcagcgagtttgacttcaagccccagcagctggtgtctgacatctgcaccatctacctgaacctgggagatgaggagaacttctgtgccaccgtgcccaaggatggccgcagctacagccccaccctgtttgcccagacagtgcgggtgctgaagaagatcaacaagccaggcaacatgatcatggccttcagcaacctggccgagcgcatcaagagcctggccgacctgcagcagcaggaggaggagacctatgcagatgcctgtgatgagttcctggaccccatcatgagcaccctgatgtgtgaccctgtggtgctgcccagcagccgggtgacagtggacaggagcaccatcgcccggcacctgctgagtgaccagacagaccccttcaacagaagccccctgaccatggaccagatccggcccaacacagagctgaaggagaagatccagcgctggctggccgagaggaagcagcagaaggagcagctggagtag

SEQ ID NO: 80515 - DNA, 3201 bp, Artificial Sequence
  derived and/or modified sequence
atgaccgaccaggagaacaacaacaacatcagcagcaaccccttcgcggctctgtttggctcccttgcagatgctaagcagtttgcagccattcagaaggaacagttgaagcaacaatctgatgagctgcccgcctcgcctgacgatagtgacaatagcgtctcagagagcttagatgaatttgactatagtgtagccgaaatctccaggtccttccgtagccaacaggagatttgtgagcagttgaacattaaccacatgatccagcgcatttttcttatcaccctcgataacagcgacccatccctcaaaagcggaaacgggataccaagcaggtgcgtctacctggaggagatggccgtagaactcgaagatcaggattggctggacatgtcgaacgttgagcaggcactatttgcgcgcttactgcttcaggatccaggaaatcatctgatcaacatgacttcctcaaccactttgaatctaagtgctgacagggacgcaggagagcgtcacatcttctgctacctgtactcctgttttcagcgggccaaggaggagatcacaaaggttccagaaaacctcctcccattcgcggtgcagtgcagaaacctcacagtttcaaacacccgcaccgtcctccttacccccgagatttatgtcgaccagaatattcatgagcagcttgtcgatctgatgttagaggcaatacaaggcgcccattttgaagacgtaaccgaatttctggaggaggttatagaggcattaatcttagacgaggaagtgcgtacgttcccagaggtaatgattcctgtgtttgacattcttctggggcgcatcaaagatctcgaactgtgccaaatcctgctttacgcgtacttggacatactgctttatttcaccagacagaaggatatggcaaaggtctttgttgaatatattcagccaaaagacccaaccaacgggcagatgtaccaaaaaacactacttggggtgatactgagcatcagctgtttactcaaaacaccaggggtcgtggaaaatcacgggtattttctgaatcctagcaggagcagtccccaggagatcaaggttcaagaggccaacatccaccagtttatggcacaatttcatgaaaagatatatcagatgcttaagaacctgttacaattgtcgcccgagactaagcattgcattctgagctggctcgggaattgtctacatgccaacgcggggcgtacgaagatatgggcaaatcagatgcccgaaattttctttcaaatgtacgcgtccgacgcgttctttctcaacctgggggctgcactactgaaattgtgccagccgttctgtaaacctagaagcagcagacttctaacctttaaccctacgtactgtgcactcaaagaactgaatgatgaggagcggaagatcaaaaacgtccacatgagggggctagataaggagacatgcctcatccctgcagtgcaagagcctaaattcccacagaattacaacctggtgaccgaaaatttagcactcactgaatacaccttatatttaggcttccataggctccatgaccagatggtcaaaattaaccaaaacttgcatcgcctccaggtggcctggagagatgcgcagcaatctagctctcctgcagcagacaacctgagagagcagtttgaacgtctgatgacaatttacttatctaccaaaactgcaatgactgagcctcaaatgctgcaaaactgcttgaacttacaggtctccatggccgtgctgctcgtacaactggccataggtaacgaaggcagccagcctatcgagctcacctttcctctcccagacggctactcatcactagcctacgtgccagagttctttgcagacaacttgggcgacttcttgatcttcctgcgccgctttgccgacgacatattggagacgagcgccgactccctagaacacgttttacatttcattactatttttaccggctctatagaaaggatgaaaaaccctcacctccgggctaagctggcagaggtgctggaggccgttatgccccatctggatcaaacccctaatccactggtaagttcagtgttccatagaaagagggtcttctgcaatttccagtatgcccctcagctggcggaggctcttataaaagtattcgtcgatatcgaatttactggcgaccctcatcagtttgaacagaaattcaactatcgtaggccaatgtatcctatactccgttacatgtgggggaccgacacttaccgtgaatctattaaagatttagcagactacgcaagcaagaaccttgaggctatgaatccgccccttttcttgagattcctgaacctgctcatgaacgatgctattttcctactggacgaggccattcagtacttgtctaagattaagattcaacagatcgagaaggacagaggcgaatgggacagtctaaccccagaggcgagaagggagaaggaggccggccttcagatgtttggccagctggctcggttccacaacatcatgtcaaatgagactatcggaacactcgccttcctcacaagcgaaattaaatcccttttcgtgcacccatttctggccgagcggattatcagtatgctcaattacttcctacagcacctggtaggacctaagatgggtgcccttaaagtgaaagacttcagcgagtttgactttaagcctcagcagctggttagcgacatctgtaccatctatctcaatctgggggatgaggaaaacttctgtgctaccgtgcccaaggatgggagaagctactcacctactttatttgcgcagaccgtcagggtgcttaagaaaatcaacaagcctgggaacatgattatggcattctctaatctggcagagcgaatcaagtcgctggcggatctgcagcagcaagaagaggagacctacgctgatgcctgcgatgaattcctcgaccccattatgtctaccctgatgtgcgatccagtcgtgctgccaagctcacgagtgacggtggaccgttctaccatcgccagacacctgttgtctgaccaaaccgacccattcaaccgttcgccactgacaatggaccaaatacgcccgaacacagagctgaaggaaaaaattcagcggtggctggccgagcgaaaacagcagaaagagcaactcgagtag

SEQ ID NO: 80516 - DNA, 3201 bp, Artificial Sequence
  derived and/or modified sequence
atgacggaccaagagaacaataacaatatatccagcaacccttttgcagctctgtttgggagtcttgctgatgctaaacagtttgccgctattcagaaggaacagctgaaacagcaatccgacgagctgcctgcaagcccagacgattcggataactccgtttccgagagccttgacgagtttgactactccgttgcagaaatatccaggagctttaggagccaacaggagatttgcgaacagctgaatataaaccacatgattcagcgtatatttcttataacgctggataatagcgacccttctctgaagagtggaaacggcattcccagccgatgcgtctacctcgaggaaatggccgtggaactggaagaccaagattggttggacatgagcaacgtggagcaggccctcttcgccagactcctcctgcaagacccgggaaatcatctgattaacatgacctctagcacaacactgaacctgtcagccgacagagacgctggcgagcgccacatattctgttacctgtactcatgtttccaacgggctaaagaggagattaccaaggttcctgagaatttactgccttttgctgtccagtgcaggaacctcacggtctccaatacacggactgttttgctaacacctgagatttacgtggatcagaacatccacgaacagcttgtcgatctgatgctcgaagcaatacaaggagcccacttcgaagatgtaactgagttcctggaggaagtgattgaagccctgatcctggacgaggaggtgcgcactttcccagaggtgatgattcccgtatttgatattctgcttggtaggattaaggacctggagttgtgtcagatattgctttatgcctacctagatatccttctgtattttacacggcaaaaagatatggcaaaggtgtttgtggaatacatccagccaaaagatcctacaaacggccagatgtaccagaaaactctgcttggagtgattttaagcatctcgtgcctcctgaaaacccctggtgtcgttgagaaccacggctacttcctgaaccccagtaggagtagtccacaggagatcaaagttcaagaggcaaatatacatcagtttatggctcagttccatgagaagatctatcagatgctaaagaatctgctccagctatcaccagagaccaaacattgtatcttgtcctggcttggcaattgtctccacgcgaatgctggaagaactaagatatgggctaaccagatgcctgaaatcttcttccagatgtacgcatcagacgcatttttcctgaatcttggagccgctttgctgaagctgtgtcagcccttctgtaaacctaggtccagccggctcctcacatttaaccccacctactgtgccctcaaggagcttaacgacgaagaaaggaagattaagaacgtgcacatgcggggacttgacaaagagacctgcctgatcccggcagtccaggaacccaagtttccccagaactataacctcgtgacagagaacctggccctgacggagtacaccctgtatctgggctttcatcgcctacacgatcaaatggtgaagattaatcagaatctgcaccgcctgcaggtggcctggagagacgctcaacagagtagctctcccgcagctgataacctgagggaacagttcgagagacttatgacaatttatctgtccaccaaaacagccatgactgagcctcaaatgttgcaaaactgtttgaatttgcaagtctccatggctgtgcttctggttcaactagcaattggtaacgagggttcccaacctatcgagctcactttcccactccctgatggatactctagccttgcttatgtgccggagttctttgccgataacctgggcgatttcttaatcttcctcagaagatttgcagacgacatcctggagactagcgccgattcacttgagcatgtattgcactttatcaccatcttcaccggctctatcgagcgcatgaagaacccccatctgcgcgctaaactggcagaggtgctagaagccgtgatgccccatcttgaccagacccctaacccgttagtgtcatccgtgtttcatcggaaacgggtcttttgcaatttccagtacgctcctcaactggcagaagcgttaattaaagtctttgttgacatcgagttcaccggggacccacatcagtttgagcagaagtttaactatagaagacccatgtaccctattctgcgctatatgtggggaacagacacttatcgggagtccataaaagacctcgccgactacgcgagcaaaaatctcgaggctatgaaccccccactgttcctgagattcctgaacctcctgatgaatgatgccatttttttgctggacgaagctattcaatacctgtccaaaataaagattcaacaaattgaaaaggatcgaggggagtgggattcactgacaccggaagcgaggagagagaaggaggctgggctgcagatgtttggacagcttgctcggttccacaacatcatgtcaaacgagacgatcggaactctcgcatttctgaccagcgaaataaagtccctctttgtccacccattcctggctgagagaattattagtatgctcaattatttcctgcagcacctagtcggtcctaaaatgggggctcttaaggtgaaggatttctctgagttcgattttaagcctcagcagctggtgagcgacatctgtaccatctatctcaacctgggggacgaagagaacttttgtgcaaccgttccaaaagatgggcgatcctactcacccactctcttcgcacagacagtgcgtgtcctgaaaaagatcaataaacccggaaatatgatcatggctttttcaaatctcgcagagaggataaagagcctcgctgatctccagcagcaggaggaagaaacctacgccgatgcctgtgacgagttcctggatcccattatgtcaaccttaatgtgtgaccccgtcgtactccctagctctcgtgtaaccgttgaccgcagcaccattgcgagacatctgttaagcgaccagaccgacccgttcaataggtcccccttgacaatggaccagattcggccaaacacagaacttaaagagaaaatccagcggtggctggcagagcggaaacaacagaaagagcagcttgagtag

SEQ ID NO: 80517 - DNA, 6103 bp, Artificial Sequence
  derived and/or modified sequence
taacttccggttgctgtgctgagtcggaagtgggaacccttcggccgctgagattctgtcgtgtcgtcgctgctggcacttcaggctctgcctctcccactaggtctggatggaggataccttaaagtgaaatgacagaccaggagaataacaacaacatctcaagtaacccctttgctgctctttttggctccctggctgatgccaaacagtttgcggcaatccaaaaagagcagctgaagcaacaatctgatgaactcccagctagcccagatgactcggataatagcgtgtcagagagcctggatgaattcgattactctgtggctgagattagccgctcattccgatcacagcaggaaatatgtgagcaactcaacatcaatcacatgatccaaaggatcttccttattactctggacaacagtgatcccagcttgaaaagcgggaatggcatccctagccgttgtgtgtatttggaagaaatggcagtagagctagaagatcaagactggcttgatatgagcaatgttgagcaggccctcttcgctcgcttattacttcaagatccaggcaaccacttaattaacatgacttcttctacaacgctaaatctctctgctgatcgagatgcaggagagaggcacattttttgttacctttactcctgcttccagagagccaaggaagagattaccaaagttccagagaacctgctaccctttgcagtgcagtgcagaaacctcactgtgtccaatacccgaacagttcttctcaccccagagatctatgttgaccaaaacatccatgagcaactggtagatttgatgttagaagccatccagggagcccattttgaagatgtaactgagtttctggaagaggtcattgaagccttgatattggatgaggaagttagaacatttccagaagtcatgattccagtgtttgatattttattgggccgaataaaagatctagagctctgtcagatccttttgtatgcatatctggatattcttctctatttcactaggcaaaaagatatggcaaaggtttttgtagaatacattcagcccaaggaccctaccaatgggcaaatgtaccagaagaccttgctgggagtaattctgagtatctcctgcttattaaagactccgggtgttgtagaaaatcatggctactttttgaatccatctcgttccagcccccaggagatcaaagtacaggaggccaacatccatcagttcatggctcagttccacgaaaagatctaccagatgctgaagaacttactccagctctctccagaaaccaaacactgtatcttgtcctggcttggaaactgtttgcatgcaaatgcaggccgcaccaagatttgggccaatcagatgccagaaatctttttccaaatgtatgcctcagatgctttctttctgaatctgggtgctgctctcctgaagctatgccagccattttgcaaacccagatcctctcggctcctcacctttaatcccacatactgtgccctcaaggagttgaatgatgaagaacgaaaaattaaaaatgtacacatgagaggtttggacaaagaaacctgtttgatcccagctgtgcaggagccgaagtttccacagaactacaaccttgtaacagagaaccttgctctgacagagtacaccttgtacttgggatttcacaggttgcatgatcagatggtaaaaatcaaccaaaatctgcatcggctgcaggttgcctggcgggatgctcagcaaagttctagccctgctgctgacaatcttcgtgagcagtttgaacgactgatgaccatctatctttctaccaagactgccatgacagagccacaaatgctacaaaactgcctaaacttgcaggtgtccatggctgttctactggttcaactggccataggcaatgagggctcacagccaatagagctaacctttcctttgccagatggctacagctctttggcttatgtgccagaattttttgcagataacctgggtgattttctcatttttctccgccgctttgccgatgacattttggagacatcagcagattccctggagcatgtccttcactttatcaccattttcactggaagcatagaaagaatgaagaatccccacctgagggccaaactagcagaggtgttggaagcagtgatgccccacctggatcagaccccaaatcccttggtatccagtgtgttccaccggaaacgtgtgttctgcaactttcagtatgcaccccaacttgcagaggctctaatcaaggtttttgtggacatcgaatttacaggagacccccatcaatttgaacagaagtttaattaccgccgtcccatgtatcctatcctaagatacatgtgggggacagatacctatcgggagagcattaaggatttggctgactatgcctctaagaatttagaagccatgaatcccccacttttcctccgctttcttaacctgctaatgaatgatgccatcttccttttggatgaagccatacagtatttgagcaagataaagattcagcaaattgagaaggatcgaggtgaatgggatagtctgactccagaagcccgccgagaaaaggaggctggcctacagatgtttggacagctggcacgtttccataacatcatgtccaatgaaacaatcggtacccttgcctttctcacatcagagatcaagtcactctttgtgcatcccttcctggctgagcgcatcatctccatgttgaactacttcctgcaacacctggttggccccaagatgggtgccttaaaagtcaaggacttcagcgaatttgacttcaaaccccagcagcttgtatcagatatctgcactatctacttaaatcttggggatgaggagaatttctgtgccactgtgcccaaggatggacgttcctattccccaactctctttgcacagacagttcgagtcttgaagaaaataaataagcctgggaatatgattatggctttcagcaacttggcagagagaatcaagtctcttgcagacctccaacaacaggaagaggaaacctatgcagatgcctgtgatgagttcctggatcccattatgagcacactgatgtgtgaccctgtggtgctgccatcttccagagtcactgtggatagatccaccattgcaagacatttgctcagtgaccaaacagatccctttaaccgtagtcccctcaccatggaccagatccggccaaacacagaactaaaagaaaaaatccaacggtggcttgcagagaggaaacaacaaaaggagcaacttgaatagatactgtgaactaaccaaaccaaaaccaaccccagagtgcagataaacaattgtttgtggtttctctctttctggttctgttccttttctttcttcttttctttttcttttttttttttttttttactaaattagagaactgctcttgctgaaattatgatagttaagattcctaagaacttgacaatgctcccctggcttgcaggaaattatacttattatagcatcaccaagtttagaaatcatcactaattttcaccctctgttgtctcttcatattcttcttccttttcctaaatgaaattatattatttcaactactaaaacttcccgccaccctgctatttctcttccaattactgttcaaacatttttggtgagtgctgcttttataaatatgtgatgtcacatatttcagtgacagctgatgttatcagaaaaatcctgttatcctgtgtatttactagtcctcatgatctagacttaaccccttttctgtgttacagagtaacttcacataaaagcagatacctttaagtttgtgtagacttctgaataagatgatagacgagaattttttttaaaaaaggaatttaaaggaatcttgtgcaacttctgttgatagctcttaattttgttatacagtctttttaatgaggattggtagggcaatcctaccaattgatgggggtgaggagactgttgggcccttattctcttatgaaaatctgtttctacaaggactaggcctaagtagatttaggcaacgggtatcatatccatgaaaaatgtcattttaagacactaatatcaacagtatatctcagtgtgtgagatatataaatacacatacaccccatgtgcttttttgttggtttagtgtaaactgagtaccactttatattttctcttccatagtgagatgtatgcagtatgtggccatgtttactaacatactcattcttcacaaaattctgagattataaaatgtatatagttaatatttgtttgagcttgtgacctgacttctaagagctacttctaacacagccttaggtcttcaattaacaaagtaggaagttgagcacaaccttgtccacagccattttaaatatccacttagccctgtgtagttggtaggtggacaccactttcataagtgaacttgagctcactactcaattgtgcagcttaatatgctgactagggacattcccctatggattatctttatatcactgtctttctaagcccagagatgtcataagtgacaagaaaagtgataggatcaagaaatgggtgtcactgcttcatttggaacatgttattaactatggtctctttcaaataaatagtagttttatatttcaacacaagttgctataagcagtccttgatgggtttttgattgcatcagctggaaagcctcaaatctaagagggcttcccatcctagatataaaataggtgttgcctattgctgtgcttataaaatgaaaaaggaaattgaggacacttttgcaaatgccagaatgtaagattcattcagtgtgctccctgggcctttatggcatgggttgacaggatttgtttattttctaaaattagcttcattcaatatttatcatcctcctttccctctctgagaatgaactatgtataaaataagcttctgcctatttgcatttatcttccaaacccaatctagtaggatgttctcattttaaaaacgaggggaaaagaccagagtttttcaggagaaaactggaggaaaatgggcacaaaaactcagaaggcagctattcccagcagcttcctagttaacaacccccatgctgcctccagtctttgtctgtattcttctgtatttaaccttcagattgtaagccttttctggcaagcttttcttctttttttaaactcttttcctgaaactttttatgaatggctatggcaccattaatgctgctgaatatctttaaactctgcacaagcaagtgtgtagcttaaggccactactggtaaggaaaccaagtgtcctctgtgccttttttctttctgtgaagtaatttaagaatatccaaaaaaattagactttaaaaagttatcttggtacaacaccgtgtgtatatacacttggaagcttaaaaaggtgttttgtctggaacttagaagcagctctaaatctagtagagcagactttctaacatacctagttttgtgtattggctttgctggagtatgatagcaaaatgaagactcttttactcagctctggtattgctcataacttaccaagaggctaatactaaacttggaaaattgtttaagtatgttttatcaagcagtctgggttttgttttttaatatactttttaatggatatgtgaaaactgaaggaaatgttaaaggttttttaatggtgcaagtgaaggtgccagttgctatttgatatcacactctacaaaagcttcattactttatttgatggtggttgctaagcagccattgcacagagcataagtctactgggtgcctttacatgccagaggctgatgctgcactgttgatgtcatgtgaggaaataatgcacatgctctaactgctcaacaggaaatgaacctagaaacagaaaatgaaaaggttgattgaaataaaacttgatcaacgcgactgtattttgaaacattccaggaaggttacttcttgtcaaacttgcctggcagtgtttgttcaaaacttgtatttaataaatgaacatctgacttacaa

SEQ ID NO: 80518 - protein, 78 aa, Artificial Sequence
  derived and/or modified sequence
MASQSQGIQQLLQAEKRAAEKVADARKRKARRLKQATRRQVQGMQSSQQRNRERVLAQLLGMVCDVRPQVHPNYRISA

SEQ ID NO: 80519 - DNA, 237 bp, Artificial Sequence
  derived and/or modified sequence
atggccagtcagtctcagggtatccagcagctcctacaggccgagaagcgggcagctgagaaggtggcagatgcaagaaaacgcaaagctaggcgtctgaagcaggccaccagacggcaggtgcaaggcatgcagtctagccagcagagaaacagagagagggtgctggcccagttactcggaatggtgtgcgatgtaaggcctcaggtgcatcccaactatcggatcagtgcctag

SEQ ID NO: 80520 - DNA, 237 bp, Artificial Sequence
  derived and/or modified sequence
atggcctcacaaagccaaggcatccagcagctgcttcaagcagaaaagcgggctgctgagaaagtggctgatgccagaaagagaaaggctaggcggctgaagcaagccactcggagacaagtacagggaatgcaaagctcacaacagaggaaccgcgaacgggtgttggctcaactgcttggtatggtatgtgatgttcgaccccaagttcatcctaactatagaatttctgcgtag

SEQ ID NO: 80521 - DNA, 237 bp, Artificial Sequence
  derived and/or modified sequence
atggcatctcaatcacagggtattcagcagctgctgcaggctgagaaacgggcggctgaaaaagtcgccgatgctcggaagcgcaaggctcggagactcaagcaagctacccggagacaagtccagggcatgcagtcatcccagcagcgcaaccgcgagagggtccttgcccagttgctggggatggtttgtgatgtccgaccacaagtacaccctaactaccggataagcgcttag

SEQ ID NO: 80522 - DNA, 237 bp, Artificial Sequence
  derived and/or modified sequence
atggcatcgcagagtcaggggatacagcagttgctgcaagcggaaaaacgggctgctgaaaaagtggccgatgcgaggaaaaggaaagctaggagactgaaacaggcgactcggaggcaggtccaagggatgcagagctcccagcagaggaatcgagagagagtgctagcgcagctcctcggaatggtctgtgacgttaggcctcaggtgcacccaaattacagaatctccgcgtag

SEQ ID NO: 80523 - DNA, 237 bp, Artificial Sequence
  derived and/or modified sequence
atggctagccagtcacaggggatccaacaactgctgcaagccgagaagcgagccgcagagaaggttgccgatgctcgcaaacgtaaggcccgccgtcttaagcaggctactcggcggcaggtgcagggcatgcagtcaagccaacaaagaaatcgagaacgtgtcctcgctcaactgcttggaatggtgtgcgacgtgcggccccaggtgcaccctaactataggatatctgcctag

SEQ ID NO: 80524 - DNA, 237 bp, Artificial Sequence
  derived and/or modified sequence
atggcaagccagtcccagggcattcagcagttgcttcaggcagaaaagcgagccgcagagaaggtagcagatgcccggaagagaaaagcccgacgcctcaagcaagccaccaggcgtcaggtccagggcatgcaatccagtcagcaaaggaacagggaaagagtgttggcccaactgttgggaatggtgtgcgacgtccgcccccaagtgcaccccaattatcgtatttcagcttag

SEQ ID NO: 80525 - DNA, 237 bp, Artificial Sequence
  derived and/or modified sequence
atggcctcacaaagccagggaatccaacagttgctccaggcagaaaagcgcgcagcggagaaggtggcggatgccaggaagagaaaagctcgacgcttaaaacaggctacccggcgtcaggtgcagggaatgcaaagctctcagcaacgcaatagggagcgcgtgttggctcagcttctgggcatggtatgcgatgttcgacctcaggtacacccaaattacaggatttccgcttag

SEQ ID NO: 80526 - DNA, 237 bp, Artificial Sequence
  derived and/or modified sequence
atggccagccagagccagggcatccagcagctgctgcaggccgagaagagagctgctgagaaggtggctgatgccaggaagaggaaggcccggcggctgaagcaggccacccggcggcaggtgcagggcatgcagagcagccagcagaggaaccgggagcgggtgctggcccagctgctgggcatggtgtgtgatgtgcggccccaggtgcaccccaactaccgcatcagcgcctag

SEQ ID NO: 80527 - DNA, 237 bp, Artificial Sequence
  derived and/or modified sequence
atggccagccagagccagggcatccagcagctgctgcaggccgagaagagagctgctgaaaaggttgcagatgcacggaagcggaaagctaggcggcttaagcaggcgactaggagacaagttcagggaatgcagagcagccagcagcgaaatcgcgagcgcgtgctagcccaattgctggggatggtttgcgatgtgcggccccaggtgcatcccaattaccggatatcagcatag

SEQ ID NO: 80528 - DNA, 237 bp, Artificial Sequence
  derived and/or modified sequence
atggccagccagagccagggcatccagcagctgctgcaggccgagaagcgggcagccgagaaggtcgcggacgcccgaaaaagaaaggcacgcaggctgaagcaggccaccagacgacaagtccagggcatgcagagcagccaacagagaaaccgggaaagggttctcgcccagctcctgggtatggtatgtgacgtgcggcctcaggtccatcccaactacaggatcagcgcgtag

SEQ ID NO: 80529 - DNA, 237 bp, Artificial Sequence
  derived and/or modified sequence
atggccagccagagccagggcatccagcagctgctgcaggccgagaaacgcgctgcagaaaaggtcgcggatgctcggaaacggaaggctcgacgacttaagcaggctacccgaagacaggtccaggggatgcagtcctcccagcagagaaaccgggagagggtcctggcccaactgttgggaatggtgtgtgacgtcaggccacaggtacatccaaactatcggatatccgcctag

SEQ ID NO: 80530 - DNA, 237 bp, Artificial Sequence
  derived and/or modified sequence
atggccagccagagccagggcatccagcagctgctgcaggccgagaaacgtgcagccgaaaaggtggcagatgctagaaagagaaaagccagacgtctaaaacaggcaacaaggcgtcaggtccagggaatgcaaagctcccagcagcgcaaccgggagcgggttctggctcaattgctcgggatggtttgtgacgtgaggcctcaagtgcaccctaattaccgaatctctgcatag

SEQ ID NO: 80531 - DNA, 237 bp, Artificial Sequence
  derived and/or modified sequence
atggccagccagagccagggcatccagcagctgctgcaggccgagaagcgggccgcggaaaaggttgcagacgctcggaaacgcaaggcgcgacgcctgaagcaggccacgaggcgacaagtccaagggatgcaatcatctcagcagcggaatagggagcgggtgctcgctcagctgctgggaatggtctgcgacgtgcggccgcaagtacatcccaattacagaattagcgcctag

SEQ ID NO: 80532 - DNA, 237 bp, Artificial Sequence
  derived and/or modified sequence
atggccagccagagccagggcatccagcagctgctgcaggccgagaagcgcgctgccgaaaaggtagccgacgcccgcaaacgcaaggcgcggagacttaagcaggcaaccagaaggcaggtgcaaggtatgcaatcaagccagcagagaaaccgggaacgtgtgctggcacagcttctgggtatggtgtgcgatgttaggccacaagttcaccccaactatcgtatcagcgcctag

SEQ ID NO: 80533 - DNA, 237 bp, Artificial Sequence
  derived and/or modified sequence
atggccagccagagccagggcatccagcagctgctgcaggccgagaaacgcgcagccgaaaaagtggccgatgcaagaaaacgtaaggcccgacggctgaaacaggcaaccaggcgccaggtccaggggatgcagagctcccaacagcgcaatagagagagagtgctagcccagctccttggtatggtctgtgacgtgcggccacaggttcaccccaactatcggatcagcgcctag

SEQ ID NO: 80534 - DNA, 237 bp, Artificial Sequence
  derived and/or modified sequence
atggcatcccagagccaggggatacagcagcttcttcaagccgaaaagagggccgcagagaaggtggccgacgcccgaaaacggaaggccagaaggttgaaacaggctaccagacgccaagtgcaggggatgcagtcaagtcaacagcggaatcgcgagcgggtgcttgcccagctgttgggtatggtttgcgatgtccggccacaagttcatccaaattatcggatttccgcctag

SEQ ID NO: 80535 - DNA, 237 bp, Artificial Sequence
  derived and/or modified sequence
atggcgagtcagtcccagggtatccagcaattgctgcaggctgagaaacgagcggctgagaaagtcgccgacgctcggaagaggaaagctcgccgactgaagcaggcgactcggagacaagttcaaggcatgcagagcagccagcaacgcaatagagaacgggttctggcacagctgctggggatggtgtgcgatgtacggcctcaggtgcatcctaattaccgaattagtgcgtag

SEQ ID NO: 80536 - DNA, 237 bp, Artificial Sequence
  derived and/or modified sequence
atggcaagccagagccaggggatccagcagctcctgcaagccgagaaaagagcggctgagaaagtagccgacgcgcgaaagcggaaagcgagaagattaaagcaggccactagaagacaggtgcaaggcatgcaaagtagtcagcaacgcaacagggaacgtgtgctggcccagcttttaggaatggtgtgtgacgtccgtcctcaggtccaccctaattatcggatctctgcctag

SEQ ID NO: 80537 - DNA, 237 bp, Artificial Sequence
  derived and/or modified sequence
atggcgtcacagtcgcagggcattcagcagctcctgcaggctgagaaaagagctgccgaaaaagttgctgacgcgagaaagcgcaaggcaaggcgtctcaagcaggctactcgacggcaggtccaagggatgcaatcctcacagcagcgtaacagagagagggtactggcacagctgctgggcatggtgtgcgacgtgagaccccaagtgcaccctaactaccgaatctccgcttag

SEQ ID NO: 80538 - DNA, 237 bp, Artificial Sequence
  derived and/or modified sequence
atggccagccaaagtcaaggaatccaacagttgcttcaggctgagaagcgcgctgcggaaaaggtggctgacgcacgcaaacgcaaagccaggcgcctcaaacaagccacccgacggcaagtgcagggaatgcagagcagtcagcagcgtaatagggaacgtgtcttagctcagttgctgggaatggtttgcgacgtccggcctcaggtccaccctaactatcggatttcagcctag

SEQ ID NO: 80539 - DNA, 237 bp, Artificial Sequence
  derived and/or modified sequence
atggcctctcagtcccaaggcatccagcagctgctgcaggccgagaaacgagccgctgagaaggtggccgatgccaggaagagaaaagcacggagactcaagcaggctaccaggagacaagtgcagggcatgcagagtagtcagcagcgaaatagggaaagggttctggctcagctactgggcatggtgtgtgatgtgcggcctcaagtgcaccctaattatcgcatctccgcgtag

SEQ ID NO: 80540 - DNA, 237 bp, Artificial Sequence
  derived and/or modified sequence
atggcatcccagagtcaaggaattcagcagctcctgcaggcagagaagagggccgctgagaaggtggccgacgctcgcaagagaaaggcaaggcggctgaagcaggcgaccagacgccaggttcaaggaatgcagagctcacagcagcgcaatagagaaagagtgctggctcaactgcttggtatggtatgcgacgttcggccacaggtacaccccaattatagaattagtgcgtag

SEQ ID NO: 80541 - DNA, 1261 bp, Artificial Sequence
  derived and/or modified sequence
ggagaagtaagcggtggggggtgggagccatctggtactttgacagcattcaaaacagcatcggccataacaacagaaatggccagtcagtcccaaggtatccagcagcttctgcaagctgagaagcgggcagctgagaaggtggcagatgccagaaagaggaaggcccggcgactgaagcaggctacaaggcgccaggtgcagggcatgcagagctcccagcagagaaaccgagagcgtgtcctggcccagcttcttggcatggtctgcgacgtcaggccccaggtccaccccaactaccggatttctgcctagggccaccgtagggcctgactccttctgccagttccctccctcaaagaaatcctccaatcaaaatcacctcccaccataatccctgtcttctttccatcccctagaaatcctgggaggcaggatccaataattttcctgtgacacttataaatatcctgctcacatctgaatctccttgttgttctttaaccctcactgggactttgtaaacttccaagtcattctcacctaaaccctctgtgaaatttgtaatatggggaagtaggaatgtggaaaacatcctgacttcagtgtctggccgatgtgggtccctctcttgaccctgtcacttgctggctgtgaaaccaggacaagctacttaacttggtagcctcgatgtcctcctctgtgaaactgggatgataataatgcctaccttgtgagggttgcttcaatgattaggaatcattctgtaaagtctagcacagttccttgcatgttgtagcagtgattcagtaagtagcaaccctgtgatactattaccaccacctgctcactggtcaaaacctacacagctgtttcctcacgtccatcactggctctctaattccacttgttcattctgtgaccctagttattttctgaaaaattggttcttctcttttcccagagaccttctgatctccaaaaagaggagatgactacatttagcccctctcttataattccaggtagataactgcattttgtagcctctctttgtttttcttttgctgatctttgtctttattagattttcctcctttcctatttccccaaagacttatcagatgctcattgctttctaagatctaaaatgatactgtgttccctcatatgcatgcccttcctttctatatccttgacaccttactttcccattgtaacaataaaaaaagtatcaataaaataattattggcaaataaa

SEQ ID NO: 80542 - DNA, 1261 bp, Artificial Sequence
  derived and/or modified sequence
ggagaagtaagcggtggggggtgggagccatctggtactttgacagcattcaaaacagcatcggccataacaacagaaatggccagtcagtcccaaggtatccagcagcttctgcaagctgagaagcgggcagctgagaaggtggcagatgccagaaagaggaaggcccggcgactgaagcaggctacaaggcgccaggtgcagggcatgcagagctcccagcagagaaaccgagagcgtgtcctggcccagcttcttggcatggtctgcgacgtcaggccccaggtccaccccaactaccggatttctgcctagggccaccgtagggcctgactccttctgccagttccctccctcaaagaaatcctccaatcaaaatcacctcccaccataatccctgtcttctttccatcccctagaaatcctgggaggcaggatccaataattttcctgtgacacttataaatatcctgctcacatctgaatctccttgttgttctttaaccctcactgggactttgtaaacttccaagtcattctcacctaaaccctctgtgaaatttgtaatatggggaagtaggaatgtggaaaacatcctgacttcagtgtctggccgatgtgggtccctctcttgaccctgtcacttgctggctgtgaaaccaggacaagctacttaacttggtagcctcgatgtcctcctctgtgaaactgggatgataataatgcctaccttgtgagggttgcttcaatgattaggaatcattctgtaaagtctagcagagttccttgcatgttgtagcagtgattcagtaagtagcaaccctgtgatactattaccaccacctgctcactggtcaaaacctacacagctgtttcctcacgtccatcactggctctctaattccacttgttcattctgtgaccctagttattttctgaaaaattggttcttctcttttcccagagaccttctgatctccaaaaagaggagatgactacatttagcccctctcttataattccaggtagataactgcattttgtagcctctctttgtttttcttttgctgatctttgtctttattagattttcctcctttcctatttccccaaagacttatcagatgctcattgctttctaagatctaaaatgatactgtgttccctcatatgcatgcccttcctttctatatccttgacaccttactttcccattgtaacaataaaaaaagtatcaataaaataattattggcaaataaa

SEQ ID NO: 80543 - DNA, 237 bp, Artificial Sequence
  derived and/or modified sequence
atggccagccagagccagggcatccagcagctgctgcaggccgagaagagagccgccgagaaggtggccgacgccagaaagagaaaggccagaagactgaagcaggccaccagaagacaggtgcagggcatgcagagcagccagcagagaaacagagagagagtgctggcccagctgctgggcatggtgtgcgacgtgagaccccaggtgcaccccaactacagaatcagcgcctag

SEQ ID NO: 80544 - DNA, 765 bp, Artificial Sequence
  derived and/or modified sequence
atgcaaggcgatgccagacgcaggaggaacgagaactactttgatgacataccacgctctaagctggagcgacagatggctcagaccggcgattggggagagccgtccatcacccttcgccctcccaacgaggccaccgccagtaccccagtacagtattggcagcatcatccggagaaactgatatttcaatcatgcgattacaaggccttttatctgggcagcatgctgataaaagagctccgagggactgagagcacccaggacgcatgtgcaaagatgcgggcgaattgtcagaagtccaccgagcagatgaagaaagtcccgactatcatcctgtctgtgtcctataagggagttaaattcatagatgccaccaacaaaaatataattgcggagcacgaaatccgaaatatctcctgtgccgcgcaagatcctgaggatctatcgactttcgcttacattactaaagacctgaaatccaatcaccactactgtcacgtgttcacggcttttgacgttaatttggcctacgagatcatactaaccctggggcaggcttttgaggtggcctatcaactggccctccaggcgcgcaagggcggtcattcctcaaccttgcctgagtcttttgaaaataagccctccaagcccatccccaaacctagggtgtccatccgaaaaagtgtggacctgctccatgcctctcatactggccaggagccgtcggagcgccatacagaagaggcactgaggaagttctag

SEQ ID NO: 80545 - DNA, 765 bp, Artificial Sequence
  derived and/or modified sequence
atgcagggagatgccaggagaagaagaaatgaaaactactttgatgacatccccaggagcaagctggagcggcagatggcccagacaggagactggggcgagcccagcatcaccctgcggcccccaaatgaggccacagccagcacccctgtgcagtactggcagcaccaccctgagaagctgatcttccagagctgtgactacaaggccttctacctgggctccatgctgatcaaggagctgcggggcacagagagcacccaggatgcctgtgccaagatgagggccaactgccagaagagcacagagcagatgaagaaggtgcccaccatcatcctgtctgtgtcctacaagggcgtgaagttcattgatgccaccaacaagaacatcatcgccgagcacgagatccggaacatcagctgtgccgcccaggaccctgaggacctgagcacctttgcctacatcaccaaggacctgaagagcaaccaccactactgccacgtgttcaccgcctttgatgtgaacctggcctatgagatcatcctgaccctgggccaggcctttgaggtggcctaccagctggccctgcaggccaggaagggcggccacagcagcaccctgcctgagagctttgagaacaagcccagcaagcccatccccaagccccgggtgtccatcaggaagtctgtggacctgctgcacgccagccacacaggccaggagcccagcgagcggcacacagaggaggccctgaggaagttctag

SEQ ID NO: 80546 - DNA, 765 bp, Artificial Sequence
  derived and/or modified sequence
atgcagggcgacgcccggcggcggcggaacgagaactacttcgacgatattccaaggtccaaactcgagcgccaaatggcccaaaccggcgactggggagaaccttccatcaccctgcggccgcctaacgaggcaacagcctcaacacctgtgcagtactggcagcaccatcctgagaaactcatatttcagagctgtgactataaagccttctacctagggtctatgctcattaaggaactccgggggacagagtcaacccaggatgcttgcgcaaaaatgcgagcaaactgtcagaagtcgacagagcaaatgaagaaggtccctactataattctctctgtgagttacaaaggcgtaaagttcatcgatgcgacgaataagaacataatagccgaacacgagattaggaacatctcttgtgcagcgcaggaccccgaggatttatctactttcgcctatattaccaaagatctgaaatccaatcaccactactgtcacgtttttactgcctttgacgtcaatctggcctatgagatcattcttaccctgggccaagcctttgaagtggcctaccaactcgccctccaggctcgaaaagggggccattctagtaccctccccgaatcttttgagaataagccctccaagcccattcctaagcctagggtctcaatcagaaaaagcgtggatttactgcatgctagtcataccgggcaggaacctagtgagcggcacaccgaagaagcactgcgtaagttttag

SEQ ID NO: 80547 - DNA, 765 bp, Artificial Sequence
  derived and/or modified sequence
atgcagggggacgcgaggcggcgtcggaatgagaactatttcgacgacattcccaggtccaagttggagcgtcagatggctcagaccggagactggggcgaacccagcatcacacttaggccgccaaatgaggcgactgcatcgactccggtccaatactggcagcatcatccagaaaagctgatattccaaagttgcgactacaaagccttttacctagggtctatgttgattaaggaactgcggggaactgagtccactcaggacgcctgcgcaaaaatgagggcgaactgccagaaatccactgagcagatgaaaaaagtgccaacgatcattttgagcgtaagctataaaggggttaagtttatcgacgccacaaacaagaatatcattgctgaacatgaaattcgaaacatctcttgcgcagcccaggatcccgaggatctaagtacatttgcctacatcaccaaagacctcaagtcaaaccaccattattgccatgtgtttacagcatttgatgtgaatttggcatacgaaatcatcctgacactcgggcaggcgttcgaggttgcataccaactggccctccaggcacgcaagggtgggcactcttccaccctgcctgaatccttcgaaaataagccttcgaagcctatccctaagcctcgggtcagcatacggaaatcagtagacctgttgcacgcaagtcacactggtcaggagcccagtgaacgacatacagaagaagccctcagaaaattttag

SEQ ID NO: 80548 - DNA, 765 bp, Artificial Sequence
  derived and/or modified sequence
atgcagggcgacgccagaagaagaagaaacgagaactacttcgacgacatccccagaagcaagctggagagacagatggcccagaccggcgactggggcgagcccagcatcaccctgagaccccccaacgaggccaccgccagcacccccgtgcagtactggcagcaccaccccgagaagctgatcttccagagctgcgactacaaggccttctacctgggcagcatgctgatcaaggagctgagaggcaccgagagcacccaggacgcctgcgccaagatgagagccaactgccagaagagcaccgagcagatgaagaaggtgcccaccatcatcctgagcgtgagctacaagggcgtgaagttcatcgacgccaccaacaagaacatcatcgccgagcacgagatcagaaacatcagctgcgccgcccaggaccccgaggacctgagcaccttcgcctacatcaccaaggacctgaagagcaaccaccactactgccacgtgttcaccgccttcgacgtgaacctggcctacgagatcatcctgaccctgggccaggccttcgaggtggcctaccagctggccctgcaggccagaaagggcggccacagcagcaccctgcccgagagcttcgagaacaagcccagcaagcccatccccaagcccagagtgagcatcagaaagagcgtggacctgctgcacgccagccacaccggccaggagcccagcgagagacacaccgaggaggccctgagaaagttctag

SEQ ID NO: 80549 - protein, 165 aa, Artificial Sequence
  derived and/or modified sequence
MLMPKKNRIAIYELLFKEGVMVAKKDVHMPKHPELADKNVPNLHVMKAMQSLKSRGYVKEQFAWRHFYWYLTNEGIQYLRDYLHLPPEIVPATLRRSRPETGRPRPKGLEGERPARLTRGEADRDTYRRSAVPPGADKKAEAGAGSATEFQFRGGFGRGRGQPPQ

SEQ ID NO: 80550 - DNA, 498 bp, Artificial Sequence
  derived and/or modified sequence
atgctcatgccaaaaaaaaatcgcattgccatatatgaactgctgttcaaggagggcgtgatggtagccaaaaaagacgtgcatatgcccaagcacccagagttggctgacaagaatgttccaaacctgcatgtaatgaaggcgatgcagtctctcaagtctagaggttacgtgaaggagcagtttgcctggagacacttctactggtacttaacaaatgagggtattcaatacctccgggattatttgcatctccctccggagattgtgcccgctacactccgtaggagccgaccagaaacaggaagaccgcggccaaaagggctcgagggagagaggcctgcaaggctcacccgcggtgaggcagaccgggacacttatagaaggagtgcagtccctcctggcgccgacaagaaggcagaggcaggagcagggagcgctactgagtttcagtttcgaggcggctttggccgcggcagaggccagcctccccagtag

SEQ ID NO: 80551 - DNA, 498 bp, Artificial Sequence
  derived and/or modified sequence
atgctgatgcccaagaagaacagaattgccatctatgagctgctcttcaaggagggcgtgatggtggccaagaaggatgtgcacatgcccaagcaccctgagctggccgacaagaatgtgcccaacctgcacgtgatgaaggccatgcagagcctgaagagccggggctacgtgaaggagcagtttgcctggaggcacttctactggtacctgaccaatgaaggcatccagtacctgcgggactacctgcacctgcccccagaaattgtgcctgccaccctgcggcgcagcaggcctgagaccggccggccccggcccaagggcctggagggggagaggcctgcccggctgaccagaggagaggccgaccgggacacctaccgccgctctgctgtgcccccaggagctgacaagaaggccgaggccggggccggcagcgccacagagttccagttccggggcggcttcggccggggccggggccagcccccccagtag

SEQ ID NO: 80552 - DNA, 498 bp, Artificial Sequence
  derived and/or modified sequence
atgctgatgcccaagaagaaccggatcgccatctacgagctgctgtttaaggagggggtcatggtagccaagaaggatgtacacatgccgaagcatccagaactcgccgacaaaaacgttccaaacttgcacgtcatgaaggccatgcagagtctgaagtcacgcggctacgtcaaggaacagtttgcatggaggcacttctactggtacctcaccaacgaaggcattcagtacctgcgagattacctgcacctacccccagaaatcgtgcccgcaaccttacgcagatctagaccagagaccggccgtccccggcctaagggacttgagggcgaaaggcctgccagactgacaaggggggaggcggatcgagacacctacagacggtccgctgtccctcctggggctgataagaaagcggaagcgggggccgggagcgctacagagtttcagttccgcggcggtttcggccggggacgtggacagcccccgcagtag

SEQ ID NO: 80553 - DNA, 498 bp, Artificial Sequence
  derived and/or modified sequence
atgctcatgcccaaaaaaaaccggatagccatttatgagcttctgttcaaggagggagtgatggtggctaaaaaggatgtacacatgcctaaacaccctgaattggccgataagaacgtgccgaatctgcatgtgatgaaggccatgcagtctctcaagagcagaggttatgtcaaagaacagttcgcgtggcgacacttctattggtacctgacaaatgaggggattcaatacctgcgcgactacttacatctgccacctgaaattgtgccagcaactctgaggaggagccggcctgagaccgggaggccacggccaaagggactcgaaggcgagcgcccagcccgtctgacacgtggcgaagccgacagggacacatatcgcagatcggctgtgcccccaggtgcagataaaaaggccgaagctggcgcaggcagcgccaccgagtttcaatttagagggggattcgggcgagggaggggccagccaccacagtag

SEQ ID NO: 80554 - DNA, 644 bp, Artificial Sequence
  derived and/or modified sequence
ggcggggggcgggtccacgccagcccggaagagacgcagcaccgcgcatgctccttcctttccagccccggtaccggaccctgcagccgcagagatgttgatgcctaagaagaaccggattgccatttatgaactcctttttaaggagggagtcatggtggccaagaaggatgtccacatgcctaagcacccggagctggcagacaagaatgtgcccaaccttcatgtcatgaaggccatgcagtctctcaagtcccgaggctacgtgaaggaacagtttgcctggagacatttctactggtaccttaccaatgagggtatccagtatctccgtgattaccttcatctgcccccggagattgtgcctgccaccctacgccgtagccgtccagagactggcaggcctcggcctaaaggtctggagggtgagcgacctgcgagactcacaagaggggaagctgacagagatacctacagacggagtgctgtgccacctggtgccgacaagaaagccgaggctggggctgggtcagcaaccgaattccagtttagaggcggatttggtcgtggacgtggtcagccacctcagtaaaattggagaggattcttttgcattgaataaacttacagccaaaaaaccttaa

SEQ ID NO: 80555 - DNA, 498 bp, Artificial Sequence
  derived and/or modified sequence
atgctgatgcccaagaagaacagaatcgccatctacgagctgctgttcaaggagggcgtgatggtggccaagaaggacgtgcacatgcccaagcaccccgagctggccgacaagaacgtgcccaacctgcacgtgatgaaggccatgcagagcctgaagagcagaggctacgtgaaggagcagttcgcctggagacacttctactggtacctgaccaacgagggcatccagtacctgagagactacctgcacctgccccccgagatcgtgcccgccaccctgagaagaagcagacccgagaccggcagacccagacccaagggcctggagggcgagagacccgccagactgaccagaggcgaggccgacagagacacctacagaagaagcgccgtgccccccggcgccgacaagaaggccgaggccggcgccggcagcgccaccgagttccagttcagaggcggcttcggcagaggcagaggccagcccccccagtag

SEQ ID NO: 80556 - DNA, 582 bp, Artificial Sequence
  derived and/or modified sequence
atggacagcaccctggccgtgcagcagtacatccagcagaacatcagagccgactgcagcaacatcgacaagatcctggagccccccgagggccaggacgagggcgtgtggaagtacgagcacctgagacagttctgcctggagctgaacggcctggccgtgaagctgcagagcgagtgccaccccgacacctgcacccagatgaccgccaccgagcagtggatcttcctgtgcgccgcccacaagacccccaaggagtgccccgccatcgactacaccagacacaccctggacggcgccgcctgcctgctgaacagcaacaagtacttccccagcagagtgagcatcaaggagagcagcgtggccaagctgggcagcgtgtgcagaagaatctacagaatcttcagccacgcctacttccaccacagacagatcttcgacgagtacgagaacgagaccttcctgtgccacagattcaccaagttcgtgatgaagtacaacctgatgagcaaggacaacctgatcgtgcccatcctggaggaggaggtgcagaacagcgtgagcggcgagagcgaggcctag

SEQ ID NO: 80557 - DNA, 381 bp, Artificial Sequence
  derived and/or modified sequence
atgaccgccaccgagcagtggatcttcctgtgcgccgcccacaagacccccaaggagtgccccgccatcgactacaccagacacaccctggacggcgccgcctgcctgctgaacagcaacaagtacttccccagcagagtgagcatcaaggagagcagcgtggccaagctgggcagcgtgtgcagaagaatctacagaatcttcagccacgcctacttccaccacagacagatcttcgacgagtacgagaacgagaccttcctgtgccacagattcaccaagttcgtgatgaagtacaacctgatgagcaaggacaacctgatcgtgcccatcctggaggaggaggtgcagaacagcgtgagcggcgagagcgaggcctag

SEQ ID NO: 80558 - DNA, 582 bp, Artificial Sequence
  derived and/or modified sequence
atggactctacattagcggtgcagcaatacatacagcagaacatcagagccgactgctctaacattgacaagatcctagaaccgccggaaggacaggatgagggggtatggaaatacgaacatttacgtcaattttgtttggagctcaatgggctcgccgtgaagcttcaatctgaatgtcacccagatacatgtacacagatgacagccactgaacagtggatcttcttgtgcgcagcccacaaaacccctaaagaatgccccgcgatagactataccaggcatacccttgacggcgccgcctgtctgttaaattcaaataagtactttccttcgagagtaagcatcaaggaaagtagtgttgccaaattaggctctgtgtgtcgcagaatctatcgaatcttcagccatgcatacttccaccacagacagatcttcgatgaatacgagaacgaaactttcctatgccaccgattcacaaagtttgtaatgaaatacaacttgatgagcaaagataacctcattgttcctatactggaggaggaggttcagaatagtgtgtcaggggagtctgaagcttag

SEQ ID NO: 80559 - DNA, 381 bp, Artificial Sequence
  derived and/or modified sequence
atgacagcaacagaacaatggatattcctgtgcgcagctcataaaacccccaaggagtgtcctgccatcgattacaccagacatacactggatggagccgcttgtctccttaactccaataagtatttccctagccgcgtttctattaaagaatcctcagtggcaaagttagggtccgtatgccggcgcatctatagaatcttcagccatgcctatttccaccaccgtcagatatttgatgagtatgagaacgagacttttctttgtcatagattcacaaaatttgtcatgaaatacaatctgatgagcaaggacaacctgatcgttcctatcctggaagaggaagtgcagaatagcgtgagcggcgaaagcgaggcttag

SEQ ID NO: 80560 - DNA, 582 bp, Artificial Sequence
  derived and/or modified sequence
atggacagcaccctggccgtgcagcagtacatccagcagaacatccgggctgactgcagcaacatcgacaagatcctggagcccccagagggccaggatgaaggagtgtggaagtatgagcacctgcggcagttctgcctggagctgaatggcctggccgtgaagctgcagagcgagtgccacccagacacctgcacccagatgacagccacagagcagtggatcttcctgtgtgccgcccacaagacccccaaggagtgcccagccatcgactacaccaggcacaccctggatggagctgcctgcctgctgaacagcaacaagtacttccccagccgggtgtccatcaaggagagctctgtggccaagctgggctctgtgtgccgccgcatctaccgcatcttcagccacgcctacttccaccaccggcagatctttgatgaatatgaaaatgagaccttcctgtgccaccgcttcaccaagtttgtgatgaagtacaacctgatgagcaaggacaacctgattgtgcccatcctggaggaggaggtgcagaacagcgtgtctggagagagcgaggcctag

SEQ ID NO: 80561 - DNA, 381 bp, Artificial Sequence
  derived and/or modified sequence
atgacagccacagagcagtggatcttcctgtgtgccgcccacaagacccccaaggaatgtcctgccatcgactacaccaggcacaccctggatggagctgcctgcctgctgaacagcaacaagtacttccccagccgggtgtccatcaaggagagctctgtggccaagctgggctctgtgtgccgccgcatctaccgcatcttcagccacgcctacttccaccaccggcagatctttgatgaatatgaaaatgagaccttcctgtgccaccgcttcaccaagtttgtgatgaagtacaacctgatgagcaaggacaacctgattgtgcccatcctggaggaggaggtgcagaacagcgtgtctggagagagcgaggcctag

SEQ ID NO: 80562 - DNA, 582 bp, Artificial Sequence
  derived and/or modified sequence
atggacagcaccctggccgtgcagcagtacatccagcagaacatccgcgcagactgtagcaatattgacaagatactggaacccccggaaggccaggatgagggagtgtggaagtacgagcacttgcggcagttttgtcttgagctgaacggcttggctgtaaaactgcagtcagaatgtcatccagacacctgcacccaaatgacagccactgagcagtggatttttttgtgcgcagcacacaagactcccaaggaatgtcccgcaatcgattatacacggcataccctggacggggccgcatgcctgctgaactctaacaagtattttccatcccgcgtgtctattaaggagtctagcgttgccaaattggggagcgtctgcaggcggatttacaggattttctcccacgcctattttcaccataggcaaatatttgatgagtatgagaacgagacttttctgtgtcaccggttcacaaagtttgttatgaagtataacttgatgagcaaagacaaccttatcgtacccatcctcgaagaggaagtccaaaacagtgtctcaggtgagtctgaagcatag

SEQ ID NO: 80563 - DNA, 381 bp, Artificial Sequence
  derived and/or modified sequence
atgaccgccaccgagcagtggatcttcctgtgcgccgcccacaagacccccaaggagtgccccgccatcgattatactcggcatactctggacggtgctgcctgcctgcttaattctaataagtatttcccctcacgagtgagcatcaaagaatcaagtgtggcaaagttagggtccgtctgcaggcgcatttatagaatcttctcccacgcatactttcatcacagacaaatcttcgatgagtatgagaacgagacttttctatgtcatcgtttcaccaaatttgtaatgaagtataacctgatgagcaaggacaatttaatcgtgcctatcctggaagaagaggtgcagaattccgtctctggtgagtccgaggcctag

SEQ ID NO: 80564 - DNA, 829 bp, Artificial Sequence
  derived and/or modified sequence
cgcaggttctatagaatttgccaagactgctggcctgttttctaccctgattccttaggtggcttctgggacagaattacggttctctaagtatttgcttgcagtatattcaacagaacataagagcagattgctccaatattgacaaaattcttgaaccacctgaaggccaagatgaaggtgtgtggaagtatgaacatttaaggcagttctgccttgagctaaatggacttgctgtcaaacttcagagtgaatgccatccagatacttgcactcaaatgacagcaactgaacaatggatttttctttgtgcagctcataaaactccaaaagagtgtcctgctatagactatactagacacacacttgatggtgctgcatgtcttctgaatagcaataaatattttcccagcagggttagcataaaggaatcatctgtagcgaaactaggatcagtatgccgtaggatttacagaatattttcacatgcttattttcatcatcggcagatatttgatgaatatgaaaatgaaacatttttgtgtcatcggtttactaagtttgtgatgaaatacaatttgatgtccaaggataacctgattgtaccaattttagaagaggaagtacagaattcagtttctggggaaagtgaagcatgaagggaatcataggaaaaatgtactgatcatataattaacattatgtactgtatatatcattttagacacatcaatcatgtatccatattatagcttctttgtttagtataggtttttgtatgctgggtttgccttttaaaatgggaaatactttttaagttattcataag

SEQ ID NO: 80565 - DNA, 582 bp, Artificial Sequence
  derived and/or modified sequence
atggattcgaccttggcagtgcagcaatatatccagcagaacatcagagcagattgctcgaatattgataagatcctcgagcccccagagggccaagacgaaggagtatggaagtatgagcatctcaggcaattctgcctcgaacttaacggacttgcagtgaagctccagtctgagtgtcaccctgacacgtgcacgcagatgaccgctactgagcagtggatattcctgtgtgccgctcataagactccgaaggagtgccccgctatcgactacacccgacacactctggatggagccgcttgcctgctcaactctaataagtacttcccctccagagttagcatcaaagaaagttctgtggctaagctgggctcagtttgtagaagaatttatcgaatcttctcccacgcatactttcaccacagacagatctttgatgagtatgagaacgaaacattcttatgccacaggtttaccaagttcgtcatgaagtacaacctgatgagtaaggataatctgattgtcccaattctggaagaggaggttcagaactctgtctcgggcgagtctgaggcctag

SEQ ID NO: 80566 - DNA, 381 bp, Artificial Sequence
  derived and/or modified sequence
atgacagcaaccgagcagtggatattcctttgtgccgctcataaaaccccaaaggaatgccctgctatcgattacacaaggcacaccctggatggcgctgcatgcctattaaatagcaacaagtattttcctagtcgagtgtcaatcaaagaaagttcagtggcaaaattaggtagcgtgtgcaggagaatttatagaattttttcgcacgcatatttccaccataggcagatatttgacgagtacgaaaatgagacattcctttgccaccgctttactaagtttgtgatgaagtacaatctgatgagtaaggataatctaattgtcccaatcctggaggaagaagtccagaattcagtctcgggagaaagcgaagcctag

SEQ ID NO: 80567 - DNA, 582 bp, Artificial Sequence
  derived and/or modified sequence
atggattctacactagcagtgcagcaatacatccagcaaaatataagggcagattgtagtaatattgataaaattcttgaaccaccagagggccaggacgagggggtgtggaagtacgagcatctgcgccaattctgcttggagctgaacggtctcgcagtgaagctgcagagtgagtgtcatccagacacgtgtacccagatgaccgcaaccgagcaatggatttttctgtgcgcagctcacaaaacccccaaggagtgcccggccatcgattacacgcgacatactcttgacggtgcagcttgcctgttaaattcaaacaaatactttcccagccgagtgtccatcaaagagtcaagcgtggcgaaattaggctcagtgtgcaggcggatatacaggatcttttcccacgcatacttccaccatcgccagattttcgacgaatatgagaatgaaacattcctgtgtcatcgattcacaaagttcgtcatgaagtataatctcatgtccaaggacaatctgattgtccccattttggaggaggaggttcaaaacagcgtcagtggggaatctgaagcgtag

SEQ ID NO: 80568 - DNA, 582 bp, Artificial Sequence
  derived and/or modified sequence
atggacagcaccctggccgtgcagcagtacatccagcagaacatccgggccgattgctctaacatagacaagatcttggagcccccggagggccaggacgagggagtgtggaaatacgagcatttaaggcagttttgtctggaactgaatgggctcgccgtgaaactacagtcagagtgtcatcctgatacatgtacgcagatgacagccactgaacagtggatctttctttgtgcagcacacaaaacgccaaaagaatgccccgcaatcgactacactagacatactttagacggagcagcttgtctgctcaatagtaacaaatacttcccaagcagagttagcattaaagagtcttccgtggctaagctcgggagcgtgtgccgacgcatctaccgaatcttctctcacgcatactttcaccatcgacaaatattcgacgagtacgaaaacgaaaccttcttgtgccaccgcttcactaaattcgttatgaagtacaacctcatgtctaaggacaacctgatcgtgccaatccttgaggaagaagtgcaaaattcggtgtccggtgagtctgaagcttag

SEQ ID NO: 80569 - DNA, 582 bp, Artificial Sequence
  derived and/or modified sequence
atggattcgactttagctgtgcaacagtatatccagcagaacattcgagccgattgttctaacattgataaaatcctcgagccaccggaaggccaggacgagggcgtgtggaagtatgaacacctcagacaattttgcttagaactgaatggactggctgtgaagctacagtcagagtgccaccctgatacctgcactcagatgacagctactgagcagtggatcttcttatgcgccgctcataagacgcctaaggagtgcccggctattgattacacacggcatacactggacggggctgcttgtctcttgaatagtaacaagtatttcccatctagggtcagcatcaaggaaagtagcgtcgccaagctcggcagtgtgtgcagacggatctacaggatcttcagccacgcgtatttccaccaccgtcagatcttcgacgagtacgaaaacgaaactttcctatgccacaggttcactaagtttgtgatgaagtataatttgatgtctaaggacaacctgatcgtgccaatactggaagaagaagtacaaaatagcgtttcaggcgaaagcgaagcatag

SEQ ID NO: 80570 - protein, 180 aa, Artificial Sequence
  derived and/or modified sequence
MLGLCGQRLPAAWVLLLLPFLPLLLLAAPAPHRASYKPVIVVHGLFDSSYSFRHLLEYINETHPGTVVTVLDLFDGRESLRPLWEQVQGFREAVVPIMAKAPQGVHLICYSQGGLVCRALLSVMDDHNVDSFISLSSPQMGQYGDTDYLKWLFPTSMRSNLYRICYSPWGQEFSICNYWH

SEQ ID NO: 80571 - protein, 180 aa, Artificial Sequence
  derived and/or modified sequence
MLGLWGQRLPAAWVLLLLPFLPLLLLAAPAPHRASYKPVIVVHGLFDSSYSFRHLLEYINETHPGTVVTVLDLFDGRESLRPLWEQVQGFREAVVPIMAKAPQGVHLICYSQGGLVCRALLSVMDDHNVDSFISLSSPQMGQYGDTDYLKWLFPTSMRSNLYRICYSPWGQEFSICNYWH

SEQ ID NO: 80572 - protein, 93 aa, Artificial Sequence
  derived and/or modified sequence
MLGLCGQRLPAAWVLLLLPFLPLLLLAAPAPHRASYKPVIVVHGLFDSSYSFRHLLEYINEGALCAGLCFLSWMITTWILSSPSPLHRWDSME

SEQ ID NO: 80573 - protein, 180 aa, Artificial Sequence
  derived and/or modified sequence
MLGLWGQRLPAAWVLLLLPFLPLLLLAAPAPHRESYKPVIVVHGLFDSSYSFRHLLEYINETHPGTVVTVLDLFDGRESLRPLWEQVQGFREAVVPIMAKAPQGVHLICYSQGGLVCRALLSVMDDHNVDSFISLSSPQMGQYGDTDYLKWLFPTSMRSNLYRICYSPWGQEFSICNYWH

SEQ ID NO: 80574 - DNA, 909 bp, Artificial Sequence
  derived and/or modified sequence
atgttaggactatgtggtcagagactgcccgcagcatgggtcctgttgttactccccttcctaccgttactgctcttagccgccccggcacctcaccgtgctagctacaagcctgtcatcgtcgtccacggtttgtttgactcatcttatagttttagacacctcctggagtacattaatgaaacacaccccgggactgtggtgaccgtgctagatcttttcgatgggagggaatccctgcggccgctgtgggagcaggtccagggcttccgcgaggctgtggtcccaattatggccaaggctcctcagggtgtccacctgatttgttacagccagggcggacttgtctgtcgagcccttctgagcgtgatggatgatcacaacgtggacagcttcatttcactgtccagcccccagatggggcagtacggggatacagactacctgaaatggcttttccctacaagtatgcggagtaacctgtatagaatttgctattctccctggggtcaggagttctctatttgcaactactggcacgatcctcaccatgacgacctatacctcaatgccagtagcttcctcgccctgatcaacggcgagcgggatcatcccaatgctaccgtgtggagaaagaacttcctcagagtgggacatctagttttgattgggggtccagacgatggcgtgattaccccatggcagagctctttcttcggcttttatgatgcgaacgaaacggttctggagatggaggagcagctggtctaccttagggattccttcggcctcaagactctcctcgccagaggcgcaatcgtccgttgtcccatggccggcatctcgcataccgcctggcactccaacaggaccctatatgagacttgcatcgagccatggttgagctag

SEQ ID NO: 80575 - DNA, 909 bp, Artificial Sequence
  derived and/or modified sequence
atgctgggcttgtgtggccagcgacttcctgctgcttgggttttgttgctactgccctttcttcctttactgctcctcgcagctcccgctccccatagggcctcctacaagcctgtgattgttgttcacgggctgtttgactcttcctacagctttcggcaccttttggagtatattaacgagactcatccaggcaccgttgtgaccgtactcgacctgtttgatggtagagagagcctgcgaccactctgggagcaagtgcaagggttccgggaggccgtggtaccaatcatggctaaggccccccagggcgtgcacttgatttgctactcgcagggggggctggtctgtagagcactgctcagtgtgatggatgatcataacgtggattcatttataagcctgagtagcccccagatgggtcaatacggcgacaccgactacctgaagtggctcttcccgactagcatgcgaagcaacctctatcggatatgttacagcccttggggtcaggaattctctatttgcaactattggcatgacccccaccacgatgatctgtatctgaatgcctctagcttcttggctctgatcaatggtgagcgagaccaccctaatgcgaccgtttggcgaaagaattttctccgtgtcggacacctagtgcttatcggaggaccggacgacggagtgataacaccttggcaatcatcctttttcgggttctacgatgccaatgagactgtgttggagatggaagagcaactggtgtacctgcgggattcattcggactcaaaactctgttggcacggggggcaatcgttcggtgtcccatggcaggaatcagccacacggcatggcactcaaatcgtactctgtatgagacatgtatagaaccttggctcagttag

SEQ ID NO: 80576 - DNA, 909 bp, Artificial Sequence
  derived and/or modified sequence
atgcttgggctttgcggccagcggcttcctgcagcttgggtactgctgcttctcccgtttctgcccctgctcctactggccgcccccgcccctcatagagcctcctataagccagtgattgtggttcatgggctgtttgacagctcttactctttccgccacctcttagagtatatcaacgagacacatccagggacagtggttacggtccttgatctgttcgacggaagggagtcactgcggcctttatgggaacaggtccaaggcttccgggaagccgttgttcctattatggctaaagcaccgcagggagtgcacctgatctgttatagtcagggcggcctggtgtgtcgggccttactcagcgtcatggacgatcataatgtggactccttcattagcctcagctcacctcagatgggccagtatggcgatactgactacctcaaatggttgtttccaactagtatgaggagcaatctgtatcgaatttgttactccccctggggccaggagttcagcatctgtaattattggcacgacccccatcacgatgatctgtatttaaacgcctccagctttctggcacttattaatggagaaagggaccacccgaacgccaccgtctggaggaagaacttcctgcgcgtcgggcaccttgttctcattggaggtcccgacgacggtgtcatcacaccatggcagagctcattcttcggtttttatgacgccaatgaaacagtgcttgagatggaggaacaactggtctacctgagggacagctttgggttgaagacgctcctggcccgaggagccattgtccgctgtcccatggctggcattagccatacagcctggcacagcaataggacactgtatgaaacttgtattgagccatggctctcttag

SEQ ID NO: 80577 - DNA, 909 bp, Artificial Sequence
  derived and/or modified sequence
atgttaggcctctgcggccagcgacttccggctgcttgggtcctcttgcttcttccttttctgccattactgcttctggccgctccagcaccccaccgtgcctcttataagcccgttattgtggttcacgggttgtttgatagtagttacagctttaggcacctcttggaatatatcaatgaaacacaccctgggaccgtcgtgacagtgttggatctattcgatgggagggaaagcctccgacccttgtgggagcaggtgcaagggtttcgcgaggccgtggttccaattatggctaaagctcctcaaggagtacacctgatctgctatagccagggagggctcgtctgccgagccttactgtcagtgatggacgaccataatgttgactcctttatcagcttgagcagccctcagatggggcagtatggcgatacagattacttgaaatggctgtttcctacctcgatgaggtccaacctctaccggatctgttattctccctggggccaggagttctccatctgtaattactggcatgatccccaccatgacgatctgtacctgaacgcgagtagtttcctagccctgataaacggcgagcgggatcaccccaatgcaactgtctggcgaaagaacttcctgcgagtgggccacctcgtgctgattggagggccagacgatggagtgatcaccccatggcaaagctctttttttggcttctacgatgccaatgagacggtgctcgaaatggaggagcagctcgtatacttgcgggacagtttcggccttaagacactgctggccagaggggccatcgtcaggtgccccatggccggtattagccacaccgcctggcactcaaaccgcactctgtacgaaacttgcatcgagccgtggctttcctag

SEQ ID NO: 80578 - DNA, 909 bp, Artificial Sequence
  derived and/or modified sequence
atgttaggcctctggggacagcgccttccagcagcgtgggtcctgctcctactcccttttctgcctctcctcctgctggccgcacccgcccctcatcgggaaagctacaagccggttattgtggtccacggtctttttgattctagctactcctttagacacctacttgagtacataaatgagacacaccccggcacagtagtgaccgttcttgacctctttgatggccgtgagtctctcaggcctctctgggaacaggttcaggggtttcgggaggccgtagtaccaataatggccaaggctccgcagggtgtccatcttatctgctatagtcagggtggactggtctgtcgcgccctcctctccgtcatggacgatcataacgtggattccttcattagtctatcctctcctcagatgggacagtatggggacacagattatctgaagtggctgtttccaacgtctatgagatccaacttatatagaatatgctactcaccgtggggacaagagttcagcatttgtaactattggcatgacccccatcatgacgacctctacctcaatgcttccagtttcctggccttaattaacggggagcgtgaccacccgaatgccacggtatggagaaagaattttttgcgagtggggcacctcgtgctgattggcggacccgacgacggggtgatcaccccgtggcagtccagtttctttggcttctacgatgcaaacgagacagtgttagaaatggaggagcagctggtgtacttacgcgacagttttggcctgaagaccctactcgctcgcggcgccatcgtccggtgccctatggcagggatctctcacaccgcatggcacagcaacaggactctctacgaaacatgtattgagccttggttgagctag

SEQ ID NO: 80579 - DNA, 909 bp, Artificial Sequence
  derived and/or modified sequence
atgctggggttgtggggacagagactgcccgccgcctgggtgctcctgctgctgccattcttgcctttgctcctcctggctgcccccgctccccaccgggagtcgtacaagcccgttatagtcgtccacggcttgttcgattcatcctatagcttcagacacctgctggagtacatcaatgaaacccatccaggcacagtggtaaccgtactcgacctatttgatggtcgcgaatcactgcgcccgctctgggaacaggtgcaggggttccgagaagccgtggtgccgattatggcaaaggccccgcagggcgtgcatcttatctgctatagtcagggaggattagtttgtcgagcccttctgtccgtgatggacgaccataatgtggactcctttatctccttgtcctcaccacagatgggtcaatacggcgatacagattacctgaagtggctatttcctacatctatgaggtccaacctataccggatttgttacagtccttggggccaggaatttagcatttgtaactattggcatgatccccatcacgacgacctgtacttaaatgcctcatcatttctggccctaatcaatggagagagagatcaccctaacgccaccgtttggagaaagaactttctccgggtgggccacttggtgcttatcggcggacccgacgatggggttattacaccctggcaaagtagcttctttggcttttatgatgcaaacgaaaccgtgttggaaatggaggaacaacttgtatacctgagggattcttttggcctgaaaaccctcctcgctaggggcgccatagtcaggtgccccatggctggaatctctcacaccgcctggcactctaatcgaaccctgtatgagacttgtatcgaaccatggctctcatag

SEQ ID NO: 80580 - DNA, 909 bp, Artificial Sequence
  derived and/or modified sequence
atgctggggctgtgggggcaaagacttcccgccgcctgggtattgttgctgttaccattcctcccactcctgttactggcggccccagctccccatagagaatcctacaaacccgttatcgtggtccacggcttattcgatagcagttattcattcagacatttgctcgaatatatcaatgaaacgcaccctgggaccgtagttaccgtgcttgacctgtttgacggccgcgaaagtctgcggccgttatgggaacaggtgcagggttttagagaagctgtggtccccattatggctaaagccccacagggcgtgcacctcatttgttattcgcagggcggccttgtgtgtcgcgccctgctcagcgttatggatgaccacaatgtggatagctttattagcctgtcatccccgcagatgggtcagtacggggatacagactatttgaagtggctatttcctactagcatgagatccaacttgtatcgtatttgttattccccatggggacaggaattttcgatttgtaactattggcacgacccccaccatgacgacctttatcttaacgccagctccttcctcgccttgatcaatggcgagagggaccaccctaacgctacagtgtggagaaagaactttctcagggtaggacatttggtgctgatcggtggtccagatgacggggtgatcaccccttggcaatcatcattcttcggattctacgatgctaatgagacagttctggagatggaggagcagctggtgtacctgcgagatagctttgggctgaaaaccctacttgctagaggtgcaattgttcggtgtccaatggccgggatctcccacacagcttggcactctaaccgcaccctctatgagacctgtattgaaccctggcttagttag

SEQ ID NO: 80581 - DNA, 909 bp, Artificial Sequence
  derived and/or modified sequence
atgctcggactatggggacaaaggctccctgccgcatgggtccttttactcctaccgttccttccactactcctgttggcagcccctgcccctcaccgggcctcatataaacctgtaatcgtagtacatggattgtttgacagctcctacagtttccggcatctgctggagtacatcaacgagacacacccagggacagtggtgacagtcctggatctgttcgatgggagagaaagtctgaggcctctgtgggaacaagtacaggggttccgcgaggctgtcgtacccatcatggcgaaagctccccagggtgtgcaccttatctgctattctcagggaggactagtgtgcagggccctgctgtctgtgatggacgatcacaatgtagattccttcatttctttgagtagcccgcagatgggccagtatggagataccgactacttaaaatggctgtttcccacttcgatgcgcagtaatctctatcgtatctgttactcaccctggggtcaggagttcagtatctgcaattactggcatgacccccaccacgatgatttgtatcttaacgcgagtagcttcctcgctctcattaatggagaaagggaccaccccaatgctaccgtttggcggaaaaatttcctccgagtggggcatctggtcttgatcggaggccccgatgacggtgtgattaccccctggcagtcaagtttcttcggattctacgatgcaaatgagacggttcttgagatggaggagcagctcgtgtatctcagggattcctttggtctgaagaccctgctggcgcggggagcaatcgtaagatgccctatggctggcataagccacactgcctggcacagcaacagaacactttacgagacttgcatagaaccctggctatcttag

SEQ ID NO: 80582 - DNA, 909 bp, Artificial Sequence
  derived and/or modified sequence
atgctcggtctgtggggacagcgcctccccgctgcatgggtgctgttacttctccctttcctgcctctgctgctgttggctgctccggccccacatcgcgcctcttacaaaccagtcattgtggttcacggcctgtttgactcctcatactccttccgccacttactggagtatatcaatgaaacccatcccggtacagtggtgactgtgcttgacctctttgacggcagggagtcactgcggcccctctgggagcaggtccaaggattccgggaggctgtggtgcccattatggcaaaagctcctcagggggttcatctgatatgttattcccagggaggtctggtctgtcgcgctttgctaagtgtcatggacgaccacaatgtggatagcttcatcagtctaagtagcccacagatggggcaatatggagacactgattacctcaagtggctgttcccgacctccatgcggtcgaatctgtatagaatctgctactctccatggggccaagagttttcaatctgtaactactggcatgatccccaccatgacgacctctatcttaacgcaagctcattcctggctttaatcaatggcgagcgagatcatccaaacgccacagtgtggcggaaaaactttttacgcgtaggccatctagttctgataggcggcccagatgatggcgttattacaccatggcagtcaagcttctttggcttttacgacgcaaacgagacggtcctagagatggaggagcagctggtgtacctccgcgacagctttggcctaaaaacattgttggccagaggcgcaatagtgagatgtcctatggccggaatcagccacacggcctggcatagcaatcgaacactgtatgaaacctgcatcgagccatggctgagttag

SEQ ID NO: 80583 - DNA, 909 bp, Artificial Sequence
  derived and/or modified sequence
atgctcggcctctggggacagcgccttcctgcagcatgggtgctgctgctgctgccctttctccctttgctgctactggccgcccctgctccacatcgcgcgagttacaagcccgtgatcgtcgtgcatggcctctttgactcctcgtactcgttccggcatctattagagtacatcaacgaaactcacccaggtaccgtcgtaactgtgctagacctctttgacgggagagaaagcctccgcccactttgggagcaggtgcaggggttcagggaagctgtcgttcctatcatggctaaagctcctcagggtgttcacctcatctgttactcgcagggggggctcgtgtgtcgcgccttgctgtccgtaatggacgatcacaatgtggatagctttatctccctctcatctccacagatgggccagtatggcgacaccgattacttgaaatggttgtttcccacttccatgcgctcaaacctttacaggatctgctacagcccatgggggcaggaattttcgatctgtaactattggcacgacccccatcacgacgatttatatctgaatgcttcatctttccttgcgctgattaacggggaacgggaccaccccaacgctaccgtgtggcgaaagaactttctgagagtgggtcatctggtgctaatcgggggccccgatgatggcgtgatcaccccctggcagagttcgtttttcggattttacgatgctaacgagactgtgctcgagatggaagagcagctcgtgtaccttcgggattcttttgggctgaagactctgctagctcggggggccattgtaaggtgtcctatggccggtatctcccacacagcttggcacagtaataggaccctgtacgagacctgcatcgagccctggcttagctag

SEQ ID NO: 80584 - DNA, 282 bp, Artificial Sequence
  derived and/or modified sequence
atgctcgggctgtggggccagaggctgccagctgcatgggtgttgcttttgctcccctttcttccattgctcctgctggccgcgcctgcccctcatcgggccagttacaagcctgtgatcgtcgttcatggtctttttgactcatcttacagtttccgtcatctccttgagtatatcaatgagggggccctgtgtgctggcttgtgcttcctttcttggatgatcacaacttggattttgagcagtccgagtcctctacacagatgggactccatggaatag

SEQ ID NO: 80585 - DNA, 543 bp, Artificial Sequence
  derived and/or modified sequence
atgctcgggctatgtggacagcggctgcctgcagcctgggtgcttctgctcctgccatttcttcctctcctgctgctggcagctcctgctccacatcgtgccagttacaaacctgttatcgtagtccacggtctgttcgattccagttacagcttccgccatttgttggaatacatcaatgaaacgcatccggggactgtggtcactgtgttagatctcttcgacgggagggagtccctgagacccctctgggaacaggtgcaaggatttcgagaggccgtggtccccattatggcgaaggccccacagggcgttcatctcatctgttatagccagggtggcctggtgtgcagggctttactatccgttatggacgaccataacgttgactctttcatttccttgtccagtccacaaatgggccagtacggggatacagattatctcaagtggctcttccctacatccatgcgttctaatctgtatcggatctgttactccccttggggacaggaatttagtatttgtaactattggcactag

SEQ ID NO: 80586 - DNA, 603 bp, Artificial Sequence
  derived and/or modified sequence
atgctcggcctctggggacagagactccctgcagcctgggtgctcctgctgctgccattcctgccgctcctgctgctagcagcccccgcaccacatcgtgagtcatacaagcctgtgatcgtagtgcacggcctgtttgattcaagttattcttttaggcatctgctggaatatatcaatgagactcacccaggtaccgtcgtgaccgtactcgacctgttcgacggcagggaaagtcttcgacccttgtgggagcaggtccaggggttcagagaggctgttgttcccattatggccaaggctccacagggagtgcacctgatatgttactctcagggtggccttgtgtgtcgagctctcctatctgtcatggacgatcataatgtggattctttcattagcctttctagcccacagatggggcaatacggagatacggactatctcaaatggctcttccccacatctatgcgaagcaacttataccgcatctgctactcaccatggggccaagaattctccatatgcaattactggcatgacccgcaccacgatgatctgtatttgaatgcctcttccttcctggctctaatcaacggatag

SEQ ID NO: 80587 - DNA, 477 bp, Artificial Sequence
  derived and/or modified sequence
atgcttgggctttggggacagcggctgcctgctgcatgggtgcttttactgctgccctttctccccctactgcttttagccgccccagcgccccaccgcgagtcctacaagcccgtcattgtcgtgcatgggctgttcgactcttcatatagcttccgccatttgttagaatatatcaatgaaatgggccagtatggggacaccgattaccttaagtggctgttccctacctccatgaggagtaatttataccgtatttgttatagcccatggggtcaggagtttagcatttgtaattactggcatgatcctcatcacgacgacctgtatttaaatgctagctcattcctcgccctcatcaatggagagcgtgaccatcccaacgcaacagtctggaggaaaaattttttgcgggttggccatctcgtcctgataggtggcccagatgatggagtgatcactccatggcagagttag

SEQ ID NO: 80588 - DNA, 543 bp, Artificial Sequence
  derived and/or modified sequence
atgcttgggctctgggggcaacggctgcctgccgcctgggtcctcctgctgctgccgtttttgcctctcctcctgctggccgcccccgccccacacagggcctcttacaagcctgtgatcgtggtacacggtttgttcgattctagctacagcttccggcacctgctggaatacattaatgaaacgcacccagggacagtggttaccgtactggatctgttcgatggccgggaatctctgcgacctctgtgggagcaggtccaggggttcagggaggccgttgtacccatcatggctaaggctccacagggcgtccacctcatttgttactcccagggcggcttagtatgcagagccttgttaagcgtaatggacgatcacaacgtcgattccttcatctcactgagctcaccccagatgggtcagtacggagacacagattacttgaaatggctctttcccacgagcatgaggagcaacctgtatcgaatttgctatagcccctgggggcaggagtttagcatctgcaactattggcactag

SEQ ID NO: 80589 - DNA, 477 bp, Artificial Sequence
  derived and/or modified sequence
atgctcggcctttggggccagaggctccctgccgcgtgggtgctgctgctcttgcctttcctgcctctgctcttacttgcagcacccgcaccccatagagcttcttataagcccgtgatcgtggtgcacggcttgttcgatagttcttacagcttccgccacctcttggagtacattaatgaaatggggcagtatggcgataccgactatctcaaatggctttttccaacttccatgcgctccaatctatataggatatgctatagcccgtggggccaggagttcagcatttgcaactattggcacgacccccatcacgacgatctctatcttaacgcaagctcatttttggccttaattaatggagagagagatcatcctaacgctacagtgtggcggaagaactttctgcgggttggtcatctggtgcttatcggcgggcccgacgacggcgtgattaccccatggcagtcatag

SEQ ID NO: 80590 - DNA, 543 bp, Artificial Sequence
  derived and/or modified sequence
atgttagggctctggggccagcgtctacccgcagcgtgggttttgttgctcctacccttcttacctctcctgctcttggcagccccagctcctcacagggctagctataaaccagtgatcgtcgtacacggcttgtttgatagttcctacagctttcggcatttactcgaatacatcaacgaaactcaccccggcacagtcgtgaccgtcctggacctgttcgacggccgggaatccttgaggccgctctgggagcaagtgcagggcttccgggaggccgtcgttcccattatggcgaaggccccccagggcgtgcatctaatctgttacagtcaggggggattagtctgtagggcactgctctctgtgatggacgaccacaacgtagacagctttatctccctgtcttctccccaaatgggccagtacggggatacggactatctaaagtggctgttcccaacgtccatgagatctaatttgtaccgtatctgttattccccatggggccaggaattttctatctgcaactattggcattag

SEQ ID NO: 80591 - DNA, 909 bp, Artificial Sequence
  derived and/or modified sequence
atgctgggcctgtggggccaacgccttccagctgcatgggttctcctactgctcccattcctcccactgcttctcctggccgcacccgccccgcacagagcctcctacaagcctgtcatcgtagtgcacgggctgttcgatagtagctatagtttcaggcatctcctggaatacataaatgaaacccaccctggcacagttgtgactgtccttgacctcttcgatgggcgcgagagccttcgcccgctttgggaacaggttcagggattcagagaggctgtggtgccgattatggcgaaggcacctcagggtgtccaccttatttgttatagtcagggaggcctcgtgtgtcgagccctgcttagcgtgatggacgatcacaatgtagattcattcatctccttgagttccccacaaatgggacagtatggcgatacggactacctgaagtggctgttcccaacgagcatgcggagtaacttgtataggatctgttacagcccctgggggcaggagttctccatttgcaactactggcatgacccccatcatgacgatttgtacctcaacgcctcaagcttccttgcgttgattaatggggagagggaccatccaaatgcgacagtatggcgaaagaattttctgagagtggggcacctggtcctgattggaggacctgatgacggtgtgatcactccctggcagtccagcttttttggcttctacgacgcgaatgagacagttcttgaaatggaagagcagctagtgtaccttagagacagcttcggcctcaagacacttctcgcacggggcgcaattgttcggtgccccatggctggcatctctcacacagcatggcattctaataggaccttgtatgagacatgcattgaaccatggctcagctag

SEQ ID NO: 80592 - DNA, 909 bp, Artificial Sequence
  derived and/or modified sequence
atgctgggtctatgggggcagcgattgcccgcagcctgggtccttctgctgctgcctttccttcccctgttgttgctggctgcacctgccccacatcgagcttcctacaagccggtgatcgtagtgcacggtttgttcgattcctcatacagcttccgacatctgctagagtacataaatgagacccatccaggcacggttgtcacagtccttgatctattcgacggtagagaaagcctccgacctctgtgggagcaggtgcagggcttcagagaggctgtcgtgcccattatggcgaaggcaccacagggtgtccacctcatatgctactctcaaggaggcttggtgtgcagagccctgctttccgtgatggacgatcacaatgtggacagtttcatctccctgagcagcccccagatggggcaatatggcgacacagactacctgaagtggttattccccacatctatgagatcaaacctgtacagaatctgttactcaccctggggtcaggaattttcaatctgtaattattggcatgacccacaccacgatgatttgtatcttaacgcctccagcttccttgcactaatcaatggcgaacgcgatcacccaaatgcgactgtgtggcgcaagaacttcctccgcgtagggcacttagttctgattggcggtcctgacgacggagtgatcacaccatggcaaagttcatttttcggattctatgatgccaatgaaaccgtgttggaaatggaagaacaacttgtctaccttcgagatagttttggactaaagaccctcctcgcacgaggtgcaatcgtgcggtgtcccatggccgggatcagccacaccgcttggcattccaatcgaaccctgtacgagacatgcattgagccatggctgagttag

SEQ ID NO: 80593 - DNA, 282 bp, Artificial Sequence
  derived and/or modified sequence
atgctgggtctgtggggccagcgtcttcctgctgcatgggtgcttttgcttctcccattcctgccccttctattgctggcagcgcctgcccctcatagagccagctataaacctgtcattgtggtgcacggcctcttcgattccagctactccttccggcatcttttagaatatattaacgaaggggccttgtgtgccggcctgtgcttcctgagctggatgatcacgacttggatcctctcctcacccagcccactccacaggtgggactctatggagtag

SEQ ID NO: 80594 - DNA, 909 bp, Artificial Sequence
  derived and/or modified sequence
atgctgggcctctgggggcaaaggctccctgccgcctgggtcctccttttattgccttttttgccactgttgctgctcgccgcacctgcaccccaccgggcttcatacaaaccagtgattgttgtgcacgggctctttgatagctcctactcatttcgccatcttctggagtatattaatgagacccaccctggcactgtcgtaaccgttttagacttgtttgacgggcgtgagtcactccgacctctctgggagcaggtgcaagggttccgagaagctgtcgtacctatcatggcgaaggctccccaaggggtacacttaatatgctactctcagggcggtctggtttgccgcgctcttctctctgttatggatgaccacaatgtggactctttcatttccttgtcgtcccctcaaatgggccagtacggggacaccgactacctaaagtggttgtttccaacctcgatgaggtcaaatctgtacagaatctgttattctccatggggacaggagtttagtatttgcaactattggcacgatccccaccacgatgatctctatctgaatgcgtcaagtttcttggctctgatcaatggcgagcgagaccatccgaatgcaaccgtgtggcgtaaaaacttcctcagggtcggtcatctggtccttatcggcggtccagatgacggtgttatcacaccttggcagtcttctttttttgggttttacgatgccaacgaaaccgtgctcgagatggaagagcagctggtctacttacgggactctttcggattaaaaacactactggctcggggcgcaatcgtcagatgccctatggccgggattagtcacacagcctggcacagcaatagaaccctgtatgaaacttgcattgagccatggctgtcctag

SEQ ID NO: 80595 - DNA, 477 bp, Artificial Sequence
  derived and/or modified sequence
atgctcgggttgtgcggacagcgtctgcctgctgcttgggtgctcctactcctaccatttctccctctgctgctgctagccgccccagcccctcatagggcgtcttacaaacccgtgatcgtggtgcacggtctatttgacagctcttatagctttcgtcatctgctcgagtacataaatgagatggggcagtatggcgacacagattacctcaagtggttatttcccacttctatgcggagcaacctttacagaatttgttactcaccttgggggcaggaattttcgatctgtaactactggcacgaccctcaccacgacgacttgtacctcaatgccagcagctttctcgcattgatcaacggagaaagagaccatcctaacgccaccgtgtggcgcaagaatttcctgcgggtaggccatcttgtattaatcggagggcctgatgatggtgtgatcaccccctggcagtcctag

SEQ ID NO: 80596 - DNA, 711 bp, Artificial Sequence
  derived and/or modified sequence
atgcttggtctttggggccagagactcccagctgcctgggttctcctgctgcttccattcctacccctgctgctactagcggcaccagcccctcacagggaaagttacaaaccagtgattgtcgtgcatgggctcttcgactcctcttacagcttccgtcaccttttagagtatattaacgaaacacatcccgggactgtcgttactgtactggacttgtttgacggacgtgaatctttgcgccctttatgggagcaggttcagggattccgcgaggccgtagtgccaataatggctaaagctccacaaggggttcacctcatttgttactcacaaggaggacttgtgtgcagggctttactcagtgtgatggatgaccataacgtcgactcattcatatccctgagttcaccccaaatggggcagtacggcgataccgattatctgaagtggctcttcccaacgagtatgcgctcaaatctctaccggatctgttacagcccctggggacaggaattcagcatctgcaactactggcacgaccctcaccatgatgacttatatctgaacgccagctcattcctcgctctgattaacggtgagcgcgaccaccctaatgccaccgtttggcgtaagaactttctgcgagtgggccacctcgtacttattggcggcccagatgacggagtcataacaccttggcagtcatag

SEQ ID NO: 80597 - DNA, 543 bp, Artificial Sequence
  derived and/or modified sequence
atgctgggtctctgggggcagcgtctgcccgccgcgtgggtcctgctgctgctcccattcttacccctgctgctgctggcggctcccgcaccacacagagcaagctacaaaccggttatagtagtacacggtctgtttgatagctcctattcattccgtcatctactggagtatatcaatgagacacatccagggacagttgttacggtattagatctgtttgacgggagagagagtttgcgcccgctttgggaacaagttcagggattcagggaggccgtggtgcccattatggccaaggctccacagggggtccacctgatttgctattcccaaggaggtctcgtgtgcagagccctcctgtctgtgatggacgaccacaacgtagattccttcatctctcttagctcaccccaaatgggccagtatggcgacacagactacctgaagtggctatttcctacaagcatgcggagcaatctgtacaggatctgttactcaccatgggggcaagaattctcgatttgcaactactggcattag

SEQ ID NO: 80598 - DNA, 711 bp, Artificial Sequence
  derived and/or modified sequence
atgctcggcttgtggggacagagactacccgcagcctgggtactgttactgcttccattcctgccccttcttcttttagctgcacccgcacctcaccgcgagtcctacaagccagtcattgtcgtgcatgggctgtttgatagctcttattcttttcggcacctgctggaatacatcaatgagacccatcctggcactgtcgtcactgtcctcgacctattcgatggcagggaatcgctcaggccattgtgggaacaggtccaaggttttagagaggctgttgtgccgatcatggccaaagccccacagggcgttcacctgatttgctactctcagggcgggctggtgtgtagagccctgctgagcgtgatggatgatcacaatgtggacagtttcatctcactcagttcaccacaaatgggccagtacggagataccgattacctgaagtggctgttcccaacatccatgcggtcaaacctatatcggatctgttatagcccatgggggcaggagttctctatctgcaactactggcacgatcctcaccacgatgacctttacctgaatgcttcctccttcctggccctaatcaatggcgagagagatcaccccaacgccacagtgtggcggaagaactttctacgggttggacacttagtactcatagggggacccgatgatggtgtcattactccctggcagagttag

SEQ ID NO: 80599 - DNA, 603 bp, Artificial Sequence
  derived and/or modified sequence
atgctcggattatggggccagaggctgcctgcagcctgggtcttgctgctactgcctttcctgcctctgctgctgctggctgcccctgccccacacagagctagctataaacccgttatcgtggtccatggcctgttcgatagctcctactcttttaggcaccttctggaatacataaacgagacacaccccggtacggtggtgacagtactcgacctatttgacgggcgcgaaagcctgagaccactctgggagcaggtgcaagggttccgcgaggccgttgtgccgattatggccaaagcacctcagggggtccacctgatctgttacagtcaaggcggtctggtctgccgggctctgctaagcgttatggatgatcataatgtcgatagctttatcagcttgtcctccccccagatgggtcagtatggtgatacggactacctaaagtggctgttcccaaccagtatgcgctctaacctatacaggatttgttatagtccgtggggacaggaatttagcatttgcaattattggcatgaccctcaccatgacgacctgtacctgaacgcttcttcctttctggctcttattaacgggtag

SEQ ID NO: 80600 - DNA, 909 bp, Artificial Sequence
  derived and/or modified sequence
atgttgggcctctggggccagcgccttcctgcagcttgggtgctgctgttgttaccctttttgccgttactgttgctcgcggcccctgcccctcaccgcgcttcttataagccagtcattgtggtacacggcttattcgattcaagctactccttccgtcatctgttggagtacattaacgagactcaccccgggacagtcgtgacagtcctggaccttttcgacgggagagaaagtttgaggcccctgtgggagcaggtgcagggattcagagaggccgtggtcccaattatggccaaggctcctcagggggtgcacctgatctgttactcccagggcgggttggtatgtcgggcccttttatctgtgatggatgaccacaacgtcgattcatttatttccctatcctcgccgcagatgggacagtatggagataccgattatctgaaatggcttttccccacctcaatgcgttctaacctgtatcggatctgttattccccctggggtcaggaatttagtatctgcaattactggcacgatcctcaccacgatgatctttatctaaacgcttcatcttttctggcactgattaacggagagcgagaccaccctaacgccactgtctggcgcaaaaatttcttgagagtgggacacttagtgctaatcggcggacctgacgacggcgtcatcacgccctggcaatcctcattctttggcttttatgacgcaaatgagaccgtgcttgagatggaggagcagctcgtgtacctgagagattcgttcggactgaagacactgttagcgcgcggcgcaatcgtgcggtgccctatggccggtatttcccacacagcatggcactccaaccgtaccctttacgagacttgcattgagccttggcttagttag

SEQ ID NO: 80601 - DNA, 603 bp, Artificial Sequence
  derived and/or modified sequence
atgcttggactctggggccagcggcttcctgccgcatgggtgttactcctactgccctttctcccactcctcttgctggctgctcccgcccctcaccgagcctcttacaagcctgtgattgttgtgcacggtctcttcgacagttcgtattccttccgccacttactagagtacatcaatgagactcaccctggcacagtggttacagttctcgacctgttcgacggaagggagagtctgcggcccctttgggagcaagttcaggggttccgtgaagccgtcgtacccatcatggccaaagccccccagggcgtgcacctgatttgctatagccaggggggactggtctgcagggcactgttgtccgtgatggatgaccacaacgtcgactccttcattagtttatcttcaccccagatgggacaatatggcgacaccgactacctcaaatggctctttcccactagcatgaggtctaacctctaccgcatttgttactctccttggggccaggaattttctatatgtaactactggcacgacccccaccatgacgatctgtatttaaatgcatcttcatttttggccttaatcaacgggtag

SEQ ID NO: 80602 - DNA, 711 bp, Artificial Sequence
  derived and/or modified sequence
atgttgggcctctgggggcagagacttcccgctgcatgggtcctactccttctgcctttcctgcctctgctgcttctagctgctccagcccctcaccgcgagtcttataagcctgtgattgtcgtgcatggcctatttgacagcagctattcctttagacatctcttggaatatatcaacgagacacaccccggcaccgttgtgacagtgcttgacctttttgatggccgtgagtccttgcgccctctctgggaacaggttcaaggctttagagaagccgttgtccctatcatggctaaggccccacagggcgtccacctgatctgttactcgcaggggggactggtgtgcagagccctactgtctgtgatggacgaccataacgttgacagttttatctccttgagtagtccccaaatgggacaatacggtgatactgactacctgaaatggctgtttcctacttccatgcgttccaacttataccggatctgttactcgccatggggacaagagttctccatttgcaactattggcacgacccccatcacgatgatctttaccttaatgcctcatcctttttggccctaattaacggagaacgcgaccatcccaatgccaccgtttggaggaaaaatttcttacgggtgggccacctcgtgctgattggcggccctgacgatggtgtaatcacgccgtggcagagttag

SEQ ID NO: 80603 - DNA, 543 bp, Artificial Sequence
  derived and/or modified sequence
atgttggggctttggggacagagactccccgccgcctgggtccttctccttctacccttcctgcctctgctcctgctggccgccccagcccctcatcgggcttcctataagccagtgatagtggttcatggactcttcgactctagctacagttttagacatttacttgagtatattaatgagacacaccccggcacagtggtcactgttctggatttattcgacggcagagagtccctcagacctttgtgggaacaggtccagggctttcgggaagcagtggtgccgattatggcgaaagcccctcagggggtgcacctgatctgctactcgcagggagggctcgtgtgccgcgcactgctgagcgtgatggacgatcataatgtcgattccttcataagcctgtcaagtccccagatgggccagtatggcgatactgattacctgaaatggcttttccccacatctatgcggagcaatctgtacaggatttgctattccccatggggtcaagagttttcgatttgcaactactggcactag

SEQ ID NO: 80604 - DNA, 477 bp, Artificial Sequence
  derived and/or modified sequence
atgctggggctgtggggccagaggttgccagccgcatgggttctactccttcttccctttctgcccctgttgctgctggccgccccggcccctcatcgcgctagctataaaccagttattgttgtacatgggctgtttgatagcagctattccttccggcatctgcttgagtatatcaatgagatgggacaatacggtgacacggactatcttaaatggctatttccgacatcaatgcgtagtaacctgtataggatctgttatagcccatggggccaggagttcagcatttgcaactactggcatgacccccatcatgacgacctctaccttaatgcttctagcttcctggcactcatcaacggcgaaagagaccaccccaatgcaacagtgtggcgcaagaattttttgcgagtgggacacctggtcttgattggcggtcccgacgatggggtaatcactccttggcagagttag

SEQ ID NO: 80605 - DNA, 603 bp, Artificial Sequence
  derived and/or modified sequence
atgctcggcctgtggggccaacggttgcccgctgcgtgggtactgctacttctgcctttcttaccactcctgctgctggctgcccctgcacctcaccgagagtcgtacaagcctgtgatcgtggtccacggtctcttcgattctagctacagcttccgccatctcctagaatacattaatgagacacaccccggaacagttgtcacggtgctggacttatttgatggcagggagtccttaaggcccctctgggaacaagtacaggggtttcgagaggccgtcgtgccaattatggctaaggctcctcagggcgtccatttgatctgctactctcagggaggtctggtatgtcgtgctcttctttctgttatggacgaccacaatgtcgactcgttcatatccctatcatctccccagatgggacagtatggcgacacagactatctgaaatggttgttcccaacatcaatgagatctaatttatatcgcatttgctattccccttggggacaggagtttagtatctgcaactactggcacgatccgcaccatgacgatctttacctgaatgctagtagcttccttgcattgatcaacggctag

SEQ ID NO: 80606 - DNA, 603 bp, Artificial Sequence
  derived and/or modified sequence
atgctgggactttgcggccagaggctgcctgcggcttgggtcttgctgctattgccgtttctcccattacttctgcttgcagcccctgctccacaccgtgcaagctacaaacccgtgattgtagtgcatggcctctttgatagttcatattcatttaggcacctcttggaatatataaatgagacgcacccaggaacagtggtgaccgtgctggaccttttcgacgggagagaaagtctgcggcctttgtgggagcaggtacaaggattcagagaagccgtggtcccgattatggctaaggccccacagggagtgcacttaatttgttacagccagggcggactcgtgtgcagggcactgctctccgtaatggacgaccacaacgtggactcatttatcagcctgagtagcccacagatgggccaatacggagatactgactatctcaaatggctattcccaacctccatgcggagcaacttgtatagaatctgttatagtccgtggggacaggaattttcaatttgcaactactggcacgaccctcaccacgacgacttatatctgaatgcttctagtttcctggccctcataaatgggtag

SEQ ID NO: 80607 - DNA, 441 bp, Artificial Sequence
  derived and/or modified sequence
atggatgatcataacgttgacagctttattagcctgtccagtccccagatgggacagtatggcgacacagactatctgaaatggctttttccgacctctatgcggtctaacctgtatagaatttgttactcaccttggggccaggaattttctatttgcaactactggcatgatcctcaccacgacgacttgtatctcaacgcctccagtttccttgccctgattaatggcgagcgtgatcatcccaatgcaaccgtttggaggaagaattttctgagagtgggtcacttggtgctgataggcggccccgacgatggcgtgattacaccctggcagtcctccttcttcggcttctatgatgcaaacgagactgtgctcgaaatggaagagcagcttcctgtcggctcctcagtaaaagctaatcatggtgtccagggctag

SEQ ID NO: 80608 - DNA, 477 bp, Artificial Sequence
  derived and/or modified sequence
atgctgggcttgtggggtcagcgcctccccgcggcctgggtgttgctgctgttaccttttctgcccctcttgctgctggcagccccagccccgcaccgcgcaagctacaaaccagttatcgtggttcacggcctgtttgatagcagctattccttccgccatcttctcgagtatatcaacgagatgggccagtatggcgacactgattacctaaagtggttgtttcctacctcaatgaggtccaacctgtatcgaatctgttatagtccatggggccaggagttttctatttgcaactactggcacgacccgcaccacgacgatctgtacctgaatgccagtagtttcctggccctcatcaacggcgaacgggatcaccctaatgctaccgtgtggaggaagaattttctccgggtgggccacctggtgctcatcggcgggccagatgatggcgtgatcaccccctggcagtcttag

SEQ ID NO: 80609 - DNA, 909 bp, Artificial Sequence
  derived and/or modified sequence
atgctgggattatggggacagcgcctgcctgccgcctgggtcttactccttctgccttttcttccgttattgctcctagctgcccctgcgccccacagggctagctataagcctgtaatcgttgtgcatggtctgtttgatagttcttacagtttccggcacctgcttgaatacattaatgaaacacaccccggcacagtcgtcacagtcctggacctgtttgacgggagggagtcacttagaccactgtgggaacaagttcaggggtttcgggaggctgtcgtccctatcatggctaaagccccacagggggtccatctcatttgttactcgcaaggcggactagtttgtagggcactgctgtcagtgatggacgatcacaacgtcgattccttcattagcctgtccagccctcaaatgggccagtacggagataccgactacctcaagtggctgtttccgaccagcatgcgcagtaacctctacaggatttgctattccccatggggacaggagttttccatctgtaattactggcacgacccacaccacgatgacctgtacttgaacgccagttcattcttagctttaattaatggggagcgagaccacccgaacgctactgtgtggaggaaaaattttctcagggtggggcatctggttctgattggtggccctgatgatggagtgattactccttggcagagctcgttcttcggcttctacgatgcaaacgagacagttttagaaatggaggagcagctcgtttatttacgcgacagttttggcctgaaaactttgctggctaggggtgcaattgttaggtgcccaatggcaggtataagccatacggcctggcattccaaccgtacactctacgaaacctgcatcgagccctggctgtcttag

SEQ ID NO: 80610 - DNA, 909 bp, Artificial Sequence
  derived and/or modified sequence
atgcttggcctttgggggcagagattacctgccgcgtgggtacttctactcctaccgtttctgccccttctcttgctcgccgctccggcccctcaccgggcttcctacaagccggtcattgtagtgcacggactgtttgattccagctactctttccgacatctccttgaatatatcaacgaaacacaccccgggactgtcgttacggtcctggatctttttgatggtagggaatcactcaggccactgtgggagcaggtccagggtttccgggaagcagtcgtgccaatcatggccaaggcaccgcaaggagtccacttgatttgttacagtcagggcggtctggtatgcagggctcttctgagcgtgatggacgaccataacgtggacagtttcatcagcctgtccagtccacaaatgggccaatatggtgatacagattatctcaaatggctgtttcccacatctatgaggtccaatttgtatagaatatgctattccccttgggggcaggagtttagcatttgcaactactggcacgatccccatcatgacgatttgtatctcaatgccagcagtttcctggccctgattaacggggagagggaccaccccaatgccacagtgtggcgaaaaaactttctcagggtcggccacctggtactgatcggcggacccgatgacggcgttataacgccttggcagtcatcttttttcggtttctacgacgccaatgaaaccgtgcttgaaatggaagaacagctggtgtacttacgcgatagctttgggttaaaaactctactcgctcggggcgccatcgtccggtgtcccatggctggcatttctcacactgcatggcacagcaaccggactctatacgaaacctgcatagaaccttggctgagttag

SEQ ID NO: 80611 - DNA, 909 bp, Artificial Sequence
  derived and/or modified sequence
atgctaggtctctggggtcagcgactgccagctgcttgggtgctgctcctgctgccattcctccccctcctcctcctagccgctcccgcccctcacagagcctcctacaaacctgtcattgtagtacatggtctctttgacagcagctactccttccgacatctgctagagtatattaatgagactcaccctggtacagtcgtgacagtcctcgacctctttgacggaagggagtctctgcgcccattatgggaacaggtacagggcttcagggaggccgtggtcccaatcatggctaaagctcctcagggagttcatctgatctgctattcgcaaggtggcctcgtttgtagagcgctccttagcgtcatggatgaccataatgtggattctttcatctcactatcaagtccacagatggggcaatacggcgacaccgactatctcaagtggctctttcctacctccatgcggagcaacctttacaggatttgttacagtccctggggccaggaattttccatttgcaattactggcatgatccacaccatgatgatctgtacttaaacgcctcttcattcctggcattgatcaatggtgaacgggatcaccctaacgccaccgtgtggcggaaaaatttcttgagggttggccacctagtgctgatcgggggccccgacgacggcgtcattaccccatggcagtcatcattcttcgggttttacgatgcaaatgagactgtgctcgagatggaggagcagctggtttacctgcgtgacagttttggccttaaaaccctgttggcccgaggcgccatcgtgagatgccctatggctgggatcagtcataccgcatggcactctaaccgcaccctctatgagacttgtattgagccatggctgagttag

SEQ ID NO: 80612 - DNA, 282 bp, Artificial Sequence
  derived and/or modified sequence
atgctcggactgtggggtcagcgcctgccggccgcctgggtccttctcttgctgcccttcctgccgctcctgctgctcgctgctcccgcgccacatcgtgagagctacaagcccgtaattgtggtgcatggactttttgacagctcgtactcctttcgacacctgctggagtacatcaacgaaggcgcgctctgtgccggtctgtgtttcctgagctggatgatcacaacatggattctctccagtccttctccgctgcacaggtgggattctatggaatag

SEQ ID NO: 80613 - DNA, 603 bp, Artificial Sequence
  derived and/or modified sequence
atgctagggctctggggacagagattgccggctgcatgggtgcttttactgctgcccttcctgccgttacttctgcttgccgcccccgccccacaccgggcgtcgtacaaacctgtgattgtggtgcatggactgtttgactctagctacagttttagacatttgctggagtatattaatgaaacccaccctgggaccgtggtgacggtcctggatcttttcgatggtcgagaaagcttgcggcctctgtgggaacaggtccagggcttccgggaggctgttgtgcccattatggccaaagcaccccagggggttcatctaatctgctactcgcaaggcgggttggtgtgcagggcgctcctcagtgtcatggacgaccacaacgttgatagtttcatctccctgtctagcccccagatgggccagtacggtgacactgattacctgaaatggctgtttccgacatctatgagatctaatttatatcgcatctgctactcaccttggggtcaagaatttagcatctgtaactactggcacgacccccatcacgatgatttgtacctcaacgccagcagcttcctagccctgataaacggatag

SEQ ID NO: 80614 - DNA, 603 bp, Artificial Sequence
  derived and/or modified sequence
atgcttggcttatggggccaaagacttccagcagcatgggtccttctcctgctccccttcctgcccctcctgctcctcgcagcccctgccccccatcgggcatcatacaaaccagtcatagtggtacatgggttattcgacagttcctattcattccggcacctcttggaatacatcaatgaaactcatccaggtaccgtggtaactgtcctggatctcttcgacggaagggagagcttaaggccgttgtgggagcaggttcaagggtttagagaggcagtcgtgccaatcatggctaaggcacctcagggcgtacacttgatctgttacagccaggggggcctcgtgtgccgcgccctgctttccgttatggacgatcataacgttgattcattcattagtctgtcttcaccgcagatgggtcagtacggagataccgactacctcaaatggctgttcccaacctccatgagatcgaacttgtatcgcatctgctatagtccatggggtcaggagttttctatctgtaactattggcacgatcctcaccatgatgacctgtacctgaatgccagctctttcctggccctgattaacggatag

SEQ ID NO: 80615 - DNA, 909 bp, Artificial Sequence
  derived and/or modified sequence
atgctaggcttatggggccagcgattgcctgctgcgtgggtgctgttgcttttaccttttcttccattgttactcctggcagctcctgccccacatagggccagctacaagcctgtcattgtggtgcatggcctgttcgacagttcatattctttcaggcatttactggagtatattaacgaaacccaccctggcaccgttgtcacagttctggacctgttcgacggaagagagagtttgcgcccactatgggaacaggttcaagggttcagagaagctgtggtgcctatcatggccaaggctcctcagggcgtccaccttatttgctattcacagggtggactcgtgtgtcgcgcccttctctccgttatggacgatcataatgtggattctttcataagcctgagctccccgcaaatggggcaatacggcgacactgattatttaaagtggctgtttccaacctcaatgagatcgaatctgtatagaatttgttacagcccatggggccaggagtttagcatatgcaactactggcacgatccacaccacgatgacctttacttaaatgccagttctttcttagccctgattaacggcgaacgcgaccatccaaatgcgactgtgtggcgcaagaacttcttgagagtgggccacctggtgctcataggcgggccagacgatggagtgattacgccctggcagtcgtctttcttcggcttttacgatgctaacgaaacagtgttggaaatggaggagcaacttgtctatctgagggactctttcggtctgaagactctcctcgcccggggggcgatcgtcagatgcccaatggccggcatttctcacacggcttggcatagcaacaggaccctttacgagacatgtatcgaaccctggctgagctag

SEQ ID NO: 80616 - DNA, 906 bp, Artificial Sequence
  derived and/or modified sequence
atgctagggttatgcggccagagactgcctgccgcttgggttcttctactgcttccctttctccccctgctcctgttggccgcccccgcaccgcaccgcgcgagttacaaacccgtgatcgttgtccacggactcttcgactcatcttattcttttagacatttgcttgaatacatcaacgagacacatcctggcacagtggtcacagtgttggacctgttcgacggtagggaatccctgcgacccctttgggagcaagtccagggcttccgggaagcagtggttccgatcatggcaaaagcccctcagggcgtacacctcatttgctattctcaaggcggattggtgtgccgtgctctgttgtccgtgatggatgatcacaacgtagactccttcattagcctgtcatcccctcagatggggcaatatggagacacagattacctgaagtggctgttcccaaccagcatgcggtccaacctataccgtatatgttactcaccttggggccaagaattcagtatatgtaattattggcatgacccacaccacgatgacctgtatcttaacgcaagctctttccttgccctgattaatggagagcgtgatcaccctaatgcaactgtgtggcgcaagaattttttgcgagtcggacacctggtactcatagggggcccagacgacggagtcatcactccgtggcagtcctctttcttcggcttttatgacgcaaatgaaactgtcctggaaatggaagagcagctgccagcacgccctactcatcagtcagaactgttgctgctgagattggtgtgtctcaaaccccctagacgcaaaaagccagcctgcagggtacagcggcagagtgagagctggggtccagggctgtcatgtgccttatcctag

SEQ ID NO: 80617 - DNA, 477 bp, Artificial Sequence
  derived and/or modified sequence
atgctgggcctgtggggacagcgcctgccagccgcgtgggtgctcttgcttcttccctttctgcccctattactattggccgccccggccccccaccgagaatcctataagcccgtcattgttgtgcacggtctcttcgatagttcatacagctttcggcacctgttggagtatattaacgagatgggacagtacggggataccgattacctgaagtggctctttcctacaagtatgagatcaaacctgtacagaatctgctactctccttggggacaagagtttagcatctgcaattactggcatgacccccaccatgacgacttatatcttaatgcatcatcgttccttgcgctaattaatggcgaacgggatcatcctaacgctacagtgtggcgcaagaattttttaagggtgggacaccttgtgctaatcggtgggcctgacgatggcgtgataactccctggcaatcttag

SEQ ID NO: 80618 - DNA, 543 bp, Artificial Sequence
  derived and/or modified sequence
atgttgggcctgtggggccaacgcttgcccgcagcttgggtcctgctccttctgcctttcctgccgctgctcctcctagccgcacccgccccacaccgagcatcctacaagcctgtgatagtggtacacggcttgtttgacagtagttatagttttagacacctgttagagtacattaacgagacccaccccggaacagtcgtgaccgttctggatttatttgatggtcgcgaaagtcttcggcccctgtgggaacaggtgcaggggtttagagaggccgtagtccccatcatggctaaagctccgcagggggtccatttgatatgttactctcagggcggactcgtttgcagagccctcctctcggtgatggatgatcacaatgttgattcattcatctctctgtcgtccccgcagatgggccaatacggggacacagattacctgaagtggctgttccccacttccatgaggagtaacctgtacagaatctgctacagcccgtggggacaagagttctccatctgcaactactggcactag

SEQ ID NO: 80619 - DNA, 603 bp, Artificial Sequence
  derived and/or modified sequence
atgctaggcctatggggccaaagacttcctgccgcttgggttctcctattgctcccattcctgcctctgctcctgctcgccgcaccagccccgcatagggcaagttataagcccgtaatagtggttcacggcctatttgacagttcatactcctttaggcacctgctggagtatatcaatgagacacaccctgggaccgtggtaaccgtccttgatttgtttgacggacgggaatctcttcgccccctgtgggaacaggtgcagggcttcagggaggctgtggtgccgatcatggccaaggcaccccagggggtccatctcatctgctattcacagggcggtctggtttgccgggctctgctgagtgtgatggatgaccacaacgtggactcatttatatcactgagcagtcctcaaatgggacaatacggcgacacggattacctgaagtggctttttcccacgtcaatgcgttcaaacctgtaccggatttgttactctccgtggggacaagagttcagcatttgcaactattggcacgaccctcaccatgatgacctctatctaaacgcttcttctttcctcgcactaatcaacggctag

SEQ ID NO: 80620 - DNA, 909 bp, Artificial Sequence
  derived and/or modified sequence
atgctcggcttatggggacagcggctgccagcagcctgggtgctgcttcttttgcctttcctgccactgctcctgcttgctgcccccgccccccatagagcttcttataaaccagtgatcgtggtacatggcctgtttgattcgagctacagcttccggcacctactcgaatacattaacgaaacccatccagggacagtcgtgaccgttctagacttgttcgatgggcgcgagagcctgaggcctctgtgggaacaggtccagggctttcgcgaggctgtagtgcccatcatggcgaaggctccacagggcgttcacctgatctgttattctcagggcgggctggtgtgtcgtgcattgctcagtgtgatggatgaccacaacgtggatagcttcatcagcctgagttctccgcagatgggccagtatggggacacggactacctcaagtggcttttccctacttccatgaggtcaaatctgtatagaatttgttacagcccctgggggcaggagttctccatctgcaactactggcatgacccgcaccacgacgacctctacttaaacgcctcgtcctttctcgcgcttataaacggagagcgcgatcatcccaacgccacagtatggcgaaagaactttctacgtgtcggacacctggtgttgatcgggggcccggacgacggagtgattacgccttggcagtcaagtttcttcgggttctacgacgcaaatgaaaccgtcctggaaatggaagaacagctggtttaccttagagattccttcggcctgaaaacgctgctcgctcgcggagccattgtccggtgccccatggctggaattagtcacaccgcctggcacagcaaccggacactgtacgaaacctgcatcgagccttggctgtcttag

SEQ ID NO: 80621 - DNA, 909 bp, Artificial Sequence
  derived and/or modified sequence
atgctcggcttgtggggtcagcgcctgcccgcggcctgggttctgctgcttctcccgttccttccactactgttgctggctgctcccgcccctcatagggcgtcatataagccagtcatagtggtgcatggcctcttcgactcatcttattcttttcgccacctgctcgaatatatcaacgaaacccaccctggaaccgttgtaaccgtcttggacctgtttgacggccgggagagtctccgtcctctctgggaacaagtgcaaggatttagagaagcagtggttccaattatggccaaagctccacagggggttcatctgatttgctattcccaagggggcttagtatgccgcgccttactgtcagtgatggacgaccacaatgtggactcatttattagcctgagctcaccacagatgggccaatatggtgatactgattacctaaaatggttgtttcctacaagcatgcggtccaacctataccgcatttgttactccccgtggggccaggaattcagcatatgcaactactggcatgatcctcaccatgacgacttgtatctgaatgcttcctctttcctggctcttataaacggcgaaagggaccacccgaacgcgaccgtgtggcgcaagaattttctgagggtgggtcacttggtcctgatcggcgggccggacgacggtgtgatcacaccctggcaatcctcgttctttgggttttacgatgccaacgaaacagtgttggaaatggaggaacagttagtgtaccttcgagacagcttcgggctcaaaaccctgttagcacgcggggctatcgtcagatgcccaatggcagggattagccacaccgcctggcattctaatcgcactctgtacgaaacctgcatcgagccatggttgagttag

SEQ ID NO: 80622 - DNA, 282 bp, Artificial Sequence
  derived and/or modified sequence
atgctgggactgtggggtcagcggcttcctgccgcctgggtgctgttgctcctgccatttcttccattgctgctcctggctgcaccagcaccacaccgcgcttcatacaagccagttatcgtagttcatgggctctttgactccagctactcatttcggcatcttcttgagtacattaacgaaggagctctgtgcgcgggcctctgctttctgtcttggatgatcactacatggattctgtcttccccaagccccctccataggtgggactccatggaatag

SEQ ID NO: 80623 - DNA, 282 bp, Artificial Sequence
  derived and/or modified sequence
atgctcggcctgtgcgggcagagactccccgctgcatgggtgctcctgctattgcccttccttcccctgcttctgttagcagctcctgctcctcatcgcgcttcatacaaacctgtgattgtggtgcacggactgttcgattcttcttatagtttcagacatctgctcgaatacatcaatgagggcgccctgtgcgccggactctgttttctatcttggatgattaccacgtggattctgagttcaccgtctcccctgcatcgatgggacagcatggaatag

SEQ ID NO: 80624 - DNA, 909 bp, Artificial Sequence
  derived and/or modified sequence
atgttgggcctgtggggccagcgtttgccggccgcatgggtcctgctgctgctgccattcctaccattgctgctcttagctgctcccgctccgcaccgtgcctcttacaagcctgttatagtggtgcacggactctttgactccagctattcctttagacacctgttagaatacatcaacgagacacacccaggaactgtcgttactgtactagacctgtttgacggccgcgagtcactaagacctctgtgggaacaggtgcaagggttcagagaagcagtggtccctataatggcaaaggccccgcagggggtccatcttatctgctactcccaggggggtctggtgtgcagggctctgctgtcagtgatggatgaccataacgtggactcatttatctcgcttagcagtcctcagatgggacagtatggagataccgactatcttaaatggctgttccccacctccatgcggtccaatctgtatagaatttgctacagcccttggggccaggaatttagcatttgcaactattggcatgatccccatcatgatgacttgtatttgaacgcttctagcttcctggcccttatcaacggagagcgggaccatcctaacgcaacagtgtggagaaaaaacttccttagggttggacacctggtgctcatcggtgggcctgacgatggagtcatcacaccttggcagtcaagctttttcggattttacgatgccaacgaaacagtcttggagatggaagaacagctcgtctatctgcgagattctttcggattgaaaacattgctggcaaggggagctatagtgcggtgtccgatggctggcatcagccatactgcgtggcacagcaaccgcaccttgtacgagacttgcatcgaaccttggctctcctag

SEQ ID NO: 80625 - DNA, 909 bp, Artificial Sequence
  derived and/or modified sequence
atgttgggcctttggggacaacggcttccggctgcttgggtcctcctgcttttgccctttctgccacttctgctgctggccgccccagcgccccaccgtgcatcgtataaaccagtcattgtggtgcatggactgtttgactccagctactccttcaggcacttgcttgagtacatcaatgaaactcatccaggaacagtggtcacagtgctggatctgtttgacggtcgggaatcactcaggcctctgtgggagcaggtacagggtttccgtgaagctgtagtgcctatcatggccaaggctcctcagggagtccatctgatttgctatagtcaaggtggcctcgtgtgccgggctttactgagtgtgatggatgatcacaacgtggacagctttataagcctgagctcccctcagatgggccaatacggcgatactgattacctcaaatggctcttcccaacgtccatgcgcagtaacttgtaccggatctgctatagtccgtggggccaggagtttagcatctgtaattattggcacgacccacaccacgatgacctgtacctgaacgctagttcattccttgccctaatcaatggagaaagagatcaccccaatgccactgtttggcggaagaatttcttacgggtgggtcacctcgtcctgatcgggggccctgacgatggtgtgatcacaccctggcagtcttcattcttcggattttacgacgccaatgaaaccgttcttgagatggaggaacagttagtgtaccttagggattcatttgggctcaagaccctgctggctaggggagctatcgtccgttgtcctatggctggtattagccatacagcctggcattctaaccgaactctgtacgagacgtgcattgagccttggctgagctag

SEQ ID NO: 80626 - DNA, 543 bp, Artificial Sequence
  derived and/or modified sequence
atgcttgggctctgggggcagcggctgccagctgcatgggttttgctgttgctgccatttctacccctgctgctactcgcagcgccagcacctcaccgggagtcctacaagccggtgatcgtagtgcacggattatttgattccagctactctttccgacatctgttagaatatatcaacgagacacatcctgggactgtggtaaccgtgttggacctgtttgacggacgcgaatcactgagacccttgtgggaacaggtccagggctttagggaagccgtcgtccccatcatggccaaagcccctcagggcgtgcatctgatctgctattcacaggggggactcgtgtgccgggccctcctgagtgtgatggatgaccacaacgttgattcttttatcagtctaagctccccacagatgggtcaatacggggatactgactatctgaagtggctgtttccgacctccatgcgctcaaacctgtaccgcatctgctacagcccctggggccaggaattctctatttgcaattactggcactag

SEQ ID NO: 80627 - DNA, 543 bp, Artificial Sequence
  derived and/or modified sequence
atgctgggactttggggtcaaagattgcccgccgcctgggtcctgttgttactcccgttcctgcccttactgctcctcgcagcccccgccccccacagggagtcctataaacccgtgatcgtagtgcatggcctcttcgactcttcttatagcttcaggcatctgttagagtatatcaacgagacccatccggggaccgtcgtgactgtgctcgacttgttcgatggtcgcgagagcctgagaccgctgtgggagcaagtgcaaggctttcgggaggctgtagttcccattatggccaaagcaccccagggggtacatctgatctgttattcacagggaggccttgtttgtcgagctctgttgtccgttatggatgatcacaatgtggacagctttataagtctatcttccccccagatggggcagtacggtgatactgactacctgaaatggctgtttcccacgagtatgaggagtaatctttataggatttgctattctccttgggggcaggaatttagtatctgcaactactggcattag

SEQ ID NO: 80628 - DNA, 282 bp, Artificial Sequence
  derived and/or modified sequence
atgctcgggctatggggtcagcgattacccgccgcgtgggttctcctgttgttaccattcctcccattgctgcttttggccgctccagcaccacacagggagtcgtacaaacctgtcatcgtagttcatgggttgttcgacagtagctactcctttcggcacctcctggaatacataaacgaaggagccctgtgtgctgggctatgttttttaagttggatgataacaacatggatcctaagcagcccctctcctctccaccggtgggacagcatggagtag

SEQ ID NO: 80629 - DNA, 711 bp, Artificial Sequence
  derived and/or modified sequence
atgttaggactctggggacagcggctccctgcagcatgggtcctgctcctcctccccttcctgcccctgttgttgctcgccgcccctgctccgcaccgggagagttacaagccagtgattgtcgttcatgggttgttcgactcctcttactctttcagacacttgctcgaatacatcaacgaaacacaccccggcacggtggtcactgtgctggacctgttcgacgggagagaaagccttcggcctttgtgggagcaggtccagggcttcagagaggctgtggttcctatcatggccaaggcaccgcaaggagtccacctcatctgttactctcagggaggcctggtgtgccgtgcgctgctgagcgtaatggacgaccacaatgtggattcttttatcagcctgagtagtccccagatggggcagtatggcgatacagactacctcaagtggctatttcccacttccatgcgaagtaatctttacaggatctgttacagcccctggggccaggagtttagcatttgtaattactggcacgacccgcaccatgacgacctgtacctcaatgcatctagttttttggccttaatcaatggcgagagagaccaccccaatgccactgtatggaggaaaaattttctgcgggtggggcacctagttctcatcggcggtccagacgatggggtcattactccctggcaatcatag

SEQ ID NO: 80630 - DNA, 165 bp, Artificial Sequence
  derived and/or modified sequence
tagcacgacgacctgtacttgaacgcctcttctttcttggccctcatcaatggtgagcgagatcaccctaatgctaccgtctggcggaaaaattttcttcgagtgggtcacctggttctaatcggcgggcccgacgacggcgtgataacaccttggcagtcttag

SEQ ID NO: 80631 - DNA, 711 bp, Artificial Sequence
  derived and/or modified sequence
atgcttggactctggggccagcgtctgccagccgcttgggtcctcctgcttcttccattcctccccttgctcctccttgctgcacccgcccctcacagagagtcttacaaacccgtcatcgtggtgcatggattgtttgactcgtcttactcttttaggcaccttttagagtatatcaacgagacccatcctggtaccgtggtaacagtgcttgatcttttcgatggccgcgagtccctgagacctctgtgggagcaggtgcaagggttcagggaagcagtggtgccaatcatggccaaagctccacagggagtacatctcatttgctattctcagggaggattagtgtgccgagccctcttgagtgtgatggacgaccacaatgtggacagctttattagcctgtccagccctcagatgggacagtacggagacaccgactacctgaagtggttgtttcctacatctatgcgtagcaacctttaccggatctgttactcaccgtggggccaggaattctcaatttgtaattactggcatgaccctcaccacgacgacctctacctcaacgcaagcagcttcctggccctgataaatggtgagagggaccacccaaatgcaacggtgtggagaaaaaactttctgagggtaggccacctggtactgatcggggggcctgacgacggtgtcattaccccctggcagtcttag

SEQ ID NO: 80632 - DNA, 909 bp, Artificial Sequence
  derived and/or modified sequence
atgcttggtctgtggggccaacggctccccgctgcttgggtccttctgcttttgcccttcctgcctctgctgctgctcgctgcaccagcccctcatagagcaagctataagccagtcattgttgttcatggtctctttgacagcagctactctttcagacacctccttgaatatattaatgagacccatcctggaaccgtcgtcactgttttagacctgttcgacggccgcgagtccctccggcccctatgggagcaggtgcagggctttcgggaggcagtagtccccattatggccaaagcacctcaaggggtgcacttaatttgctactcacagggggggttggtatgcagagcactattaagcgtgatggatgaccataacgtcgactcctttatcagcctgagcagcccacagatgggacaatacggagatacagactacctgaagtggttgtttcctacttccatgcgctccaacctgtaccgaatctgctacagtccatgggggcaggaattcagcatctgtaactactggcatgatccacatcacgatgatctgtacctcaatgcatcaagtttcctggctctgatcaatggggaaagggaccaccctaatgcgaccgtgtggcgcaaaaacttcctgcgcgtgggacacctagttttgatcggtggaccagatgacggcgtgataaccccgtggcagtcctcgttcttcggcttctatgatgccaacgaaaccgttctggaaatggaggaacagctggtttatctcagagatagtttcgggctgaaaactctgttggcgcggggggctattgtccgttgtccaatggctggaatttctcataccgcctggcacagtaatcggaccttgtatgaaacctgtattgaaccgtggctaagctag

SEQ ID NO: 80633 - DNA, 909 bp, Artificial Sequence
  derived and/or modified sequence
atgctcgggttgtgggggcagagactgcctgccgcttgggtccttcttctcctgccctttctacctcttctgctcttggctgctccggctcctcatagagcctcttataagccagtgattgttgtgcacggattatttgattcttcgtatagcttccgccatctgctggagtatattaatgagacacacccaggaacagtggtgaccgtgctggacctgtttgatggccgggaaagcctgcgccccttgtgggagcaggttcagggatttcgagaggccgtcgtgccaatcatggcaaaggctccacagggagtgcaccttatttgttactcacaggggggcctggtgtgtagggcccttttgagcgtaatggacgaccacaacgtggattccttcatttcgctttcctccccacagatggggcagtacggggacaccgactaccttaagtggttgttccctacttctatgcggtctaatctttataggatctgttattctccctggggccaggagttttccatttgtaattactggcacgacccacaccatgacgacctctaccttaacgccagttcttttcttgccctgattaatggagaaagggatcaccccaacgcaacggtgtggcgaaaaaacttcctgcgcgttggacaccttgtcctgattggcgggccagatgatggagtgataactccgtggcagagtagctttttcggcttctacgatgccaacgaaacagttctcgagatggaggagcaattagtgtacctcagggactcattcggactcaagacccttctggcccgcggcgctattgttcgctgtcctatggcgggaattagccacactgcctggcactccaatcggactctgtacgagacctgtatcgagccgtggctgtcgtag

SEQ ID NO: 80634 - DNA, 909 bp, Artificial Sequence
  derived and/or modified sequence
atgcttggcctctgggggcagcggcttcctgctgcctgggtcctgctgctgctgccgtttctgccactcctgttgctcgccgccccagcaccacacagagctagctacaaacccgtgatcgtcgtccatggtctgttcgactcttcctacagcttcaggcaccttctagagtatattaatgagacccaccccggtacggtggtgaccgtcctcgatctgtttgacggtagggaaagcctcaggccattgtgggagcaggtgcagggattcagggaggctgtcgtgcccatcatggccaaggcccctcagggcgtgcacttgatttgttatagtcaagggggactggtttgccgagccctgctgtcagttatggacgatcacaacgtggactcatttatatctctttcctcaccacagatggggcagtacggcgacaccgattatctaaaatggctgtttcctacctcaatgcgatccaacctgtatagaatctgctattccccctggggtcaggagttctctatttgtaactactggcacgatccccaccacgatgatttgtatctaaacgcaagtagcttcctcgccttaatcaacggggaaagagatcatccaaatgcgaccgtgtggaggaagaatttcctcagggtaggccacctggtacttattggaggtcccgatgatggggtgatcactccttggcagagttcattcttcgggttctatgatgctaatgagacggtcttggaaatggaggaacagctcgtgtatctcagggattcatttggcctaaagacactcctggcgagaggcgccattgtgcgttgccctatggccggaatatcccacaccgcctggcatagtaatcgcactttgtatgaaacatgtatcgagccttggttatcatag

SEQ ID NO: 80635 - DNA, 441 bp, Artificial Sequence
  derived and/or modified sequence
atggatgatcacaatgtggactccttcatttctctgtcctctccccagatggggcagtatggcgacacagactatcttaagtggctctttccaacaagcatgcgatctaatctataccggatctgttattctccatgggggcaggaatttagcatctgtaattactggcatgacccacaccatgacgacttgtacctgaatgctagtagctttctcgccctcattaacggcgaacgagaccatccgaacgcaaccgtgtggcggaaaaactttcttcgggtgggccatctcgttctgatcggggggcccgatgatggcgttataaccccctggcagagtagctttttcggcttttatgatgccaatgagacagtcctcgagatggaagaacaactgcctgtgggaagcagtgtgaaagctaaccatggggtgcagggttag

SEQ ID NO: 80636 - DNA, 906 bp, Artificial Sequence
  derived and/or modified sequence
atgcttggactgtggggccagcggttgccagcagcatgggtcctcctcttattgccatttttgccactcctcctgctggcggcgcctgccccccacagggctagctacaagcctgtcatcgtcgtgcacggcctgtttgattcttcttactcatttagacatcttctggaatatattaatgaaacgcatcccggaaccgtcgtaaccgtgctggatctgttcgatggaagggagtcactcagacctctgtgggaacaggtgcagggcttccgtgaagcagtcgtcccgataatggccaaggccccccagggtgttcacttgatctgctatagccagggcgggctggtgtgccgagccctcctgtcagtgatggacgaccataacgtggactcctttatatcactctctagcccccagatgggacaatatggagatactgattacctgaagtggctatttcccacatcaatgagaagcaacctgtaccgaatatgttattccccttggggccaggagttctccatttgcaattactggcatgacccccatcacgacgacctctatctgaacgcctcttcatttctggcactgataaacggggaacgggatcacccaaacgccaccgtctggcgaaaaaatttcctcagagtcggtcatctcgtgctcattggcggacccgacgatggtgtgatcacaccatggcaatcaagcttcttcggcttctatgatgccaacgaaactgtgcttgagatggaggaacaactgcctgccaggcccactcaccagtccgagctacttctgctcaggctcgtctgtctgaagccaccccgcaggaaaaagcctgcatgccgagtccagcgacaatccgagagttggggccctgggctgtcttgtgccctctcgtag

SEQ ID NO: 80637 - DNA, 909 bp, Artificial Sequence
  derived and/or modified sequence
atgcttggactctgggggcaacgactcccagcggcttgggtcttgctactgcttcccttcttaccgctgttgctgctggccgctcccgcccctcaccgcgaaagctacaagccagtgattgtggtccacggcctcttcgatagctcttactcctttcggcatctcctcgagtatatcaatgaaactcatcccggaactgtggtaaccgtgttggacttgtttgatggacgcgagtccctgagaccattgtgggaacaggtgcaggggttcagagaagcggtggtgcccatcatggcaaaagctccacaaggcgtgcacttgatttgctactctcagggcggtctggtctgcagggctttgctgagcgtgatggatgaccacaacgtggactcttttatttccctgtcgagcccccagatgggccagtatggggatacggactacctgaaatggttgttcccgacctctatgcgaagcaatctgtatcgtatctgttacagtccgtggggccaagagttctccatttgcaactactggcacgatccccaccatgacgatttgtacctgaacgcatcatcttttctggccctcattaatggcgagagagatcacccaaatgctactgtctggaggaaaaattttcttagagtgggccatctggtactgattggtgggcccgatgacggggtgataacaccgtggcagtcctctttttttggtttctacgacgccaatgaaacagtgttggaaatggaggaacagttagtctatctcagagactccttcggcctcaaaacactgctggcgcgcggcgccatcgtgcggtgccccatggccggaataagtcacaccgcatggcatagtaaccgaaccctatatgaaacctgcatcgaaccatggctgtcttag

SEQ ID NO: 80638 - DNA, 441 bp, Artificial Sequence
  derived and/or modified sequence
atggacgatcataatgtcgacagtttcatatcactgtcatccccccagatgggtcagtacggggataccgattatctcaaatggctcttccctacatccatgagaagcaatctttaccgaatctgttactccccttggggacaagagtttagtatctgcaactattggcacgatccccatcacgacgacctgtatcttaatgcttcgagtttcttagccctgattaatggcgagcgcgaccatcccaacgcaaccgtgtggcgtaaaaacttcctgagagtcggtcatctggttttgattggtggacccgacgatggtgtcatcacaccttggcagtcatccttcttcggcttctacgacgccaacgagactgttctggaaatggaggagcagctgccagtgggatcttccgtcaaggcaaatcatggggtgcagggttag

SEQ ID NO: 80639 - DNA, 906 bp, Artificial Sequence
  derived and/or modified sequence
atgttgggtctctgggggcagcgcctacccgccgcttgggtgctgttactgttaccgttcttgcctcttttactgctggccgcccccgcccctcacagagcctcttataagcctgtgatcgtcgttcatggactttttgatagttcttattcatttcgccacctgctcgaatatatcaatgaaacacaccccgggacggtggtaaccgtgctggacctctttgacggacgagaaagcctgcgccctttgtgggagcaggttcaaggcttcagagaggcagtggttcccattatggctaaggcaccccagggggtgcaccttatctgctactctcagggaggcttggtttgtcgcgcactactgagcgtaatggacgaccacaatgtggactcattcatctctctgagcagtcctcagatgggacagtacggagataccgattacctcaagtggctgtttccaactagcatgcggtctaacctgtacaggatctgttattcgccctggggtcaggagttttctatctgtaactactggcacgatccacatcacgacgacctttacctgaacgcttccagttttctcgcattgattaatggcgaacgagaccacccaaacgctaccgtctggcggaaaaattttctcagagtgggccatctggtcttaattggaggaccagacgacggggtgataacgccctggcagtcttccttttttggcttttatgacgctaatgaaaccgtgctggaaatggaggagcagctcccagctcgtcctacccaccagtccgagttgttgttactccggctcgtatgcctgaaaccgccgcggcggaagaagcccgcatgcagagtgcaaaggcagtctgagtcttggggcccaggcctgagttgcgcactgtcttag

SEQ ID NO: 80640 - DNA, 441 bp, Artificial Sequence
  derived and/or modified sequence
atggatgatcataacgtggatagcttcataagcctgagttctccacagatgggccagtacggtgacaccgattatctcaagtggctgttcccaactagcatgagatctaacttgtatagaatctgctatagcccctggggtcaggagttctctatttgcaactattggcatgatccccaccatgatgatctctacttgaatgccagttcctttctcgcactcatcaatggagaacgggaccacccaaatgccactgtctggagaaagaacttcctgagagtggggcacctggtgctgatcggaggtccagacgacggtgttataaccccatggcagagctctttttttggcttttacgatgcaaacgaaaccgttttggagatggaggagcagctgcccgtcggttcctctgtgaaggctaaccatggcgtgcaagggtag

SEQ ID NO: 80641 - DNA, 906 bp, Artificial Sequence
  derived and/or modified sequence
atgctgggcctatggggtcaaaggctacccgctgcctgggtgttgctgctgttgcccttcctcccattgttgctcctggctgccccggccccccatcgcgcttcatacaagcctgttatagtggtgcatggactttttgactcatcatattcctttcgacatctgctcgagtacataaatgagacccatcctggtacggtggttactgtgctcgacctgttcgatggtcgggagtctctgaggcccctctgggaacaagtgcaaggattcagggaggctgttgtgcccataatggccaaggcacctcagggggtacatctaatatgctatagtcaaggcggtcttgtttgccgagccttgttatctgtcatggacgaccacaacgtggactcatttatttccctcagctcaccccaaatgggacaatacggcgatacagactacctcaagtggctgtttccaacaagcatgcgcagcaatctgtaccggatatgctattctccttggggccaggagttctccatctgcaactactggcacgatcctcatcacgacgatctctatttgaacgcgagttcctttttggccttaattaacggtgagcgggaccatccaaatgccactgtctggcgaaagaacttcctccgtgtgggtcatctcgttcttattggaggcccagatgatggggtgattaccccctggcagagcagtttctttggcttttacgacgccaatgagaccgtccttgagatggaggagcagcttccagcccggcccacgcaccaaagtgagctactgctcctgcgactggtgtgtcttaagccgccgagaaggaaaaagccagcctgcagagtccaacgccagagcgaatcctggggaccaggtttgtcctgtgcactctcatag

SEQ ID NO: 80642 - DNA, 441 bp, Artificial Sequence
  derived and/or modified sequence
atggatgatcacaatgtggactccttcatctccctgagttcacctcagatgggacagtacggagacaccgactatttgaaatggctcttccccacctccatgcgttctaacctgtatcggatctgttacagtccatggggccaagaattttcaatttgcaactattggcacgatcctcaccatgacgacctgtacttgaacgcttcttccttcttggcactgattaatggggagagagatcacccgaacgcaactgtctggaggaaaaatttccttagagtcgggcacctggtccttatagggggtcctgacgacggcgtgatcaccccctggcagagcagcttctttgggttttatgacgccaatgaaacggtgctggagatggaggagcagttgccagtgggctcaagcgtcaaagctaaccacggggtccaggggtag

SEQ ID NO: 80643 - DNA, 909 bp, Artificial Sequence
  derived and/or modified sequence
atgttagggttgtggggacaacgactccccgcggcctgggtcctcttactcctacctttcctgccactgctactgctggcagccccagccccgcacagagcctcttataaaccagtgatcgtcgtgcacggcttgtttgactctagttattcattccgtcaccttctcgagtatattaacgaaacacatcccggtactgtggtgactgtgctcgatctgttcgacggccgcgagtccctgcggccgttgtgggagcaagtccagggtttcagggaggcagtcgtccctatcatggctaaagctccgcagggggtgcatctgatctgttatagtcaaggaggtctggtttgtcgggcattgcttagcgtgatggatgaccacaacgtggacagtttcatctctctgtccagcccacagatgggccagtatggtgatacagactatttaaagtggctttttcccacgtccatgagaagcaatctttacaggatctgctacagcccgtgggggcaagagttctctatttgcaattactggcacgacccccaccacgacgacctctacctgaatgctagctccttcctggccctcataaacggggaaagggatcatcctaatgccaccgtgtggcgcaagaatttcctccgggtgggacacctggtcctgatcggaggccccgatgatggagtcatcacaccatggcagtcctcatttttcggtttctacgatgccaacgaaaccgtcttggaaatggaggaacaactcgtgtacctacgagactccttcggactgaaaacactgctcgcccgcggggctatcgtgcggtgtccaatggctgggattagccacaccgcatggcattcaaacagaacgctgtacgagacctgcatagaaccctggctatcttag

SEQ ID NO: 80644 - DNA, 441 bp, Artificial Sequence
  derived and/or modified sequence
atggacgatcacaatgttgattcctttattagtctttccagtccccagatgggacagtacggagacactgattacctcaaatggctgttccctacgtccatgaggagtaacctgtatagaatatgctatagcccttgggggcaggaattctctatttgcaattactggcatgacccacaccacgacgatttgtatctaaatgcttctagctttttagccctgatcaatggcgaaagagaccaccccaacgccaccgtgtggcggaagaactttttgcgcgttgggcacctggttctcataggcggcccagacgacggagtgataacgccgtggcaatcctcattctttggcttctacgacgcaaacgagacagttctggaaatggaggaacagctcccagtgggcagctccgtcaaggcaaatcacggagtacagggttag

SEQ ID NO: 80645 - DNA, 909 bp, Artificial Sequence
  derived and/or modified sequence
atgctcggtctgtgggggcagaggcttcctgcagcctgggtattgttactgctaccatttctcccactacttctgctggccgctcctgctccacatagagcttcctacaaacccgtcattgtcgtccatggactttttgactcgtcttactccttccgccaccttctggaatacatcaacgagacccatccagggaccgttgtaaccgtcctagacttatttgacggaagggaatcattacgacctctgtgggagcaggttcagggattccgggaagccgtggtccccattatggccaaggctccccagggcgtgcaccttatctgttactctcaaggaggactagtgtgtagggccctgttgagcgtcatggacgatcataacgtagacagcttcatcagtctctccagccctcagatgggtcaatatggcgataccgactatttgaagtggctcttccctacctctatgaggagcaacttgtaccgcatctgctatagcccatggggccaggaattcagcatttgcaactactggcacgaccctcaccacgatgatctgtacctcaatgcatctagttttctcgctctgattaacggcgagagagaccaccctaacgccacagtctggcgaaagaacttccttagggtgggacacctggtactgattggcgggcccgatgacggagtgattaccccctggcaatcctccttcttcgggttttacgatgccaatgagactgtgctggagatggaggaacaactggtgtatttacgggactcattcgggttgaagacgctgctggcacgaggcgccatcgtgaggtgccctatggctggaatcagccacacagcttggcacagcaatcgaaccctctatgagacatgcatcgaaccttggctaagttag

SEQ ID NO: 80646 - DNA, 441 bp, Artificial Sequence
  derived and/or modified sequence
atggatgatcacaatgttgattccttcatctcactatctagccctcagatggggcagtacggggacaccgattacctcaaatggctcttccccacatccatgcgaagcaatctgtaccggatctgttactctccctggggacaggagttctccatatgtaactactggcacgatccacatcacgatgacctttacctgaacgcttccagctttctggccctaattaatggagagcgagaccatcccaatgctactgtttggagaaagaattttctgcgcgttggccacctagttctgatcggcggtcctgatgatggggtgattactccatggcagagttcttttttcgggttctacgacgctaatgagacagtgctggagatggaggaacaactcccagttggctcttcagtgaaggcaaatcatggagtgcagggctag

SEQ ID NO: 80647 - DNA, 906 bp, Artificial Sequence
  derived and/or modified sequence
atgctgggattatggggtcagaggctacccgccgcctgggtgttgctgctgttacctttcctacctttactgctgctcgccgctcccgctccccacagagcatcctataagcctgtcatcgttgtacacggactgtttgacagcagctactcatttcggcacctgttggaatacatcaacgagactcatccagggaccgtggttactgtcctcgatctcttcgatgggcgtgagtcgctgcgacctctgtgggagcaggtccaagggtttagggaggcagtcgtgccaatcatggccaaggcgccccaaggggttcatctaatatgctattcccagggaggcctggtctgtcgcgccctcctctccgtaatggacgaccataatgtggactcttttatttctctcagcagtccgcagatgggtcagtacggcgacacagactacctcaagtggcttttcccgacgagtatgcgctcaaacctttataggatttgttacagcccgtggggtcaagagtttagcatatgcaactactggcatgacccacatcacgatgatctctatctcaatgccagctcctttttggctctcattaatggagaacgcgaccaccctaatgccacggtgtggcggaagaattttcttagggttggccatctggtgctgatcgggggcccggacgacggtgtaatcaccccatggcagtcctcattttttggattttacgacgcgaacgaaacagtactcgaaatggaagagcagctgcccgcccggccgacacatcagtccgagttacttttattgcgattagtgtgccttaagcccccaagaaggaagaaaccggcatgccgcgtccagcgccagagcgagtcatggggtccagggctcagctgtgcactgtcatag

SEQ ID NO: 80648 - DNA, 906 bp, Artificial Sequence
  derived and/or modified sequence
atgctcgggttatggggccagagactgccagctgcttgggttctcctgctcttaccatttctgcccctcctacttctggcggctccagccccccatcgagaatcctacaaacccgtgattgtagtgcacggactgttcgacagctcctactctttccgccatctcctagaatatatcaacgaaacccaccccgggaccgtcgtgactgtgctggaccttttcgacggcagagaaagcttgagaccactatgggagcaggttcagggcttcagagaagccgttgtgccgatcatggctaaggccccccaaggcgtccacttaatctgctattcacagggagggctcgtctgcagggcattactaagcgtaatggatgaccacaacgtggactcgtttatctcactgtcttctccccagatgggccagtatggagacaccgactatctcaagtggctgttcccgacttctatgaggtccaacctctatcgcatctgctatagcccatggggccaggaattttctatctgtaattattggcatgacccccaccacgacgatctctatttaaacgcttcatccttcctggcattgataaatggagagagagaccaccccaacgctactgtttggcgtaaaaactttcttcgcgtcggtcatctggtgctcattggtgggccggatgatggagtcattactccatggcaatcctctttcttcgggttttatgatgccaatgaaactgtcctggaaatggaagagcagttgccagccagacccacacaccagtccgaacttcttctactgcgtttagtttgcttgaagcccccccggcggaagaagcccgcatgtcgcgtacagcgacagagtgagtcctggggtcccggattaagttgtgcactaagctag

SEQ ID NO: 80649 - DNA, 906 bp, Artificial Sequence
  derived and/or modified sequence
atgttgggcctgtggggccaacgcctgcccgcagcttgggtgctgctacttttaccgttcctgccactcttactgctggccgctccggcacctcatcgcgcctcttataaacccgtgatcgtcgtgcacgggctctttgactcgagttactcatttcgccacttgctagagtacatcaacgaaactcacccaggtacagtcgtgactgtgcttgacctctttgatggccgggaatccctgcgtccactctgggagcaagttcaggggtttcgcgaagctgtggtaccgattatggcgaaagcgccccagggtgtgcaccttatttgctacagccagggcggactggtctgtcgagcccttctgtcagtaatggatgatcacaacgtagactcctttataagtctttcatcccctcagatgggacagtatggagacactgactacctgaaatggcttttcccaacgtcaatgcggagtaatctctatcgtatttgttacagcccttggggacaggagttttcaatctgcaactactggcatgatcctcatcatgacgatctgtatctgaacgcctccagcttcctagcactcatcaacggagagcgggaccatccgaacgctaccgtttggcggaagaatttccttagggtggggcacttggttctcattggtggccctgatgacggtgtgattaccccttggcagagttccttctttggcttctatgatgctaacgagacagtattagaaatggaggaacagctgcctgcccggcccacccaccagtccgaactgctgctgcttcgcctcgtctgcttgaaacccccacggaggaagaagcctgcatgtagggtacaacgacagagcgagagctgggggccgggcctctcttgcgcgttgtcttag

SEQ ID NO: 80650 - DNA, 909 bp, Artificial Sequence
  derived and/or modified sequence
atgcttggcttgtgggggcagcgcttgccagcggcttgggtgttgcttctgctgccttttctcccccttctgttgcttgctgctcccgcaccgcaccgcgcgagttacaagcctgtcattgtggtacatggcctcttcgactccagttactcctttcggcatctactggagtacatcaacgagacccaccctgggacagtcgtgaccgtcctcgacctgtttgacgggcgggaatccctgaggcccttgtgggagcaggtccaagggtttagggaagctgtggtgcctataatggctaaagccccgcagggggtccatctcatctgttacagtcaaggcggcctcgtatgtagagcactgctcagtgttatggatgatcataatgtcgacagcttcattagccttagctctccccaaatgggacagtatggggatactgactatctgaagtggttgtttcccaccagcatgaggtctaacctgtatcgcatttgttatagtccttggggacaggaatttagcatttgcaactactggcacgatccccaccacgacgatttgtacttaaatgcttcgtccttcttggctctcatcaatggggagcgcgaccacccaaacgcaaccgtgtggcggaagaactttctacgcgttgggcacctggtcctcatcggcggcccagatgatggagttattacaccgtggcaatcaagcttcttcgggttttacgatgccaatgaaacagttctagaaatggaggagcaacttgtgtacctgcgggactcctttggtttaaagactctgctggcaagaggggcaatcgtgcggtgccccatggccggaatctcccacactgcttggcacagtaaccgcaccctgtacgagacgtgcattgagccgtggctctcatag

SEQ ID NO: 80651 - DNA, 909 bp, Artificial Sequence
  derived and/or modified sequence
atgctgggcctgtgtggccagaggctgcctgctgcctgggtgctgctgctgctgcccttcctgcccctgctgctgctggccgccccagccccccaccgggccagctacaagcctgtgattgtggtgcacggcctgtttgacagcagctacagcttccgccacctgctggagtacatcaatgagacccaccctggcaccgtggtgacagtgctggacctgtttgatggccgggagagcctgcggcccctgtgggagcaggtgcagggcttccgggaggccgtggtgcccatcatggccaaggccccccagggcgtgcacctgatctgctacagccagggcggcctggtgtgccgggccctgctgtctgtgatggatgaccacaacgtggacagcttcatcagcctgagcagcccccagatgggccagtatggagacacagactacctgaagtggctgttccccacctccatgaggagcaacctgtaccgcatctgctacagcccctggggccaggagttcagcatctgcaactactggcatgacccccaccatgatgacctgtacctgaatgccagcagcttcctggccctgatcaatggagagcgggaccaccccaatgccaccgtgtggaggaagaacttcctgcgggtgggccacctggtgctgattggaggcccagatgatggagtcatcaccccctggcagagcagcttcttcggcttctatgatgccaatgaaacagtgctggagatggaggagcagctggtgtacctgcgggacagctttggcctgaagaccctgctggcccggggggccatcgtgcgctgccccatggccggcatcagccacacagcctggcacagcaacagaaccctgtatgagacctgcatcgagccctggctgtcctag

SEQ ID NO: 80652 - DNA, 909 bp, Artificial Sequence
  derived and/or modified sequence
atgctgggcctgtggggccagaggctgcctgctgcctgggtgctgctgctgctgcccttcctgcccctgctgctgctggccgccccagccccccaccgggagagctacaagcctgtgattgtggtgcacggcctgtttgacagcagctacagcttccgccacctgctggagtacatcaatgagacccaccctggcaccgtggtgacagtgctggacctgtttgatggccgggagagcctgcggcccctgtgggagcaggtgcagggcttccgggaggccgtggtgcccatcatggccaaggccccccagggcgtgcacctgatctgctacagccagggcggcctggtgtgccgggccctgctgtctgtgatggatgaccacaacgtggacagcttcatcagcctgagcagcccccagatgggccagtatggagacacagactacctgaagtggctgttccccacctccatgaggagcaacctgtaccgcatctgctacagcccctggggccaggagttcagcatctgcaactactggcatgacccccaccatgatgacctgtacctgaatgccagcagcttcctggccctgatcaatggagagcgggaccaccccaatgccaccgtgtggaggaagaacttcctgcgggtgggccacctggtgctgattggaggcccagatgatggagtcatcaccccctggcagagcagcttcttcggcttctatgatgccaatgaaacagtgctggagatggaggagcagctggtgtacctgcgggacagctttggcctgaagaccctgctggcccggggggccatcgtgcgctgccccatggccggcatcagccacacagcctggcacagcaacagaaccctgtatgagacctgcatcgagccctggctgtcctag

SEQ ID NO: 80653 - DNA, 909 bp, Artificial Sequence
  derived and/or modified sequence
atgctgggcctgtggggccagaggctgcctgctgcctgggtgctgctgctgctgcccttcctgcccctgctgctgctggccgccccagccccccaccgggccagctacaagcctgtgattgtggtgcacggcctgtttgacagcagctacagcttccgccacctgctggagtacatcaatgagacccaccctggcaccgtggtgacagtgctggacctgtttgatggccgggagagcctgcggcccctgtgggagcaggtgcagggcttccgggaggccgtggtgcccatcatggccaaggccccccagggcgtgcacctgatctgctacagccagggcggcctggtgtgccgggccctgctgtctgtgatggatgaccacaacgtggacagcttcatcagcctgagcagcccccagatgggccagtatggagacacagactacctgaagtggctgttccccacctccatgaggagcaacctgtaccgcatctgctacagcccctggggccaggagttcagcatctgcaactactggcatgacccccaccatgatgacctgtacctgaatgccagcagcttcctggccctgatcaatggagagcgggaccaccccaatgccaccgtgtggaggaagaacttcctgcgggtgggccacctggtgctgattggaggcccagatgatggagtcatcaccccctggcagagcagcttcttcggcttctatgatgccaatgaaacagtgctggagatggaggagcagctggtgtacctgcgggacagctttggcctgaagaccctgctggcccggggggccatcgtgcgctgccccatggccggcatcagccacacagcctggcacagcaacagaaccctgtatgagacctgcatcgagccctggctgtcctag

SEQ ID NO: 80654 - DNA, 282 bp, Artificial Sequence
  derived and/or modified sequence
atgctgggcctgtggggccagaggctgcctgctgcctgggtgctgctgctgctgcccttcctgcccctgctgctgctggccgccccagccccccaccgggccagctacaagcctgtgattgtggtgcacggcctgtttgacagcagctacagcttccgccacctgctggagtacatcaatgaaggagccctgtgtgccggcctgtgcttcctgtcctggatgatcaccacctggatcctgagcagccccagccccctgcaccgctgggacagcatggagtag

SEQ ID NO: 80655 - DNA, 543 bp, Artificial Sequence
  derived and/or modified sequence
atgctgggcctgtgtggccagaggctgcctgctgcctgggtgctgctgctgctgcccttcctgcccctgctgctgctggccgccccagccccccaccgggccagctacaagcctgtgattgtggtgcacggcctgtttgacagcagctacagcttccgccacctgctggagtacatcaatgagacccaccctggcaccgtggtgacagtgctggacctgtttgatggccgggagagcctgcggcccctgtgggagcaggtgcagggcttccgggaggccgtggtgcccatcatggccaaggccccccagggcgtgcacctgatctgctacagccagggcggcctggtgtgccgggccctgctgtctgtgatggatgaccacaacgtggacagcttcatcagcctgagcagcccccagatgggccagtatggagacacagactacctgaagtggctgttccccacctccatgaggagcaacctgtaccgcatctgctacagcccctggggccaggagttcagcatctgcaactactggcactag

SEQ ID NO: 80656 - DNA, 603 bp, Artificial Sequence
  derived and/or modified sequence
atgctgggcctgtggggccagaggctgcctgctgcctgggtgctgctgctgctgcccttcctgcccctgctgctgctggccgccccagccccccaccgggagagctacaagcctgtgattgtggtgcacggcctgtttgacagcagctacagcttccgccacctgctggagtacatcaatgagacccaccctggcaccgtggtgacagtgctggacctgtttgatggccgggagagcctgcggcccctgtgggagcaggtgcagggcttccgggaggccgtggtgcccatcatggccaaggccccccagggcgtgcacctgatctgctacagccagggcggcctggtgtgccgggccctgctgtctgtgatggatgaccacaacgtggacagcttcatcagcctgagcagcccccagatgggccagtatggagacacagactacctgaagtggctgttccccacctccatgaggagcaacctgtaccgcatctgctacagcccctggggccaggagttcagcatctgcaactactggcatgacccccaccatgatgacctgtacctgaatgccagcagcttcctggccctgatcaatggatag

SEQ ID NO: 80657 - DNA, 477 bp, Artificial Sequence
  derived and/or modified sequence
atgctgggcctgtggggccagaggctgcctgctgcctgggtgctgctgctgctgcccttcctgcccctgctgctgctggccgccccagccccccaccgggagagctacaagcctgtgattgtggtgcacggcctgtttgacagcagctacagcttccgccacctgctggagtacatcaatgagatgggccagtatggagacacagactacctgaagtggctgttccccacctccatgaggagcaacctgtaccgcatctgctacagcccctggggccaggagttcagcatctgcaactactggcatgacccccaccatgatgacctgtacctgaatgccagcagcttcctggccctgatcaatggagagcgggaccaccccaatgccaccgtgtggaggaagaacttcctgcgggtgggccacctggtgctgattggaggcccagatgatggagtcatcaccccctggcagagctag

SEQ ID NO: 80658 - DNA, 543 bp, Artificial Sequence
  derived and/or modified sequence
atgctgggcctgtggggccagaggctgcctgctgcctgggtgctgctgctgctgcccttcctgcccctgctgctgctggccgccccagccccccaccgggccagctacaagcctgtgattgtggtgcacggcctgtttgacagcagctacagcttccgccacctgctggagtacatcaatgagacccaccctggcaccgtggtgacagtgctggacctgtttgatggccgggagagcctgcggcccctgtgggagcaggtgcagggcttccgggaggccgtggtgcccatcatggccaaggccccccagggcgtgcacctgatctgctacagccagggcggcctggtgtgccgggccctgctgtctgtgatggatgaccacaacgtggacagcttcatcagcctgagcagcccccagatgggccagtatggagacacagactacctgaagtggctgttccccacctccatgaggagcaacctgtaccgcatctgctacagcccctggggccaggagttcagcatctgcaactactggcactag

SEQ ID NO: 80659 - DNA, 477 bp, Artificial Sequence
  derived and/or modified sequence
atgctgggcctgtggggccagaggctgcctgctgcctgggtgctgctgctgctgcccttcctgcccctgctgctgctggccgccccagccccccaccgggccagctacaagcctgtgattgtggtgcacggcctgtttgacagcagctacagcttccgccacctgctggagtacatcaatgagatgggccagtatggagacacagactacctgaagtggctgttccccacctccatgaggagcaacctgtaccgcatctgctacagcccctggggccaggagttcagcatctgcaactactggcatgacccccaccatgatgacctgtacctgaatgccagcagcttcctggccctgatcaatggagagcgggaccaccccaatgccaccgtgtggaggaagaacttcctgcgggtgggccacctggtgctgattggaggcccagatgatggagtcatcaccccctggcagagctag

SEQ ID NO: 80660 - DNA, 477 bp, Artificial Sequence
  derived and/or modified sequence
atgctgggcctgtgtggccagaggctgcctgctgcctgggtgctgctgctgctgcccttcctgcccctgctgctgctggccgccccagccccccaccgggccagctacaagcctgtgattgtggtgcacggcctgtttgacagcagctacagcttccgccacctgctggagtacatcaatgagatgggccagtatggagacacagactacctgaagtggctgttccccacctccatgaggagcaacctgtaccgcatctgctacagcccctggggccaggagttcagcatctgcaactactggcatgacccccaccatgatgacctgtacctgaatgccagcagcttcctggccctgatcaatggagagcgggaccaccccaatgccaccgtgtggaggaagaacttcctgcgggtgggccacctggtgctgattggaggcccagatgatggagtcatcaccccctggcagagctag

SEQ ID NO: 80661 - DNA, 711 bp, Artificial Sequence
  derived and/or modified sequence
atgctgggcctgtggggccagaggctgcctgctgcctgggtgctgctgctgctgcccttcctgcccctgctgctgctggccgccccagccccccaccgggagagctacaagcctgtgattgtggtgcacggcctgtttgacagcagctacagcttccgccacctgctggagtacatcaatgagacccaccctggcaccgtggtgacagtgctggacctgtttgatggccgggagagcctgcggcccctgtgggagcaggtgcagggcttccgggaggccgtggtgcccatcatggccaaggccccccagggcgtgcacctgatctgctacagccagggcggcctggtgtgccgggccctgctgtctgtgatggatgaccacaacgtggacagcttcatcagcctgagcagcccccagatgggccagtatggagacacagactacctgaagtggctgttccccacctccatgaggagcaacctgtaccgcatctgctacagcccctggggccaggagttcagcatctgcaactactggcatgacccccaccatgatgacctgtacctgaatgccagcagcttcctggccctgatcaatggagagcgggaccaccccaatgccaccgtgtggaggaagaacttcctgcgggtgggccacctggtgctgattggaggcccagatgatggagtcatcaccccctggcagagctag

SEQ ID NO: 80662 - DNA, 603 bp, Artificial Sequence
  derived and/or modified sequence
atgctgggcctgtggggccagaggctgcctgctgcctgggtgctgctgctgctgcccttcctgcccctgctgctgctggccgccccagccccccaccgggccagctacaagcctgtgattgtggtgcacggcctgtttgacagcagctacagcttccgccacctgctggagtacatcaatgagacccaccctggcaccgtggtgacagtgctggacctgtttgatggccgggagagcctgcggcccctgtgggagcaggtgcagggcttccgggaggccgtggtgcccatcatggccaaggccccccagggcgtgcacctgatctgctacagccagggcggcctggtgtgccgggccctgctgtctgtgatggatgaccacaacgtggacagcttcatcagcctgagcagcccccagatgggccagtatggagacacagactacctgaagtggctgttccccacctccatgaggagcaacctgtaccgcatctgctacagcccctggggccaggagttcagcatctgcaactactggcatgacccccaccatgatgacctgtacctgaatgccagcagcttcctggccctgatcaatggatag

SEQ ID NO: 80663 - DNA, 603 bp, Artificial Sequence
  derived and/or modified sequence
atgctgggcctgtgtggccagaggctgcctgctgcctgggtgctgctgctgctgcccttcctgcccctgctgctgctggccgccccagccccccaccgggccagctacaagcctgtgattgtggtgcacggcctgtttgacagcagctacagcttccgccacctgctggagtacatcaatgagacccaccctggcaccgtggtgacagtgctggacctgtttgatggccgggagagcctgcggcccctgtgggagcaggtgcagggcttccgggaggccgtggtgcccatcatggccaaggccccccagggcgtgcacctgatctgctacagccagggcggcctggtgtgccgggccctgctgtctgtgatggatgaccacaacgtggacagcttcatcagcctgagcagcccccagatgggccagtatggagacacagactacctgaagtggctgttccccacctccatgaggagcaacctgtaccgcatctgctacagcccctggggccaggagttcagcatctgcaactactggcatgacccccaccatgatgacctgtacctgaatgccagcagcttcctggccctgatcaatggatag

SEQ ID NO: 80664 - DNA, 441 bp, Artificial Sequence
  derived and/or modified sequence
atggatgaccacaacgtggacagcttcatcagcctgagcagcccccagatgggccagtacggggacacagactacctgaagtggctgttccccacctccatgaggagcaacctgtaccgcatctgctacagcccctggggccaggagttcagcatctgcaactactggcatgacccccaccatgatgacctgtacctgaatgccagcagcttcctggccctgatcaacggggagcgggaccaccccaatgccaccgtgtggaggaagaacttcctgcgggtgggccacctggtgctgattggaggcccagatgatggagtcatcaccccctggcagagcagcttcttcggcttctatgatgccaatgagaccgtgctggagatggaggagcagctgcctgtgggcagctctgtgaaggccaaccacggcgtgcagggctag

SEQ ID NO: 80665 - DNA, 282 bp, Artificial Sequence
  derived and/or modified sequence
atgctgggcctgtggggccagaggctgcctgctgcctgggtgctgctgctgctgcccttcctgcccctgctgctgctggccgccccagccccccaccgggagagctacaagcctgtgattgtggtgcacggcctgtttgacagcagctacagcttccgccacctgctggagtacatcaatgaaggagccctgtgtgccggcctgtgcttcctgtcctggatgatcaccacctggatcctgagcagccccagccccctgcaccgctgggacagcatggagtag

SEQ ID NO: 80666 - DNA, 906 bp, Artificial Sequence
  derived and/or modified sequence
atgctgggcctgtgtggccagaggctgcctgctgcctgggtgctgctgctgctgcccttcctgcccctgctgctgctggccgccccagccccccaccgggccagctacaagcctgtgattgtggtgcacggcctgtttgacagcagctacagcttccgccacctgctggagtacatcaatgagacccaccctggcaccgtggtgacagtgctggacctgtttgatggccgggagagcctgcggcccctgtgggagcaggtgcagggcttccgggaggccgtggtgcccatcatggccaaggccccccagggcgtgcacctgatctgctacagccagggcggcctggtgtgccgggccctgctgtctgtgatggatgaccacaacgtggacagcttcatcagcctgagcagcccccagatgggccagtatggagacacagactacctgaagtggctgttccccacctccatgaggagcaacctgtaccgcatctgctacagcccctggggccaggagttcagcatctgcaactactggcatgacccccaccatgatgacctgtacctgaatgccagcagcttcctggccctgatcaatggagagcgggaccaccccaatgccaccgtgtggaggaagaacttcctgcgggtgggccacctggtgctgattggaggcccagatgatggagtcatcaccccctggcagagcagcttcttcggcttctatgatgccaatgaaacagtgctggagatggaggagcagctgcctgcccggcccacccaccagagcgagctgctgctgctgcggctggtgtgcctgaagccacccaggaggaagaagccagcctgccgggtgcagaggcagagcgagagctggggccctggcctgagctgtgccctgtcctag

SEQ ID NO: 80667 - DNA, 282 bp, Artificial Sequence
  derived and/or modified sequence
atgctgggcctgtgtggccagaggctgcctgctgcctgggtgctgctgctgctgcccttcctgcccctgctgctgctggccgccccagccccccaccgggccagctacaagcctgtgattgtggtgcacggcctgtttgacagcagctacagcttccgccacctgctggagtacatcaatgaaggagccctgtgtgccggcctgtgcttcctgtcctggatgatcaccacctggatcctgagcagccccagccccctgcaccgctgggacagcatggagtag

SEQ ID NO: 80668 - DNA, 543 bp, Artificial Sequence
  derived and/or modified sequence
atgctgggcctgtggggccagaggctgcctgctgcctgggtgctgctgctgctgcccttcctgcccctgctgctgctggccgccccagccccccaccgggagagctacaagcctgtgattgtggtgcacggcctgtttgacagcagctacagcttccgccacctgctggagtacatcaatgagacccaccctggcaccgtggtgacagtgctggacctgtttgatggccgggagagcctgcggcccctgtgggagcaggtgcagggcttccgggaggccgtggtgcccatcatggccaaggccccccagggcgtgcacctgatctgctacagccagggcggcctggtgtgccgggccctgctgtctgtgatggatgaccacaacgtggacagcttcatcagcctgagcagcccccagatgggccagtatggagacacagactacctgaagtggctgttccccacctccatgaggagcaacctgtaccgcatctgctacagcccctggggccaggagttcagcatctgcaactactggcactag

SEQ ID NO: 80669 - DNA, 165 bp, Artificial Sequence
  derived and/or modified sequence
tgacatgatgacctgtacctgaatgccagcagcttcctggccctgatcaatggagagcgggaccaccccaatgccaccgtgtggaggaagaacttcctgcgggtgggccacctggtgctgattggaggcccagatgatggagtcatcaccccctggcagagctag

SEQ ID NO: 80670 - DNA, 906 bp, Artificial Sequence
  derived and/or modified sequence
atgctgggcctgtggggccagaggctgcctgctgcctgggtgctgctgctgctgcccttcctgcccctgctgctgctggccgccccagccccccaccgggccagctacaagcctgtgattgtggtgcacggcctgtttgacagcagctacagcttccgccacctgctggagtacatcaatgagacccaccctggcaccgtggtgacagtgctggacctgtttgatggccgggagagcctgcggcccctgtgggagcaggtgcagggcttccgggaggccgtggtgcccatcatggccaaggccccccagggcgtgcacctgatctgctacagccagggcggcctggtgtgccgggccctgctgtctgtgatggatgaccacaacgtggacagcttcatcagcctgagcagcccccagatgggccagtatggagacacagactacctgaagtggctgttccccacctccatgaggagcaacctgtaccgcatctgctacagcccctggggccaggagttcagcatctgcaactactggcatgacccccaccatgatgacctgtacctgaatgccagcagcttcctggccctgatcaatggagagcgggaccaccccaatgccaccgtgtggaggaagaacttcctgcgggtgggccacctggtgctgattggaggcccagatgatggagtcatcaccccctggcagagcagcttcttcggcttctatgatgccaatgaaacagtgctggagatggaggagcagctgcctgcccggcccacccaccagagcgagctgctgctgctgcggctggtgtgcctgaagccacccaggaggaagaagccagcctgccgggtgcagaggcagagcgagagctggggccctggcctgagctgtgccctgtcctag

SEQ ID NO: 80671 - DNA, 906 bp, Artificial Sequence
  derived and/or modified sequence
atgctgggcctgtggggccagaggctgcctgctgcctgggtgctgctgctgctgcccttcctgcccctgctgctgctggccgccccagccccccaccgggagagctacaagcctgtgattgtggtgcacggcctgtttgacagcagctacagcttccgccacctgctggagtacatcaatgagacccaccctggcaccgtggtgacagtgctggacctgtttgatggccgggagagcctgcggcccctgtgggagcaggtgcagggcttccgggaggccgtggtgcccatcatggccaaggccccccagggcgtgcacctgatctgctacagccagggcggcctggtgtgccgggccctgctgtctgtgatggatgaccacaacgtggacagcttcatcagcctgagcagcccccagatgggccagtatggagacacagactacctgaagtggctgttccccacctccatgaggagcaacctgtaccgcatctgctacagcccctggggccaggagttcagcatctgcaactactggcatgacccccaccatgatgacctgtacctgaatgccagcagcttcctggccctgatcaatggagagcgggaccaccccaatgccaccgtgtggaggaagaacttcctgcgggtgggccacctggtgctgattggaggcccagatgatggagtcatcaccccctggcagagcagcttcttcggcttctatgatgccaatgaaacagtgctggagatggaggagcagctgcctgcccggcccacccaccagagcgagctgctgctgctgcggctggtgtgcctgaagccacccaggaggaagaagccagcctgccgggtgcagaggcagagcgagagctggggccctggcctgagctgtgccctgtcctag

SEQ ID NO: 80672 - DNA, 909 bp, Artificial Sequence
  derived and/or modified sequence
atgctgggcctgtgcggccagcggctgcccgccgcctgggtgctgctactgctaccattcctgccactgctgctgctcgccgcccccgccccgcacagagctagttataagcccgtgattgtagttcatggtctgtttgactcaagctactcctttcggcacctcttagagtatatcaatgagacacatcctggcacagtggtgactgtcctcgacctgttcgacggtcgggaaagtctcagacccctctgggaacaagtacagggcttcagagaagccgtcgtccccattatggctaaggccccacagggggtgcatctaatttgctatagccagggaggacttgtctgccgggccctgctgtccgtgatggatgatcataacgtggactcttttattagcctctcctcaccacagatgggccaatatggggatacggactatctcaaatggttgtttcctacgtccatgcgttccaacttatatcgcatatgctatagcccttggggtcaggagttctcgatctgtaactactggcacgatccacaccacgacgatctctatttgaatgcaagctccttcttggcccttatcaacggcgagagagaccaccccaatgctactgtctggaggaaaaattttctgcgggtgggccacctggtactcattgggggaccagacgatggggtgataaccccttggcaatcttcctttttcggattctacgatgctaatgaaactgtcctcgagatggaggaacaactggtttatctgcgcgattcgttcggcttaaaaacgctgctggcccggggtgccatcgtgcggtgcccgatggctggcatctcccacactgcctggcatagtaaccgcactctttacgaaacttgtatagagccctggctctcttag

SEQ ID NO: 80673 - DNA, 909 bp, Artificial Sequence
  derived and/or modified sequence
atgctgggcctgtgcggccagcggctgcccgccgcctgggtgctgctcctcttgcccttcctgcctctgctcttactggctgcccccgctccgcatagagcctcctacaagcccgtaattgtagtacacggcctgttcgacagctcttattcctttagacacctgctggaatacataaatgagactcaccccggtaccgtggtcactgtgcttgacttatttgacgggagagagtcactgcgccccttatgggagcaagtgcagggatttcgcgaggccgtggtgcccatcatggctaaggctcctcagggggtgcatttaatctgttattctcagggcgggctagtctgcagggcacttctttcggtgatggatgatcacaatgtcgattctttcattagtttatcttcaccacagatgggacagtatggtgacactgattatctgaagtggctcttccccacgtccatgaggtccaacctgtacaggatttgctacagtccctggggccaggagttcagtatctgcaattattggcatgatccacatcacgatgatttatatctgaacgccagctcgttcctcgcactaattaacggagagagagaccaccctaatgcgacagtctggcgcaagaatttcctgagagttggccacctggtcctgattggcggaccggacgacggcgtaatcaccccatggcagtcttcgttttttggcttctacgatgcaaatgaaaccgtgctagaaatggaggagcagttggtctacctcagagactcgtttggattgaaaaccctcctggcacgtggagccatcgtcagatgtccgatggctggcattagccataccgcctggcacagtaatcgaactttgtacgagacttgcatcgagccatggttgtcatag

SEQ ID NO: 80674 - DNA, 909 bp, Artificial Sequence
  derived and/or modified sequence
atgctgggcctgtgcggccagcggctgcccgccgcctgggtgctgttactcctgccctttctaccattgctcctgttggctgctcctgctccccaccgggcatcgtataaacccgtcatcgtggtccatggactattcgacagtagttatagctttcgccaccttctagaatatattaatgagacacacccagggaccgtcgttactgtgctggatctcttcgacggtagggaaagcctgcggcccctttgggagcaggtgcagggctttagagaagccgtcgtccctattatggccaaagccccgcagggtgttcacctcatttgttattcccagggtggcctcgtgtgccgagcccttctcagcgttatggatgaccacaatgtcgactcctttattagtctatcctcccctcagatgggacagtacggagacacagactacctcaagtggctgtttcctacatcaatgcgttcaaatctgtatcggatctgctatagcccatggggccaggaattctccatctgtaattactggcacgatcctcaccatgatgacctttatctgaacgcgtcatccttccttgctctgatcaatggagaacgggatcaccccaacgccacggtgtggcgaaagaactttcttagggtaggtcatctggtccttatcggtggacccgacgacggggtgatcacaccctggcagtcatcattttttggcttttatgacgcaaatgagactgtacttgaaatggaagaacaactggtgtacctcagagattcctttggcctaaaaaccctgctggcgaggggtgccattgtgcgctgtcctatggccggaatctcacacaccgcatggcactcaaacagaacactttacgagacctgtattgagccttggctttcgtag

SEQ ID NO: 80675 - DNA, 909 bp, Artificial Sequence
  derived and/or modified sequence
atgctgggcctgtgcggccagcggctgcccgccgcctgggtgctgctgctgctcccctttctgcccctgctactgttagcagctccagcccctcatagagcaagctataagccggtcatcgtcgtgcatggtcttttcgactctagctatagcttccgccacctgttagaatatatcaatgaaactcaccccgggaccgtagtgactgttttggacctgtttgatgggcgcgaatccctgagaccactctgggaacaagttcaaggctttagggaggccgtggtgcccatcatggctaaggcccctcagggcgtgcatcttatctgttatagccaaggaggcctggtgtgccgcgctctcttaagcgtgatggatgaccacaacgttgattctttcatttccctgtcatccccacaaatggggcagtacggagacaccgattatttgaagtggctattccccacgtctatgcggagtaacctctaccgcatttgctatagcccttggggccaggaattcagtatttgtaactattggcatgatccacatcacgatgacctctacctgaatgcctcaagctttttggctctcatcaatggagagcgcgaccaccccaacgccacggtgtggcggaaaaattttctccgggtgggacatttggtgttgataggcggtcccgatgatggagtgattaccccatggcagtcctccttttttgggttttacgatgccaacgaaactgtgctcgagatggaggagcagctggtatacctcagagactccttcgggttgaagacgctgctcgctagaggcgctatcgttagatgcccgatggcagggatttctcataccgcctggcatagcaaccgaacactctacgagacctgtattgagccctggctgtcttag

SEQ ID NO: 80676 - DNA, 909 bp, Artificial Sequence
  derived and/or modified sequence
atgctgggcctgtggggccagcggctgcccgccgcctgggtgctgctgctgctgcctttcctgcctttgctcttgctggctgcccccgctccccatcgagagtcttacaagccggtgatcgtagtccacggcctgtttgatagctcatacagcttcaggcacctactggagtacatcaatgagacacatcccgggacagttgtcacggtgctggacctgttcgacggccgcgagtctttgcggcctctgtgggagcaggtgcagggattccgtgaagccgtggtgccgatcatggcgaaagcccctcaaggcgtccatctaatctgttatagtcaaggaggactcgtatgccgcgccctgctgtctgtaatggacgatcacaatgtggatagtttcatctccctgtccagtccacagatgggccagtatggcgataccgattacctcaagtggctcttccctactagcatgcgctctaacctgtacagaatctgttattcaccctggggtcaggagttttctatctgcaactattggcatgatccccaccacgatgatctgtatcttaacgcttcttcttttttagccctgattaatggggagagagatcaccctaacgccacagtctggaggaagaactttctgcgggtcggccacctggtcctcattggcggacccgacgacggcgtgatcactccatggcagagctcattctttgggttctatgatgccaacgaaactgtgctggaaatggaggaacaactggtgtacctgagagactcgtttggcctcaaaacactcctggcgagaggcgccatcgtcaggtgccctatggcaggcatcagccacaccgcatggcactcaaaccgtactctgtatgagacctgtatcgagccttggctgtcttag

SEQ ID NO: 80677 - DNA, 909 bp, Artificial Sequence
  derived and/or modified sequence
atgctgggcctgtggggccagcggctgcccgccgcctgggtgctgttattgctccccttcttgcccctgctgcttctggccgctcctgcccctcatagggagtcttataaacccgtaatcgttgtacacggacttttcgactcttcctattccttcagacatttgttggagtatatcaacgagacccaccctggcaccgttgtgacggtgctggacctgtttgatggacgggagtctctcaggccattatgggagcaggttcagggctttcgcgaggccgtggtgccaattatggcgaaggcaccccaaggtgttcatctgatttgttatagtcaggggggattggtgtgtagagcactgcttagtgtgatggacgaccacaatgtcgacagctttatcagtttatcgtccccgcagatggggcaatacggtgacactgattatttgaaatggctcttcccaacatccatgcggtccaatctgtaccgtatctgctacagtccctggggacaggagttttctatctgtaattactggcatgacccccatcacgatgacctgtaccttaatgcctcctccttcctcgccttgatcaatggcgagagggatcaccctaatgcaaccgtgtggcgcaagaattttctcagggttggacacctcgtgctgatagggggccccgatgacggagtgattactccgtggcagtcatcttttttcggtttctacgatgctaacgagacagtgttggaaatggaagagcagctggtgtacctgagggactcgtttggtcttaaaaccttactagctagaggcgctatagtccggtgtcctatggctggcatcagtcacaccgcgtggcactcaaacaggaccttgtatgagacttgcattgagccatggctcagttag

SEQ ID NO: 80678 - DNA, 909 bp, Artificial Sequence
  derived and/or modified sequence
atgctgggcctgtggggccagcggctgcccgccgcctgggtgctgctgctgttgccctttctgccactgctccttttggcagcgcctgccccccaccgggagagctataaaccagtcatcgttgtgcatggactgttcgactcatcctattccttcagacatctcctcgagtacattaacgaaacacatcctggtaccgtggtgaccgtgctggatctcttcgacggccgagaaagccttcgtcctctgtgggaacaggtgcagggtttccgggaagccgtagtaccgataatggctaaagccccacagggagtccacctaatttgttactcccaaggaggcctggtttgtagggccctcctcagcgtgatggatgaccacaatgtggacagttttatatcactcagcagtccacaaatggggcagtatggcgacacagactaccttaaatggttgtttcccacctctatgaggagcaatctgtacaggatctgttacagtccctgggggcaagagttcagtatttgtaattactggcacgacccccatcacgatgacctctatctcaatgccagcagcttcctggcgttgattaacggcgaaagagatcaccccaacgctactgtatggcggaagaactttttgagagtgggacacctagtgctgattgggggacccgacgatggagtgatcaccccctggcaatcaagctttttcggcttctacgatgcgaacgagactgtgttggaaatggaggagcagttggtttaccttcgggatagctttgggttgaaaacgctcttagcacgcggggcaattgtgcgttgtccaatggcgggcatcagccataccgcttggcactccaacagaaccctttacgagacatgtatagagccgtggctgtcatag

SEQ ID NO: 80679 - DNA, 909 bp, Artificial Sequence
  derived and/or modified sequence
atgctgggcctgtggggccagcggctgcccgccgcctgggtgctgttactactgccctttctcccacttctgctgctcgccgcccctgcgccacatagggcctcttacaagcctgttattgtggtgcacggcctgtttgacagtagttattctttccggcatctgctggagtacatcaacgagacccatcccggtaccgtggtcaccgtactagatctgttcgatggcagagagagtctccggcccctctgggagcaggttcagggttttcgcgaagccgtggtaccaatcatggccaaggcaccccagggcgtgcatctaatctgttacagccagggcgggcttgtgtgcagggccctgctgtcggtaatggatgaccacaatgtcgactcttttattagcctctctagcccccagatgggtcagtatggggatacagactatttaaagtggctctttcctacctccatgcgcagtaacctgtataggatctgctattccccatggggccaggagttcagtatctgtaactattggcacgacccccaccacgacgacctctatttgaacgcttccagcttcctcgctctgataaacggggaaagagatcacccaaacgccacagtttggcgaaagaatttcctgcgggtcggccacctcgttctcatcggtggcccggatgacggcgtcatcaccccatggcagagttccttctttggattttacgatgctaatgagacagtgctcgaaatggaagaacagctggtctacctgagagactcttttggattaaagacactgctagccaggggcgccatcgttcggtgccctatggcaggcatcagccatactgcttggcatagcaaccgcacgttatatgagacttgtatcgagccttggctctcctag

SEQ ID NO: 80680 - DNA, 909 bp, Artificial Sequence
  derived and/or modified sequence
atgctgggcctgtggggccagcggctgcccgccgcctgggtgctgttgctgctcccattcctacctctcctactgctggccgcccccgcgccacaccgggcatcctataagccggtgattgtggttcacggcctgtttgattcctcatatagcttccgccatctactggaatatattaatgagacacaccccggcacggtggttacagtcttggatctgttcgatggacgcgagagtttgagacctctttgggaacaggttcaaggattccgcgaggccgttgtccctatcatggcaaaagcaccgcaaggcgtacacctgatctgctattctcaaggtggcttggtgtgtagggcgctgctaagcgtgatggacgatcataacgtagattcattcatcagcctgagtagcccccagatggggcagtacggggatactgactatctgaagtggctgttcccaacctcgatgcgcagcaacctctacaggatttgttactccccgtggggacaggagttctctatctgtaattactggcatgatccacatcacgatgatttgtacctgaacgcttcatcttttctcgctctcatcaatggagagagggatcatcccaacgcaactgtctggcgtaagaacttcttgcgcgtgggtcatctggtgctcattggtgggcccgatgacggggttatcaccccctggcagtcttctttcttcggtttttacgacgctaacgaaacagtgttggaaatggaggagcagctggtgtaccttcgggactcctttggcctgaaaacgctgctggcgcggggggccatcgtcaggtgtcccatggctggtatctcacatacagcttggcacagcaatcggacgctctatgagacctgcatcgagccgtggctctcatag

SEQ ID NO: 80681 - DNA, 909 bp, Artificial Sequence
  derived and/or modified sequence
atgctgggcctgtggggccagcggctgcccgccgcctgggtgctgcttctcctgccattcctgcccctcttactcctggccgctcctgccccacatcgagctagttataaacccgtgatcgtcgtgcacggactcttcgacagctcctacagttttcgtcacttgctcgagtacattaacgagacccacccagggacagtggtcacagtgcttgatctctttgatggccgcgagtccctaagacccctgtgggaacaggttcagggttttcgggaggccgtggtgccaatcatggcaaaagctccccagggggtgcacctgatctgttatagccaaggcggcctggtctgccgggcactactttccgtaatggatgaccacaatgttgactcttttatatcattgagtagtccacaaatggggcagtacggggacactgactatctaaaatggctctttcctaccagcatgaggtccaacttatatcgcatttgctacagcccttgggggcaggagttttcaatttgtaattattggcatgacccccatcatgacgacctatatctaaacgcatcttcctttttggcattgatcaacggagagcgtgaccacccgaacgccaccgtctggagaaagaactttttgcgagttggacatctcgtgcttatcggcggacctgatgacggtgtcatcacgccctggcaaagcagctttttcgggttttacgatgcaaatgagaccgtgttagaaatggaagagcagctggtgtacttaagggactccttcggacttaagaccctgttagcccgcggagccatagtgagatgtccaatggccggcatttcacacacagcctggcactccaatcggaccctgtacgagacttgcatcgaaccatggctgagctag

SEQ ID NO: 80682 - DNA, 282 bp, Artificial Sequence
  derived and/or modified sequence
atgctgggcctgtggggccagcggctgcccgccgcctgggtgctgcttctgctgcccttcctgcctctgctcctcctggccgccccagcccctcaccgggcgagttataagcctgtcattgtggttcatgggctgttcgattcctcttacagtttcaggcacctgctggagtacatcaacgagggagccctgtgtgctggtctttgcttcctgagctggatgattaccacttggatcctctcgagcccctcacccctgcatcgttgggattcaatggaatag

SEQ ID NO: 80683 - DNA, 543 bp, Artificial Sequence
  derived and/or modified sequence
atgctgggcctgtgcggccagcggctgcccgccgcctgggtgctgctgctccttcctttcctccccctgctgctgctggctgcgcctgccccgcacagagcttcgtacaagcctgttatcgtggtgcatggtctattcgacagttcctatagttttcggcacctgctggagtacataaatgaaacccaccctggcactgtggtgacagtcctcgatctgttcgacggtcgcgagtctctgcggcctctctgggaacaggtgcagggatttcgggaagctgttgtgcctattatggcaaaggcaccacagggcgtgcacctgatctgctattctcaggggggcctcgtatgccgcgccctgctgtcagtgatggatgatcacaacgtcgattctttcatatccctgtctagtccccagatgggccagtatggagacactgattatctgaaatggctattcccaacaagtatgcgctccaacctgtaccgaatatgctactctccctgggggcaggaattcagtatttgcaactattggcactag

SEQ ID NO: 80684 - DNA, 603 bp, Artificial Sequence
  derived and/or modified sequence
atgctgggcctgtggggccagcggctgcccgccgcctgggtgctgctattactgcccttcctgccactgctgcttttggccgcccctgccccacacagagagtcatacaagcccgtgattgtggtgcatgggttgtttgactcgtcttactcatttcgacatctcctggaatacataaatgaaacgcatcctgggaccgtcgtaacggtgcttgatctgttcgacggccgcgaaagcttgagaccattgtgggagcaggtccaaggattccgtgaagcggttgtgcctattatggccaaagcaccacagggggtgcatctgatctgttatagccagggggggctcgtttgccgggccttgttgagcgtgatggacgatcataatgttgactcctttatatccttaagttctccccaaatgggacagtatggcgacaccgactatttgaagtggttgtttcccacgtctatgcggtccaatctctaccgcatctgctatagtccgtgggggcaggaattctccatttgcaactactggcacgatccacaccatgatgatctgtatctgaacgcctcctcatttttggcccttatcaacggctag

SEQ ID NO: 80685 - DNA, 477 bp, Artificial Sequence
  derived and/or modified sequence
atgctgggcctgtggggccagcggctgcccgccgcctgggtgctgctgctccttcctttcctcccacttttacttctcgccgctccagctcctcaccgagaatcttataagcctgtcatcgtggttcacgggctatttgactcttcttactctttcagacacttattagaatatatcaatgaaatgggacaatatggagataccgattatctcaagtggctgttccccacaagtatgaggagtaatctgtaccgcatatgttattcaccatggggacaagagttctccatctgcaactactggcatgatccccaccacgacgatttatatctgaatgccagtagttttcttgcactgattaatggtgagagggaccatccaaacgcaaccgtgtggcgtaaaaatttcctccgagtcggccatttagtgctcatagggggtccagacgacggcgtgatcaccccatggcagtcatag

SEQ ID NO: 80686 - DNA, 543 bp, Artificial Sequence
  derived and/or modified sequence
atgctgggcctgtggggccagcggctgcccgccgcctgggtgctgctgctgctcccatttctgccgttactcctcctggccgcacccgccccccaccgggccagctataaacccgttatcgtggtccatggcctctttgattcttcatatagtttcaggcatctcctggagtacatcaatgaaactcaccccggaacggtggttacagtgttggaccttttcgatggtagagagtctctccggccactgtgggagcaggtgcagggctttcgcgaggccgtggtcccaatcatggctaaggccccacagggagtgcatttaatctgctatagccagggaggattagtgtgtcgcgcccttctctccgtaatggatgaccataacgtagacagctttatcagtctatcctcccctcagatgggccagtacggagatactgattatttaaagtggctcttcccaacttcaatgcggtctaacctatacagaatttgctactccccatgggggcaggaattttccatctgcaattactggcactag

SEQ ID NO: 80687 - DNA, 477 bp, Artificial Sequence
  derived and/or modified sequence
atgctgggcctgtggggccagcggctgcccgccgcctgggtgctgctactcctgccctttttgcctctgctcctgctggctgcccccgccccgcatcgggcctcatacaagcctgtgatcgtggtgcacggattgttcgacagcagctactccttcagacaccttctggagtacattaatgagatggggcagtatggggatacagattacctgaaatggctatttcctacatccatgcggagcaacctgtataggatctgctattcaccttggggacaggaatttagtatatgtaattattggcatgaccctcatcacgatgacctgtacctgaacgccagctcttttctggctcttattaatggcgaacgtgaccacccaaacgccactgtctggagaaagaacttccttagagtcgggcatctggtattgataggaggccccgacgatggagtcataactccctggcagtcttag

SEQ ID NO: 80688 - DNA, 543 bp, Artificial Sequence
  derived and/or modified sequence
atgctgggcctgtggggccagcggctgcccgccgcctgggtgctgctgctgctgccatttctgccacttctgctgctcgcagcgccggccccgcatagggcctcatacaaacccgtcatagtggtccatggcctttttgactccagctattctttccggcatcttctggagtacatcaatgagacccatcctggaacagtcgtgactgtgctcgacttattcgacggcagggaatccctcagacccctatgggagcaagtgcagggttttcgggaggccgtcgtaccgatcatggccaaagccccgcaaggagttcatctcatctgttattcccagggcggattggtgtgcagagctctgctttcagtgatggacgatcataatgtcgatagtttcatctctctttcttcaccacaaatgggccagtatggcgatacagactacctgaaatggctcttccctacaagcatgcggtctaacctttaccgcatctgttattccccttggggacaggagttcagcatctgtaattattggcattag

SEQ ID NO: 80689 - DNA, 909 bp, Artificial Sequence
  derived and/or modified sequence
atgctgggcctgtggggccagcggctgcccgccgcctgggtgctgcttctgctgccgtttctgcccctgctgttgctggcagctcccgccccccatcgagcaagctataagcctgtgatagtggtgcacggcctgttcgacagctcttattcttttagacatctgctggagtacatcaatgagacgcaccctggaaccgtagttaccgtactggacctgttcgacggccgggaaagcctgaggcccctctgggagcaggtgcaaggcttccgtgaagccgtggtccccataatggccaaagcccctcagggggtccacttaatttgttacagccagggggggcttgtttgcagggctctcctgagcgtaatggacgatcataacgtggattctttcatttccctctcatccccccaaatgggtcaatacggagacacagactacctcaagtggctgtttccgacctcaatgcgctccaatctatataggatttgttactccccttggggacaggagtttagtatttgcaattactggcacgacccacatcatgatgatctttatctcaatgcctcctctttcttggccctcattaacggcgagcgggaccaccctaatgcaaccgtgtggcgtaaaaacttcctgcgggtgggacacctggtgctgattggcggcccagatgatggtgtgatcacgccctggcagagctctttctttggcttctatgatgccaatgaaacagttcttgagatggaggagcagctcgtttatttaagggactcctttggactaaagactttactcgcacggggcgccatcgtccggtgtcctatggcaggaatatctcacactgcgtggcacagcaacaggactctgtacgagacatgtatcgagccatggctttcatag

SEQ ID NO: 80690 - DNA, 909 bp, Artificial Sequence
  derived and/or modified sequence
atgctgggcctgtggggccagcggctgcccgccgcctgggtgctgcttctactcccatttctgccactactcctgctcgctgccccagcaccacacagagccagctataagcccgtgattgttgtgcatggactatttgactccagctattccttccgccacctcctggaatatattaacgagacccaccccggcactgtggtgactgtactggatctttttgacggcagagagagcctgaggccattgtgggaacaagtgcagggcttccgcgaggccgtcgtaccaatcatggcgaaggctccacaaggcgtgcatctgatttgttactcacagggagggttagtatgtcgcgccttgctttcagttatggatgaccacaacgtggactcgttcataagcttgtcttctccccagatgggccagtacggagacacggattatctcaagtggctgttccccacctcaatgagatccaatctttaccggatttgctactccccctggggccaggaattctcaatctgcaactactggcacgatccacaccacgacgatctgtatctgaacgctagttcttttctagcccttatcaacggggagagggaccacccgaatgcaaccgtctggagaaaaaattttctgagggtggggcacttggttctgatcgggggtcctgacgatggcgtcattacaccctggcagtcctcttttttcgggttttacgacgccaacgagaccgtcctggaaatggaagagcagctcgtgtaccttagagacagcttcgggttgaaaaccctgttggcccgtggggcaatcgtccgttgccccatggctggaatcagccatacagcatggcactcaaatagaaccctgtacgaaacctgcattgagccatggctttcctag

SEQ ID NO: 80691 - DNA, 282 bp, Artificial Sequence
  derived and/or modified sequence
atgctgggcctgtggggccagcggctgcccgccgcctgggtgctgctcctcctcccctttcttcctctgttgctgcttgctgctcccgcgccgcacagagcctcgtataaacccgttatcgtggtccacggccttttcgacagctcttattcctttcgccatctgctggagtacatcaatgaaggggccctgtgcgccgggctctgttttttgtcgtggatgatcacaacatggatcctgtcgtctcctagtccacttcaccgatgggactctatggagtag

SEQ ID NO: 80692 - DNA, 909 bp, Artificial Sequence
  derived and/or modified sequence
atgctgggcctgtggggccagcggctgcccgccgcctgggtgctgttgctcctgcctttcctgcctttactcttactagccgctcccgcaccacacagagccagctacaaaccagtgattgtagtccacggactgttcgattctagttacagtttcagacacctcctagaatacattaatgagactcaccctggcaccgtcgttactgtcctggacctatttgatgggagggagagcctcaggccactgtgggaacaggtccaggggtttcgcgaagccgttgtgccaataatggccaaagctcctcaaggcgttcacctgatctgttactcccagggaggcctcgtttgccgagccctcttaagtgtcatggatgaccataatgtggactccttcattagtttgtcatctccacaaatgggacagtatggcgatactgattacctgaagtggctgtttccgacttccatgcggtccaacctctaccggatctgctattccccatgggggcaggaattctccatttgtaactattggcatgacccacatcatgacgatctctaccttaacgccagcagtttcctggcgctgatcaatggcgaaagggatcacccaaatgccactgtgtggcgaaagaactttctgcgggtgggacacttggttttgatcggagggcccgacgatggtgttattacaccctggcagagttctttcttcggcttctacgacgccaacgagacagtgttagagatggaggaacagttggtgtacctgcgtgactccttcggactgaagaccctgctggcacggggagcaattgtccgctgccccatggctggcatctcccatactgcctggcatagtaataggacgttgtacgaaacctgcattgagccctggctaagttag

SEQ ID NO: 80693 - DNA, 477 bp, Artificial Sequence
  derived and/or modified sequence
atgctgggcctgtgcggccagcggctgcccgccgcctgggtgctgctgctgctgcccttcttgcctcttcttctgctcgcggcaccagcccctcaccgcgcgtcctacaaaccagtaatcgtcgtgcatggtctctttgattcttcatactcttttcgacacctcctggaatacatcaacgagatgggacaatatggagacacagattatctgaaatggctgtttcccactagcatgcgttccaacctgtatcgcatatgttactctccgtggggtcaggaattctctatttgcaactactggcatgatccccaccatgatgatctgtacctaaatgctagttccttccttgcactgatcaatggagagagggaccaccccaacgccacagtgtggagaaaaaattttctgcgcgtcggacatctggttctcatcggcggcccagatgatggggtgataaccccctggcaaagttag

SEQ ID NO: 80694 - DNA, 711 bp, Artificial Sequence
  derived and/or modified sequence
atgctgggcctgtggggccagcggctgcccgccgcctgggtgctgctacttctaccattccttcctctgctgctgttggccgcacccgcgcctcaccgggagagctataaaccggtcattgtggttcacggcctgtttgatagctcatacagctttaggcacctgctggaatacatcaatgaaactcaccctggaacagtggtaacagtgctggatttgttcgatggccgtgaaagcttgaggcctctgtgggagcaagtgcagggctttcgtgaggccgtggtgccaataatggctaaagcccctcaaggagtgcacttgatttgttattcacaaggcggcctcgtgtgcagagccctcctgtccgtcatggacgatcataatgtggactcgtttatctcattatccagtccacagatgggacagtacggggacacggattatttgaagtggctcttccctacatccatgaggtccaatctatatcgcatatgctacagtccatgggggcaggagtttagcatatgcaactactggcatgatcctcatcacgacgacctataccttaacgcctcttcttttttggctctaattaatggggagcgtgaccatcctaacgcgaccgtttggaggaagaattttttacgcgtgggccacctcgtgcttattgggggcccagacgacggcgtgatcacgccttggcagtcttag

SEQ ID NO: 80695 - DNA, 543 bp, Artificial Sequence
  derived and/or modified sequence
atgctgggcctgtggggccagcggctgcccgccgcctgggtgctgttactcctccccttcttacctctcctactgctcgccgccccagccccccacagggcatcttacaaacctgtaatagttgtccatggtcttttcgattcctcttacagttttcgtcatttgctggaatatattaatgaaacccaccccggaaccgttgtgactgtgcttgacctgtttgacggtagagagagtcttcgaccactgtgggaacaagtgcaggggtttagggaggcagtggtgcccattatggcgaaagcaccccagggggttcacctgatttgttattcgcagggcggactcgtgtgcagagctttgctgtctgtcatggatgatcataatgtggatagtttcatctccctcagctccccccaaatgggacagtatggggacacggattacctcaagtggctcttccccacctccatgcggagtaacctttaccgtatttgctactccccttggggccaggagttcagcatctgtaattactggcactag

SEQ ID NO: 80696 - DNA, 711 bp, Artificial Sequence
  derived and/or modified sequence
atgctgggcctgtggggccagcggctgcccgccgcctgggtgctgttactattgccctttcttccactactgctgttggctgcgcccgctccacatcgggagagttacaaacccgtcatcgtcgtacacgggctgttcgattcgagctactccttcaggcaccttttggagtacatcaacgagacccatcccggaacagttgtgaccgtgcttgatctcttcgacggaagggaaagtttaagaccactctgggagcaagtccagggattcagggaagctgttgttcctataatggcaaaggctcctcagggcgtgcatctgatttgttattcacagggtgggctcgtctgcagggcattgctctccgtgatggatgaccataatgtggattccttcatcagcctgtccagtccccagatgggacaatacggtgatacagattatctgaagtggctttttcccaccagtatgaggtctaacctataccgtatctgttacagcccctggggacaggagttctcaatttgcaattactggcacgatcctcaccacgatgacctttacttgaacgcatcttcctttttggccctgataaacggtgaaagggaccaccccaatgctacagtgtggagaaaaaacttcctgcgcgttggccacctagtcctcatcggagggcctgatgacggcgtgatcactccctggcagtcgtag

SEQ ID NO: 80697 - DNA, 603 bp, Artificial Sequence
  derived and/or modified sequence
atgctgggcctgtggggccagcggctgcccgccgcctgggtgctgctgctgcttcccttcctgcccctgcttctactggcagcccctgcccctcatcgtgcttcttataagcctgtcatcgtggttcatggattgttcgactctagctacagctttcgtcatctactggagtacatcaacgagactcacccaggcactgttgtgacagtgctggacctgttcgatgggagggagtccttgagacccctatgggaacaggtccaggggttcagggaggccgtcgtgcctattatggctaaggctcctcagggagttcacctgatttgttactctcaaggcgggctcgtatgtcgagccttactttcagtgatggatgaccataacgtggattccttcatctctctgtcctcccctcaaatggggcagtatggagacaccgactacctcaaatggctgttcccaacatctatgcggtccaacctgtatcgcatctgctacagcccatgggggcaggaattcagtatttgcaactactggcacgacccacatcatgacgatttatacctgaatgcctccagcttcctggcgctgataaacggctag

SEQ ID NO: 80698 - DNA, 909 bp, Artificial Sequence
  derived and/or modified sequence
atgctgggcctgtggggccagcggctgcccgccgcctgggtgctgctactcctgccatttctgcccctcttactcttggcagctcctgctccgcacagagcgagctataagcctgttatcgtggtgcacgggctctttgatagttcctatagtttccgtcatctgctggagtatataaacgagacccaccccgggacagtggtcactgtcctcgatctgttcgatggaagggaatcattgagacctctctgggagcaagtgcaggggttccgggaggctgttgtgccgatcatggccaaagctccccagggagtgcacctgatctgctactctcagggtggtctggtgtgtagagcacttctgtccgtcatggatgaccataatgttgatagctttatttctctttcatctcctcagatggggcagtacggcgacacagattatctgaagtggctgttcccgaccagcatgcgctccaacctctaccggatttgctatagcccatggggccaggagttctcaatatgtaattattggcacgatccacatcacgacgatttgtatttaaacgcatccagctttcttgcgctgattaacggcgaacgcgaccaccccaatgctacggtgtggcggaaaaactttttgcgggtggggcatctggtattaattggcggtcctgatgatggtgtcatcacaccctggcagtcaagtttttttggtttctacgatgcgaatgaaaccgtgcttgaaatggaagagcagctcgtgtatctgagagattccttcggcctgaagactctcttggcaaggggggctatagttcgttgcccgatggccggaatatctcacacggcctggcactcgaacaggactctgtatgagacttgtattgaaccatggctcagctag

SEQ ID NO: 80699 - DNA, 603 bp, Artificial Sequence
  derived and/or modified sequence
atgctgggcctgtggggccagcggctgcccgccgcctgggtgctgctgctcctgccttttctcccactgctgctgctggcggcacccgcacctcatcgtgcctcatacaagcccgtgatcgtggtgcacggactgtttgattcttcttatagttttaggcatcttctggagtatatcaacgaaacacaccctggaacggtcgtaaccgttctagatctcttcgacggaagagagtctctccgaccgctgtgggagcaggtgcaggggtttcgggaagcagtggtccccatcatggctaaggctccgcagggggttcatttgatatgctattctcagggaggcctcgtgtgccgcgccctgctgtccgtcatggacgaccacaacgtcgatagctttatttctcttagctcaccccagatgggtcagtatggtgataccgattacttaaagtggttgttcccgacttccatgaggtcaaatttgtataggatttgttattctccctggggacaggagttttcaatttgtaactactggcatgacccacaccacgatgacctgtacttaaacgcttcatcatttctagcacttataaatggctag

SEQ ID NO: 80700 - DNA, 711 bp, Artificial Sequence
  derived and/or modified sequence
atgctgggcctgtggggccagcggctgcccgccgcctgggtgctgctccttcttccatttcttcctttactgcttcttgctgcgccagcaccacatcgtgagtcctataaacccgtcatcgtcgttcacgggctgttcgacagcagctactcttttcggcacttgcttgagtacatcaacgaaacgcaccccggaacagtggtgaccgtcttagacctctttgacgggagggaaagtttgagacccctgtgggaacaggtgcaaggttttagggaagcagtggtcccgattatggcaaaggcccctcaaggcgtgcacctgatatgttattcacaaggcggcctagtctgtcgagcattactcagcgtgatggacgatcacaatgttgatagctttattagcttgtccagccctcaaatggggcagtatggagataccgattacctaaaatggctttttccaacatctatgagatccaacctgtataggatttgttactcaccttggggccaggagttcagcatctgcaattactggcacgaccctcatcacgatgacctctacctcaatgcgtctagcttcttggccctgatcaatggtgaaagagaccatccaaacgctacagtctggcgaaagaacttcctccgcgtcggtcatctggttcttattggaggacccgacgacggcgtcattactccatggcaatcttag

SEQ ID NO: 80701 - DNA, 543 bp, Artificial Sequence
  derived and/or modified sequence
atgctgggcctgtggggccagcggctgcccgccgcctgggtgctgcttctgctgccttttctgcccctgctgctgctggccgccccggccccacacagggccagttataagccagtaatagttgtgcacggtctgtttgacagctcatacagctttagacatctgctcgagtacattaacgaaacccacccgggtaccgtggtcaccgtgttagatctgttcgacggacgcgagtctctgcgacccctgtgggagcaggtccagggttttagggaggccgttgtgcccataatggcaaaagcgccccagggagtccacctcatatgttatagtcaggggggtctggtgtgtcgagcgcttttgtcagtgatggatgatcacaacgttgacagcttcatatctctgagcagtccccagatgggccagtacggcgacactgactatctgaagtggctgttccctacctcaatgcggtctaatctgtaccgcatatgttacagcccctggggtcaagagttctcgatttgcaactattggcactag

SEQ ID NO: 80702 - DNA, 477 bp, Artificial Sequence
  derived and/or modified sequence
atgctgggcctgtggggccagcggctgcccgccgcctgggtgctgctcttgttacccttcctcccgcttttactcttggccgctccagcaccccaccgggcctcctacaagccagtcatcgtcgtgcatggactgtttgactcctcctattcttttcgccatctgttggagtacatcaacgagatgggacaatacggagacactgactacctcaaatggttgttccctaccagcatgagatcaaatttataccggatctgctattcgccatggggccaggagttcagtatctgtaactattggcacgacccacaccacgatgacctctacctgaatgctagcagctttctagccctcatcaacggtgagcgggatcaccccaacgccactgtgtggaggaagaactttctgcgcgtgggacacctcgtgctgatcggtgggcctgacgatggcgtcattaccccttggcagagttag

SEQ ID NO: 80703 - DNA, 603 bp, Artificial Sequence
  derived and/or modified sequence
atgctgggcctgtggggccagcggctgcccgccgcctgggtgctgcttctgctcccgttcctgcctctgctgctactggctgccccagccccacaccgggagagttataaaccagtcatagtagtgcacgggttattcgattccagctacagcttcaggcacttgctggagtacataaatgagacgcatccaggcactgttgtgaccgttctggatttgtttgacggaagagaatctctgaggccgctctgggagcaggttcagggcttccgggaggctgtggtccctattatggctaaggcaccccagggagtgcacctgatctgttactcccaggggggcctggtgtgcagggccttattgagcgtaatggatgaccacaatgtggatagcttcatatctctgagttctccccaaatgggacaatacggggacactgattatttaaagtggctgtttccgacttccatgcggagcaatttgtaccggatctgctactctccctggggtcaggagttttcaatttgcaactactggcacgacccccaccatgacgacctgtacttgaatgctagctcatttctcgcgttgatcaatgggtag

SEQ ID NO: 80704 - DNA, 603 bp, Artificial Sequence
  derived and/or modified sequence
atgctgggcctgtgcggccagcggctgcccgccgcctgggtgctgctgctgctgcctttcctgcccctcctgctgctggcagcaccagctccccatagagcaagctacaaacctgtgattgtggtgcatggcctgttcgactcctcctacagcttccgccatcttctcgagtatataaacgagacacacccaggaacagttgtgaccgtccttgacctgtttgacggccgtgagtctttacgccccctttgggagcaggtgcagggttttcgtgaggccgtggtccctatcatggccaaagctccgcagggcgtacacctcatttgctattctcagggggggttggtctgccgagctctgctctcggtgatggatgatcacaacgtagactcattcatttccctctcaagtccccaaatgggacagtacggagatacagattacttgaaatggctcttcccgacctccatgaggtccaatctttatagaatatgctactcgccgtggggacaggagttctctatttgtaattattggcatgaccctcatcatgatgacctctacctgaacgcgagcagctttttggctctcataaatggctag

SEQ ID NO: 80705 - DNA, 441 bp, Artificial Sequence
  derived and/or modified sequence
atggacgaccacaacgtggacagcttcatcagcctgagcagcccccagatgggccagtatggagatacagattacctgaaatggctttttcctacctccatgaggagtaacttgtacaggatctgctatagcccgtggggccaagagttttcaatttgcaactattggcacgacccacaccatgacgatttgtacctcaatgcgagctcgttcctagctctaatcaacggcgagcgagaccatcctaacgcaactgtctggagaaaaaacttcctgcgggtggggcacctggtgcttattggagggccagatgatggggtcatcaccccctggcagtccagcttctttggcttctatgatgcaaatgaaaccgtcctcgagatggaagaacagctacctgttggctcttcggtgaaggctaaccatggagtgcaggggtag

SEQ ID NO: 80706 - DNA, 477 bp, Artificial Sequence
  derived and/or modified sequence
atgctgggcctgtggggccagcggctgcccgccgcctgggtgctgctgttgctcccttttcttcctttgctgcttcttgctgcccccgcgccccaccgggctagttacaagcccgtgattgtggtccacggtctgttcgactcatcatatagcttcagacatcttctagagtacatcaatgagatgggtcagtacggggacactgactatttgaagtggctgttcccaacatcgatgcgctccaacctctaccgcatctgctactccccctggggccaggaattttctatatgcaattattggcacgacccgcatcacgacgacctttacctgaatgcctctagctttctggctctcataaacggtgaacgtgatcatccaaacgcaaccgtgtggcgcaagaacttcctccgggtgggtcatctagtcttaataggagggccagatgatggggttatcaccccttggcagagttag

SEQ ID NO: 80707 - DNA, 909 bp, Artificial Sequence
  derived and/or modified sequence
atgctgggcctgtggggccagcggctgcccgccgcctgggtgctgctcttattacccttcctccctcttctgttactggctgcacctgcgccccatagagcatcttacaagccagtgattgtcgtgcacggactgtttgatagttcttactccttccgccacctcctggagtatatcaacgaaacccatccagggacagtggtcacagtgttggatctgttcgacgggagagagtctctgagacctctgtgggaacaggtccagggattccgtgaggctgtcgtacccatcatggccaaagcccctcaaggcgttcatcttatatgttactctcagggagggttggtttgccgagcactgctcagcgtcatggacgaccataacgtagattcttttattagcctctccagcccacagatgggccagtacggagacacagactaccttaaatggttgttcccgacttccatgcgcagcaatctgtaccggatttgttatagtccatggggccaagagtttagcatctgcaattactggcacgacccccaccacgacgacctgtacttaaacgcttcctcctttctagcgctaattaatggcgaaagggatcaccctaacgccactgtttggcgcaaaaatttcctccgagtcggacatctggtcctgataggcggacctgatgacggagttatcaccccatggcagagtagcttttttggcttctatgacgctaacgagaccgtactagagatggaggagcagcttgtttacctcagggattccttcggactaaaaacacttcttgctcgcggcgctatcgtgcggtgccctatggctgggatttcccacaccgcctggcactcgaacagaacactctacgaaacttgtatagagccctggcttagctag

SEQ ID NO: 80708 - DNA, 909 bp, Artificial Sequence
  derived and/or modified sequence
atgctgggcctgtggggccagcggctgcccgccgcctgggtgctgcttttgctcccctttctcccactgctgctgctcgcggcccccgctccccacagagcttcttataagcctgtcattgtggttcacgggctctttgattcctcttactctttccgccacttactggagtacattaacgaaacgcacccaggcacagtcgttactgtgctggacctcttcgatggccgtgaatcgctccggcctctgtgggagcaggtgcagggcttcagggaggccgttgtgccgataatggctaaagccccccagggagtccatttgatctgttatagtcagggggggctcgtctgcagggctctcctgtcagttatggacgaccacaacgtggatagctttattagcctcagctcaccccagatgggccaatacggagacaccgattacctcaagtggctgtttcccacatccatgcgcagcaacctctatcgcatctgttactcaccatggggccaagaattcagtatatgcaattattggcatgacccccatcatgacgatctgtacctgaacgcctcctcctttctcgctctgattaacggggagcgggaccaccccaatgctacggtttggcgcaaaaatttcctaagggtggggcacttggtcctcatcgggggtccagacgacggtgttatcactccctggcagtctagcttcttcgggttctatgacgccaatgaaactgtgcttgagatggaagaacagctggtgtatctgagagattcgtttgggctcaaaacgctgctggctcggggcgcaatcgtgagatgcccaatggccggaatcagtcatacggcttggcacagtaacaggaccctgtacgagacttgcattgaaccgtggctctcctag

SEQ ID NO: 80709 - DNA, 909 bp, Artificial Sequence
  derived and/or modified sequence
atgctgggcctgtggggccagcggctgcccgccgcctgggtgctgcttcttctgcctttcctgcctctcttgttgctggcagcccccgctccacaccgcgcgagctataaacccgtcattgttgtccatggtctcttcgactcttcatactccttccggcatctacttgagtacatcaatgaaacacaccccgggacagtagtgaccgtattggacctctttgacggacgagagtcccttcgcccattatgggaacaggttcaggggttccgcgaagccgtcgtgcctatcatggccaaagccccacagggtgtacaccttatctgttacagtcaaggaggcctcgtgtgtagagcattactcagcgtgatggacgatcacaacgttgattcgttcattagcttgagctccccacaaatgggccagtacggggacaccgattacctcaaatggctgtttccaacatccatgcgttccaatttatacagaatatgttattctccctggggccaagagttcagcatatgcaactactggcatgatccccaccacgatgacctgtatctcaacgcatcgtcatttctggcattaatcaacggcgaacgggatcatcccaatgctaccgtttggcgaaaaaactttcttagagtaggacatctggttctgattggagggccggacgatggagtgattacaccatggcagagcagtttttttggcttctatgatgccaacgagacagttctcgagatggaagagcaactggtgtatttgcgcgactccttcggattaaaaactctgctagcacggggcgcgatcgtgcgctgtccaatggctggcataagtcacaccgcctggcactccaatcggaccttgtatgagacctgtatagagccttggttgtcctag

SEQ ID NO: 80710 - DNA, 282 bp, Artificial Sequence
  derived and/or modified sequence
atgctgggcctgtggggccagcggctgcccgccgcctgggtgctgctactgctcccgtttcttcctctgttgcttttagccgcaccggcacctcaccgggaatcttacaaaccggttatagtggtgcacgggctctttgatagctcttactcatttagacacttgttggagtatataaatgaaggcgcattatgcgctggactttgttttctatcctggatgatcacaacctggattctctcatccccaagtccactgcaccgttgggactcgatggaatag

SEQ ID NO: 80711 - DNA, 603 bp, Artificial Sequence
  derived and/or modified sequence
atgctgggcctgtggggccagcggctgcccgccgcctgggtgctgctgctccttccattcctcccactcctcctattggctgctcctgctccccacagagcaagctacaagccagtgatcgtcgtgcacggcctcttcgatagcagctattcttttcggcatctccttgaatacatcaacgaaactcaccctggcactgtggtaacagtgctggaccttttcgacgggcgagaaagtttacgcccactctgggagcaggtgcagggattcagagaggcggtggtccccatcatggccaaggcaccacagggagtgcacttgatatgttacagtcaaggcggtcttgtctgtagggccttattgtctgtcatggatgaccataacgttgacagttttatctctctttccagcccgcagatggggcagtatggggacacagactatctgaaatggctctttcccacctctatgaggtccaacctctaccggatttgttatagtccctggggacaggagtttagcatctgcaactactggcatgatcctcatcacgacgatctctacctcaatgcatctagtttcctggccctaatcaatggctag

SEQ ID NO: 80712 - DNA, 603 bp, Artificial Sequence
  derived and/or modified sequence
atgctgggcctgtggggccagcggctgcccgccgcctgggtgctgcttttgctcccattcttgccgctgctacttctggccgctccggccccgcacagggctagctacaagcccgtgatcgtcgtccatggtctgttcgacagtagttatagctttcggcatcttctcgagtatataaacgagacacatcccggaaccgtggtgacagttcttgacttgtttgacggaagagagagtctgcgcccactctgggaacaggtgcagggctttcgggaggccgtggttccaatcatggcaaaagctccgcaaggagtgcatctcatatgctattcccagggagggctggtctgtcgcgccctccttagtgtcatggacgatcacaacgttgacagttttatatccctcagttctccccagatgggccagtacggcgacacagattatctcaaatggctttttccaacaagtatgaggagcaacttgtataggatctgttactctccatggggccaggaattctctatctgcaactactggcatgacccccatcatgacgatctctatttaaacgcctcctcatttctggctttgataaacgggtag

SEQ ID NO: 80713 - DNA, 909 bp, Artificial Sequence
  derived and/or modified sequence
atgctgggcctgtggggccagcggctgcccgccgcctgggtgctgctgttgctgccattcctgccactgctgctcctggcagctcccgcaccgcacagagcttcctacaaacctgtcattgtggtgcatggactgtttgattccagttatagtttcaggcatttgttggaatatatcaacgagacacaccctgggacagttgtgacggttctcgatctcttcgacggaagggaaagcctgcggcccttatgggagcaggtccaggggttccgtgaagctgttgtgcctatcatggccaaagctccccagggtgtgcacctgatttgctatagccaaggcggcttagtctgtagagcccttctgtccgtgatggacgaccataacgtcgattcattcattagtctgtcgtctccgcagatgggacagtatggcgacaccgactaccttaaatggctcttccccacttccatgagatccaacctttacagaatttgttactcaccctggggacaggaattttccatctgtaactattggcatgacccgcatcatgatgatctgtacttgaacgctagcagctttttggccctgattaacggagaaagagatcacccaaatgccaccgtatggcgcaagaactttctacgcgtcggacacctcgtcctcataggtgggcctgacgatggagtcattacaccttggcagtcctccttctttggtttttacgacgccaacgaaacagtgctggagatggaggaacagctggtttatctgagagattccttcggtctcaagacactcctggcaaggggagccattgtgcgctgtcccatggctgggattagtcacaccgcctggcactcaaatcgcacactctacgagacttgcatcgaaccatggttatcgtag

SEQ ID NO: 80714 - DNA, 906 bp, Artificial Sequence
  derived and/or modified sequence
atgctgggcctgtgcggccagcggctgcccgccgcctgggtgctgctgctcctcccctttctacccctcctgttactcgcggctccagctcctcaccgtgctagctataaacccgttatcgtggtgcacggcctctttgactcaagttactccttccgacacctcttagagtacattaacgagacccaccctgggactgttgttaccgtcctagatttgtttgatggccgggagtcactgaggcccctatgggaacaagttcagggattccgcgaagcagtggtgccaatcatggctaaagcgccacagggggtacatctcatctgctattctcagggaggactggtgtgtcgagcccttttgtccgtcatggatgatcacaatgtggacagcttcattagcttgtcatctccacagatgggccagtatggggacaccgattacctcaaatggcttttccccacaagtatgcgctccaacctatatcggatttgctattccccatggggacaggaattctccatctgtaactattggcacgatcctcaccatgacgatctatatctgaatgccagttcctttctggcactcataaacggcgagcgcgaccatcccaacgccacagtctggcggaagaacttcttgcgcgttgggcacctggtgctgatcggtggacctgatgacggagtgattacaccttggcaatctagcttttttgggttctatgacgccaatgagacagtgctggagatggaagagcagctcccagcacgccctacccatcagtccgagctgctattactcaggctagtgtgtctgaagccaccacgaaggaaaaagccagcctgccgtgttcaacgacagtccgagtcctggggtccggggctcagttgcgccctgtcttag

SEQ ID NO: 80715 - DNA, 477 bp, Artificial Sequence
  derived and/or modified sequence
atgctgggcctgtggggccagcggctgcccgccgcctgggtgctgcttctactcccctttctccctctgttactcctggcagctcctgccccccaccgggaaagctacaaacccgtcattgtggtgcatggcctcttcgattcgagctactccttccggcacctcctggaatacatcaatgagatgggacaatatggtgataccgactatcttaagtggctgttccccacttccatgcggagcaatctctatcgcatttgttactccccttgggggcaggaattctcaatctgtaattattggcatgatccccatcatgatgatctctaccttaacgcatcttcttttctggctcttattaacggagaacgtgatcaccccaatgcgacagtctggcgcaagaatttcttgcgggtgggtcatttagttctgataggggggcccgacgacggggttataacaccgtggcagagctag

SEQ ID NO: 80716 - DNA, 543 bp, Artificial Sequence
  derived and/or modified sequence
atgctgggcctgtggggccagcggctgcccgccgcctgggtgctgcttttactgcccttccttcctctgctgctactcgctgctcctgccccccaccgcgccagttataaacctgttattgtggtccacggcttgttcgacagtagttattcattcaggcaccttctggaatatattaacgagactcaccccgggaccgtcgtgactgtcctcgacctgtttgacgggcgcgagtcactaaggccactctgggaacaagtgcagggctttcgggaggccgtcgtacccattatggccaaagccccgcagggggtgcaccttatatgttacagccaaggtggtctggtgtgccgtgcgctgctctcggtgatggatgaccacaacgtcgactcatttatctcattatcatcccctcagatgggccagtatggcgacaccgattacctcaagtggctcttcccaacctctatgcggtctaacttgtacagaatctgctactcaccgtggggccaggagtttagcatttgtaattactggcattag

SEQ ID NO: 80717 - DNA, 603 bp, Artificial Sequence
  derived and/or modified sequence
atgctgggcctgtggggccagcggctgcccgccgcctgggtgctgcttctgttaccctttctgcctcttcttctccttgccgctcctgcaccacacagagccagctacaagcctgtgatcgttgtgcacggcttgtttgattcatcatacagcttccgccacctgctcgaatatattaacgagacacacccaggtaccgtcgtcacggtccttgacctttttgacggaagagaatccctcagacctttatgggaacaggtccaggggtttcgcgaagcagttgtgcccataatggcgaaggctccgcagggagttcacctgatatgttattcccagggtggtctcgtttgccgcgccctgctgtcagtcatggatgaccacaatgtggactcgttcatcagcctgtctagtccccagatgggccagtacggagacacggactacttaaagtggctcttcccgacatcaatgcgatccaatctgtacaggatctgctatagtccctggggccaggaattcagtatctgtaactactggcacgaccctcatcacgatgatctctacctgaatgcaagtagctttctggccctaatcaacggctag

SEQ ID NO: 80718 - DNA, 909 bp, Artificial Sequence
  derived and/or modified sequence
atgctgggcctgtggggccagcggctgcccgccgcctgggtgctgctgttactgccttttctgccattgttgctactcgccgcccctgcgccccacagagccagctataagccagttatcgttgtgcatggcctcttcgactcgtcttattcattccggcatctgctcgagtacattaatgagacacatcccgggaccgtggtaaccgtcctggacctgtttgatggtagggagagcttgcgcccactgtgggagcaggtacagggatttcgagaagctgtcgtgccaataatggcgaaggcccctcaaggggtgcacctaatttgctactcacagggcggcctggtgtgtcgcgccctcttaagcgtgatggacgaccataatgtggatagctttatttcgcttagctctcctcaaatgggacaatacggagatacagactacctgaaatggctgttccccactagtatgcgcagcaatttatatagaatttgctatagcccatgggggcaggagttttccatttgcaactactggcatgatccccaccacgatgacctctacttgaatgcctcatcatttttggctttgataaatggagaaagggaccatcctaacgccacagtgtggcggaagaacttcctgagggtcggccacctagtgctcataggagggcccgatgacggggtgatcacaccttggcagtcctcattctttggattttacgatgctaacgagactgtgctcgagatggaagaacagttggtttaccttagagactcctttggcctgaagactctcctcgctcggggagccatcgtgaggtgtcccatggccggcatttcgcacactgcctggcattctaatagaacactctacgagacttgtattgaaccttggttgtcttag

SEQ ID NO: 80719 - DNA, 909 bp, Artificial Sequence
  derived and/or modified sequence
atgctgggcctgtggggccagcggctgcccgccgcctgggtgctgcttctgcttccattcctgcccttgctgctgctggctgcgcccgctcctcacagagcctcttacaaaccagtcattgtcgtccacgggctgtttgatagctcatactctttcaggcacctgctggaatatatcaatgaaacccaccccggaacagttgttaccgtccttgatctttttgatggacgtgaaagtctccggcccctgtgggagcaggtgcagggcttcagagaggctgttgtgccaattatggcgaaagctccccagggtgtgcaccttatttgctattctcagggaggactggtctgtcgggctctcctcagtgtgatggacgaccacaatgtcgattcgtttatttctctgtcttcccctcagatgggacagtacggagataccgactaccttaaatggctttttcccaccagtatgcggagcaatctgtatagaatttgttattctccctggggccaggagttctcgatctgtaactattggcacgaccctcaccacgatgatctctacctgaacgctagtagctttctggcactcattaacggcgagagagaccacccaaatgctactgtatggcggaaaaatttcctccgggtgggccatctcgtactgatcggcggccccgatgacggcgtgattacgccttggcaaagctcatttttcggtttctatgacgccaatgagaccgtcctggagatggaagagcagcttgtgtatctcagggactccttcggactgaagaccctgcttgctaggggcgccatcgtgcggtgtcctatggctggtatctcgcacacggcttggcactctaaccgaacactctacgagacatgcatcgaaccctggctgtcttag

SEQ ID NO: 80720 - DNA, 282 bp, Artificial Sequence
  derived and/or modified sequence
atgctgggcctgtggggccagcggctgcccgccgcctgggtgctgttgctgctgcctttcttgccccttctgctgctcgctgcgcccgcccctcacagagccagctataaacctgtaattgtggtgcatggcttatttgatagcagctattctttccgacacttactggaatatattaacgaaggcgctctctgcgcagggctgtgttttttgtcttggatgatcacaacctggatcctcagttctcctagcccactgcatagatgggactctatggaatag

SEQ ID NO: 80721 - DNA, 282 bp, Artificial Sequence
  derived and/or modified sequence
atgctgggcctgtgcggccagcggctgcccgccgcctgggtgctgctgctccttccctttcttccattgcttctgttggccgcgccggcacctcaccgcgcaagttataagcctgttattgtggtgcatggcctgtttgattcttcatactcattcaggcacttgctggagtatatcaacgagggcgctctttgtgccgggttgtgtttcctatcttggatgatcaccacatggattctgtcaagcccttcacccttgcacagatgggatagcatggaatag

SEQ ID NO: 80722 - DNA, 909 bp, Artificial Sequence
  derived and/or modified sequence
atgctgggcctgtggggccagcggctgcccgccgcctgggtgctgttactcctgccttttctgcctctgcttctgcttgcagcaccagccccacaccgcgcctcatacaaacctgttatagtggtccatgggcttttcgactcctcttactcatttagacacttgcttgagtacatcaacgagacacaccctggcactgtggtcacagtactcgatctgttcgatggcagagaatccctgagaccactgtgggagcaggtccagggttttcgggaggccgtagtgcctattatggctaaagccccacagggcgtgcacctcatctgctacagtcagggtggtttggtgtgtcgggctcttttatccgtcatggatgaccacaatgtggatagcttcatctcactgtcgtctccacaaatgggacagtatggtgataccgactacctgaagtggttgtttcctacctccatgcgcagcaatctatacaggatctgctactcaccttggggacaggaattcagtatctgtaattactggcatgatcctcaccacgatgacctttatctgaacgccagcagctttctcgctcttatcaacggagaacgcgaccatccaaacgccactgtctggcgcaagaacttcctgcgcgtcgggcacctggtcctcattggcgggcctgacgatggtgttatcaccccctggcagtcatcctttttcggcttttatgacgctaatgaaacggtgttggagatggaggaacagttggtatacctccgggactcttttggcctgaagacactgctggctaggggagccatcgtgcgctgtcccatggcggggatttctcataccgcctggcattctaaccggacgctctatgaaacctgtattgaaccatggctgtcctag

SEQ ID NO: 80723 - DNA, 909 bp, Artificial Sequence
  derived and/or modified sequence
atgctgggcctgtggggccagcggctgcccgccgcctgggtgctgctgttactgcccttcttgcctctgcttttactcgcggcacccgccccccacagggcctcctacaaaccagtgattgtggtgcacggtctttttgatagcagctactccttcaggcatctactggaatatattaatgaaacccacccaggaactgtggttaccgtcctcgacttatttgatggccgggagtctctgcgaccgctgtgggaacaggtgcaggggtttagggaagcagtcgtgccaatcatggccaaggctccacaaggagttcacctcatatgctatagccagggcggtctcgtgtgtcgcgcgctcctgagcgtgatggatgatcacaatgtcgatagcttcatatcactgtcatcccctcagatgggtcagtacggagatacagactacttgaagtggctctttcctacgtcaatgaggagcaacctgtataggatctgttacagcccatggggccaagagttttccatatgtaattactggcatgacccacaccatgatgacctgtatttgaatgcctcgtccttccttgctcttattaatggagagagggaccatccgaatgccaccgtttggcgcaagaatttccttagagttggccacctggtgctgatcggaggcccagatgacggagtaatcaccccttggcagtccagctttttcgggttttacgacgccaatgaaactgtactggaaatggaagaacagttggtttacctgcgggactcatttgggctgaaaacgctactcgcacgaggtgccatcgtcagatgcccgatggcaggcatttctcatacagcttggcactcgaatcgcaccctttatgagacttgtattgaaccatggctgtcatag

SEQ ID NO: 80724 - DNA, 543 bp, Artificial Sequence
  derived and/or modified sequence
atgctgggcctgtggggccagcggctgcccgccgcctgggtgctgttgctgctgcctttcctgcctctgctgcttctggccgccccggccccgcaccgggaaagctacaagcctgtgatagtcgtgcatgggctcttcgacagcagctactctttccgccaccttcttgaatacattaatgaaacgcatcctggtactgtcgtgactgttcttgatctctttgatggacgggaaagcctgagaccactgtgggagcaggtgcaggggtttagggaggccgttgtgccaatcatggctaaagcgccccagggcgtccacctaatatgctactcacagggcggactggtgtgcagagccctcctgagtgtaatggatgatcacaacgtggactcctttataagcctgtcctctccacaaatgggccaatatggcgatactgattatcttaagtggctcttccccacttcaatgagaagcaatctgtaccggatttgctactctccctggggacaggagttctcaatttgtaactactggcattag

SEQ ID NO: 80725 - DNA, 543 bp, Artificial Sequence
  derived and/or modified sequence
atgctgggcctgtggggccagcggctgcccgccgcctgggtgctgctgctccttccttttctgccactgcttctactggccgcacccgctccacatcgtgagtcttataaacccgtgatcgttgttcacggtctcttcgactcctcctactcctttcgccatttgctggaatacatcaatgagacgcacccaggaactgtcgtgacagtactggacctgttcgatggtcgcgagagtctgaggcctctttgggagcaggtccagggcttccgtgaggccgttgtgcccattatggcaaaagctccgcaaggagtgcatcttatctgctatagccaagggggattagtctgtagggctttgctcagcgtaatggatgaccataacgtggattcctttatcagtctgagcagtccccagatgggacagtacggggataccgactatttaaagtggctctttccaactagcatgcgcagcaatttgtaccgtatctgttattctccttggggacaggaattctccatttgtaactactggcactag

SEQ ID NO: 80726 - DNA, 282 bp, Artificial Sequence
  derived and/or modified sequence
atgctgggcctgtggggccagcggctgcccgccgcctgggtgctgctcctgctgcccttcctgccgctgctactgttggcggctcctgcacctcacagggaatcttataaacctgtgatcgtagttcacggcttattcgatagctcctattcattccgccatctcttggaatacataaacgagggtgccttatgtgcaggcctgtgctttctgagttggatgattacaacttggatcctgagctctcccagcccactccatagatgggacagcatggagtag

SEQ ID NO: 80727 - DNA, 711 bp, Artificial Sequence
  derived and/or modified sequence
atgctgggcctgtggggccagcggctgcccgccgcctgggtgctgcttctcctgcccttcttacccttgctcctcctcgctgcaccagccccacaccgtgagagttacaagcctgtgattgtcgtacatggtctctttgattccagctacagcttccggcatctgttggaatacattaatgagacacatccagggacggtagttacggtgctggacctgttcgacggtcgcgagagcctgagacctttatgggaacaggtccagggatttcgtgaggccgtagtcccaattatggccaaagcaccacagggagttcaccttatctgctacagccaggggggattggtttgtagagctctgctatctgtgatggacgaccataacgtagatagctttatctcattatctagccctcagatgggacagtatggagataccgactaccttaagtggctgttccctacctccatgcgatcgaatctgtataggatctgttacagtccttggggacaagaattctcaatttgcaattactggcacgatccacaccatgacgacctctatttgaacgcgtccagcttcctggcgctgatcaatggtgagagggaccaccccaacgccacagtgtggaggaagaactttctcagagtgggacatctggtgttaattggagggcctgacgatggggttataaccccttggcagtcctag

SEQ ID NO: 80728 - DNA, 165 bp, Artificial Sequence
  derived and/or modified sequence
tgacacgacgacctgtacctgaacgccagcagcttcctggccctgatcaatggagagagggaccacccaaatgctacggtatggcgtaagaatttcctgcgggtgggccatcttgtgctgatcggtggccctgacgacggggtgattacgccatggcaaagttag

SEQ ID NO: 80729 - DNA, 711 bp, Artificial Sequence
  derived and/or modified sequence
atgctgggcctgtggggccagcggctgcccgccgcctgggtgctgctgctgctgcccttcctgcccctgctcctgttggccgccccggccccccaccgcgagtcctacaaaccagtaattgtcgtgcacggactgttcgattctagctattccttcagacatttgttggaatatattaatgagacccacccaggcactgtggtgactgtcctggacttgtttgacgggagggagtccttgcggccactgtgggagcaagtccaggggtttcgcgaggccgtcgtgcctataatggctaaagctccacagggtgtccacttaatttgctactctcagggcgggctggtgtgccgcgctctcctgtccgttatggatgaccacaacgtggattcatttataagcttgagttcaccacagatgggacagtatggagataccgattacttgaagtggctcttcccgaccagcatgagatcaaacctttatcgcatctgttactctccctggggccaagaattctccatttgcaattattggcatgacccacaccacgatgatttatacctgaacgcgagctcctttctggccctaataaacggagagcgcgatcaccctaatgcgaccgtctggaggaaaaattttctcagagtagggcacctggttctgattggcggacccgacgatggtgtcatcacaccatggcagagttag

SEQ ID NO: 80730 - DNA, 909 bp, Artificial Sequence
  derived and/or modified sequence
atgctgggcctgtggggccagcggctgcccgccgcctgggtgctgttactgctcccgtttcttccactgctgctgctggctgcgccagcaccccatagagccagttacaagcctgtaatcgttgtgcatgggttgttcgacagtagttactccttccgccacctgttggagtatatcaacgagacccacccaggtacagttgtaacggtgctggacctcttcgatggtcgtgagagtctaaggccactctgggagcaggtgcaaggattcagggaagctgttgtgccaatcatggctaaagcccctcagggtgttcacctgatttgttactcccaaggggggttagtgtgtagagctctgttgagtgtgatggatgaccacaatgtcgacagcttcatctccctttcaagcccacaaatggggcagtatggagataccgactacttgaaatggttattccctacctcaatgaggtctaatctttaccggatctgttatagtccgtgggggcaggaatttagcatatgcaattactggcatgatccacaccacgacgatctctatctgaacgccagttctttcctcgccctgatcaacggtgagagagatcatccaaacgccacagtgtggcgcaagaactttctacgcgtgggccacctggtgctcatcggtggaccggacgacggagttatcaccccttggcagtcatcttttttcggcttctatgatgccaacgagacggttctcgagatggaagagcagcttgtttacctgcgtgacagtttcggactgaagacactcttggcgagaggggcaattgtgcgctgtcctatggctggcatctcacacactgcatggcattcaaaccgaacgttgtacgagacgtgcattgaaccttggctgagctag

SEQ ID NO: 80731 - DNA, 909 bp, Artificial Sequence
  derived and/or modified sequence
atgctgggcctgtggggccagcggctgcccgccgcctgggtgctgttgcttctgcccttcctgcctcttttgcttctggctgctcctgccccacatcgagcctcctacaaacctgtgatcgtggtgcatggcctgtttgactctagctactcatttaggcatctgctggaatacataaacgaaacacaccccgggaccgtggtgactgtgctcgatctcttcgacggccgggaatctctccggcccttgtgggagcaggtacagggattcagggaagctgtggtccctatcatggccaaagcacctcagggcgtgcatctaatctgctactcccagggaggcctcgtctgtcgcgctctcctcagtgttatggatgatcataatgtcgacagcttcataagcctgtctagcccacaaatgggtcagtacggggataccgactatttaaagtggctgtttcctacaagcatgcgatcaaatctctacaggatctgctatagtccatgggggcaggaatttagcatttgcaactattggcatgacccgcaccacgacgacctttacctgaacgccagcagtttccttgctctcattaacggagagagggaccaccctaacgccacggtctggagaaagaactttctgagagtcgggcacttagtactgataggaggccctgacgatggagtaatcacaccatggcagtcttcatttttcggcttttacgacgccaatgagaccgtgctggagatggaggaacagctggtgtacctgcgcgattccttcggactcaaaacacttctggcccggggtgctatagtccggtgtccaatggccgggattagccacactgcatggcattcgaaccggacactttacgagacgtgtatcgaaccttggttgagttag

SEQ ID NO: 80732 - DNA, 909 bp, Artificial Sequence
  derived and/or modified sequence
atgctgggcctgtggggccagcggctgcccgccgcctgggtgctgctgctgcttcctttcttgcccctgctgctattggcagctcccgccccacacagggcgagctacaaacctgtgatagtggtgcacggtttgtttgatagcagctacagcttccgtcatttgttagagtacatcaacgagacacacccaggaacggtcgtcacggttctagacctcttcgacgggagagagagtctgagacccttgtgggaacaggtacagggatttcgtgaggctgtggtaccaattatggcaaaagctccccaaggcgtccatttgatttgttactcgcaggggggcctcgtttgtcgcgcactcctttcagttatggatgaccataacgtcgacagcttcatttcactgtcttctccccaaatgggtcagtacggagacacggattacctaaagtggctgttccctacttcgatgaggagtaacctctataggatttgttactctccttggggacaggaattttctatttgcaactactggcatgacccacatcacgacgatttgtatctgaatgcctccagctttcttgcactcatcaacggagagcgcgaccaccccaatgcaactgtgtggcgtaagaacttcctgcgagtcggacatttagtgttaatcggcggtcctgacgatggcgtgatcactccgtggcagtcctcctttttcggattctatgacgcaaatgaaactgtgctagaaatggaggagcaactggtctatctccgtgatagcttcgggctgaagacccttctcgcacggggcgcaattgtgagatgccctatggctggcatttctcataccgcatggcacagcaaccgcaccttgtacgaaacctgtatcgaaccgtggctctcttag

SEQ ID NO: 80733 - DNA, 441 bp, Artificial Sequence
  derived and/or modified sequence
atggacgaccacaacgtggacagcttcatcagcctgagcagcccccagatggggcagtatggagatactgactacctgaagtggttgtttccaacctcaatgcggagcaatttgtatcggatctgttatagtccctggggccaagaattcagcatctgtaattattggcatgaccctcaccacgatgacctgtacctgaacgcctccagtttcctcgcactaatcaatggcgaaagagaccaccctaacgctacggtgtggaggaagaacttcttgcgtgtcggtcacctcgtgctcattggaggaccagatgacggtgtgatcacaccgtggcagagtagtttctttggattctacgacgcaaacgaaaccgtgctggagatggaagagcagcttccggtgggcagctctgtgaaggctaatcatggcgtgcaggggtag

SEQ ID NO: 80734 - DNA, 906 bp, Artificial Sequence
  derived and/or modified sequence
atgctgggcctgtggggccagcggctgcccgccgcctgggtgctgctgctgctccccttccttcccctgctgttgctcgccgcccccgctccacacagagcatcttataaacctgttatcgtggtccatgggctcttcgacagtagttattcattcaggcatctcctggaatacattaacgagactcaccccggtacagtagtgacggtgttagatttatttgacggcagggagagcctgaggcccctgtgggaacaggtgcaaggcttcagagaggccgtggttcctataatggctaaggcaccccagggggtgcatctcatctgctatagccaagggggactcgtctgcagggcccttctgagtgtgatggacgaccataatgtcgactcattcatttctctctcttctccacagatgggtcagtatggtgacacagactaccttaagtggttatttccaacgagtatgcgaagcaacctttatcgaatctgttacagtccctggggccaggaattttcgatttgcaactattggcacgacccccaccacgatgacctatacctgaatgcctcctcctttttagctcttattaacggtgagagagatcaccctaatgccaccgtatggcggaagaacttcctccgggtgggccacctcgtattaatcggcgggccagacgacggcgtgattacaccttggcagagcagttttttcggtttctatgacgctaatgaaaccgtgctggaaatggaagaacagctgcccgcccgacctacacaccaaagcgagctgctgctgttaaggctggtctgtctgaagccgccacgccgcaaaaagccagcttgccgagttcagcgtcagtccgagtcatggggcccaggactgtcttgtgccctcagttag

SEQ ID NO: 80735 - DNA, 909 bp, Artificial Sequence
  derived and/or modified sequence
atgctgggcctgtggggccagcggctgcccgccgcctgggtgctgttactcctgccttttctgcctctccttttattagcggctccagctcctcatagagaatcttataaaccagtgatagttgtgcacggcctgtttgattcctcttacagcttccgacatctgctcgagtatattaacgaaactcatccaggcacggtggtaacagtccttgatctcttcgatgggcgcgaatcccttcggcctctgtgggagcaagtccaagggtttagagaggccgtcgttccaatcatggcaaaggctcctcaaggtgtccacctgatctgctattctcaaggcgggctcgtttgcagagccctgctgtctgtcatggatgatcataatgttgactcctttatatcactgagttcacctcagatgggccaatacggggataccgattacctgaaatggctgtttccgacaagtatgcgctctaatctgtaccgtatttgctattcaccctggggacaagagtttagcatatgcaactactggcatgacccgcaccacgacgacctctacctgaacgcgagctcctttcttgctctaattaatggcgaaagggaccatcctaatgccaccgtgtggcggaagaattttttgcgggtgggccatctggtactaataggcggccctgacgacggagtcatcaccccctggcagagtagcttttttggtttttacgatgccaacgagaccgtgttggagatggaggagcagctcgtgtacctgcgcgatagtttcggcctgaagacattgctggctcggggggccatcgtgcgttgtcctatggccggcattagccacacagcatggcactctaataggaccctgtacgagacctgcatcgagccgtggctcagctag

SEQ ID NO: 80736 - DNA, 441 bp, Artificial Sequence
  derived and/or modified sequence
atggacgaccacaacgtggacagcttcatcagcctgagcagcccccagatgggtcagtacggagacactgactacctcaaatggttattccccacatccatgaggtccaatttgtaccggatctgttattcaccctggggacaggaatttagcatatgtaactactggcacgatcctcatcacgatgatctctatttgaacgcaagtagtttcttggccttaatcaatggcgagcgggaccatcctaacgctacagtctggaggaagaattttctgagggtggggcatctggtcctcattggagggccggatgacggcgtcatcaccccctggcagagctcatttttcggtttttacgacgccaatgagaccgtgttggaaatggaagagcagctgccggtgggctcatctgtgaaggccaatcatggcgtgcagggatag

SEQ ID NO: 80737 - DNA, 906 bp, Artificial Sequence
  derived and/or modified sequence
atgctgggcctgtggggccagcggctgcccgccgcctgggtgctgttgcttctgccctttcttccattactattactagctgcgcctgccccacatcgagcaagctataagcctgttattgtcgtgcatggtctctttgattctagttactcctttaggcacttattagagtacattaacgaaacacaccctggcacagtcgtaacagtcttggatttatttgacgggagagaatctctgagaccactgtgggaacaagtgcaggggttccgcgaggcagtcgtccctatcatggccaaagcccctcaaggggtgcaccttatatgctactcgcaggggggactcgtttgtcgggctctcctgagcgtaatggatgatcacaatgtggatagctttatcagcttgagcagccctcagatgggccagtacggagataccgactatcttaaatggctgtttcctacttccatgagaagcaacctgtataggatttgttactctccgtggggacaggaattctccatctgtaactattggcacgacccccatcacgatgatctgtatctgaatgcttcttcctttctggcactgattaacggggagagagatcaccctaacgcaacggtatggagaaagaactttttgcgcgtaggccatctcgtgctgatcgggggccctgacgacggagtgattaccccgtggcaaagctctttctttggcttctacgacgcgaacgaaactgtcctcgaaatggaagaacaactcccggcaaggccaacacatcagagcgaactgctacttctgcgactggtgtgcctgaagcctcccaggagaaagaaacccgcttgtcgcgtgcagagacagagtgagagctggggacccggcttaagctgtgcattaagttag

SEQ ID NO: 80738 - DNA, 441 bp, Artificial Sequence
  derived and/or modified sequence
atggacgaccacaacgtggacagcttcatcagcctgagcagcccccagatgggacagtatggcgacaccgattatctcaagtggctgtttcccactagcatgaggtcgaatctttatcgcatctgctacagcccatggggacaggaattctccatttgtaactactggcatgatccacaccacgacgatctttatttgaatgcatcctctttcctggctctgattaatggcgaacgggatcaccctaatgctaccgtgtggcgtaagaatttcctgagagtggggcatcttgtactgataggtggtcccgatgatggcgttattaccccttggcaatcaagttttttcggcttttacgatgctaacgaaactgtgctggagatggaagaacaactgccagtaggatcatccgtgaaggccaatcacggcgtgcagggctag

SEQ ID NO: 80739 - DNA, 906 bp, Artificial Sequence
  derived and/or modified sequence
atgctgggcctgtggggccagcggctgcccgccgcctgggtgctgctgttgctcccgttcttaccactgctcctgctcgcagcaccagcaccccatagagcctcttacaaaccagtaattgtggtgcatggcctctttgatagctcctatagctttagacatttactggagtacatcaatgagacccacccaggaactgttgttaccgttctggatctgttcgatggtcgggagagcctgaggcctctgtgggagcaggtgcaggggtttcgggaggccgtggtaccaatcatggccaaagcccctcagggtgtgcacctgatttgttacagccagggggggctggtttgtagggcgctcctgtcggtaatggacgatcataatgtggacagcttcatcagcctctcaagtccgcagatggggcagtacggtgataccgactatctgaaatggcttttccccaccagcatgcgctccaacctttatcgtatctgctattctccatggggacaggaatttagcatttgtaattactggcatgacccccaccatgacgatttatatctgaacgccagttcatttcttgctctgattaacggggagagggatcatcccaacgccacagtttggagaaagaatttccttagggtggggcatctcgtgcttatagggggtcccgatgacggcgtaattacaccctggcagtcctcgttctttgggttttacgacgccaatgagacagtacttgaaatggaagaacaactgccagccagacccacacaccagtctgagctgctcctgcttagactggtttgtttgaagccacctcgccggaaaaagcccgcctgcagagtccaacggcagtctgagagctgggggcccggactgagctgcgcattatcctag

SEQ ID NO: 80740 - DNA, 441 bp, Artificial Sequence
  derived and/or modified sequence
atggacgaccacaacgtggacagcttcatcagcctgagcagcccccaaatgggtcaatatggtgacacggactatttaaaatggctgttccccacaagtatgcgatctaacctttataggatctgttacagtccctggggacaggagttctcaatttgcaactactggcacgatccccaccatgatgatctctatctgaacgcaagttcctttctggcactgatcaacggcgaaagggatcatccgaatgcaaccgtgtggcggaagaacttcctgagagtgggtcatctcgtcctcataggcggacctgatgatggggtgatcaccccttggcaaagtagcttctttggcttctacgacgccaatgagaccgttctcgagatggaagagcagctgccagtggggtcgagcgtgaaggcaaaccacggggtgcagggctag

SEQ ID NO: 80741 - DNA, 909 bp, Artificial Sequence
  derived and/or modified sequence
atgctgggcctgtggggccagcggctgcccgccgcctgggtgctgctactactaccctttctgcccctcttgctactggccgccccggcaccacaccgcgcctcatacaaaccggtgatcgtggtacacgggttgtttgatagtagttatagttttcgacacctgttggagtatatcaacgagacccatcccggcaccgtggtgaccgtgctggatctgtttgacggccgggaatcacttagacccctgtgggagcaggtgcaggggtttcgggaggcggtggtacccatcatggctaaggccccacagggggtacacctcatctgctatagccagggtgggctggtctgtcgggccttgctttccgtcatggacgatcataatgttgacagctttatctccctgtctagcccgcaaatggggcagtatggggacactgactacctcaaatggttgttccctacctccatgagatcgaatttatatcgcatctgttactctccctggggccaggaattctctatttgcaactattggcacgacccccaccacgatgatctctacctgaatgctagttcctttctcgccctcatcaatggagaacgcgatcatccgaatgctaccgtatggcgcaagaacttcctgagggtaggacaccttgtgctaattggcgggcccgacgatggagtgatcaccccgtggcaatcaagctttttcgggttttacgacgctaatgaaaccgtcctggagatggaagagcagctggtgtatttgagggattcattcggcctcaaaacgcttttggctaggggcgctattgtgcgatgtccgatggcaggaataagtcatactgcctggcattccaatagaaccctgtacgaaacctgcattgagccttggttgagttag

SEQ ID NO: 80742 - DNA, 441 bp, Artificial Sequence
  derived and/or modified sequence
atggacgaccacaacgtggacagcttcatcagcctgagcagcccccagatggggcaatacggtgacaccgactacctgaagtggcttttccccacatctatgcgttctaacctgtatagaatttgctactcgccgtggggtcaagagttctccatatgcaattattggcacgatccccaccacgacgacctgtatctcaacgcaagttctttcctggctctgattaatggcgaaagggatcaccccaacgctaccgtttggcgcaagaactttctccgggtcggacatctagtgctcatcggcggccccgacgacggagtaatcacaccttggcagtccagtttcttcggattttatgacgcgaacgaaacagtcctggagatggaggagcagctcccagttggctctagtgtgaaggccaaccatggcgttcagggatag

SEQ ID NO: 80743 - DNA, 909 bp, Artificial Sequence
  derived and/or modified sequence
atgctgggcctgtggggccagcggctgcccgccgcctgggtgctgttgctcctccctttcctgcccctcctcctgcttgctgccccagctccgcacagggcctcctataagccagtaatcgtggtgcacggactatttgactcctcttatagctttagacatttgctggaatatatcaatgaaacccacccaggcaccgtggtcacagttctggatctatttgatggtcgcgagagcctgcggcccctctgggagcaagtgcagggcttccgggaagccgtggtgcccatcatggccaaggccccacagggggttcatctgatctgctatagccagggtgggctggtgtgtagagcgctgttaagcgtgatggacgatcacaacgtggacagtttcattagcttatcttccccacagatggggcaatatggcgataccgattaccttaaatggctgttccccacgtctatgcggtccaatctatacagaatttgttattcaccctggggccaagagtttagcatctgtaattattggcatgacccccatcacgatgatctgtacttgaacgccagctctttcctggcactgatcaacggagaaagggaccaccccaatgccactgtatggcgcaagaacttcctgcgcgtggggcaccttgtgttgattggggggcccgatgatggagtgataaccccgtggcagagctcctttttcggattctacgacgccaacgagactgttcttgaaatggaggaacaactagtatatcttcgcgactcttttgggcttaaaaccttgttggctcgaggtgcgattgtaagatgccctatggctgggatcagccacacagcctggcatagtaatagaaccttgtacgagacatgcatcgaaccatggttatcttag

SEQ ID NO: 80744 - DNA, 441 bp, Artificial Sequence
  derived and/or modified sequence
atggacgaccacaacgtggacagcttcatcagcctgagcagcccccagatgggccagtatggggacaccgattatcttaaatggttgtttccaacttcaatgcgtagcaacttataccgtatctgttattcaccttgggggcaggaattttccatatgcaactattggcacgacccccatcatgacgatctgtatctcaatgcctcgtcatttcttgctctgattaacggcgagagggaccatcccaacgctacagtctggcgaaaaaatttccttcgtgtgggtcacttagtgctcattggtggccccgacgacggcgtaattactccctggcagtcctccttttttggattttatgacgctaacgagactgtgctggagatggaagagcagttgccggttggcagctccgttaaggccaatcatggcgttcagggctag

SEQ ID NO: 80745 - DNA, 906 bp, Artificial Sequence
  derived and/or modified sequence
atgctgggcctgtggggccagcggctgcccgccgcctgggtgctgttgctcttaccattcttgccactgttgctcctcgctgcacccgccccccatagggccagctataaacccgtaattgtagtgcatgggctgtttgattctagctactccttccgccacctgttagaatacatcaacgagactcacccagggaccgtagtgactgttttagatctctttgacggtagggaatcactgcggcctctctgggaacaagtgcaaggattccgcgaagccgtcgttcccattatggcgaaggctcctcagggcgtccacctgatctgctatagtcaaggcggcctggtatgtcgggctttgctctccgtcatggatgaccacaatgtggactctttcatttccctttccagcccccaaatggggcagtacggtgataccgactacctcaagtggctctttccgacttccatgcgctccaacttgtaccgcatctgttacagcccctggggtcaagaattcagcatctgtaattactggcacgatccccaccatgacgacttgtatttaaatgcatcttcgtttttggctcttataaacggagagagagaccaccctaatgctactgtgtggaggaagaacttcctccgcgtagggcatttagtactgattggcggaccagatgacggcgttataaccccgtggcaaagcagttttttcggattctatgatgccaatgagaccgttctcgaaatggaagagcaattaccagctagacccacccatcagtcagagctgctactactcaggctggtctgtcttaaacccccgagacgaaagaagcctgcctgtagagtacagcggcagagcgagagctggggcccaggactgtcctgcgccttgtcctag

SEQ ID NO: 80746 - DNA, 906 bp, Artificial Sequence
  derived and/or modified sequence
atgctgggcctgtggggccagcggctgcccgccgcctgggtgctgctgctgctacccttcctgcccctcctgttgcttgcagcccctgccccacacagagaaagctacaaacccgttatagtggtgcatggactgttcgactcatcttattcctttaggcacctgctggagtacattaacgagacacacccgggaacggtggtcaccgtgcttgatctgtttgacgggcgggagtcacttagaccactgtgggagcaggtgcaaggcttcagggaggctgtggtgcctattatggctaaagcccctcagggtgtgcatctgatttgctacagccaaggtgggttggtctgtcgggctctcctgtctgttatggatgaccacaacgttgattctttcatctctttgtcatccccacaaatgggccagtatggcgacaccgactacctgaagtggctgttcccaacctccatgcgcagtaatctgtacaggatctgttatagtccctggggccaggagttcagcatctgtaattactggcatgacccccatcacgatgacctgtatctaaacgcttcctcttttctggcactgataaatggcgagcgcgatcaccctaacgccacggtctggcggaagaattttctgagggtcggccatctcgttctcatcggaggtcccgatgacggggtaattactccctggcagtcctcttttttcggattctacgacgccaatgagacagttctcgagatggaagaacagctgcctgctagaccaacacaccaaagcgaactactgctcctgcggttagtgtgtctgaagcctcccagacgaaagaaacctgcgtgtcgcgtccagaggcaatcagagagttggggccctggactgtcctgtgccctgagctag

SEQ ID NO: 80747 - DNA, 906 bp, Artificial Sequence
  derived and/or modified sequence
atgctgggcctgtggggccagcggctgcccgccgcctgggtgctgctgcttcttccatttttgcctctgcttctgctggctgcaccagcccctcaccgggcctcttataagcctgtcatcgtcgtgcacggactcttcgactcatcttatagctttaggcatctcttagaatacatcaacgagacccaccccggaaccgtggtcacggtattggacctctttgacggcagagaaagcctgaggcccctctgggagcaggtccagggctttagggaggccgtggtccctatcatggccaaagcaccacaaggcgtacatctcatttgttatagtcaagggggcctcgtgtgccgggctttgctgagtgtaatggatgatcataacgtggactccttcatctctctgtcatctccccagatgggacagtacggggatacagactacttgaaatggctcttccccacttctatgaggtctaacctgtatcggatctgttattctccttggggccaggaattcagcatttgcaactactggcacgatccccaccacgacgacctgtacttgaatgcatccagttttctggccctgattaatggagagcgggaccaccctaatgcaacagtgtggagaaaaaatttcctgagagttggccaccttgtgctaattggcgggccagatgatggcgttataacaccttggcagtcctccttttttggattttatgacgccaacgagacagtgctggagatggaagagcagctgccagcacggccgacacaccaatcagaactcctcctgctgagacttgtctgcttgaagccaccaagacgtaagaagccagcgtgcagggtgcaacgccaatctgaatcgtgggggcctgggttgtcatgcgccctctcctag

SEQ ID NO: 80748 - DNA, 909 bp, Artificial Sequence
  derived and/or modified sequence
atgctgggcctgtggggccagcggctgcccgccgcctgggtgctgctgctcctccccttcctgccgctcctgcttctggcggcaccggcaccccatagagcctcttacaagcctgtcatcgtggtccacggtctcttcgatagcagctattcttttagacaccttctggagtacattaacgaaacccatcccggcactgttgtaaccgtacttgacttgttcgatggccgcgagtccctcagaccactatgggagcaggtgcaaggatttagagaggcagtggttcctatcatggccaaggcacctcaaggtgttcatctgatctgctattcacagggcgggctcgtgtgtagggcattactgtcagtgatggacgatcacaacgtcgatagcttcattagtctttcgtcaccacagatgggccagtacggcgataccgactacctcaagtggctctttcctacctctatgcggtccaatctataccgcatctgttactccccttggggacaggagtttagcatttgtaactattggcatgatccccatcacgacgacctgtatttgaatgcttccagctttctcgcgctaatcaacggcgaaagggaccatcctaacgccaccgtttggcgcaaaaatttcctccgcgtgggacacctagtcctcattggcgggcctgacgacggggttattactccgtggcagtcttcattcttcggcttttatgacgctaacgagacagtcctggaaatggaggaacaactggtctatcttagagattcatttgggctgaaaacactgcttgcacgaggagccattgtacggtgcccaatggcaggcatcagtcataccgcttggcattcaaacagaactctctatgagacctgcatcgagccatggctttcttag

SEQ ID NO: 80749 - DNA, 1945 bp, Artificial Sequence
  derived and/or modified sequence
acggatttgcgcgaccccaagcagcccgcccttccccctcccatccgtcattcccctgcgctctctttcctcacccttccccccgccaccgtgggttccagacttgggataagtaaacagcgggtggagcgaggcctacggacccaggccaggtgggagtctgcactcttcaaggggcctgggctgctgctcacgggtattaaagaactccgcgttgttcatggctgaggcgatgcattaggaagatcctggacctagagaacaagtcccccgaacgctgagttggaggcgggacttcgggcgggagcatgctggggctctgcgggcagcggctccccgcggcgtgggtcctgcttctgttgcctttcctgccgctgctgctgcttgcagcccccgcgccccaccgcgcgtcctacaagccggtcatcgtggtgcatgggctcttcgacagctcgtacagcttccgccacctgctggaatacatcaatgagacacaccccgggactgtggtgacagtgctcgatctcttcgatgggagagagagcttgcgacccctgtgggaacaggtgcaagggttccgagaggctgtggtccccatcatggcaaaggcccctcaaggggtgcatctcatctgctactcgcaggggggccttgtgtgccgggctctgctttctgtcatggatgatcacaacgtggattctttcatctccctctcctctccacagatgggacagtatggagacacggactacttgaagtggctgttccccacctccatgcggtctaacctctatcggatctgctatagcccctggggccaggaattctccatctgcaactactggcatgatccccaccacgatgacttgtacctcaatgccagcagcttcctggccctgatcaatggggaaagagaccatcccaatgccacagtatggcggaagaactttctgcgtgtgggccacctggtgctgattgggggccctgatgatggtgttattactccctggcagtccagcttctttggtttctatgatgcaaatgagaccgtcctggagatggaggagcaactggtttatctgcgggattcttttgggttgaagactctattggcccggggggccatagtgaggtgtccaatggccggtatctcccacacagcctggcactccaaccgtaccctttatgagacctgcattgaaccttggctctcctgaggatatattcaggggtccccaggaactcctcggtccagagaccaagtggtggccttggaaagcagatgtcaggctttggtgtgcctgtgaccacctcattgctcccatattatcccccatttttagtagagacggggttttagtagagacttggcctcccagaacccccttcctctgctcctccatgaatgacaattccaggcctcccctacctcatgtcctctcatttgggggattgctccgtgctgtccctttctctcaaggccgaagttgggaagtgagaaaccatgtttttaacttgtggctgcttttgctgctgctgctcctccgtatctggctgtatgggtggagaacccaccccctgcccaccacaggggtctccttccaggccactcaggacatttttagcttctctcctccccatgttcccttttttctctaaagtcccctgacatcagccctcccaactcctaagagggactacccatgagagtggggttctgaggctcccctatggggacagttccgttcttgaagtgtcagtgttggggaatatctgtggcctatgaggcccatctcaggtttggggatcccccagtccctatgatcagtgttggagtacccccctgggagagcctagtttctttgaggccccaggccctcttttaactacctttgaataggtgttatccctgtatttatggaaataaagttccatttcctcagtg

SEQ ID NO: 80750 - DNA, 1945 bp, Artificial Sequence
  derived and/or modified sequence
acggatttgcgcgaccccaagcagcccgcccttccccctcccatccgtcattcccctgcgctctctttcctcacccttccccccgccaccgtgggttccagacttgggataagtaaacagcgggtggagcgaggcctacggacccaggccaggtgggagtctgcactcttcaaggggcctgggctgctgctcacgggtattaaagaactccgcgttgttcatggctgaggcgatgcattaggaagatcctggacctagagaacaagtcccccgaacgctgagttggaggcgggacttcgggcgggagcatgctggggctctgggggcagcggctccccgcggcgtgggtcctgcttctgttgcctttcctgccgctgctgctgcttgcagcccccgcgccccaccgcgagtcctacaagccggtcatcgtggtgcatgggctcttcgacagctcgtacagcttccgccacctgctggaatacatcaatgagacacaccccgggactgtggtgacagtgctcgatctcttcgatgggagagagagcttgcgacccctgtgggaacaggtgcaagggttccgagaggctgtggtccccatcatggcaaaggcccctcaaggggtgcatctcatctgctactcgcaggggggccttgtgtgccgggctctgctttctgtcatggatgatcacaacgtggattctttcatctccctctcctctccacagatgggacagtatggagacacggactacttgaagtggctgttccccacctccatgcggtctaacctctatcggatctgctatagcccctggggccaggaattctccatctgcaactactggcatgatccccaccacgatgacttgtacctcaatgccagcagcttcctggccctgatcaatggggaaagagaccatcccaatgccacagtatggcggaagaactttctgcgtgtgggccacctggtgctgattgggggccctgatgatggtgttattactccctggcagtccagcttctttggtttctatgatgcaaatgagaccgtcctggagatggaggagcaactggtttatctgcgggattcttttgggttgaagactctattggcccggggggccatagtgaggtgtccaatggccggtatctcccacacagcctggcactccaaccgtaccctttatgagacctgcattgaaccttggctctcctgaggatatattcaggggtccccaggaactcctcggtccagagaccaagtggtggccttggaaagcagatgtcaggctttggtgtgcctgtgaccacctcattgctcccatattatcccccatttttagtagagacggggttttagtagagacttggcctcccagaacccccttcctctgctcctccatgaatgacaattccaggcctcccctacctcatgtcctctcatttgggggattgctccgtgctgtccctttctctcaaggccgaagttgggaagtgagaaaccatgtttttaacttgtggctgcttttgctgctgctgctcctccgtatctggctgtatgggtggagaacccaccccctgcccaccacaggggtctccttccaggccactcaggacatttttagcttctctcctccccatgttcccttttttctctaaagtcccctgacatcagccctcccaactcctaagagggactacccatgagagtggggttctgaggctcccctatggggacagttccgttcttgaagtgtcagtgttggggaatatctgtggcctatgaggcccatctcaggtttggggatcccccagtccctatgatcagtgttggagtacccccctgggagagcctagtttctttgaggccccaggccctcttttaactacctttgaataggtgttatccctgtatttatggaaataaagttccatttcctcagtg

SEQ ID NO: 80751 - DNA, 1945 bp, Artificial Sequence
  derived and/or modified sequence
acggatttgcgcgaccccaagcagcccgcccttccccctcccatccgtcattcccctgcgctctctttcctcacccttccccccgccaccgtgggttccagacttgggataagtaaacagcgggtggagcgaggcctacggacccaggccaggtgggagtctgcactcttcaaggggcctgggctgctgctcacgggtattaaagaactccgcgttgttcatggctgaggcgatgcattaggaagatcctggacctagagaacaagtcccccgaacgctgagttggaggcgggacttcgggcgggagcatgctggggctctgggggcagcggctccccgcggcgtgggtcctgcttctgttgcctttcctgccgctgctgctgcttgcagcccccgcgccccaccgcgcgtcctacaagccggtcatcgtggtgcatgggctcttcgacagctcgtacagcttccgccacctgctggaatacatcaatgagacacaccccgggactgtggtgacagtgctcgatctcttcgatgggagagagagcttgcgacccctgtgggaacaggtgcaagggttccgagaggctgtggtccccatcatggcaaaggcccctcaaggggtgcatctcatctgctactcgcaggggggccttgtgtgccgggctctgctttctgtcatggatgatcacaacgtggattctttcatctccctctcctctccacagatgggacagtatggagacacggactacttgaagtggctgttccccacctccatgcggtctaacctctatcggatctgctatagcccctggggccaggaattctccatctgcaactactggcatgatccccaccacgatgacttgtacctcaatgccagcagcttcctggccctgatcaatggggaaagagaccatcccaatgccacagtatggcggaagaactttctgcgtgtgggccacctggtgctgattgggggccctgatgatggtgttattactccctggcagtccagcttctttggtttctatgatgcaaatgagaccgtcctggagatggaggagcaactggtttatctgcgggattcttttgggttgaagactctattggcccggggggccatagtgaggtgtccaatggccggtatctcccacacagcctggcactccaaccgtaccctttatgagacctgcattgaaccttggctctcctgaggatatattcaggggtccccaggaactcctcggtccagagaccaagtggtggccttggaaagcagatgtcaggctttggtgtgcctgtgaccacctcattgctcccatattatcccccatttttagtagagacggggttttagtagagacttggcctcccagaacccccttcctctgctcctccatgaatgacaattccaggcctcccctacctcatgtcctctcatttgggggattgctccgtgctgtccctttctctcaaggccgaagttgggaagtgagaaaccatgtttttaacttgtggctgcttttgctgctgctgctcctccgtatctggctgtatgggtggagaacccaccccctgcccaccacaggggtctccttccaggccactcaggacatttttagcttctctcctccccatgttcccttttttctctaaagtcccctgacatcagccctcccaactcctaagagggactacccatgagagtggggttctgaggctcccctatggggacagttccgttcttgaagtgtcagtgttggggaatatctgtggcctatgaggcccatctcaggtttggggatcccccagtccctatgatcagtgttggagtacccccctgggagagcctagtttctttgaggccccaggccctcttttaactacctttgaataggtgttatccctgtatttatggaaataaagttccatttcctcagtg

SEQ ID NO: 80752 - DNA, 722 bp, Artificial Sequence
  derived and/or modified sequence
acccttccccccgccaccgtgggttccagacttgggataagtaaacagcgggtggagcgaggcctacggacccaggccaggtgggagtctgcactcttcaaggggcctgggctgctgctcacgggtattaaagaactccgcgttgttcatggctgaggcgatgcattaggaagatcctggacctagagaacaagtcccccgaacgctgagttggaggcgggacttcgggtgcgcgttggcgggagcatgctggggctctgggggcagcggctccccgcggcgtgggtcctgcttctgttgcctttcctgccgctgctgctgcttgcagcccccgcgccccaccgcgagtcctacaagccggtcatcgtggtgcatgggctcttcgacagctcgtacagcttccgccacctgctggaatacatcaatgagatgggacagtatggagacacggactacttgaagtggctgttccccacctccatgcggtctaacctctatcggatctgctatagcccctggggccaggaattctccatctgcaactactggcatgatccccaccacgatgacttgtacctcaatgccagcagcttcctggccctgatcaatggggaaagagaccatcccaatgccacagtatggcggaagaactttctgcgtgtgggccacctggtgctgattgggggccctgatgatggtgttattactccctggcagtccag

SEQ ID NO: 80753 - DNA, 722 bp, Artificial Sequence
  derived and/or modified sequence
acccttccccccgccaccgtgggttccagacttgggataagtaaacagcgggtggagcgaggcctacggacccaggccaggtgggagtctgcactcttcaaggggcctgggctgctgctcacgggtattaaagaactccgcgttgttcatggctgaggcgatgcattaggaagatcctggacctagagaacaagtcccccgaacgctgagttggaggcgggacttcgggtgcgcgttggcgggagcatgctggggctctgggggcagcggctccccgcggcgtgggtcctgcttctgttgcctttcctgccgctgctgctgcttgcagcccccgcgccccaccgcgcgtcctacaagccggtcatcgtggtgcatgggctcttcgacagctcgtacagcttccgccacctgctggaatacatcaatgagatgggacagtatggagacacggactacttgaagtggctgttccccacctccatgcggtctaacctctatcggatctgctatagcccctggggccaggaattctccatctgcaactactggcatgatccccaccacgatgacttgtacctcaatgccagcagcttcctggccctgatcaatggggaaagagaccatcccaatgccacagtatggcggaagaactttctgcgtgtgggccacctggtgctgattgggggccctgatgatggtgttattactccctggcagtccag

SEQ ID NO: 80754 - DNA, 1945 bp, Artificial Sequence
  derived and/or modified sequence
acggatttgcgcgaccccaagcagcccgcccttccccctcccatccgtcattcccctgcgttctctttcctcacccttccccccgccaccgtgggttccagacttgggataagtaaacagcgggtggagcgaggcctacggacccaggccaggtgggagtctgcactcttcaaggggcctgggctgctgctcacgggtattaaagaactccgcgttgttcatggctgaggcgatgcattaggaagatcctggacctagagaacaagtcccccgaacgctgagttggaggcgggacttcgggcgggagcatgctggggctctgggggcagcggctccccgcggcgtgggtcctgcttctgttgcctttcctgccgctgctgctgcttgcagcccccgcgccccaccgcgcgtcctacaagccggtcatcgtggtgcatgggctcttcgacagctcgtacagcttccgccacctgctggaatacatcaatgagacacaccccgggactgtggtgacagtgctcgatctcttcgatgggagagagagcttgcgacccctgtgggaacaggtgcaagggttccgagaggctgtggtccccatcatggcaaaggcccctcaaggggtgcatctcatctgctactcgcaggggggccttgtgtgccgggctctgctttctgtcatggatgatcacaacgtggattctttcatctccctctcctctccacagatgggacagtatggagacacggactacttgaagtggctgttccccacctccatgcggtctaacctctatcggatctgctatagcccctggggccaggaattctccatctgcaactactggcatgatccccaccacgatgacttgtacctcaatgccagcagcttcctggccctgatcaatggggaaagagaccatcccaatgccacagtatggcggaagaactttctgcgtgtgggccacctggtgctgattgggggccctgatgatggtgttattactccctggcagtccagcttctttggtttctatgatgcaaatgagaccgtcctggagatggaggagcaactggtttatctgcgggattcttttgggttgaagactctattggcccggggggccatagtgaggtgtccaatggccggtatctcccacacagcctggcactccaaccgtaccctttatgagacctgcattgaaccttggctctcctgaggatatattcaggggtccccaggaactcctcggtccagagaccaagtggtggccttggaaagcagatgtcaggctttggtgtgcctgtgaccacctcattgctcccatattatcccccatttttagtagagacggggttttagtagagacttggcctcccagaacccccttcctctgctcctccatgaatgacaattccaggcctcccctacctcatgtcctctcatttgggggattgctccgtgctgtccctttctctcaaggccgaagttgggaagtgagaaaccatgtttttaacttgtggctgcttttgctgctgctgctcctccgtatctggctgtatgggtggagaacccaccccctgcccaccacaggggtctccttccaggccactcaggacatttttagcttctctcctccccatgttcccttttttctctaaagtcccctgacatcagccctcccaactcctaagagggactacccatgagagtggggttctgaggctcccctatggggacagttccgttcttgaagtgtcagtgttggggaatatctgtggcctatgaggcccatctcaggtttggggatcccccagtccctatgatcagtgttggagtacccccctgggagagcctagtttctttgaggccccaggccctcttttaactacctttgaataggtgttatccctgtatttatggaaataaagttccatttcctcagtg

SEQ ID NO: 80755 - DNA, 1018 bp, Artificial Sequence
  derived and/or modified sequence
acggatttgcgcgaccccaagcagcccgcccttccccctcccatccgtcattcccctgcgctctctttcctcacccttccccccgccaccgtgggttccagacttgggataagtaaacagcgggtggagcgaggcctacggacccaggccaggtgggagtctgcactcttcaaggggcctgggctgctgctcacgggtattaaagaactccgcgttgttcatggctgaggcgatgcattaggaagatcctggacctagagaacaagtcccccgaacgctgagttggaggcgggacttcgggcgggagcatgctggggctctgggggcagcggctccccgcggcgtgggtcctgcttctgttgcctttcctgccgctgctgctgcttgcagcccccgcgccccaccgcgagtcctacaagccggtcatcgtggtgcatgggctcttcgacagctcgtacagcttccgccacctgctggaatacatcaatgagacacaccccgggactgtggtgacagtgctcgatctcttcgatgggagagagagcttgcgacccctgtgggaacaggtgcaagggttccgagaggctgtggtccccatcatggcaaaggcccctcaaggggtgcatctcatctgctactcgcaggggggccttgtgtgccgggctctgctttctgtcatggatgatcacaacgtggattctttcatctccctctcctctccacagatgggacagtatggagacacggactacttgaagtggctgttccccacctccatgcggtctaacctctatcggatctgctatagcccctggggccaggaattctccatctgcaactactggcatgatccccaccacgatgacttgtacctcaatgccagcagcttcctggccctgatcaatggggaaagagaccatcccaatgccacagtatggcggaagaactttctgcgtgtgggccacctggtgctgattgggggccctgatgatggtgttattactccctggcagtccag

SEQ ID NO: 80756 - DNA, 1051 bp, Artificial Sequence
  derived and/or modified sequence
gttgccagagaaagccccggacgtgacggatttgcgcgaccccaagcagcccgcccttccccctcccatccgtcattcccctgcgctctctttcctcacccttccccccgccaccgtgggttccagacttgggataagtaaacagcgggtggagcgaggcctacggacccaggccaggtgggagtctgcactcttcaaggggcctgggctgctgctcacgggtattaaagaactccgcgttgttcatggctgaggcgatgcattaggaagatcctggacctagagaacaagtcccccgaacgctgagttggaggcgggacttcgggtgcgcgttggcgggagcatgctggggctctgcgggcagcggctccccgcggcgtgggtcctgcttctgttgcctttcctgccgctgctgctgcttgcagcccccgcgccccaccgcgcgtcctacaagccggtcatcgtggtgcatgggctcttcgacagctcgtacagcttccgccacctgctggaatacatcaatgagggggccttgtgtgccgggctctgctttctgtcatggatgatcacaacgtggattctttcatctccctctcctctccacagatgggacagtatggagacacggactacttgaagtggctgttccccacctccatgcggtctaacctctatcggatctgctatagcccctggggccaggaattctccatctgcaactactggcatgatccccaccacgatgacttgtacctcaatgccagcagcttcctggccctgatcaatggggaaagagaccatcccaatgccacagtatggcggaagaactttctgcgtgtgggccacctggtgctgattgggggccctgatgatggtgttattactccctggcagtccagcttctttggtttctatgatgcaaatgagaccgtcctggagatggaggagcaactgcctgtagggtccagcgtcaaagcgaatcatggggtccagggctgagctgtgcactctcttaggcggattctccttcctcctgctactgataccaggc

SEQ ID NO: 80757 - DNA, 163 bp, Artificial Sequence
  derived and/or modified sequence
accacgatgacttgtacctcaatgccagcagcttcctggccctgatcaatggggaaagagaccatcccaatgccacagtatggcggaagaactttctgcgtgtgggccacctggtgctgattgggggccctgatgatggtgttattactccctggcagtccag

SEQ ID NO: 80758 - DNA, 1051 bp, Artificial Sequence
  derived and/or modified sequence
gttgccagagaaagccccggacgtgacggatttgcgcgaccccaagcagcccgcccttccccctcccatccgtcattcccctgcgttctctttcctcacccttccccccgccaccgtgggttccagacttgggataagtaaacagcgggtggagcgaggcctacggacccaggccaggtgggagtctgcactcttcaaggggcctgggctgctgctcacgggtattaaagaactccgcgttgttcatggctgaggcgatgcattaggaagatcctggacctagagaacaagtcccccgaacgctgagttggaggcgggacttcgggtgcgcgttggcgggagcatgctggggctctgggggcagcggctccccgcggcgtgggtcctgcttctgttgcctttcctgccgctgctgctgcttgcagcccccgcgccccaccgcgcgtcctacaagccggtcatcgtggtgcatgggctcttcgacagctcgtacagcttccgccacctgctggaatacatcaatgagggggccttgtgtgccgggctctgctttctgtcatggatgatcacaacgtggattctttcatctccctctcctctccacagatgggacagtatggagacacggactacttgaagtggctgttccccacctccatgcggtctaacctctatcggatctgctatagcccctggggccaggaattctccatctgcaactactggcatgatccccaccacgatgacttgtacctcaatgccagcagcttcctggccctgatcaatggggaaagagaccatcccaatgccacagtatggcggaagaactttctgcgtgtgggccacctggtgctgattgggggccctgatgatggtgttattactccctggcagtccagcttctttggtttctatgatgcaaatgagaccgtcctggagatggaggagcaactgcctgtagggtccagcgtcaaagcgaatcatggggtccagggctgagctgtgcactctcttaggcggattctccttcctcctgctactgataccaggc

SEQ ID NO: 80759 - DNA, 1051 bp, Artificial Sequence
  derived and/or modified sequence
gttgccagagaaagccccggacgtgacggatttgcgcgaccccaagcagcccgcccttccccctcccatccgtcattcccctgcgctctctttcctcacccttccccccgccaccgtgggttccagacttgggataagtaaacagcgggtggagcgaggcctacggacccaggccaggtgggagtctgcactcttcaaggggcctgggctgctgctcacgggtattaaagaactccgcgttgttcatggctgaggcgatgcattaggaagatcctggacctagagaacaagtcccccgaacgctgagttggaggcgggacttcgggtgcgcgttggcgggagcatgctggggctctgggggcagcggctccccgcggcgtgggtcctgcttctgttgcctttcctgccgctgctgctgcttgcagcccccgcgccccaccgcgcgtcctacaagccggtcatcgtggtgcatgggctcttcgacagctcgtacagcttccgccacctgctggaatacatcaatgagggggccttgtgtgccgggctctgctttctgtcatggatgatcacaacgtggattctttcatctccctctcctctccacagatgggacagtatggagacacggactacttgaagtggctgttccccacctccatgcggtctaacctctatcggatctgctatagcccctggggccaggaattctccatctgcaactactggcatgatccccaccacgatgacttgtacctcaatgccagcagcttcctggccctgatcaatggggaaagagaccatcccaatgccacagtatggcggaagaactttctgcgtgtgggccacctggtgctgattgggggccctgatgatggtgttattactccctggcagtccagcttctttggtttctatgatgcaaatgagaccgtcctggagatggaggagcaactgcctgtagggtccagcgtcaaagcgaatcatggggtccagggctgagctgtgcactctcttaggcggattctccttcctcctgctactgataccaggc

SEQ ID NO: 80760 - DNA, 1051 bp, Artificial Sequence
  derived and/or modified sequence
gttgccagagaaagccccggacgtgacggatttgcgcgaccccaagcagcccgcccttccccctcccatccgtcattcccctgcgctctctttcctcacccttccccccgccaccgtgggttccagacttgggataagtaaacagcgggtggagcgaggcctacggacccaggccaggtgggagtctgcactcttcaaggggcctgggctgctgctcacgggtattaaagaactccgcgttgttcatggctgaggcgatgcattaggaagatcctggacctagagaacaagtcccccgaacgctgagttggaggcgggacttcgggtgcgcgttggcgggagcatgctggggctctgggggcagcggctccccgcggcgtgggtcctgcttctgttgcctttcctgccgctgctgctgcttgcagcccccgcgccccaccgcgagtcctacaagccggtcatcgtggtgcatgggctcttcgacagctcgtacagcttccgccacctgctggaatacatcaatgagggggccttgtgtgccgggctctgctttctgtcatggatgatcacaacgtggattctttcatctccctctcctctccacagatgggacagtatggagacacggactacttgaagtggctgttccccacctccatgcggtctaacctctatcggatctgctatagcccctggggccaggaattctccatctgcaactactggcatgatccccaccacgatgacttgtacctcaatgccagcagcttcctggccctgatcaatggggaaagagaccatcccaatgccacagtatggcggaagaactttctgcgtgtgggccacctggtgctgattgggggccctgatgatggtgttattactccctggcagtccagcttctttggtttctatgatgcaaatgagaccgtcctggagatggaggagcaactgcctgtagggtccagcgtcaaagcgaatcatggggtccagggctgagctgtgcactctcttaggcggattctccttcctcctgctactgataccaggc

SEQ ID NO: 80761 - DNA, 909 bp, Artificial Sequence
  derived and/or modified sequence
atgctaggactttgtggccagagactgcccgctgcctgggtactacttctcctgccgtttttgcctttactcttgcttgccgcaccagccccacatcgagcaagttacaagcctgtaattgtggtccatgggctttttgacagctcgtacagcttccggcatctactggaatacatcaacgaaactcaccccggaaccgtggttactgtgctcgatctctttgacggcagagagtcactgaggcccctgtgggagcaagttcaggggtttcgcgaagcagtcgtgcctatcatggcaaaagcccctcagggagtccatctgatctgttatagccagggaggactggtgtgccgggctctgctgtctgtgatggatgatcacaacgtcgacagcttcataagcctctcctcccctcaaatgggacaatacggtgacactgattacctgaagtggctgttccctactagtatgagatctaatttgtaccgtatttgctattccccatggggccaggaattttcaatctgtaactattggcatgatccccatcatgacgacctgtacctgaatgcctcttcgtttttggctctgattaacggtgaaagggaccacccaaacgctaccgtgtggcggaagaattttttgcgggtggggcacctcgtgctgatcggaggtcctgatgacggcgttatcactccgtggcaaagctccttcttcggtttttacgacgcaaatgagacagtgctggagatggaggaacagctggtgtacctaagggattcatttgggttaaagaccttattagcgagaggggcaattgtgaggtgtccaatggctgggatttcccacacagcttggcactcaaacaggaccctgtatgagacttgcatcgagccatggctgagttag

SEQ ID NO: 80762 - DNA, 909 bp, Artificial Sequence
  derived and/or modified sequence
atgctgggactgtgcggacagaggctccccgctgcgtgggtacttctcctgctgccattcctgcctctcctgttgttggccgctccggcaccccatagagcttcttacaagcccgtgatcgtcgtacatgggttattcgattcatcctattctttccgtcatttgctggagtatatcaacgagacccatcctggcactgtggtgactgttctggacctgtttgacggcagggaatccttacggccactctgggagcaagtccaaggttttcgtgaggctgtcgtgcccattatggccaaggctccccaaggtgtccacctgatctgttactctcaggggggtctggtgtgcagagcccttctgtctgtaatggatgatcataacgttgatagctttatttctcttagttctccccagatgggccagtacggcgataccgattaccttaagtggctgttccctaccagcatgcgaagtaacctttatcggatttgttactcaccgtggggacaggagttttccatctgtaactactggcatgacccccaccatgacgacttgtatctaaatgctagctcattcttggcgctgataaacggagagcgcgaccatcctaacgccacagtgtggagaaaaaactttctccgtgtaggtcaccttgtgctgattggcggacccgatgatggagtgattacaccttggcagagcagcttctttgggttttacgacgccaacgaaactgtgctggaaatggaagaacaactggtttatctccgagatagctttggactgaaaacactgctggccagaggtgctattgtacgctgtccaatggcagggatctcacatacagcatggcacagtaacaggacactctacgaaacatgtattgaaccatggctgagctag

SEQ ID NO: 80763 - DNA, 909 bp, Artificial Sequence
  derived and/or modified sequence
atgctgggtctctgtggtcagagactgccagccgcttgggtcctactgctcctgccatttttgcccctgctgctgcttgcggcaccagcccctcatagggcttcgtacaaacctgtgatcgtcgtgcacgggttattcgatagctcctacagctttaggcatctattagagtatattaacgagacccatcctgggaccgtcgtcaccgtattggacctgtttgatgggagagagtcccttagacccctgtgggaacaagttcaaggttttagagaggcggtcgttccaattatggctaaagcgccacagggagtccacctgatctgctactcgcaggggggattggtgtgccgcgctctcctgagtgtgatggacgaccataacgtcgacagtttcatttccctgtccagtccacagatgggacagtatggcgacacagactatcttaaatggctgttcccaaccagcatgaggagcaacctgtatcggatctgctacagcccatggggacaggaattcagcatttgtaattactggcacgatcctcatcacgacgacttgtacctaaacgccagcagcttcctggctttgatcaacggggaaagagatcatcccaatgctactgtgtggcgcaagaacttcctccgggtgggacacctggtcttaattggcggacctgacgacggagtgattactccctggcaatcgagctttttcggtttctatgacgcaaatgaaaccgtgcttgagatggaggagcagttagtatacttgcgggactcttttggactcaagactcttcttgcccgaggggcaatcgttaggtgtccgatggctggaatcagtcacacagcatggcactctaaccgtactctttacgaaacatgcatcgagccctggctctcttag

SEQ ID NO: 80764 - DNA, 909 bp, Artificial Sequence
  derived and/or modified sequence
atgctggggttgtgcggtcagaggctgcctgctgcctgggttttgctcctgctcccctttctgcccctcctgcttcttgcagcgccagctcctcaccgtgcgtcatacaagcccgtaatcgtggtccacggactgtttgacagttcctatagctttcgtcatctcttggaatacattaatgagacgcacccaggaacagtcgttacagtcctcgacctcttcgatggcagggaatccttgaggcctctgtgggagcaggtccagggctttagagaggccgtcgtgcccattatggccaaggcaccccagggagtgcacttgatctgttatagtcagggcggtctcgtgtgtagagcccttctgtccgtgatggacgaccataatgttgattctttcatatcgctctcctcccctcagatgggacagtacggggataccgattacctcaaatggctcttccctacttccatgcgtagcaatctctatagaatttgttactcgccctggggacaggagttttccatctgtaactattggcacgatccccaccacgatgacttgtatctgaacgcaagctccttccttgccttaatcaacggagagagggaccaccctaatgctacggtgtggcgaaagaatttcctgagggtgggacatctagtgctcattggcggacccgacgacggagtgattactccctggcaatctagtttcttcgggttctacgatgccaacgagaccgtcctggaaatggaagaacagctcgtctacctcagagactcttttggactcaaaaccttgctggcccgtggtgcaattgtccggtgtccaatggccggaatctcccacaccgcatggcacagtaacaggacgttgtacgaaacctgtatcgaaccatggctgtcctag

SEQ ID NO: 80765 - DNA, 909 bp, Artificial Sequence
  derived and/or modified sequence
atgctcggcttgtgggggcagcgcttgccagcggcatgggttcttctcttgctgccatttctgcctctgctgctgctcgccgctcctgcccctcatagggagagctacaagcctgtgatcgtggtgcatgggcttttcgactcaagctactctttccgtcatctgttagagtatattaacgaaacacacccagggaccgtggtcaccgtgttggacctttttgacggcagagagagtctgagacctctgtgggagcaggtccagggattccgagaagcagtggtccccataatggctaaagcaccccagggagtgcatcttatttgctattcccagggtggcctggtgtgccgcgcactcctgtctgtgatggacgatcacaatgtcgacagttttatctctctgagctcccctcagatgggccagtatggggacacggactatctcaagtggctctttcccacaagtatgagaagcaatctgtataggatctgctattctccctggggacaggagttttctatttgcaactattggcacgatccccaccacgacgatttatatctcaatgcaagctcatttttggccctgatcaatggcgagcgcgatcaccccaacgctaccgtttggcggaagaactttctgagggttggccacctcgtgctgattgggggacctgacgatggagtgatcactccatggcagagcagtttttttggcttttatgacgccaacgagacagtgctggagatggaagaacagctcgtctatctcagagacagttttgggctgaagactctgctagcacgaggcgctatcgtgcgctgtcccatggctggaattagccataccgcctggcacagcaatcggactctctacgagacttgcattgagccttggctgtcgtag

SEQ ID NO: 80766 - DNA, 909 bp, Artificial Sequence
  derived and/or modified sequence
atgttaggattatggggacagcggctccccgctgcctgggtgttattgctcctcccctttcttcccctcttgctgcttgccgctccggcaccccacagagaatcctacaagcctgtaattgtcgtgcatggcctgttcgatagtagctattcatttcgccatctacttgagtatataaacgagacacatcctggaacggtggtgacagttctcgaccttttcgatgggagagagagccttcgcccattatgggagcaggttcaagggtttagggaggccgtagtgccaatcatggccaaagctccccagggcgtgcacctcatctgttacagccagggcggattggtgtgccgggcattgctgagcgtgatggacgatcataacgtggactcttttatttccctgagctcacctcaaatgggtcaatacggtgatacagactacctgaagtggctattccctacttccatgcggagtaacctctatcggatatgctacagcccatggggtcaggaattctctatctgcaattactggcacgaccctcaccacgacgatctgtatcttaacgcaagtagcttccttgcattgattaatggtgagcgtgatcaccccaacgccactgtgtggcgtaagaacttcctcagggtggggcacctcgtcctgataggtgggcctgacgacggggtgatcactccatggcagtccagcttctttggcttttatgacgctaatgaaacagtcttggaaatggaggagcagctagtgtaccttcgcgactcatttggacttaagactctcctggctaggggagccatcgtgaggtgccccatggccggaatctctcatactgcttggcactctaataggaccctctatgagacctgtatcgagccctggttaagctag

SEQ ID NO: 80767 - DNA, 909 bp, Artificial Sequence
  derived and/or modified sequence
atgctaggactatgggggcagagactcccggctgcctgggtccttcttttgttaccctttctgcccctgctcctgctggcggctcccgctccccacagggagtcgtataagccagtcattgtcgtgcatggcctgttcgatagcagctacagcttccggcacttgctggaatatattaacgaaacacaccccggtactgtagtgacggttctcgacctgtttgacgggagggagagtctacgcccattgtgggaacaggtgcagggattcagggaggcagttgtcccgataatggctaaagcacctcagggggtccatttgatctgctactctcagggcggactagtctgcagggccctcctgtctgtaatggacgatcacaacgtcgactcctttatcagcctgtcaagcccacagatgggccagtacggcgatacagactatctaaagtggctctttccgacttctatgcggagtaacctgtatcgcatctgctactccccttggggacaagagttctctatatgtaattactggcacgacccccaccatgacgacctgtacttgaacgccagctctttcctggccctcatcaacggggagcgagaccaccccaatgctacagtatggcggaagaacttccttagggttggccatttggtgctcataggcggaccagacgatggggttatcacaccatggcagagctcattttttggcttctacgacgccaacgagacggtgctggagatggaagagcaactggtgtacctgagagattctttcggactcaaaaccctcctggccaggggagccatagtgcggtgcccaatggccggaataagtcacactgcctggcacagtaaccggaccctgtatgaaacgtgcattgagccatggctctcttag

SEQ ID NO: 80768 - DNA, 909 bp, Artificial Sequence
  derived and/or modified sequence
atgctcggtctttggggtcagcggcttccagctgcgtgggtgctgttattacttcccttcctccctctgctgctgctggcagcgccagctcctcaccgggcaagctacaagcccgtgatcgtcgtccatggcttgtttgattccagctactcctttaggcatttactcgaatatatcaacgagacccaccctgggaccgtagtcacagtgcttgatttgttcgatggacgcgagtcactgagaccattgtgggaacaggttcaaggcttccgggaggccgtggtgcccatcatggccaaggcccctcaaggagtccacctgatctgttacagccagggaggactggtctgtcgagcactcctctcggtcatggacgaccacaatgtcgactcattcatctcattaagcagcccacaaatggggcaatacggcgacacggattaccttaaatggctctttccaacctccatgagaagtaatttgtaccgcatctgctattctccctgggggcaagagttctcaatttgcaactattggcatgacccccaccatgatgacctttatttaaacgcctcttcctttttggccttaatcaacggtgaaagggaccatcccaatgcaacagtgtggcgcaagaacttcctgcgtgtagggcatctcgttctcattggcggaccagacgacggagtcataacaccgtggcagtccagttttttcggcttttacgatgctaacgagacagtcttagaaatggaggagcagctagtatacttgagagactctttcgggttgaaaaccctgttagcacgcggtgcaatcgtgcgctgtccaatggcaggtatctctcacaccgcctggcatagcaatcgaaccctatatgagacctgtatcgagccctggctgtcatag

SEQ ID NO: 80769 - DNA, 909 bp, Artificial Sequence
  derived and/or modified sequence
atgctcggcctctggggccagcgcttgcctgctgcctgggtgttgctgttactgccttttctacccttgctactcctggcagctcctgcaccccatcgggcttcatataagcccgttatcgtagtgcatggccttttcgatagctcttattcatttcggcacctgctcgaatatataaacgagacccatcctgggactgtggtaaccgtgctcgatctgtttgatggtcgagaatccttgcggccactctgggagcaggtccagggatttcgggaagcagtggtgccgatcatggcaaaagcccctcagggtgtgcacctgatctgctactcgcagggcggtctagtgtgcagggccttactctcagtcatggacgaccataacgtggattcattcatatcattatccagccctcagatgggccagtacggagataccgattatctgaagtggttgttcccaacgtccatgcgatcaaatttgtaccgcatttgttatagcccctggggccaggaattctccatttgcaattattggcatgaccctcaccatgatgacttgtacctcaacgcctcaagcttccttgcactgatcaatggggagcgcgatcatcccaacgccacagtttggaggaagaacttcctgagagtcgggcacctcgttctcattggcggaccggatgacggcgtgataacaccctggcagtcgtcattttttgggttctatgacgccaatgaaaccgtgctggagatggaagagcagcttgtctatctgcgggacagcttcggtctaaaaaccctgctggccagaggggctatcgtgaggtgccccatggcaggtatctcccatacggcttggcattcgaatagaactctgtacgagacctgtatcgagccctggctcagttag

SEQ ID NO: 80770 - DNA, 909 bp, Artificial Sequence
  derived and/or modified sequence
atgttaggtctgtgggggcagcgcctgcccgcagcctgggtgctgctccttctcccctttttgccactgttgctgctggcggcaccggctccccatagggcatcttataagccggtaattgtggtgcatggtttgttcgatagcagctactccttccgacacctattggagtacatcaatgaaacccacccaggaactgtggttaccgtcctggatttgttcgacggccgagagagcctcagaccactgtgggagcaggtccagggtttcagagaagccgtggtgcctataatggccaaggcgcctcagggggtgcacctcatttgctattcgcagggaggactggtttgtcgcgcactgcttagtgtcatggacgaccacaatgtagatagcttcatctccctcagctccccacagatgggtcagtacggagacactgactatttgaagtggctgttccctacttccatgcgctccaacctctataggatctgctatagcccttggggacaggaattctccatttgtaactattggcatgacccccaccacgacgatctgtaccttaacgcctcaagcttcctcgctttaattaacggcgaacgggatcatcccaatgccacagtctggcgtaaaaatttcctgagggtgggccacctagtgttgattggcggtcctgatgacggcgtgatcactccttggcaatcatcattctttggcttctacgatgcaaatgaaacagtgttggaaatggaggaacagctggtatacctccgagactcttttggactgaagacactactggcccgaggagctattgtacgttgccccatggccggaatctcgcacacagcctggcacagtaatcgaacactgtacgagacgtgtattgaaccttggctgagctag

SEQ ID NO: 80771 - DNA, 282 bp, Artificial Sequence
  derived and/or modified sequence
atgctcggcctgtggggtcagagactgccagctgcttgggttctgctcttacttccatttctcccactgctgcttctggccgctcctgctccccaccgggcaagttataagcccgtcatcgtggtgcatgggctctttgattcttcctattcttttcgtcacctgctggaatatatcaatgagggggcactttgcgccggactctgctttctgtcatggatgatcacaacatggattttgagtagcccttctccactgcatagatgggacagtatggaatag

SEQ ID NO: 80772 - DNA, 543 bp, Artificial Sequence
  derived and/or modified sequence
atgctcggactgtgcgggcaacgtttgccagccgcatgggtcttgctactgctcccttttctgcccctgctactcctggctgctccagcgcctcacagagcatcttataagcctgtgatagtggtgcacggcctgttcgactcatcgtactccttccgacatcttcttgaatacataaacgaaactcacccaggtaccgtcgtgactgttttagacctcttcgacgggagagaatctttgaggccactgtgggaacaggtgcaaggcttccgggaagctgtcgtacccattatggcaaaagctccgcagggtgtgcatctcatctgctacagccaggggggactggtttgccgcgcactgttaagcgtgatggacgatcacaatgtggactcgttcattagcttaagcagcccgcagatggggcagtatggggacaccgactaccttaagtggcttttccctacctctatgcggagcaatctgtatagaatctgttacagcccatggggtcaagaattctcaatttgcaactactggcactag

SEQ ID NO: 80773 - DNA, 603 bp, Artificial Sequence
  derived and/or modified sequence
atgttagggctttggggtcagaggttgcccgcagcctgggtgctcctgctgctgccttttttgccgctgcttctgctcgctgctccagctccccatcgtgaaagctataagcccgtgattgtggtacatgggctctttgactctagttacagcttccggcatctgctggagtatatcaacgaaacccaccccggaaccgtcgtgaccgtgttagaccttttcgatggacgggagagcctgcgtccgctgtgggagcaggtgcaggggtttagagaggcagtcgtcccaattatggcaaaagccccacaaggcgtccatctgatctgttactcccaaggaggcctcgtctgtagagccctcttgtctgtcatggacgaccacaacgtggatagttttatctcgctctcctcaccacagatgggacagtacggagacacggattacctgaaatggctctttcccacttccatgcgctccaacctgtaccgcatatgttattccccatggggccaggaattttctatctgtaactactggcacgacccccaccatgacgacctctacttaaacgctagctctttcctcgctctgattaatgggtag

SEQ ID NO: 80774 - DNA, 477 bp, Artificial Sequence
  derived and/or modified sequence
atgctgggactctggggacagcggctgcccgctgcctgggtgctcctgcttctgcccttcttgccactgctcttgctcgccgcaccagctccccaccgggagtcttataaacccgtgatcgtagtccacggactgtttgacagtagctattccttcaggcatctgctcgaatacattaatgagatgggccagtacggagacactgactacctgaagtggctgtttcccactagtatgcgaagcaacctgtatcggatttgttatagcccatggggccaagagttttctatatgcaattactggcacgacccccatcacgacgatttgtatctgaacgcttcaagcttcctagccctgattaacggggagcgggaccacccaaatgccaccgtctggaggaagaacttcctgagagttggacatctcgtgttgatcgggggacctgatgacggggtaatcacaccatggcaatcatag

SEQ ID NO: 80775 - DNA, 543 bp, Artificial Sequence
  derived and/or modified sequence
atgctgggcctctggggtcagcgtctgcccgcagcctgggtgctcctgcttctgcctttcctgcctctcctgctactcgctgcgcctgccccacatagggcctcttataagccagtgatcgtcgtccatgggttgttcgattccagctactcttttcgacacctgctggaatatatcaatgagacccatcccggaacggtggtgactgttttggatctttttgacggccgtgaaagtctgaggcccctttgggaacaggtccaaggttttcgagaggcagtggtcccaattatggccaaggcccctcagggggtgcacctgatttgttactcccagggcggactggtgtgcagggccttgctgtctgtgatggacgatcacaatgtagattcgttcatcagtttgtcatccccacaaatggggcagtacggtgacaccgactatttgaaatggctctttcctacctccatgcgtagcaacctatataggatatgctattccccttggggccaggaattttccatctgcaactactggcattag

SEQ ID NO: 80776 - DNA, 477 bp, Artificial Sequence
  derived and/or modified sequence
atgctgggtctttggggtcaaaggttgcctgccgcttgggtgctgttgctactgccttttctaccgctgctcctcctcgctgcaccggctccccacagagccagttataaaccggtgatcgtcgtgcatgggttatttgactcatcatacagttttaggcatctgttggaatatattaatgaaatgggacagtacggtgacaccgactatctgaaatggctatttcccacttcgatgcgttcaaacttgtatcgtatctgttactctccttggggacaagaattttcaatttgcaattactggcatgacccacaccacgatgatttgtaccttaacgcttcatcatttctcgcattaatcaacggcgaaagggaccaccctaacgctaccgtttggaggaagaactttctaagagtcggacacttagtgctgatcgggggaccagacgacggtgtgatcactccatggcagagctag

SEQ ID NO: 80777 - DNA, 543 bp, Artificial Sequence
  derived and/or modified sequence
atgctgggactgtggggtcagagactgcctgctgcctgggtgcttctgttgcttccattcctgcccctcctccttctggccgcacccgctcctcatcgggcttcctacaaacccgtcatcgtcgtccatggactgtttgatagcagttatagcttccgccaccttctcgaatatataaatgaaacccacccgggtactgtcgtcacagtgcttgacctgtttgatggtagagagtccctgcgtccactgtgggaacaggtgcagggctttcgcgaggcagtggttcctatcatggcgaaggcccctcagggggttcacctgatatgctactctcaaggaggacttgtctgtcgggctctactgtccgttatggacgaccataacgtagactctttcatcagtctgagttccccacaaatgggtcaatatggggacactgattatctcaagtggttgtttccaacgtccatgcggtcaaatttgtatagaatctgctactccccttgggggcaggagtttagtatttgtaattactggcactag

SEQ ID NO: 80778 - DNA, 909 bp, Artificial Sequence
  derived and/or modified sequence
atgcttggtctttgggggcaacgccttccagccgcttgggtgttgctgcttctgcctttccttccactcctgctgctggctgcacccgctccacaccgagcgtcatataagcctgtcatcgtggtgcacggactgttcgactctagctatagcttcaggcatctgctggaatatataaatgaaacacatccgggaacagttgtcacagtcctggatctgtttgacggcagagaatccctgcgacccctctgggagcaggtgcaaggattcagagaggccgtggtgccaatcatggctaaagcccctcagggcgtccatcttatttgctattcccagggcggtctggtgtgcagagctttattaagtgtgatggacgatcataacgtcgatagctttatcagcttgtcaagcccccagatgggtcagtatggggacacagattacctgaagtggcttttcccgacctccatgcggtccaacctgtatcgcatttgctactctccctggggccaggagttcagcatctgcaactattggcacgacccccatcacgatgacctttatctgaacgcgagcagtttcctggcactgatcaacggcgagagggatcaccccaacgcgactgtctggcgaaaaaacttcctgcgcgtgggtcacctggtactgatagggggaccagatgatggcgtaatcactccttggcagagtagttttttcggcttctatgatgccaatgaaaccgtcctcgagatggaggaacagctcgtttatctgcgcgattcttttggcttgaagaccctcctagcgcgaggtgcaatcgtgcggtgtcctatggctggaatttcccacacagcctggcactctaataggaccctatatgaaacttgcattgaaccctggctatcctag

SEQ ID NO: 80779 - DNA, 909 bp, Artificial Sequence
  derived and/or modified sequence
atgcttggtttatggggacagagactgccagccgcttgggttttgttactgcttcctttccttccattactcctgttggcagcccctgcccctcatcgcgcttcctacaagcccgtcatcgtggttcacggattatttgattcaagctattcgtttcgtcacttgttggagtatattaatgaaacccatcccggaacggtagtgaccgtgctggacctgtttgatggcagggagtcccttcgaccattgtgggaacaggtacagggctttagggaggcagttgttccgatcatggccaaggctccacaaggcgttcacctcatttgctacagccaagggggtctggtgtgtagggcactgctgtcggtgatggatgatcacaacgtcgactccttcatcagtctatcttctccacagatggggcaatatggggatacggactacctgaaatggctgttcccaacctccatgaggtcaaacctgtaccgcatttgctatagcccatggggccaggaattttcgatatgcaattactggcacgatccacatcacgatgacttgtatttgaacgcaagttcctttttagcgctgatcaatggggagagagatcatcccaatgccacagtctggagaaagaattttctaagagtgggtcatttggttctcattgggggacccgacgacggcgtgataaccccctggcagtcatcgttttttgggttctatgacgcgaatgagacagttcttgagatggaggaacaactggtgtacctgcgagatagtttcggtttgaagacactgcttgctcgtggagccattgtacgctgtccaatggcaggcatcagtcacactgcatggcactctaatcgaactttatacgaaacctgtatagagccttggttgagctag

SEQ ID NO: 80780 - DNA, 282 bp, Artificial Sequence
  derived and/or modified sequence
atgctcggcctctgggggcagcgactgccggctgcctgggttcttctgctgctgccttttttacctctgctgcttttagccgcacccgctccacatcgtgcttcctataaaccggtgatcgtcgtccacggcctcttcgatagcagctatagttttagacacctcttagagtatatcaacgagggagctttgtgtgctggcctctgctttctgtcctggatgattaccacttggatcctgtcctctccatcgccgctgcacagatgggacagcatggaatag

SEQ ID NO: 80781 - DNA, 909 bp, Artificial Sequence
  derived and/or modified sequence
atgctcggactgtggggacagagactgccagctgcctgggtcctccttctgctcccatttttacccctattgcttctggccgctccagccccacaccgggcttcatacaagcctgtgattgtggtgcacggactgtttgactccagctactcatttcgccacctgcttgagtacattaacgaaactcatcctggcacagttgtcaccgtgctggacttgtttgatggaagggagagcttgcgccctctgtgggagcaagtccagggcttccgtgaagctgtcgttcctatcatggcaaaggctccgcagggtgtccacctgatctgctacagccagggcggactggtgtgcagagccctcctgagtgtgatggacgatcataacgtggacagcttcatctccctgtcttcgccgcagatgggccaatacggagatacagattacctaaagtggctcttccccaccagtatgcggtccaatctttatcgtatttgttattctccatggggacaggagttctctatatgcaattactggcatgacccgcaccacgatgacctttatcttaacgccagctcatttctagcgttgattaacggggagcgtgatcaccctaatgcaaccgtgtggagaaagaacttcttaagagttgggcacctcgtgttgattgggggaccagacgatggcgtcattacgccttggcagagcagcttttttgggttctatgatgccaacgagaccgtactggagatggaagaacaactggtttatcttcgtgatagcttcggactgaagacactcctggccaggggggctattgtgcggtgtcccatggcgggaatttctcacactgcatggcactcaaacaggaccctatatgagacctgcatcgaaccatggctgtcatag

SEQ ID NO: 80782 - DNA, 477 bp, Artificial Sequence
  derived and/or modified sequence
atgctgggcctctgtgggcagaggttgccggcagcttgggtcctattactgcttcctttcttacccctgctgctcctcgcagccccagcgcctcacagggcctcatacaagcccgtgattgtggtgcatggactgtttgactcatcctactccttcagacacctcctcgagtacatcaatgagatggggcagtacggggataccgattacctaaaatggctgtttccaaccagtatgcggtccaatctgtataggatttgctactccccatgggggcaggaattttccatctgtaactattggcatgacccccatcatgacgacctatatctgaatgcctcttcgtttctggccctcatcaacggggaacgcgaccatccaaatgcaaccgtgtggcgaaaaaatttcttgagggttgggcacttggtgcttatagggggtcccgacgatggcgtgatcactccttggcaatcctag

SEQ ID NO: 80783 - DNA, 711 bp, Artificial Sequence
  derived and/or modified sequence
atgctggggctatggggccagcgactccccgctgcttgggtcctgctgctgctgcctttcttgccgcttctcctcctggctgccccagcgccacacagagagagttacaaacccgtgattgttgtgcatggactgttcgattctagttacagctttcggcatctcctcgaatacataaacgaaacccatcctggcaccgtagtgacggttctcgatctcttcgatggccgagagagtctacgtcctctctgggagcaggtccagggatttcgggaggccgtagtccccattatggcaaaggcacctcagggtgttcacctgatttgttactcgcaggggggactcgtttgtcgagcccttttgtccgtaatggacgaccataatgtggactctttcataagcctgtcgtcaccccagatgggccagtatggagataccgactacttgaagtggctgttcccaaccagtatgagatctaatttataccggatttgctactcaccctgggggcaagaatttagtatttgtaactactggcatgatccgcatcacgatgatctgtacctgaacgcctccagcttcctcgcactgattaatggtgaaagagatcatccgaacgccaccgtgtggagaaagaatttcctgagagttggacatctggtgctgatcggcggtcctgacgatggcgtaatcaccccttggcagtcctag

SEQ ID NO: 80784 - DNA, 543 bp, Artificial Sequence
  derived and/or modified sequence
atgttaggactctggggccagcgtctacctgccgcttgggtcctgctgctgctgcctttcctcccccttttgcttttggctgcccctgctccacatcgcgcatcgtataaacccgtgattgtggtgcatgggctctttgactctagctatagtttcagacacctcctggagtatatcaacgagacccacccaggaacagtagtaacagtgctagatctgttcgatgggagagagtccctccgcccactgtgggaacaggtgcagggttttcgagaggctgtggtaccaatcatggccaaagctcctcagggcgtgcacctgatctgttattcgcaagggggactcgtatgccgtgctttgttgtcagtcatggatgatcataatgtggacagcttcatctccttgtcatcccctcagatggggcaatacggcgataccgattatctcaagtggttatttccaacatctatgaggtcaaacctgtacaggatctgttacagcccatggggacaggaattttctatttgcaattactggcattag

SEQ ID NO: 80785 - DNA, 711 bp, Artificial Sequence
  derived and/or modified sequence
atgctgggactgtgggggcagcgactcccggctgcctgggtactcctgctccttcctttcctgccactgttacttctggcggcaccagcaccgcatcgcgaaagctataagccagtcatcgtggtgcatggtctcttcgactcatcatactccttcaggcatctcctggaatacatcaatgagactcaccccggtaccgtggtaacagtgctggatctgtttgatggaagagagtctctacgcccactgtgggagcaggtgcaggggttccgggaagccgtggttccgataatggccaaagctccccagggcgtccatctaatctgttattcccaaggaggtcttgtgtgccgagctctcctctcagtgatggacgatcataatgtcgacagcttcattagcttaagttcaccccagatgggccagtatggagacacggattatctgaaatggctgttccctacttcgatgcgaagtaacctataccgcatttgttacagcccttggggtcaggagttttcaatctgtaactattggcatgacccccaccacgatgacctgtatctgaacgcatcctccttcctggctctaattaatggtgaaagggatcatcccaacgccaccgtctggaggaagaacttcctccgtgtgggccacctggtgctgatcggaggtccagacgatggagtcattacaccatggcagagctag

SEQ ID NO: 80786 - DNA, 603 bp, Artificial Sequence
  derived and/or modified sequence
atgctcggcttatggggacagcggttgcctgccgcatgggtcctgttgctcttaccgttcttgcctctgctgcttctggccgctcccgctccccaccgcgctagttataaaccggtgatcgtggtacatggcttgttcgattccagttattccttccggcacttgttagagtacatcaacgagactcatccaggcaccgtcgttaccgtgctcgatctgtttgacggcagagaaagcctgaggcctctgtgggagcaggttcagggttttagagaggccgtggtccctattatggcgaaggcgcctcagggagtgcatcttatctgctatagccagggcggattggtgtgcagggctctgctcagcgttatggacgaccataacgttgactcgtttatcagcttgagctcccctcagatgggacagtacggcgacacagactacctgaagtggctcttcccaaccagtatgcgctctaacttgtaccgaatctgttatagcccatgggggcaggagtttagtatctgtaactactggcatgatccccatcatgacgacctttacttgaacgctagcagctttctcgcactgatcaatggctag

SEQ ID NO: 80787 - DNA, 909 bp, Artificial Sequence
  derived and/or modified sequence
atgctcggtctatgggggcaaaggcttcccgcagcgtgggttcttctcttgctgccttttctgcctcttttgctgctcgccgcaccagcaccccaccgagcaagttacaagcctgtgatcgttgttcatggtctattcgacagtagctacagcttccggcacctcttggaatatatcaatgaaacacaccctggcactgtcgtcactgtcctggacctgttcgatggccgagagagcctgagacctctgtgggagcaagtccaggggtttcgggaagctgtagtgcccataatggccaaggccccacaaggcgtccacctgatatgttacagccagggtggacttgtttgtcgggcactgttgtccgtgatggacgatcacaatgtggatagcttcattagcctcagttcaccccagatggggcagtatggtgacaccgattacctgaaatggttatttccaacttcgatgaggtccaatctgtaccgcatatgctactcaccttggggccaggagtttagcatttgcaactactggcacgacccacaccatgacgatctgtatttgaacgcctccagcttcctcgctctgataaacggtgaacgagaccacccaaatgccacagtttggagaaagaactttttacgcgtcggccacttggtgctcattggcggaccagacgacggcgtcataacaccctggcaatcgtctttttttgggttttacgatgcgaatgagaccgtcctagagatggaggaacagctcgtgtacctacgggattcttttggcctcaagaccctattggccagaggcgcaattgtgcgctgccctatggcgggaatcagccacaccgcctggcattcaaatcggaccctctacgagacatgtatagagccttggctcagttag

SEQ ID NO: 80788 - DNA, 603 bp, Artificial Sequence
  derived and/or modified sequence
atgctcggtctatggggtcagcggcttccagccgcatgggtgttgctgcttctgccattcctgccgctgctacttttggcagcacccgcaccacaccgcgcttcctataaacccgtcatcgtcgtccatggactgtttgattcctcctacagcttccgccatttgctcgaatacatcaatgaaacccacccgggaaccgttgtaactgtactagatctgttcgatggacgggagtctcttcggcctttgtgggaacaagtgcaaggcttccgagaagctgtagtccctatcatggcaaaggctccacagggagttcacctgatttgttacagccagggtgggctggtatgtcgagccctgttaagcgttatggatgatcacaacgttgattccttcatcagcctgtcttccccgcagatggggcagtacggcgacacggactacctcaagtggttgttccccactagcatgagatcaaacctctacaggatttgctactccccatgggggcaggaattctcgatctgtaactattggcatgatccacatcacgacgacctttatctcaatgcaagttcctttctggccctaatcaatggctag

SEQ ID NO: 80789 - DNA, 711 bp, Artificial Sequence
  derived and/or modified sequence
atgctcggcctttggggacagcgcctcccggcagcctgggtcctcctgctgctcccattcctccccctcttgttgctggccgctcccgctcctcatcgggagtcatacaaacccgtcattgtagtgcacgggctttttgatagcagctacagctttagacacttattggagtatataaatgagacccacccagggacagtcgtgaccgtgctcgacttgttcgacggcagggagtcactaagacctttatgggaacaggtgcagggctttcgcgaagctgtcgtgccaatcatggcaaaggctccacagggcgtacatctcatttgctatagccagggtgggctggtctgccgtgctttgttatctgtgatggacgatcacaatgtggacagctttatttctctctcttcacctcagatggggcaatacggagacactgattatttgaaatggctttttcccacgtccatgcggtctaatctgtatagaatctgttacagtccatgggggcaggaattttcgatctgcaactattggcacgatccccatcacgatgatctttacctgaacgcctcatcctttctcgcattgatcaatggggaaagagaccaccctaacgctacagtgtggaggaagaattttctcagagtgggccatctggtgctgatcggcggacctgatgacggcgtgataaccccctggcagtcttag

SEQ ID NO: 80790 - DNA, 543 bp, Artificial Sequence
  derived and/or modified sequence
atgttaggattatggggccaaagattacctgccgcatgggttttactgctactgccctttctccccctgttactgctggctgcaccagcccctcacagagccagctataaacctgtgatagtggtgcacggcttgtttgattcttcctacagtttccggcatctgctggaatatatcaacgagactcatccgggaacggtggtgacagtactggatttgttcgatggcagggaaagcctgaggcccctgtgggagcaggtccaagggttccgtgaggcggtggtgcctatcatggcgaaggcacctcagggggttcacttaatttgttatagccagggaggcttggtgtgccgcgctctactatctgtcatggatgatcacaatgtggatagcttcatctcactctcttctccacagatgggccagtacggggacacagactatttgaaatggttgttccccacatctatgcgcagcaatttataccggatctgttactccccgtggggccaggaattctcaatatgtaactattggcactag

SEQ ID NO: 80791 - DNA, 477 bp, Artificial Sequence
  derived and/or modified sequence
atgctcggtctgtggggtcagcggctgcccgctgcatgggtgctccttctgctgcccttcttgccattattattattagcggctcctgcaccacaccgggcttcatacaaacctgtcatagtggtacatggtttgtttgattctagctatagttttagacacctgctggagtatatcaacgaaatgggacagtatggagacacggattacctcaaatggctttttcccacatcaatgaggtccaacctctataggatctgctacagcccctggggtcaggagttcagcatttgcaactactggcacgatcctcaccatgacgatctgtatctgaatgcctccagttttctggctctgatcaatggggagcgcgatcatcccaacgccaccgtctggcgcaagaattttctgagggtcgggcatctggtactcatcggaggaccagatgacggggttattaccccatggcagtcttag

SEQ ID NO: 80792 - DNA, 603 bp, Artificial Sequence
  derived and/or modified sequence
atgttgggtctgtgggggcaacgtctacctgccgcatgggtgctactgcttcttccctttcttcccttgctgctcctggcggcacccgctccacatagagaatcttacaagcctgtgattgtggttcacggtctgtttgacagctcctactcattcagacacctcttggagtacataaacgagacccacccagggaccgttgtgactgtgctcgatctcttcgatggcagggagagtctgcgtcccctctgggagcaagtgcaaggcttccgcgaagccgttgttcctatcatggctaaagcgccacagggggtccaccttatttgctacagccagggaggcttggtttgtcgcgcactgctttcggtcatggatgatcataacgtcgactccttcatctccctcagctcacctcaaatgggacagtacggtgatactgactacctgaaatggctgttccctacttcaatgagaagcaacctttatcgtatctgttatagcccgtggggccaggagttctccatctgcaactactggcacgatccacatcatgacgatctctatctcaacgcctctagtttcctcgcactcatcaatgggtag

SEQ ID NO: 80793 - DNA, 603 bp, Artificial Sequence
  derived and/or modified sequence
atgcttggcctgtgcggtcagagactgcctgctgcatgggtcctgctgctgctcccatttcttccactgcttctactagctgcacccgctccgcatcgtgcctcctacaagcctgtgatagtggtacacggactttttgacagctcctacagctttaggcatttgctggaatacatcaacgaaacacatcccggtacagtggtcacagttctggacctgtttgacgggagagaaagtctccgtcccctgtgggagcaggtgcagggattccgtgaggccgtggtgcccatcatggcaaaggcgcctcagggggttcatctgatttgttactcgcagggagggctggtgtgccgtgcccttctgagcgtgatggacgatcataatgtggattctttcatttctctgtcctcaccccagatgggtcagtacggggacacagattacctaaagtggcttttccccacgagtatgcgatctaacctgtatcgcatctgctactctccctggggccaggaattttctatatgcaactactggcacgatccacaccatgatgatctgtacctgaacgccagttcctttctggccctgatcaatggctag

SEQ ID NO: 80794 - DNA, 441 bp, Artificial Sequence
  derived and/or modified sequence
atggatgaccacaacgtggattcatttatcagcctgagttctcctcaaatgggccagtatggtgatactgactacctcaagtggctgttccccacctcaatgagaagcaacctgtacagaatctgctactctccatggggacaagaattttcaatttgtaactattggcacgatccacatcatgatgacttgtatctaaatgcctcttcattcttagccctgatcaatggtgaaagggaccatccaaatgccactgtttggaggaaaaacttcttacgagtcgggcacctcgtacttattggaggcccagatgatggagtgatcacgccctggcagagctctttttttggcttctatgatgccaatgagaccgtgttggagatggaggaacagttaccagtggggtcctctgtgaaggccaatcacggagtgcagggttag

SEQ ID NO: 80795 - DNA, 477 bp, Artificial Sequence
  derived and/or modified sequence
atgctcggattgtggggccagagactgcctgccgcttgggtcctgttattgctgccgttcttgccacttctactcctggctgcaccagctccacaccgggcatcatacaagcccgtgatcgtagttcatgggttgttcgacagtagttattcattcagacatctcttggagtatataaacgaaatggggcagtacggtgacacagattaccttaaatggttgtttccgaccagcatgaggagtaacttatatcgcatttgttacagtccatggggacaagagttctccatttgcaactactggcatgacccacatcacgatgatctctacctcaatgcctcttcctttcttgcgttaattaacggagaacgcgaccacccaaacgccacagtttggcgcaagaattttctccgggtgggtcatctcgtactaatcggaggcccagacgatggcgtgattaccccttggcagagctag

SEQ ID NO: 80796 - DNA, 909 bp, Artificial Sequence
  derived and/or modified sequence
atgctcgggctctggggacaaaggttaccagctgcttgggtgcttctcctgcttccattcctgccactccttcttcttgcggctcctgcacctcaccgagccagttacaaacctgttatagtggtgcacggactgttcgatagttcttactcattcaggcacctactggagtatatcaatgagactcatccgggaactgtagtgaccgtgctcgacctgttcgacggcagagaatcactgcgccctctgtgggagcaagtgcaaggcttccgcgaggcagttgtccccatcatggctaaagctccccaaggcgtccatttaatatgctattctcaaggcggactggtgtgtagggccttattgtcagtcatggatgatcataatgtggattcatttatctctctcagttctccacagatgggtcagtatggagacacagattacctcaagtggcttttcccgacctccatgcgtagcaatctttaccggatttgctacagcccctggggccaggaatttagtatatgcaactattggcacgatccccaccatgacgacctctatttgaatgcgagcagtttcctggccctgatcaatggggagcgtgatcaccctaatgctaccgtttggagaaaaaattttctccgcgtgggccacctggtcctgatcgggggacctgatgatggggttatcaccccttggcagagcagcttttttgggttctacgatgcaaacgaaacagtcctcgagatggaggagcaacttgtgtacctaagagattcgttcggattgaagactctgcttgctcggggagcgatcgtgaggtgtccaatggctgggatatctcataccgcctggcactctaacagaactctctacgaaacctgcattgaaccatggctatcctag

SEQ ID NO: 80797 - DNA, 909 bp, Artificial Sequence
  derived and/or modified sequence
atgctagggctgtgggggcaaaggcttccagcggcatgggtcctgctgctgctgccatttctgcccttactgctcttggcagcccctgccccacatagggcttcttacaaacccgtgattgtcgtccacggcttatttgattcaagctacagctttaggcacttgcttgaatacatcaatgaaacccacccaggcacagtggtgaccgtgctggacttgttcgacggtcgagaatccctaaggcccctctgggagcaggtgcaggggttccgcgaggctgttgtcccgatcatggcaaaagctccccaaggcgtgcacctcatctgttatagccagggcggactggtgtgcagggctctgctgagcgtcatggatgatcacaacgtcgactcttttatcagtctctcctctccacaaatgggacagtatggggacacggattatctgaaatggctgtttcctactagcatgagaagcaacctgtacagaatatgctactctccgtggggccaagagttcagtatctgtaattactggcacgacccgcatcatgatgatctctacctgaacgctagctcatttctcgcactcatcaatggagagagagaccatcccaacgctaccgtatggaggaaaaacttcctcagagtgggtcaccttgtcctcatcggcggaccggacgacggagtcataaccccatggcagagtagtttctttggcttctacgacgcgaatgaaacagtgctggaaatggaagagcagctggtatacctgcgagacagcttcggtctaaagaccctgcttgccagaggagcaattgtgcgatgtccaatggctggtatatctcatactgcttggcacagtaataggacgctgtacgagacctgcatcgagccctggttgagctag

SEQ ID NO: 80798 - DNA, 909 bp, Artificial Sequence
  derived and/or modified sequence
atgttgggcctatgggggcagaggttgccagccgcttgggtgctgcttttgctaccattcttacctttactgctgcttgctgccccagccccacaccgggcaagctataaaccagtcatcgtcgtccacgggcttttcgacagctcctacagtttccgccacttgctcgagtacatcaatgaaactcaccccggtaccgtggtgactgtgctggatctattcgatggaagagaatccctgcgcccattgtgggagcaggtgcagggctttagagaagccgtagtcccaatcatggccaaagcaccacagggcgtccacctcatctgttattcccaagggggtttggtctgtcgggctctcttgagtgtgatggacgaccacaatgtcgattcatttatttccctatcttccccacagatggggcagtacggcgataccgactatctgaagtggcttttccccacctcaatgcggtccaatttgtatcggatctgctacagcccttgggggcaggagtttagtatctgtaattattggcatgacccccaccacgacgacctgtatctgaacgcaagctccttcctcgctcttattaacggggagcgcgaccacccaaacgcgacagtgtggaggaagaattttcttagggtgggtcacctggtgctgattggcggacctgatgatggcgtgatcaccccttggcaatcctccttctttggcttctatgacgctaacgaaaccgtcctggagatggaggaacagctcgtttatttaagagacagcttcggactcaaaactttgctcgctaggggagctattgttcgttgtcccatggccggaatcagtcacaccgcatggcatagtaatcgcaccctttacgagacatgtattgagccatggctgtcctag

SEQ ID NO: 80799 - DNA, 282 bp, Artificial Sequence
  derived and/or modified sequence
atgctcggcctgtggggtcagcggttgcctgctgcctgggttctgctcttacttccttttctcccactcctcctattagctgcccctgctccccaccgtgaaagctacaagccagtcatcgttgttcacgggctgttcgactcgtcctattcattccggcatctgctggaatacatcaacgaaggagctctgtgtgctggcttatgtttcctgtcatggatgattaccacttggatcctgtccagtccctcacccctccatcgctgggattcgatggaatag

SEQ ID NO: 80800 - DNA, 603 bp, Artificial Sequence
  derived and/or modified sequence
atgttggggctttggggtcaacgtcttcccgctgcatgggtgctcctgctgctccccttcctcccacttctgctcttagctgcgcctgctccccaccgagcgagttacaagcctgtcatcgtggtgcacggtttgttcgactcttcatatagctttcgccacctgttagagtatatcaatgaaacacacccagggacggtggttactgtcctggatctgtttgatgggcgtgagtcactaagaccattatgggaacaggttcaggggttccgagaggctgtcgtcccaattatggcaaaagccccacagggagtgcatcttatttgctacagtcagggcggactggtgtgccgggctcttctctcggtcatggacgatcataacgttgattcctttataagcctgagctctccccaaatggggcaatacggcgacaccgattacttgaagtggctctttcctacatcgatgagatccaacctttatcggatttgttatagcccttggggacaagaattctccatctgtaactactggcatgacccgcatcacgacgacctttacctgaatgctagttcatttctagccttgatcaacggctag

SEQ ID NO: 80801 - DNA, 603 bp, Artificial Sequence
  derived and/or modified sequence
atgctgggcttgtgggggcagcgcctgccagccgcatgggttctgctgttgctgccttttctgccactgctcttgcttgctgccccagctccccaccgcgcaagctacaagccagtgatcgtagtccatggcctgttcgattcatcctactcttttaggcacctgttagagtacatcaatgaaacccaccccggtaccgtggtgacagttttggatctgtttgatggcagagagtcgctaagacccctctgggaacaggtacagggctttcgcgaggcagtagttcctattatggctaaagctccccagggagtgcacctaatttgctacagccagggaggtctcgtctgtcgcgcattactgtccgtcatggacgaccacaacgtcgatagtttcatttcactttcatccccgcagatgggacagtatggcgatacggattatctgaagtggttattccctaccagtatgcggagcaacttgtatcgtatctgctacagcccttggggtcaagaattctctatctgcaactactggcatgatccccatcacgacgacctgtacctcaacgccagttcttttctggccctgataaacggctag

SEQ ID NO: 80802 - DNA, 909 bp, Artificial Sequence
  derived and/or modified sequence
atgctaggcctctggggccagagactgcctgccgcatgggttcttctgcttcttccattcctccccctgttgcttctcgctgcacctgctccacaccgggcttcgtacaagcctgttatagtcgtccatgggcttttcgatagttcttactcatttcgccatctcctggagtacatcaacgaaacacatccaggtacagtggtgacagtgctcgacctgtttgacggcagagagtcgctgaggcccctttgggagcaagttcaggggtttcgagaagcagtagtgccgatcatggccaaggcaccccagggcgtacacctcatttgttactcccagggcggacttgtgtgtagggcactcctttccgtgatggatgatcacaatgtagatagcttcatttcgttgtctagccctcagatgggccagtatggcgatacagactatctgaaatggctgtttcctaccagcatgaggtcaaacctctataggatctgctacagtccctggggccaagaatttagcatttgcaattactggcatgatcctcaccacgacgatctgtacctgaacgcttccagcttccttgcccttattaatggagagagggatcatcctaatgctacagtttggcgaaaaaattttctgagagtgggacacttggtgctaatcggcggaccagacgatggcgtcataacaccttggcagagctcgttcttcggcttttatgacgccaacgagacggtgctcgaaatggaagagcagcttgtgtatttacgtgactcctttggcttgaaaacattgctggctcgaggagcgatcgtccgatgtcccatggccggaatttcccatactgcatggcattccaataggaccctgtacgagacctgcatagagccatggctgagctag

SEQ ID NO: 80803 - DNA, 906 bp, Artificial Sequence
  derived and/or modified sequence
atgttagggctgtgtggccaaaggttgcctgccgcttgggttctactactgctgccttttctaccattactgctgctggcggcaccagcgcctcacagagcgtcttacaaaccagtgatcgtggtgcatggcctatttgacagctcctacagcttcagacatctgcttgagtatataaacgaaactcacccaggcaccgtggtgactgtgctggatcttttcgacgggcgtgaatccctgcgtccgttatgggagcaagtacaaggctttcgggaggctgtcgtgccaatcatggcaaaggccccacaaggagtacatctgatttgttatagccagggcggactggtgtgtcgtgccctactgtcagtgatggacgatcacaatgtggacagctttatctcactttcttcccctcagatgggacaatacggcgacacggattatctgaagtggctctttcctacctcaatgagatccaacctgtatagaatttgttatagtccttggggccaggagttctccatttgtaactactggcatgacccgcatcatgacgatctgtatcttaacgcttcctctttcctcgcgttgatcaacggcgaaagggaccaccccaacgctacagtctggcgaaaaaattttctccgtgtggggcacctcgtgctgataggcggacccgacgatggagttatcaccccctggcagagttcgtttttcggcttttacgatgctaatgagaccgttctggaaatggaggaacaactacccgcacgcccaacacatcaatcagaacttttacttctcagactggtgtgccttaagccgccacggcgaaaaaagcccgcatgtcgcgtgcagcgacaatcagagagctggggtcctggtttgtcgtgcgcacttagttag

SEQ ID NO: 80804 - DNA, 477 bp, Artificial Sequence
  derived and/or modified sequence
atgctgggtctgtgggggcagcggctgccggctgcttgggtcctcctccttctgccctttctgcccctgttgctactggctgctcccgctccccaccgggagtcctataaacctgtcattgtggttcatggcctatttgactcctcttatagctttcgtcatctgctggaatacatcaacgaaatggggcagtacggggacaccgattatctcaaatggctgtttcctacaagtatgcgctctaacctctaccgaatttgttattctccatggggccaggagttctccatttgtaattattggcacgacccccaccatgacgatctttacctcaatgcgagctcttttctcgccctgatcaatggggaaagagatcatcccaatgccacagtttggcgcaaaaactttctgagagttggccaccttgtcctcattggtggccctgacgacggcgtgattacaccttggcaatcgtag

SEQ ID NO: 80805 - DNA, 543 bp, Artificial Sequence
  derived and/or modified sequence
atgttggggctgtgggggcaacgccttcctgctgcatgggttctgcttttactccccttcctgcctttgttgctcctcgcagctcctgccccacatagagctagctataaacctgtgatagtggtccacggattattcgactccagttactcgtttcgccatttgcttgagtacattaacgaaacacatcccggaactgtggtcaccgtgctcgacctgtttgacggaagagaaagtctgcgacctctatgggagcaagtccaaggcttcagggaagctgtggttccgattatggcgaaagcaccgcagggcgtgcacttgatttgctacagccaagggggactggtgtgcagggccctcctgtcagttatggatgaccacaatgttgattctttcattagtttgagcagtccacaaatgggacagtacggcgatactgattacttaaaatggctctttcctaccagcatgcgaagcaatttatacaggatctgctactccccttggggacaggagttctccatctgcaattactggcactag

SEQ ID NO: 80806 - DNA, 603 bp, Artificial Sequence
  derived and/or modified sequence
atgctgggcctgtggggacaacgcctccctgccgcatgggtgttgctgctgttgcccttcttgcctctgttgctgttagccgcacctgcaccacacagagcctcttataagcccgtcattgtggttcacggactcttcgactccagttactcgttccgtcatctgctcgaatacattaacgaaacccacccaggaacagtagtgaccgtgctggatcttttcgatgggcgtgagtctctccggccattgtgggagcaagttcaaggcttccgcgaggccgtggtgcctatcatggcaaaagctccccagggcgtgcacctaatctgctattcgcaggggggtctggtgtgcagagcccttctgtcagtgatggatgaccacaacgttgactcattcatatcactgagtagccctcagatgggacaatacggcgacaccgattatttgaaatggctgttccctacttcaatgaggagcaacctctaccgcatttgctactctccgtggggacaggaattttctatttgtaactactggcatgacccccaccacgatgatctctacctgaacgccagctccttcctggccttgatcaatggctag

SEQ ID NO: 80807 - DNA, 909 bp, Artificial Sequence
  derived and/or modified sequence
atgctgggactttggggtcagcgcctgcctgcagcctgggttcttctgctccttccttttctgcctctccttctgctggctgcaccagcgcctcatcgtgcttcatacaaacctgtgatcgtagtccacggcctattcgatagttcctattcgtttcgccatctacttgagtatatcaacgagactcacccagggaccgtggtaacagtactcgatttatttgacggcagagagtcccttcgacccctttgggagcaagtgcaaggttttcgggaagccgtagtgccaatcatggccaaggctcctcagggcgtgcacttgatctgttactcccagggcggtttggtgtgcagagcgctcctctccgtaatggacgaccataacgtcgacagctttatttctctatcttctccacaaatgggacagtacggtgatactgattatctcaaatggctattcccaacctccatgcgcagcaatctgtatcgaatatgttactccccctggggtcaagagttctccatctgcaactactggcatgatccccaccatgatgacctctacttgaatgcctccagttttctggccttaatcaacggggagcgtgaccacccgaacgccaccgtttggcgaaaaaattttcttcgagtgggacacctggtgctgatcggtggccctgacgatggtgtgattacgccatggcagtcctctttctttggtttctacgatgctaatgaaactgttttggaaatggaagagcagctagtgtacctacgggatagctttggactgaaaacactgctggcacgcggagctattgtacgctgtcccatggctggaataagccacactgcttggcattccaaccggacgctttatgaaacttgcattgagccatggctaagctag

SEQ ID NO: 80808 - DNA, 909 bp, Artificial Sequence
  derived and/or modified sequence
atgcttggactatggggtcagcgcctccccgctgcctgggttctgctgctgctcccgttcctgcctctgctgctcctagccgctccagcccctcatcgtgcctcgtataagcccgtcatcgtcgtccacggcctgtttgacagttcatatagctttcgacatctgctggagtacatcaatgagacccaccctgggaccgttgtgacggtcctggacctcttcgacggacgtgaatccttaagaccattatgggaacaggtgcaagggtttcgggaagctgtagttccgataatggccaaagcccctcagggggtgcacctcatatgctacagccagggtggattggtatgccgggctttgctgtctgtgatggacgatcacaacgtcgactccttcatatctctgtcgagtccacagatgggtcagtacggagacacagattatctcaaatggcttttccccactagcatgagaagtaatctgtataggatctgctacagtccctggggccaggagttttcaatttgcaactattggcacgacccacatcatgacgatctgtatttaaacgcctcctcctttctagctctgattaacggggagcgtgaccatccaaatgccaccgtgtggaggaagaactttctccgtgtcggccatctggtcctgatcggcggtcctgacgatggcgtgataactccttggcagtcgagcttctttggcttttatgacgctaatgagactgtgctggaaatggaagagcagctggtgtacctccgggattctttcggtctgaagacacttttggctcgcggagccatcgtacgttgtcccatggccggaatatcccataccgcatggcattccaacaggaccctttatgaaacatgtatcgaaccctggcttagctag

SEQ ID NO: 80809 - DNA, 282 bp, Artificial Sequence
  derived and/or modified sequence
atgcttgggctgtggggccagcgcctccccgcagcttgggtactgttgctgctcccttttttacctctgttactgctcgctgctccagcccctcaccgcgcaagctataaaccagtgatcgtggtccacgggcttttcgattcttcttattctttcagacacctgttagagtacatcaatgaaggcgctctctgtgccggtctgtgcttcttgagctggatgattaccacatggattttgtcttcccccagtcccttgcacagatgggattccatggaatag

SEQ ID NO: 80810 - DNA, 282 bp, Artificial Sequence
  derived and/or modified sequence
atgttaggattgtgtggtcagcggctgcctgcagcttgggtacttctattacttccatttctcccactgcttcttctggctgcccctgctccgcatcgggcatcctataagcctgtaattgtagtgcacggcctgttcgactcttcctatagtttccggcatctgctggaatatatcaatgaaggggctctttgcgctgggctctgtttcctttcatggatgatcacgacatggatcttatcctctccttcgccactccaccgctgggacagcatggaatag

SEQ ID NO: 80811 - DNA, 909 bp, Artificial Sequence
  derived and/or modified sequence
atgctgggcctgtggggccagaggctccccgctgcatgggttcttttattgctgccatttctcccgctgctgctgctggcagcccctgcgcctcatagagccagttataaacctgtgatcgttgtacacggactgttcgattcttcctacagtttcaggcatcttctggagtacataaacgaaactcaccctggaaccgttgtcaccgtgctggatttgttcgacggtcgggaatctctgaggcccctctgggagcaggtccaaggctttcgcgaagccgttgttccgatcatggcaaaagcaccacagggtgtgcatttgatctgctacagccaggggggactggtatgccgggcactgcttagtgtgatggatgatcataatgttgactcttttataagtctgagttcgccccagatgggccagtacggagatactgactatttgaagtggcttttcccaacatcgatgaggtctaatctctatcggatttgctatagcccatggggccaggaattctctatctgtaactactggcacgatccccaccacgacgatttatatttgaacgcctcatcattcttggctctgattaacggcgaacgggaccaccctaatgccacagtgtggcgtaaaaattttttgcgggtgggtcatctagttctgattgggggaccagacgatggagtcattaccccctggcagagctctttctttggcttttatgacgccaacgagaccgtgctggagatggaagagcagttggtctacctccgagactccttcggccttaagacgctgctggcgagaggcgcaatcgtacgctgtccaatggcaggtatcagccacaccgcgtggcattcaaatcgaaccctatatgagacctgcatcgagccatggctttcatag

SEQ ID NO: 80812 - DNA, 909 bp, Artificial Sequence
  derived and/or modified sequence
atgctgggcctgtggggccaaaggcttcctgcagcctgggtgttgctgctactgcctttcctgcctctcctgctcttagccgctccggctccccatagggcctcctacaagccagtcatcgtcgtgcatggcctttttgacagcagttactctttccgccatctgctggaatacattaatgaaacccatccaggaactgtagtcaccgtattagatctgtttgatgggcgtgagtcactacgcccactctgggaacaggttcaggggttcagggaggccgtggtccctattatggccaaagccccacaaggcgtgcatctaatttgttattctcagggtggacttgtatgccgagccctgctgtcggtcatggatgatcataacgtggattcattcatcagtctctcctcgccccaaatgggccagtacggcgacaccgattacttaaagtggctgttccctacttcaatgcgtagtaatttatatcgcatttgttattcgccatggggccaggagtttagcatctgcaattattggcacgatccccaccacgatgacctgtacttgaatgcgagttccttcctggccctaataaatggggagcgcgatcatccgaatgcaactgtgtggcgcaaaaattttctccgggttggacatctggttctcattggtgggccagacgacggggtcattacgccctggcaatcgagcttttttggcttctatgacgcgaatgagacagtgcttgagatggaagagcagctcgtctacctgcgtgactcgtttggattgaagacattgctggcacgtggcgcaattgttagatgtccaatggctgggatttcacataccgcatggcactctaataggactttgtacgagacatgcatagaaccttggttaagttag

SEQ ID NO: 80813 - DNA, 543 bp, Artificial Sequence
  derived and/or modified sequence
atgcttggcttgtggggccagaggcttcctgctgcttgggtgctgctgttgctacctttccttccactgctgcttctggcagcaccagcccctcatagagaaagttacaaacccgtgattgtggtgcacgggctctttgacagtagttattcttttcgtcaccttctggaatatatcaatgaaactcacccaggcactgtggtgaccgtgcttgaccttttcgacggacgcgaaagtctgcgtccactttgggaacaagtgcagggcttcagagaagccgtggtcccaatcatggccaaggcaccacagggggttcatctcatatgctacagtcaaggcggactggtttgcagagcgctgctgagtgtcatggacgaccacaatgtggactcctttataagtctcagctcccctcagatgggccagtatggcgacaccgactatctcaagtggctctttccgacatcgatgaggagcaacctctataggatctgctatagtccttggggtcaagaattttctatctgtaactattggcactag

SEQ ID NO: 80814 - DNA, 543 bp, Artificial Sequence
  derived and/or modified sequence
atgcttggcttatggggacagcgcctcccagccgcatgggtgctgctgcttcttccttttctgcccctcctgctgctcgcagcacccgctccccacagagagtcctacaagccggtgatcgtagtccacggactgtttgactcctcgtactctttccggcatctactggaatacattaatgaaacacaccccggtactgtcgtgaccgttctggatctgttcgacggacgagagtctttgcgccctttatgggagcaggtccagggatttcgtgaggctgtcgttcctattatggcaaaggccccacaaggggtgcacctcatttgttactcccagggtggccttgtttgtagagctttgctgtcagtaatggatgatcataacgttgacagctttatcagtttatcctcaccacagatgggccagtatggcgacacagactatctaaagtggctctttcctaccagcatgcgctctaacctgtataggatttgttattctccgtggggccaggagtttagtatttgtaattactggcattag

SEQ ID NO: 80815 - DNA, 282 bp, Artificial Sequence
  derived and/or modified sequence
atgcttggcctctgggggcagcgactccccgctgcctgggtactcctcctgctgccgttcctgccactcttacttctggctgctcccgcacctcacagagagtcgtacaaacccgtcatcgttgtacacgggttattcgatagcagttactctttccgccatctcctggagtacatcaatgaaggagccttatgtgcgggtttgtgcttcctgagctggatgattaccacatggatcctcagcagcccatcacctctacacagatgggattctatggaatag

SEQ ID NO: 80816 - DNA, 711 bp, Artificial Sequence
  derived and/or modified sequence
atgctggggctgtggggccaacggctcccagccgcatgggttctgcttctgttgccttttctcccactgttgttactggctgctccagcaccacaccgcgagtcttacaagccagtgatagttgtgcatggtctctttgactcctcatacagttttaggcacttgctcgaatacataaacgagactcaccctgggacggtcgtaaccgtcttggatctatttgatggtagggagagtttacgacccctgtgggaacaggtgcaaggattccgggaggcagttgtgcctattatggccaaggccccacagggagtacatctgatatgttacagccaggggggactggtttgtagggctctgttgtccgtcatggatgatcacaacgtggattcgtttatctccttgagttcaccacagatgggccaatatggtgacaccgattatctgaagtggctgttcccgacctctatgaggtctaatctttataggatttgttacagtccttggggacaggagttctccatttgtaactactggcatgacccccaccatgacgatctgtacctgaatgcctctagcttcctcgcactgattaatggagaacgtgaccatcccaacgctactgtctggaggaaaaacttcctgagagtcggccatctcgtgctcatcggcggacctgacgatggtgtcattacaccttggcagagctag

SEQ ID NO: 80817 - DNA, 165 bp, Artificial Sequence
  derived and/or modified sequence
tgacacgatgacctatacttgaatgcctcaagtttccttgccctgattaatggagagagagaccatcctaacgcaactgtatggcgaaagaacttcctccgggtcggccatttagtactgattggaggcccagatgatggcgtgattaccccctggcaatcttag

SEQ ID NO: 80818 - DNA, 711 bp, Artificial Sequence
  derived and/or modified sequence
atgctggggctgtggggacaacgcctgcctgccgcttgggtgcttctcctgttgccatttctcccattgctgctgcttgcagctcctgcccctcatagggagagttacaaacctgttatcgtggtacacggcttgttcgactccagctactccttcagacatctccttgagtacatcaatgaaacacaccccggaaccgtggttacagtgctggacttgttcgacggcagagagagtctgagacctctttgggagcaagtgcagggattccgggaggcagtcgtaccaattatggccaaggcccctcagggtgtacacctcatctgctattcccagggagggcttgtgtgcagggctctgctcagcgtaatggacgaccacaatgttgattcctttatttctctgagctccccacagatgggccagtacggcgacacagattacctgaagtggctcttccccacctccatgaggagtaatctctatcgcatttgttacagtccgtggggccaggagttttctatttgtaactattggcatgaccctcaccacgacgatttgtatctcaatgcctcctcgtttctggccctgataaatggtgaaagagatcaccctaacgcgactgtgtggcggaaaaactttctgagggttggccatctggtcctgattggtggacccgatgacggagtaataacaccttggcagtcttag

SEQ ID NO: 80819 - DNA, 909 bp, Artificial Sequence
  derived and/or modified sequence
atgcttgggctttgggggcaacggctcccagccgcatgggtgctcctgctcctcccgttcttgcccctcctgctgctagcggcaccggcaccacaccgcgctagttataagccggtgattgtagtgcacgggttgtttgattcgtcatacagcttccgccacctgctggaatacataaatgagactcaccccggaactgtagtgaccgtattggacttattcgacggacgagaaagccttcgcccactctgggaacaggtccagggctttcgcgaagccgtggttccaatcatggccaaagcccctcaaggagttcacctgatctgttactcacaaggcggactggtctgcagggcgcttctttcagtcatggacgaccataacgttgattcatttattagcttgagcagtccccagatgggccagtatggcgatactgactacttgaaatggttatttcccactagcatgcgtagtaacctgtatcgtatctgctactctccgtggggacaggagtttagcatatgcaattactggcatgatccacaccatgacgacctgtacttgaacgccagctccttcttagccctgatcaatggggaacgggaccatccaaatgccacagtgtggcggaagaattttctgagggttggccacttggtcctgatcggcggtcccgacgatggcgtgattaccccttggcagtcctcctttttcgggttttatgacgcaaatgaaaccgtgctcgagatggaagaacagctagtgtatttgagagacagcttcgggctcaaaactctgttggcaaggggagctatcgtgcgctgtccaatggcgggtatctcacacactgcatggcactctaataggacgctgtacgaaacatgcatcgagccctggttgtcttag

SEQ ID NO: 80820 - DNA, 909 bp, Artificial Sequence
  derived and/or modified sequence
atgctgggcctttggggtcaacgactccctgccgcttgggtcttactgcttcttcccttcttgcctctcctgctgctggccgcacctgccccacacagagccagctacaagcctgtaatagtggtacacgggctattcgattcttcgtactccttccggcatcttctggagtatatcaatgaaacgcaccctggcacagtcgtcactgtgctcgacctcttcgacggtcgggaatccctgcggcctctatgggagcaggtgcagggtttcagagaagccgtcgtgccaatcatggcgaaagctccgcaaggcgtgcacctcatttgctactcccagggtggcctggtctgtcgagctttgctcagcgtgatggatgatcacaatgtcgacagcttcatatcactgagcagcccacaaatgggtcagtacggagatacagattatcttaagtggctatttcctacctctatgcgctcaaatttgtacagaatctgctatagcccatggggtcaggagttttccatttgcaattattggcacgatccacatcatgacgatctgtatttgaatgctagttcctttttagcacttatcaacggagaacgagaccaccccaatgccactgtatggcgaaagaatttcctcagggtcgggcacctggtacttattggaggcccagatgatggcgtgatcaccccatggcagtcgtcattctttgggttttacgatgccaatgaaaccgtgctagagatggaagaacagctagtctacctcagagattcttttggacttaagacgctgttggcccgtggggctattgtgcggtgtccgatggccggaatttcccacacggcctggcatagtaaccgtactctgtatgaaacgtgtatcgaaccgtggttatcctag

SEQ ID NO: 80821 - DNA, 909 bp, Artificial Sequence
  derived and/or modified sequence
atgctcggtctttggggacagagactgccagcagcatgggttttgctcctgctacccttcctacctctgttgctactggctgccccagctccccatcgggcatcttacaagcctgtaatagtcgtgcacggacttttcgactcttcatattcattccgccacctactagagtacatcaacgagacacaccccggaaccgttgtgacggtccttgatcttttcgacgggagggaatcgctgaggccactgtgggagcaagtccagggctttagagaggctgtagtccctattatggctaaggcccctcagggagttcacctcatctgttacagtcagggcggtttggtgtgcagagccttgctgagtgtgatggatgaccataacgtggattcttttatatccctatcttcgccacaaatgggccagtacggtgatacagattacctgaaatggctgttccccacctcgatgaggtccaacctgtaccgtatctgctacagtccttgggggcaggagttcagtatctgtaactactggcatgatcctcaccacgacgatttgtacctcaacgcgagttcttttttggcgctgatcaacggggagcgcgaccatcctaacgccaccgtgtggcgaaaaaactttttgagagtggggcatctggtcttaatcggtggccctgacgatggcgtgatcacgccctggcagagctctttctttggattttacgacgcaaacgagactgtgttagagatggaggagcagctggtttacttaagagatagtttcggattgaagacacttttggccaggggcgctatcgtgcggtgccctatggctggaatctcccacacagcctggcattctaataggactctgtacgaaacttgcattgagccctggcttagctag

SEQ ID NO: 80822 - DNA, 441 bp, Artificial Sequence
  derived and/or modified sequence
atggatgaccacaatgtggactcattcattagtctctcatcgccccagatgggacagtacggtgatactgactacctgaaatggctttttccaactagtatgaggagtaacctgtaccggatatgctacagtccctggggccaagaattttctatctgtaattactggcatgatccccaccacgatgatttatatttgaacgcatcttcatttctggcactcataaacggagaacgggaccaccctaatgcgacagtctggagaaaaaattttctaagggtgggccacctggttctgatcggcggacctgatgatggcgtcattactccttggcagagctcattcttcggcttctacgacgctaacgagaccgtgctggaaatggaggagcaactccctgtaggatcctccgttaaggccaatcacggcgtgcagggttag

SEQ ID NO: 80823 - DNA, 906 bp, Artificial Sequence
  derived and/or modified sequence
atgctcggtttgtggggtcagaggctcccagctgcttgggtcctacttctcctgccttttctgcccctcttacttttggcggctcccgctcctcacagagcttcgtataaacccgtgatagtggtgcacggccttttcgatagtagttacagctttcgtcatctcctggagtatatcaacgaaacccaccctggcaccgtggtgactgtgctggacctatttgacggacgcgaatctttgcgacccctgtgggagcaggttcagggcttccgcgaagcagtcgttcctatcatggcaaaagcccctcagggggttcacctgatttgctatagtcagggcggtctcgtctgtagggcgctgcttagtgtcatggacgaccataatgtggattcctttataagcctaagttccccgcagatggggcagtacggcgatacagattacctcaaatggcttttccctacctcgatgcgttcaaacttgtaccgcatctgctacagcccgtgggggcaggagttctccatctgtaactattggcacgatccccaccacgatgatctgtacctgaatgcctctagctttctggccctgatcaacggggagagggaccatcctaacgccactgtgtggcgcaaaaattttttaagggtaggccatttagtcttaattgggggaccagatgatggagtcatcactccgtggcagagtagcttttttggtttctatgacgctaatgagaccgtacttgaaatggaagagcagctgcctgctaggcccacgcaccagagcgaactccttctactgcgtctcgtgtgcctaaaacccccacgccgtaaaaaaccagcatgcagagttcagagacagtccgaaagttgggggccaggattaagttgcgccctgagctag

SEQ ID NO: 80824 - DNA, 909 bp, Artificial Sequence
  derived and/or modified sequence
atgctgggactctggggacagcgacttccagcggcttgggtgctacttctgctccccttccttccactgctgttgttggcggctcctgccccacaccgtgagtcctacaagcctgtgatcgtggtacatggtcttttcgattcctcctactcttttcgacatcttctggaatacatcaacgagacccaccctgggacagtggtgactgtgctcgatctcttcgacggtcgggagagcctgcggcctctgtgggaacaggtccagggcttccgtgaggcggtggttcctatcatggccaaggccccacagggcgtgcatctaatttgctacagccaagggggactagtctgtcgcgctctcctcagcgtgatggatgaccacaacgtggactcctttattagcttgtctagccctcagatggggcaatacggcgatacagactatcttaaatggctttttcccacaagcatgaggagtaacctatacaggatctgttattccccctggggccaggagtttagtatttgtaactattggcacgatcctcaccacgacgacctctaccttaacgccagtagctttcttgctctgatcaacggagaaagagaccaccccaacgccacggtctggaggaaaaactttctcagagttggacacttggtccttattgggggtcctgacgacggggtaatcaccccctggcagagctcgttctttggattttatgacgcaaacgagaccgtcctcgagatggaagagcagctcgtttacctcagggactcttttggcctgaagacacttctggccaggggcgctatcgtgcgatgcccaatggcgggaattagccacacagcttggcactctaatagaacgctgtacgagacatgcattgagccgtggctatcatag

SEQ ID NO: 80825 - DNA, 441 bp, Artificial Sequence
  derived and/or modified sequence
atggacgatcacaacgtcgattctttcatctcgctgtccagtccccagatggggcagtatggcgacaccgactacctgaagtggctgtttcccacctccatgcgctccaatctctataggatctgctactcaccttggggccaggaattttccatttgcaattactggcacgatcctcaccatgatgacctgtacctaaacgcctcatctttcctggccctaattaacggtgaaagggatcatcctaatgcaacagtgtggaggaaaaactttctgagggtcggccacctggtgctgataggtggaccggatgatggggtcattaccccatggcagtcatccttcttcggcttctatgatgcgaatgaaactgtcctcgaaatggaagagcaattacctgtaggcagctccgtgaaagccaatcatggggtgcagggatag

SEQ ID NO: 80826 - DNA, 906 bp, Artificial Sequence
  derived and/or modified sequence
atgttgggtttgtggggacaaagactgccggctgcctgggttctgctgctgctaccctttttaccactgctcctgctggcggctcccgctccgcaccgggcatcttacaagcctgtgatcgtcgtgcacgggctgtttgacagcagctatagctttcgccacctcctggagtatatcaacgaaacgcatcccggtacggtggtcacagtgctggatctgttcgatggccgagagtcattacggccactctgggaacaggtgcagggcttccgagaggccgtcgtccccattatggctaaggccccacagggtgtgcacttgatctgctatagtcaagggggactcgtctgccgcgctctgctaagcgtgatggacgaccataatgtggactcttttataagcctttcatctcctcagatgggtcagtacggcgatacagattacctgaagtggctgtttcccaccagtatgcggtcaaacttgtaccggatttgctactctccttggggtcaagaattctcaatctgcaactactggcatgatccacaccacgatgatctgtatttgaacgccagctcgttcttggccctgatcaatggagaacgggatcaccctaatgccaccgtatggcgcaagaacttcttaagagtcgggcatcttgtgctgatcgggggaccagatgatggggtcattacaccgtggcaatcttcttttttcggcttttatgatgctaacgagacagtgctggaaatggaagagcagctccccgctagacccacccaccagtctgagttattacttctgcgcctagtgtgcctgaaacctccgaggagaaaaaaacctgcttgtagggtgcaacgccagagcgaaagctgggggcctggactgtcctgcgccttgagctag

SEQ ID NO: 80827 - DNA, 441 bp, Artificial Sequence
  derived and/or modified sequence
atggacgatcataacgtcgattccttcatatctctttcttccccgcagatgggacagtatggagataccgactaccttaagtggctgtttccaaccagcatgcgaagcaatctgtacagaatatgctactcgccgtggggacaggaattcagcatatgtaactattggcatgacccacaccatgatgacctttatctgaacgcctcgtccttcctcgccctcatcaatggggaaagagaccaccctaatgccaccgtttggcgaaaaaatttcctgcgggtgggacatctcgttcttatagggggaccagatgacggggtgatcaccccgtggcaaagcagttttttcggcttttacgatgcaaacgaaactgtcttagagatggaagaacagttgcccgttggctctagcgtcaaagccaatcacggcgtgcaggggtag

SEQ ID NO: 80828 - DNA, 906 bp, Artificial Sequence
  derived and/or modified sequence
atgttggggctgtggggccagcgcttaccagcagcctgggttctccttctgttaccattcctgccactgttgctgctggctgctcctgcccctcaccgcgcaagctataaaccagttattgtggtgcatggtctgttcgacagttcctacagcttccgccacttgttggagtacattaacgagacccaccccggtactgttgtgaccgtgctcgacctgttcgacggacgagaatccttacgcccactgtgggagcaggtacagggatttcgtgaagccgtagtgcccatcatggcaaaagcgccacagggggttcacctgatctgctactctcagggtgggctcgtgtgcagggcacttctcagcgtgatggacgaccacaacgtggactcttttatctccttgagctcgccgcagatgggtcagtatggtgacacagactatcttaaatggctattccccactagcatgagatccaatctctaccgcatttgctactctccctggggccaagagttttccatttgcaattattggcacgacccgcaccatgatgatctctacctgaatgcgagcagtttcctggctttaataaacggcgaaagggaccaccccaatgccaccgtctggcgaaaaaacttcctgagagtgggccacctggttctgatcgggggtccggacgacggggtaattacaccctggcaaagctctttcttcggcttttatgatgctaatgagactgttctggaaatggaggaacaattgcccgcacgacctacgcatcaatcagagctgctccttctgaggctggtgtgcctgaagcccccaaggagaaaaaaacccgcttgtcgcgtacagcggcagagcgaatcttggggccctggcctgtcctgcgcgttgtcttag

SEQ ID NO: 80829 - DNA, 441 bp, Artificial Sequence
  derived and/or modified sequence
atggatgaccacaatgtagacagttttataagtctgtcctctccacagatgggccagtacggagataccgattacctcaagtggttattccccactagcatgcgatccaatctctacagaatttgttatagcccatggggccaagagttctccatttgcaattactggcacgacccccaccacgatgacttgtacttaaacgcctcctcctttcttgctctcattaatggggaacgcgaccaccctaacgcaacggtctggagaaagaattttctgagagtcggacaccttgtactgataggtggtccagatgatggtgtgattactccatggcagtcaagcttctttggcttttacgatgccaacgagaccgtactggagatggaagagcagctgccagtcggcagctcggtcaaggctaatcacggcgttcaaggttag

SEQ ID NO: 80830 - DNA, 909 bp, Artificial Sequence
  derived and/or modified sequence
atgctcggtctttgggggcaaaggctccctgctgcctgggttttattgctgcttccattccttccgctgctgttgctcgccgctcccgcaccacatcgagcgagctataagcccgtgattgtcgtgcacggactgttcgattcaagttacagctttcgtcacctgctcgagtacatcaacgagacccacccaggcaccgtcgtcacagtgctggacctcttcgacggtcgcgagagcctgcgacctctctgggagcaagtgcaggggtttcgcgaggctgtggtgcccatcatggccaaggccccacaaggagtgcatctcatttgctacagccagggtggactggtgtgtcgcgctttgttatccgtgatggatgatcacaacgtagattcatttatctctctgtccagtccccagatgggacagtacggagataccgactatctgaagtggttgtttcccacttctatgagaagtaatctgtaccggatttgctactccccctggggacaggaattcagcatctgcaattactggcatgacccacaccacgatgatctctaccttaatgccagtagctttctggccctcattaatggcgagagggatcacccaaacgccacggtgtggcggaaaaacttcttaagagtgggacacctggtgttaattgggggacctgacgacggggtgatcacaccatggcagtcatcattcttcggattttacgacgccaacgaaacggttctggagatggaagagcagcttgtatacctgcgcgatagcttcggacttaagactctgctggcccgaggagcaatagtacggtgcccaatggctggcatatcacacacagcatggcatagcaaccgcacattgtacgagacctgcattgaaccctggctgtcatag

SEQ ID NO: 80831 - DNA, 441 bp, Artificial Sequence
  derived and/or modified sequence
atggatgaccataatgtggacagttttatctcattgagtagccctcaaatggggcaatacggggacaccgactatcttaaatggctcttcccaaccagcatgcggtcgaacctataccgcatttgctatagcccatgggggcaagaattttccatctgtaattactggcacgacccacaccatgacgacctttacttgaacgcctccagcttcctcgctctgattaacggggaaagggaccatcctaacgcaactgtgtggcgtaagaatttcctgcgagtgggccatttggtgctgattggtggcccagacgacggcgtgatcacaccttggcaatcaagcttttttggattctacgatgctaacgaaacggtactagaaatggaagaacaacttcccgtcggctcaagcgtgaaagcgaaccacggggtccagggctag

SEQ ID NO: 80832 - DNA, 909 bp, Artificial Sequence
  derived and/or modified sequence
atgctgggtctctggggccaaagattacctgccgcatgggtgctcctgctcttgcctttcctacccctgctgctgttagcggctccagcaccacaccgtgcttcctacaaaccagtcatcgtcgtgcatggtctcttcgattccagttacagttttagacatctgctcgaatatatcaatgagacacatccaggcactgtggtgactgtattagacctttttgatgggagagaatcgctgaggcccctgtgggagcaggtgcagggcttccgcgaagcagttgtccccattatggccaaagccccacagggggtccatttgatatgctactcccagggcggattggtatgtcgcgcacttctcagtgtgatggacgatcataacgtcgactcttttatttcattatcgtcaccccagatgggccagtacggcgatactgattacctgaagtggctgtttcccaccagtatgcgctctaacctgtatcgaatctgttacagtccgtggggccaggagttctcaatctgtaactattggcatgaccctcaccatgacgacctttacttgaacgccagctctttcttggcactgatcaatggtgagcgagaccaccctaatgccactgtctggagaaagaacttccttcgcgtgggacacctggtgcttatcgggggacccgacgacggagttatcacaccatggcagagcagctttttcggattctacgatgcaaacgagactgtgctggagatggaggaacagctggtgtatctgcgggactctttcggactcaagacactgcttgcgagaggcgcaattgttaggtgtccaatggctggtatcagccacactgcctggcactctaacagaaccctgtacgagacctgtattgagccatggctctcatag

SEQ ID NO: 80833 - DNA, 441 bp, Artificial Sequence
  derived and/or modified sequence
atggacgaccacaacgtcgattctttcattagtttatcctcaccccagatgggacagtatggtgacacagactacctcaaatggttattccctacaagcatgcgcagcaacctgtaccgcatctgctacagtccatgggggcaggagttcagtatctgcaattactggcacgatcctcatcacgatgacctttacctcaatgcatcctctttccttgctctgatcaatggcgagagggatcaccccaatgctaccgtgtggcggaagaacttccttcgcgtaggtcacttagtgctcataggcggaccagatgatggcgtgatcacaccctggcagagcagtttcttcggtttttatgacgccaatgagactgtgcttgaaatggaggagcaactgccagttggttccagcgtcaaggcgaaccatggtgtgcaggggtag

SEQ ID NO: 80834 - DNA, 906 bp, Artificial Sequence
  derived and/or modified sequence
atgctgggattgtggggacagagactccccgcagcctgggtgctgctacttctgccattcttacccttattgcttctggcagcgccagcaccccaccgagcttcatataaacccgttatcgtcgtgcacggtctgttcgacagtagttactccttccgccatctactcgagtacattaacgaaacacacccgggaacggttgttactgttctagatctcttcgatgggagagaaagcctgaggcccctgtgggagcaagtccaagggtttagggaggcagtggtgcccataatggcaaaagccccacaaggggtacatcttatctgctactcgcaggggggactggtgtgccgagctctcctgtcagtcatggatgatcacaatgtggactcgttcatatccttatcttctccccagatgggccagtatggggacacagactacctgaaatggcttttcccaacttcgatgagaagtaacctatacaggatttgttattctccttggggacaagagttcagcatttgcaactattggcacgaccctcaccacgacgatctgtatctgaatgctagctcattcttagcactaatcaacggggagagggaccatcccaatgcaactgtgtggagaaagaacttcctgagagtggggcacttggtgctgattgggggaccggacgacggggttatcacgccatggcaatcctcttttttcgggttctatgatgcaaatgaaaccgtactcgaaatggaggaacagctgcccgcaagacccactcaccaatcagaactgttactgctcaggttagtgtgtctgaaaccacctcggaggaaaaaacctgcttgtagagtccagagacaatcagaatcttgggggccagggttgagttgcgccctgtcttag

SEQ ID NO: 80835 - DNA, 906 bp, Artificial Sequence
  derived and/or modified sequence
atgctgggtttgtggggccaaagattgcccgcagcgtgggtgttgctgctgctgcccttcctccccctgttacttctggccgcacccgcacctcaccgagagtcgtataagcccgttatagtggtccacggactgtttgacagttcctactctttccgacacctgctggagtatatcaacgagacacaccccggaaccgtggttacggtcctggacctcttcgatggaagagaaagcctgcgcccattatgggaacaggtgcaggggtttcgggaggccgtagtcccaattatggccaaggctccgcagggtgtccacttgatctgctattctcagggcggactggtgtgccgtgcactgttatcagtgatggacgaccataacgtcgactcctttattagcttgtcttcaccacagatggggcagtacggcgacacagactacctgaaatggctgttccccaccagcatgcggtctaacctgtatagaatctgctattcaccttgggggcaggaattttccatttgcaactattggcacgacccacatcacgatgatttgtacctgaacgcctcgtcattcttggctctcataaatggcgagcgagatcacccgaacgcgacagtgtggcgtaagaatttcctgcgtgtgggccacttagtgttgattggtggcccagacgatggtgtgattacaccttggcaaagttccttctttggcttctacgatgctaatgaaacagtgctggaaatggaagaacaactgcccgctaggccgacccaccaatccgagcttctgctgctcaggctggtgtgtttgaaaccgccacgcaggaaaaagcctgcttgtcgcgtgcagaggcagtccgaatcttggggacccggactgagctgcgctctgtcttag

SEQ ID NO: 80836 - DNA, 906 bp, Artificial Sequence
  derived and/or modified sequence
atgttaggcttgtggggacaacgtctcccagccgcttgggtattgctactcttgccttttcttccgctgctccttctggccgctcccgctccacatagagcaagttacaagccagtgatcgtggtgcacggactgtttgatagttcctactcctttcgccacctgctggaatatattaatgagacccaccctggcacagttgtgacagtgctggatctctttgacgggcgtgaatcgttaaggcccttatgggagcaggtgcagggcttccgagaagccgtcgtgccgatcatggctaaggcccctcaaggggtacacctcatctgctatagtcaggggggactggtctgcagagctttgttatccgttatggacgaccacaatgtggactcttttatctccctttcgagtcctcagatgggccagtacggcgatacagactacctcaagtggctgtttcccacaagcatgagaagcaatctgtatcgcatctgctactccccatggggccaggaattcagcatctgtaactattggcacgacccccaccacgatgacctctacctgaacgccagtagctttctggcgctgataaatggcgagcgtgaccacccaaatgcgactgtctggagaaagaacttccttagagtgggacacctggtgctgatcggcggacctgatgacggggttattacgccctggcaatcctctttttttggtttctacgatgccaatgaaacggtcctggagatggaggagcagctgccagccaggcctactcaccaatccgaactcttgctgctgcgattggtgtgtctcaagccccctagacgcaaaaagcctgcatgtcgtgtgcagcgtcaatctgagtcctggggtcctggcctctcctgcgcattgtcctag

SEQ ID NO: 80837 - DNA, 909 bp, Artificial Sequence
  derived and/or modified sequence
atgttgggactgtgggggcagcggctcccagccgcttgggtgcttctcttactgccgttcctccctttactgctgcttgccgcaccagcccctcatcgggctagttacaagcctgtcatagtcgtacacggtctgtttgatagctcctactccttccgccacctcctggagtatatcaacgaaactcaccctggtactgtggtgaccgttcttgatctgttcgacggccgagagtcattgcgccctctgtgggaacaagtccaggggttcagggaggccgtggtgcctatcatggcaaaggccccacagggagttcacttgatttgttatagccaaggcggtcttgtatgccgagcactcctgtccgtgatggatgaccataatgttgattcattcatctctctaagtagtccacagatgggacagtatggtgacacagactatcttaagtggctcttccccacatccatgcgctcaaacctgtatcgaatttgttattctccatggggacaggagttcagcatttgcaactactggcacgaccctcaccatgacgacttgtatctgaacgccagcagtttcctcgccttaatcaatggtgaacgcgatcacccgaatgcaacagtgtggaggaagaattttctgcgggtggggcatcttgttctgattggcggacccgatgatggggttattaccccgtggcaaagctctttcttcggattttacgacgcaaatgagaccgtgttggagatggaagagcagttagtttatcttagagattccttcggtcttaaaacactgctggccaggggtgccattgtccgctgcccaatggcgggtatctctcatacagcctggcactcgaaccggaccctatacgagacatgcatcgagccttggctaagctag

SEQ ID NO: 80838 - DNA, 909 bp, Artificial Sequence
  derived and/or modified sequence
atgctgggcctgtgcggccagagactgcccgccgcctgggtgctgctgctgctgcccttcctgcccctgctgctgctggccgcccccgccccccacagagccagctacaagcccgtgatcgtggtgcacggcctgttcgacagcagctacagcttcagacacctgctggagtacatcaacgagacccaccccggcaccgtggtgaccgtgctggacctgttcgacggcagagagagcctgagacccctgtgggagcaggtgcagggcttcagagaggccgtggtgcccatcatggccaaggccccccagggcgtgcacctgatctgctacagccagggcggcctggtgtgcagagccctgctgagcgtgatggacgaccacaacgtggacagcttcatcagcctgagcagcccccagatgggccagtacggcgacaccgactacctgaagtggctgttccccaccagcatgagaagcaacctgtacagaatctgctacagcccctggggccaggagttcagcatctgcaactactggcacgacccccaccacgacgacctgtacctgaacgccagcagcttcctggccctgatcaacggcgagagagaccaccccaacgccaccgtgtggagaaagaacttcctgagagtgggccacctggtgctgatcggcggccccgacgacggcgtgatcaccccctggcagagcagcttcttcggcttctacgacgccaacgagaccgtgctggagatggaggagcagctggtgtacctgagagacagcttcggcctgaagaccctgctggccagaggcgccatcgtgagatgccccatggccggcatcagccacaccgcctggcacagcaacagaaccctgtacgagacctgcatcgagccctggctgagctag

SEQ ID NO: 80839 - DNA, 909 bp, Artificial Sequence
  derived and/or modified sequence
atgctgggcctgtggggccagagactgcccgccgcctgggtgctgctgctgctgcccttcctgcccctgctgctgctggccgcccccgccccccacagagagagctacaagcccgtgatcgtggtgcacggcctgttcgacagcagctacagcttcagacacctgctggagtacatcaacgagacccaccccggcaccgtggtgaccgtgctggacctgttcgacggcagagagagcctgagacccctgtgggagcaggtgcagggcttcagagaggccgtggtgcccatcatggccaaggccccccagggcgtgcacctgatctgctacagccagggcggcctggtgtgcagagccctgctgagcgtgatggacgaccacaacgtggacagcttcatcagcctgagcagcccccagatgggccagtacggcgacaccgactacctgaagtggctgttccccaccagcatgagaagcaacctgtacagaatctgctacagcccctggggccaggagttcagcatctgcaactactggcacgacccccaccacgacgacctgtacctgaacgccagcagcttcctggccctgatcaacggcgagagagaccaccccaacgccaccgtgtggagaaagaacttcctgagagtgggccacctggtgctgatcggcggccccgacgacggcgtgatcaccccctggcagagcagcttcttcggcttctacgacgccaacgagaccgtgctggagatggaggagcagctggtgtacctgagagacagcttcggcctgaagaccctgctggccagaggcgccatcgtgagatgccccatggccggcatcagccacaccgcctggcacagcaacagaaccctgtacgagacctgcatcgagccctggctgagctag

SEQ ID NO: 80840 - DNA, 909 bp, Artificial Sequence
  derived and/or modified sequence
atgctgggcctgtggggccagagactgcccgccgcctgggtgctgctgctgctgcccttcctgcccctgctgctgctggccgcccccgccccccacagagccagctacaagcccgtgatcgtggtgcacggcctgttcgacagcagctacagcttcagacacctgctggagtacatcaacgagacccaccccggcaccgtggtgaccgtgctggacctgttcgacggcagagagagcctgagacccctgtgggagcaggtgcagggcttcagagaggccgtggtgcccatcatggccaaggccccccagggcgtgcacctgatctgctacagccagggcggcctggtgtgcagagccctgctgagcgtgatggacgaccacaacgtggacagcttcatcagcctgagcagcccccagatgggccagtacggcgacaccgactacctgaagtggctgttccccaccagcatgagaagcaacctgtacagaatctgctacagcccctggggccaggagttcagcatctgcaactactggcacgacccccaccacgacgacctgtacctgaacgccagcagcttcctggccctgatcaacggcgagagagaccaccccaacgccaccgtgtggagaaagaacttcctgagagtgggccacctggtgctgatcggcggccccgacgacggcgtgatcaccccctggcagagcagcttcttcggcttctacgacgccaacgagaccgtgctggagatggaggagcagctggtgtacctgagagacagcttcggcctgaagaccctgctggccagaggcgccatcgtgagatgccccatggccggcatcagccacaccgcctggcacagcaacagaaccctgtacgagacctgcatcgagccctggctgagctag

SEQ ID NO: 80841 - DNA, 282 bp, Artificial Sequence
  derived and/or modified sequence
atgctgggcctgtggggccagagactgcccgccgcctgggtgctgctgctgctgcccttcctgcccctgctgctgctggccgcccccgccccccacagagccagctacaagcccgtgatcgtggtgcacggcctgttcgacagcagctacagcttcagacacctgctggagtacatcaacgagggcgccctgtgcgccggcctgtgcttcctgagctggatgatcaccacctggatcctgagcagccccagccccctgcacagatgggacagcatggagtag

SEQ ID NO: 80842 - DNA, 543 bp, Artificial Sequence
  derived and/or modified sequence
atgctgggcctgtgcggccagagactgcccgccgcctgggtgctgctgctgctgcccttcctgcccctgctgctgctggccgcccccgccccccacagagccagctacaagcccgtgatcgtggtgcacggcctgttcgacagcagctacagcttcagacacctgctggagtacatcaacgagacccaccccggcaccgtggtgaccgtgctggacctgttcgacggcagagagagcctgagacccctgtgggagcaggtgcagggcttcagagaggccgtggtgcccatcatggccaaggccccccagggcgtgcacctgatctgctacagccagggcggcctggtgtgcagagccctgctgagcgtgatggacgaccacaacgtggacagcttcatcagcctgagcagcccccagatgggccagtacggcgacaccgactacctgaagtggctgttccccaccagcatgagaagcaacctgtacagaatctgctacagcccctggggccaggagttcagcatctgcaactactggcactag

SEQ ID NO: 80843 - DNA, 603 bp, Artificial Sequence
  derived and/or modified sequence
atgctgggcctgtggggccagagactgcccgccgcctgggtgctgctgctgctgcccttcctgcccctgctgctgctggccgcccccgccccccacagagagagctacaagcccgtgatcgtggtgcacggcctgttcgacagcagctacagcttcagacacctgctggagtacatcaacgagacccaccccggcaccgtggtgaccgtgctggacctgttcgacggcagagagagcctgagacccctgtgggagcaggtgcagggcttcagagaggccgtggtgcccatcatggccaaggccccccagggcgtgcacctgatctgctacagccagggcggcctggtgtgcagagccctgctgagcgtgatggacgaccacaacgtggacagcttcatcagcctgagcagcccccagatgggccagtacggcgacaccgactacctgaagtggctgttccccaccagcatgagaagcaacctgtacagaatctgctacagcccctggggccaggagttcagcatctgcaactactggcacgacccccaccacgacgacctgtacctgaacgccagcagcttcctggccctgatcaacggctag

SEQ ID NO: 80844 - DNA, 477 bp, Artificial Sequence
  derived and/or modified sequence
atgctgggcctgtggggccagagactgcccgccgcctgggtgctgctgctgctgcccttcctgcccctgctgctgctggccgcccccgccccccacagagagagctacaagcccgtgatcgtggtgcacggcctgttcgacagcagctacagcttcagacacctgctggagtacatcaacgagatgggccagtacggcgacaccgactacctgaagtggctgttccccaccagcatgagaagcaacctgtacagaatctgctacagcccctggggccaggagttcagcatctgcaactactggcacgacccccaccacgacgacctgtacctgaacgccagcagcttcctggccctgatcaacggcgagagagaccaccccaacgccaccgtgtggagaaagaacttcctgagagtgggccacctggtgctgatcggcggccccgacgacggcgtgatcaccccctggcagagctag

SEQ ID NO: 80845 - DNA, 543 bp, Artificial Sequence
  derived and/or modified sequence
atgctgggcctgtggggccagagactgcccgccgcctgggtgctgctgctgctgcccttcctgcccctgctgctgctggccgcccccgccccccacagagccagctacaagcccgtgatcgtggtgcacggcctgttcgacagcagctacagcttcagacacctgctggagtacatcaacgagacccaccccggcaccgtggtgaccgtgctggacctgttcgacggcagagagagcctgagacccctgtgggagcaggtgcagggcttcagagaggccgtggtgcccatcatggccaaggccccccagggcgtgcacctgatctgctacagccagggcggcctggtgtgcagagccctgctgagcgtgatggacgaccacaacgtggacagcttcatcagcctgagcagcccccagatgggccagtacggcgacaccgactacctgaagtggctgttccccaccagcatgagaagcaacctgtacagaatctgctacagcccctggggccaggagttcagcatctgcaactactggcactag

SEQ ID NO: 80846 - DNA, 477 bp, Artificial Sequence
  derived and/or modified sequence
atgctgggcctgtggggccagagactgcccgccgcctgggtgctgctgctgctgcccttcctgcccctgctgctgctggccgcccccgccccccacagagccagctacaagcccgtgatcgtggtgcacggcctgttcgacagcagctacagcttcagacacctgctggagtacatcaacgagatgggccagtacggcgacaccgactacctgaagtggctgttccccaccagcatgagaagcaacctgtacagaatctgctacagcccctggggccaggagttcagcatctgcaactactggcacgacccccaccacgacgacctgtacctgaacgccagcagcttcctggccctgatcaacggcgagagagaccaccccaacgccaccgtgtggagaaagaacttcctgagagtgggccacctggtgctgatcggcggccccgacgacggcgtgatcaccccctggcagagctag

SEQ ID NO: 80847 - DNA, 477 bp, Artificial Sequence
  derived and/or modified sequence
atgctgggcctgtgcggccagagactgcccgccgcctgggtgctgctgctgctgcccttcctgcccctgctgctgctggccgcccccgccccccacagagccagctacaagcccgtgatcgtggtgcacggcctgttcgacagcagctacagcttcagacacctgctggagtacatcaacgagatgggccagtacggcgacaccgactacctgaagtggctgttccccaccagcatgagaagcaacctgtacagaatctgctacagcccctggggccaggagttcagcatctgcaactactggcacgacccccaccacgacgacctgtacctgaacgccagcagcttcctggccctgatcaacggcgagagagaccaccccaacgccaccgtgtggagaaagaacttcctgagagtgggccacctggtgctgatcggcggccccgacgacggcgtgatcaccccctggcagagctag

SEQ ID NO: 80848 - DNA, 711 bp, Artificial Sequence
  derived and/or modified sequence
atgctgggcctgtggggccagagactgcccgccgcctgggtgctgctgctgctgcccttcctgcccctgctgctgctggccgcccccgccccccacagagagagctacaagcccgtgatcgtggtgcacggcctgttcgacagcagctacagcttcagacacctgctggagtacatcaacgagacccaccccggcaccgtggtgaccgtgctggacctgttcgacggcagagagagcctgagacccctgtgggagcaggtgcagggcttcagagaggccgtggtgcccatcatggccaaggccccccagggcgtgcacctgatctgctacagccagggcggcctggtgtgcagagccctgctgagcgtgatggacgaccacaacgtggacagcttcatcagcctgagcagcccccagatgggccagtacggcgacaccgactacctgaagtggctgttccccaccagcatgagaagcaacctgtacagaatctgctacagcccctggggccaggagttcagcatctgcaactactggcacgacccccaccacgacgacctgtacctgaacgccagcagcttcctggccctgatcaacggcgagagagaccaccccaacgccaccgtgtggagaaagaacttcctgagagtgggccacctggtgctgatcggcggccccgacgacggcgtgatcaccccctggcagagctag

SEQ ID NO: 80849 - DNA, 603 bp, Artificial Sequence
  derived and/or modified sequence
atgctgggcctgtggggccagagactgcccgccgcctgggtgctgctgctgctgcccttcctgcccctgctgctgctggccgcccccgccccccacagagccagctacaagcccgtgatcgtggtgcacggcctgttcgacagcagctacagcttcagacacctgctggagtacatcaacgagacccaccccggcaccgtggtgaccgtgctggacctgttcgacggcagagagagcctgagacccctgtgggagcaggtgcagggcttcagagaggccgtggtgcccatcatggccaaggccccccagggcgtgcacctgatctgctacagccagggcggcctggtgtgcagagccctgctgagcgtgatggacgaccacaacgtggacagcttcatcagcctgagcagcccccagatgggccagtacggcgacaccgactacctgaagtggctgttccccaccagcatgagaagcaacctgtacagaatctgctacagcccctggggccaggagttcagcatctgcaactactggcacgacccccaccacgacgacctgtacctgaacgccagcagcttcctggccctgatcaacggctag

SEQ ID NO: 80850 - DNA, 603 bp, Artificial Sequence
  derived and/or modified sequence
atgctgggcctgtgcggccagagactgcccgccgcctgggtgctgctgctgctgcccttcctgcccctgctgctgctggccgcccccgccccccacagagccagctacaagcccgtgatcgtggtgcacggcctgttcgacagcagctacagcttcagacacctgctggagtacatcaacgagacccaccccggcaccgtggtgaccgtgctggacctgttcgacggcagagagagcctgagacccctgtgggagcaggtgcagggcttcagagaggccgtggtgcccatcatggccaaggccccccagggcgtgcacctgatctgctacagccagggcggcctggtgtgcagagccctgctgagcgtgatggacgaccacaacgtggacagcttcatcagcctgagcagcccccagatgggccagtacggcgacaccgactacctgaagtggctgttccccaccagcatgagaagcaacctgtacagaatctgctacagcccctggggccaggagttcagcatctgcaactactggcacgacccccaccacgacgacctgtacctgaacgccagcagcttcctggccctgatcaacggctag

SEQ ID NO: 80851 - DNA, 441 bp, Artificial Sequence
  derived and/or modified sequence
atggacgaccacaacgtggacagcttcatcagcctgagcagcccccagatgggccagtacggcgacaccgactacctgaagtggctgttccccaccagcatgagaagcaacctgtacagaatctgctacagcccctggggccaggagttcagcatctgcaactactggcacgacccccaccacgacgacctgtacctgaacgccagcagcttcctggccctgatcaacggcgagagagaccaccccaacgccaccgtgtggagaaagaacttcctgagagtgggccacctggtgctgatcggcggccccgacgacggcgtgatcaccccctggcagagcagcttcttcggcttctacgacgccaacgagaccgtgctggagatggaggagcagctgcccgtgggcagcagcgtgaaggccaaccacggcgtgcagggctag

SEQ ID NO: 80852 - DNA, 282 bp, Artificial Sequence
  derived and/or modified sequence
atgctgggcctgtggggccagagactgcccgccgcctgggtgctgctgctgctgcccttcctgcccctgctgctgctggccgcccccgccccccacagagagagctacaagcccgtgatcgtggtgcacggcctgttcgacagcagctacagcttcagacacctgctggagtacatcaacgagggcgccctgtgcgccggcctgtgcttcctgagctggatgatcaccacctggatcctgagcagccccagccccctgcacagatgggacagcatggagtag

SEQ ID NO: 80853 - DNA, 906 bp, Artificial Sequence
  derived and/or modified sequence
atgctgggcctgtgcggccagagactgcccgccgcctgggtgctgctgctgctgcccttcctgcccctgctgctgctggccgcccccgccccccacagagccagctacaagcccgtgatcgtggtgcacggcctgttcgacagcagctacagcttcagacacctgctggagtacatcaacgagacccaccccggcaccgtggtgaccgtgctggacctgttcgacggcagagagagcctgagacccctgtgggagcaggtgcagggcttcagagaggccgtggtgcccatcatggccaaggccccccagggcgtgcacctgatctgctacagccagggcggcctggtgtgcagagccctgctgagcgtgatggacgaccacaacgtggacagcttcatcagcctgagcagcccccagatgggccagtacggcgacaccgactacctgaagtggctgttccccaccagcatgagaagcaacctgtacagaatctgctacagcccctggggccaggagttcagcatctgcaactactggcacgacccccaccacgacgacctgtacctgaacgccagcagcttcctggccctgatcaacggcgagagagaccaccccaacgccaccgtgtggagaaagaacttcctgagagtgggccacctggtgctgatcggcggccccgacgacggcgtgatcaccccctggcagagcagcttcttcggcttctacgacgccaacgagaccgtgctggagatggaggagcagctgcccgccagacccacccaccagagcgagctgctgctgctgagactggtgtgcctgaagccccccagaagaaagaagcccgcctgcagagtgcagagacagagcgagagctggggccccggcctgagctgcgccctgagctag

SEQ ID NO: 80854 - DNA, 282 bp, Artificial Sequence
  derived and/or modified sequence
atgctgggcctgtgcggccagagactgcccgccgcctgggtgctgctgctgctgcccttcctgcccctgctgctgctggccgcccccgccccccacagagccagctacaagcccgtgatcgtggtgcacggcctgttcgacagcagctacagcttcagacacctgctggagtacatcaacgagggcgccctgtgcgccggcctgtgcttcctgagctggatgatcaccacctggatcctgagcagccccagccccctgcacagatgggacagcatggagtag

SEQ ID NO: 80855 - DNA, 543 bp, Artificial Sequence
  derived and/or modified sequence
atgctgggcctgtggggccagagactgcccgccgcctgggtgctgctgctgctgcccttcctgcccctgctgctgctggccgcccccgccccccacagagagagctacaagcccgtgatcgtggtgcacggcctgttcgacagcagctacagcttcagacacctgctggagtacatcaacgagacccaccccggcaccgtggtgaccgtgctggacctgttcgacggcagagagagcctgagacccctgtgggagcaggtgcagggcttcagagaggccgtggtgcccatcatggccaaggccccccagggcgtgcacctgatctgctacagccagggcggcctggtgtgcagagccctgctgagcgtgatggacgaccacaacgtggacagcttcatcagcctgagcagcccccagatgggccagtacggcgacaccgactacctgaagtggctgttccccaccagcatgagaagcaacctgtacagaatctgctacagcccctggggccaggagttcagcatctgcaactactggcactag

SEQ ID NO: 80856 - DNA, 165 bp, Artificial Sequence
  derived and/or modified sequence
tgacacgacgacctgtacctgaacgccagcagcttcctggccctgatcaacggcgagagagaccaccccaacgccaccgtgtggagaaagaacttcctgagagtgggccacctggtgctgatcggcggccccgacgacggcgtgatcaccccctggcagagctag

SEQ ID NO: 80857 - DNA, 906 bp, Artificial Sequence
  derived and/or modified sequence
atgctgggcctgtggggccagagactgcccgccgcctgggtgctgctgctgctgcccttcctgcccctgctgctgctggccgcccccgccccccacagagccagctacaagcccgtgatcgtggtgcacggcctgttcgacagcagctacagcttcagacacctgctggagtacatcaacgagacccaccccggcaccgtggtgaccgtgctggacctgttcgacggcagagagagcctgagacccctgtgggagcaggtgcagggcttcagagaggccgtggtgcccatcatggccaaggccccccagggcgtgcacctgatctgctacagccagggcggcctggtgtgcagagccctgctgagcgtgatggacgaccacaacgtggacagcttcatcagcctgagcagcccccagatgggccagtacggcgacaccgactacctgaagtggctgttccccaccagcatgagaagcaacctgtacagaatctgctacagcccctggggccaggagttcagcatctgcaactactggcacgacccccaccacgacgacctgtacctgaacgccagcagcttcctggccctgatcaacggcgagagagaccaccccaacgccaccgtgtggagaaagaacttcctgagagtgggccacctggtgctgatcggcggccccgacgacggcgtgatcaccccctggcagagcagcttcttcggcttctacgacgccaacgagaccgtgctggagatggaggagcagctgcccgccagacccacccaccagagcgagctgctgctgctgagactggtgtgcctgaagccccccagaagaaagaagcccgcctgcagagtgcagagacagagcgagagctggggccccggcctgagctgcgccctgagctag

SEQ ID NO: 80858 - DNA, 906 bp, Artificial Sequence
  derived and/or modified sequence
atgctgggcctgtggggccagagactgcccgccgcctgggtgctgctgctgctgcccttcctgcccctgctgctgctggccgcccccgccccccacagagagagctacaagcccgtgatcgtggtgcacggcctgttcgacagcagctacagcttcagacacctgctggagtacatcaacgagacccaccccggcaccgtggtgaccgtgctggacctgttcgacggcagagagagcctgagacccctgtgggagcaggtgcagggcttcagagaggccgtggtgcccatcatggccaaggccccccagggcgtgcacctgatctgctacagccagggcggcctggtgtgcagagccctgctgagcgtgatggacgaccacaacgtggacagcttcatcagcctgagcagcccccagatgggccagtacggcgacaccgactacctgaagtggctgttccccaccagcatgagaagcaacctgtacagaatctgctacagcccctggggccaggagttcagcatctgcaactactggcacgacccccaccacgacgacctgtacctgaacgccagcagcttcctggccctgatcaacggcgagagagaccaccccaacgccaccgtgtggagaaagaacttcctgagagtgggccacctggtgctgatcggcggccccgacgacggcgtgatcaccccctggcagagcagcttcttcggcttctacgacgccaacgagaccgtgctggagatggaggagcagctgcccgccagacccacccaccagagcgagctgctgctgctgagactggtgtgcctgaagccccccagaagaaagaagcccgcctgcagagtgcagagacagagcgagagctggggccccggcctgagctgcgccctgagctag

SEQ ID NO: 80859 - protein, 85 aa, Artificial Sequence
  derived and/or modified sequence
MAKQPSDVSSECDREGRQLQPAERPPQLRPGAPTSLQTEPQASMRQAEPADMRPEIWIAQELRRIGDEFNAYYARRLAKLLASST

SEQ ID NO: 80860 - DNA, 258 bp, Artificial Sequence
  derived and/or modified sequence
atggccaaacagcccagcgacgtgtcatctgagtgtgatcgtgaggggagacaactgcaaccagccgagcggcctccccagctgcgcccaggcgcaccaacaagcctgcagaccgagccacaggcgagcatgcggcaggccgaacctgctgacatgagaccagagatttggatagcccaagagctgaggcgtatcggagacgagtttaacgcatactatgccaggcggctggccaaactcctggcctcatcaacttag

SEQ ID NO: 80861 - DNA, 258 bp, Artificial Sequence
  derived and/or modified sequence
atggccaagcagcccagtgatgtgtccagtgaatgtgaccgggagggccggcagctgcagcctgctgagaggcctccccagctgcggcctggggcccccaccagcctgcagacagagccccaggcctccatgaggcaggccgagcctgctgacatgaggcctgagatctggatcgcccaggagctgcggagaattggagatgagttcaatgcctactatgcccggcggctggccaagctgctggccagcagcacctag

SEQ ID NO: 80862 - DNA, 258 bp, Artificial Sequence
  derived and/or modified sequence
atggccaagcagcccagcgacgtgagcagcgagtgcgaccgggagggaagacaactgcagccagctgaaagaccccctcagttaagaccgggcgcccccacgagtctccagacagaaccacaggccagcatgcgtcaggccgagcccgcagacatgcgccctgaaatctggattgcgcaggaacttcgaagaatcggtgacgagttcaatgcctattatgctcggcggctggccaagctgctcgcatccagtacttag

SEQ ID NO: 80863 - DNA, 258 bp, Artificial Sequence
  derived and/or modified sequence
atggcaaagcaaccctccgacgtgtcgagcgagtgtgaccgcgaaggcaggcaattgcagcctgcagagcgccctccacagctcaggccaggggcaccaacgtcactgcagaccgagccccaagcctccatgagacaagctgagcctgctgatatgcggccagaaatctggatcgctcaagagttgagaaggatcggggacgagtttaacgcctactacgctcgaagacttgctaagctgttggccagctcaacatag

SEQ ID NO: 80864 - DNA, 258 bp, Artificial Sequence
  derived and/or modified sequence
atggccaagcagcccagcgacgtgagcagcgagtgcgacagagagggcagacagctgcagcccgccgagagacccccccagctgagacccggcgcccccaccagcctgcagaccgagccccaggccagcatgagacaggccgagcccgccgacatgagacccgagatctggatcgcccaggagctgagaagaatcggcgacgagttcaacgcctactacgccagaagactggccaagctgctggccagcagcacctag

SEQ ID NO: 80865 - protein, 172 aa, Artificial Sequence
  derived and/or modified sequence
MAKQPSDVSSECDREGRQLQPAERPPQLRPGAPTSLQTEPQGNPEGNHGGEGDSCPHGSPQGPLAPPASPGPFATRSPLFIFMRRSSLLSRSSSGYFSFDTDRSPAPMSCDKSTQTPSPPCQAFNHYLSAMASMRQAEPADMRPEIWIAQELRRIGDEFNAYYARRMPLPPD

SEQ ID NO: 80866 - DNA, 519 bp, Artificial Sequence
  derived and/or modified sequence
atggctaaacagccatccgatgtaagctctgagtgtgatcgggagggacgccagctgcagcccgccgaaagaccaccacagctgagacctggagcgcctacctcactccagacagagcctcagggcaaccctgagggtaatcatggcggggaaggtgatagttgcccacacggaagcccccagggaccactggctcctccagccagccctgggccattcgccacgcgttctcccttattcatctttatgaggagatcttctctgttgagcaggagcagtagtggatactttagctttgacacagaccgctccccagctccaatgagttgtgacaagtctacgcaaacccccagtcccccatgtcaggccttcaaccactatctgtcagccatggcctctatgagacaggccgagcctgcggatatgcgaccagaaatttggattgcccaggagctcaggagaatcggcgatgagtttaacgcctactatgctcgccgcatgcctctccccccagattag

SEQ ID NO: 80867 - DNA, 519 bp, Artificial Sequence
  derived and/or modified sequence
atggccaagcagcccagtgatgtgtccagtgaatgtgaccgggagggccggcagctgcagcctgctgagaggcctccccagctgcggcctggggcccccaccagcctgcagacagagccccagggcaaccctgagggcaaccacggcggggagggggacagctgcccccacggcagcccccagggccccctggcccccccagccagccctggcccctttgccaccaggagccccctcttcatcttcatgaggaggagcagcctgctgagccgcagcagcagcggctacttctcctttgacacagacaggagccctgcccccatgagctgtgacaagagcacccagacccccagccccccctgccaggccttcaaccactacctgagcgccatggcctccatgaggcaggccgagcctgctgacatgaggcctgagatctggatcgcccaggagctgcggagaattggagatgagttcaatgcctactatgcccggaggatgcccctgcccccagactag

SEQ ID NO: 80868 - DNA, 519 bp, Artificial Sequence
  derived and/or modified sequence
atggccaagcagcccagcgacgtgagcagcgagtgcgaccgggaggggcgccagctgcagccggccgaacgcccccctcagctgcgcccaggtgcgcccacctctcttcaaacggagccccaagggaatcccgagggtaatcatggcggagagggggactcttgcccacacggcagcccgcagggccctctggctccccctgccagtccaggcccttttgccactcgctcccccctgtttatcttcatgcgacgttctagtctgctgtcgaggagcagttcaggttacttcagtttcgatactgaccggtcccccgcccccatgtcatgtgataaatccacacagacgccttcccccccttgccaggctttcaaccattatctcagcgcgatggcgtccatgcgtcaggccgaacctgcagatatgaggccagagatttggatagcacaggagctaaggcgtatcggggatgagtttaacgcctactacgcaaggcgcatgcccctcccgcccgactag

SEQ ID NO: 80869 - DNA, 519 bp, Artificial Sequence
  derived and/or modified sequence
atggctaagcagcctagcgacgtgagtagcgagtgtgacagggagggcagacagcttcagcctgctgagaggcctcctcaattgaggccaggggcaccaaccagccttcagacagagccacaaggcaatccagagggcaaccatggcggtgaaggggacagctgcccacatggatccccccagggacctcttgcaccccctgcaagccctgggccattcgcaacccgcagcccgctcttcatattcatgcgccgtagctcactgctgtcgcggagctcatcaggctatttctccttcgatactgataggtcacctgcccctatgagctgtgataaatcgacgcagacccccagccccccttgccaggccttcaatcactacctgagcgctatggcctcaatgaggcaagctgaacccgcagacatgcgaccggaaatctggattgctcaggagctgcggagaattggcgatgaatttaatgcgtactacgcacgacgcatgccactgccaccagactag

SEQ ID NO: 80870 - DNA, 807 bp, Artificial Sequence
  derived and/or modified sequence
acttcgctccgcgcagccgcctggtctgcagtttgttggagctctgcgtccagcgccgctgccgctgccgccgccgccgccgccgccgccgccgccgccgccgccgccactaccaccacttgattcttgcagccaccctgcgaaccctgccacactgcgatcgcatcatcgcggtattcggttcgctgcgttcccgccgccaccgcctcggcgccctttcttggcccttgttcccccaaatgtctgactctgactctcggactgagaaacgcaagaaaaaaagaccaaatggcaaagcaaccttctgatgtaagttctgagtgtgaccgagaaggtagacaattgcagcctgcggagaggcctccccagctcagacctggggcccctacctccctacagacagagccacaaggtaatcctgaaggcaatcacggaggtgaaggggacagctgcccccacggcagccctcagggcccgctggccccacctgccagccctggcccttttgctaccagatccccgcttttcatctttatgagaagatcctccctgctgtctcgatcctccagtgggtatttctcttttgacacagacaggagcccagcacccatgagttgtgacaaatcaacacaaaccccaagtcctccttgccaggccttcaaccactatctcagtgcaatggcttccatgaggcaggctgaacctgcagatatgcgcccagagatatggatcgcccaagagttgcggcgtattggagacgagtttaacgcttactatgcaaggaggatgcctcttccacctgattaa

SEQ ID NO: 80871 - DNA, 883 bp, Artificial Sequence
  derived and/or modified sequence
atggcaaagcaaccttctgatgtaagttctgagtgtgaccgagaaggtagacaattgcagcctgcggagaggcctccccagctcagacctggggcccctacctccctacagacagagccacaaggtaatcctgaaggcaatcacggaggtgaaggggacagctgcccccacggcagccctcagggcccgctggccccacctgccagccctggcccttttgctaccagatccccgcttttcatctttatgagaagatcctccctgctgtctcgatcctccagtgggtatttctcttttgacacagacaggagcccagcacccatgagttgtgacaaatcaacacaaaccccaagtcctccttgccaggccttcaaccactatctcagtgcaatggctaactgggactagaaacagctccatcacccagcttccatgaggcaggctgaacctgcagatatgcgcccagagatatggatcgcccaagagttgcggcgtattggagacgagtttaacgcttactatgcaaggaggatgcctcttccacctgattaagaaccactgtagcagacgcagacttattggacactaggcgggaggccagctctgcagacagcaggtctcaggaagacggtcaaggcatggctgctgatgatccgcttatgggtatttttgaataattaccaagcagccgaagaccacccacgaatggttatcttacgactgttacgttacattgtccgcctggtgtggagaatgcattgacaggttctttgcggagccgagataccatgcagacattttgcttgttcaaaccaacaagacccagcaccgcggtctcctggtgccattattatgcagccagcggttctcttgtggagggggc

SEQ ID NO: 80872 - DNA, 519 bp, Artificial Sequence
  derived and/or modified sequence
atggccaagcagcccagcgacgtgagcagcgagtgcgacagagagggcagacagctgcagcccgccgagagacccccccagctgagacccggcgcccccaccagcctgcagaccgagccccagggcaaccccgagggcaaccacggcggcgagggcgacagctgcccccacggcagcccccagggccccctggccccccccgccagccccggccccttcgccaccagaagccccctgttcatcttcatgagaagaagcagcctgctgagcagaagcagcagcggctacttcagcttcgacaccgacagaagccccgcccccatgagctgcgacaagagcacccagacccccagccccccctgccaggccttcaaccactacctgagcgccatggccagcatgagacaggccgagcccgccgacatgagacccgagatctggatcgcccaggagctgagaagaatcggcgacgagttcaacgcctactacgccagaagaatgcccctgccccccgactag

SEQ ID NO: 80873 - protein, 140 aa, Artificial Sequence
  derived and/or modified sequence
MAKQPSDVSSECDREGRQLQPAERPPQLRPGAPTSLQTEPQGNPEGNHGGEGDSCPHGSPQGPLAPPASPGPFATRSPLFIFMRRSSLLSRSSSGYFSFDTDRSPAPMSCDKSTQTPSPPCQAFNHYLSAMVREIEEVVV

SEQ ID NO: 80874 - DNA, 423 bp, Artificial Sequence
  derived and/or modified sequence
atggccaaacagccttctgatgtgagctcagagtgtgaccgcgaagggcgacaactccagccggccgagagaccaccacaactccgtcccggggcacctacctcacttcagaccgaacctcaggggaacccagagggtaatcatgggggcgaaggcgactcctgtcctcacggtagccctcaaggccctttagcaccacctgcctcgccaggcccttttgcaacgagatcacccttgttcatctttatgcgtaggtctagtcttctatctcggtcctcttccggatatttctcattcgacactgaccggtcacccgcaccgatgtcctgcgacaaaagcactcagaccccgtcaccgccttgccaggcttttaatcattacctatccgccatggtaagagagatagaggaggtagtggtgtag

SEQ ID NO: 80875 - DNA, 423 bp, Artificial Sequence
  derived and/or modified sequence
atggccaagcagcccagtgatgtgtccagtgaatgtgaccgggagggccggcagctgcagcctgctgagaggcctccccagctgcggcctggggcccccaccagcctgcagacagagccccagggcaaccctgagggcaaccacggcggggagggggacagctgcccccacggcagcccccagggccccctggcccccccagccagccctggcccctttgccaccaggagccccctcttcatcttcatgaggaggagcagcctgctgagccgcagcagcagcggctacttctcctttgacacagacaggagccctgcccccatgagctgtgacaagagcacccagacccccagccccccctgccaggccttcaaccactacctgagcgccatggtgcgggagattgaggaggtggtggtgtag

SEQ ID NO: 80876 - DNA, 423 bp, Artificial Sequence
  derived and/or modified sequence
atggccaagcagcccagcgacgtgagcagcgagtgcgaccgggaggggcgccagctgcagccagccgagcgcccccctcaacttcgacccggtgcacccacgagcctgcaaactgagccacaaggcaatcctgaagggaaccatggaggcgagggtgactcctgcccccatgggagcccgcaggggcccctggcacccccggccagccccgggccctttgctacaaggtcacctttgttcattttcatgcgcaggagctcgctattaagtaggagcagtagtggttatttctcctttgacaccgatcgctcacctgctcccatgagttgtgataagtctactcaaactcccagcccaccttgtcaggcctttaaccactacttatccgcaatggtgcgcgagattgaggaagtagttgtctag

SEQ ID NO: 80877 - DNA, 423 bp, Artificial Sequence
  derived and/or modified sequence
atggccaaacaaccttcagacgtgtcgagtgagtgcgatcgcgaggggcgtcagctgcaacctgccgagcgtccaccacagctccgacccggagcgccaactagcctgcagacagaaccacaaggtaatccggagggcaatcatggtggcgagggagactcttgtccccatggaagtcctcaaggtcctctggcccctccagcatcccctggtccctttgccactagatctcctctgtttattttcatgagacggtcctccttactgtctcgctccagtagcggctatttctccttcgatacagacaggtctccagcacccatgtcatgtgacaagagtacacagactccttcccccccttgccaagcctttaaccactacctctcagcaatggtccgcgaaatagaggaggtcgttgtgtag

SEQ ID NO: 80878 - DNA, 618 bp, Artificial Sequence
  derived and/or modified sequence
atggcaaagcaaccttctgatgtaagttctgagtgtgaccgagaaggtagacaattgcagcctgcggagaggcctccccagctcagacctggggcccctacctccctacagacagagccacaaggtaatcctgaaggcaatcacggaggtgaaggggacagctgcccccacggcagccctcagggcccgctggccccacctgccagccctggcccttttgctaccagatccccgcttttcatctttatgagaagatcctccctgctgtctcgatcctccagtgggtatttctcttttgacacagacaggagcccagcacccatgagttgtgacaaatcaacacaaaccccaagtcctccttgccaggccttcaaccactatctcagtgcaatggttagagaaatagaggaagttgtcgtgtagttgtcatgtattcagtccacttaagggcagtggggaagcgtttgagacggagctgtggaggctgaatccttgaaggaggaggtgagagaggcacaggtatttttgaataattaccaagcagccgaagaccacccacgaatggttatcttacgactgttacgttacattgtccgcctggtgtggagaatgcattga

SEQ ID NO: 80879 - DNA, 423 bp, Artificial Sequence
  derived and/or modified sequence
atggccaagcagcccagcgacgtgagcagcgagtgcgacagagagggcagacagctgcagcccgccgagagacccccccagctgagacccggcgcccccaccagcctgcagaccgagccccagggcaaccccgagggcaaccacggcggcgagggcgacagctgcccccacggcagcccccagggccccctggccccccccgccagccccggccccttcgccaccagaagccccctgttcatcttcatgagaagaagcagcctgctgagcagaagcagcagcggctacttcagcttcgacaccgacagaagccccgcccccatgagctgcgacaagagcacccagacccccagccccccctgccaggccttcaaccactacctgagcgccatggtgagagagatcgaggaggtggtggtgtag

SEQ ID NO: 80880 - protein, 82 aa, Artificial Sequence
  derived and/or modified sequence
MAKQPSDVSSECDREGRQLQPAERPPQLRPGAPTSLQTEPQASMRQAEPADMRPEIWIAQELRRIGDEFNAYYARRMPLPPD

SEQ ID NO: 80881 - DNA, 249 bp, Artificial Sequence
  derived and/or modified sequence
atggcaaagcagcccagcgatgtgtcatccgagtgtgatagagaaggtcggcagctgcagccagccgaaagacccccacagctgcggcccggggcgcctacatcactccagactgaaccccaggcgagtatgcgtcaggctgaaccagctgatatgcggccagagatttggatagctcaggagcttcgacgtatcggagacgagttcaacgcctattacgccaggcgcatgcctttaccccccgactag

SEQ ID NO: 80882 - DNA, 249 bp, Artificial Sequence
  derived and/or modified sequence
atggccaagcagcccagtgatgtgtccagtgaatgtgaccgggagggccggcagctgcagcctgctgagaggcctccccagctgcggcctggggcccccaccagcctgcagacagagccccaggcctccatgaggcaggccgagcctgctgacatgaggcctgagatctggatcgcccaggagctgcggagaattggagatgagttcaatgcctactatgcccggaggatgcccctgcccccagactag

SEQ ID NO: 80883 - DNA, 249 bp, Artificial Sequence
  derived and/or modified sequence
atggccaagcagcccagcgacgtgagcagcgagtgcgaccgggaggggcggcagctgcagccagcagagaggcctccacagttgaggcctggcgccccaacctccctgcaaactgagcctcaggcctcaatgagacaggccgaacctgctgacatgaggcccgaaatctggattgctcaggaacttcggagaatcggtgacgaatttaatgcatactacgccagaaggatgcctctacccccagactag

SEQ ID NO: 80884 - DNA, 249 bp, Artificial Sequence
  derived and/or modified sequence
atggccaagcagccctcagacgtcagctccgagtgcgaccgcgaaggaagacaactgcagcccgcagagagacctccccagctaagaccaggggctcctacctccctacagaccgagccgcaggcttccatgaggcaagcagagcctgctgacatgaggcctgaaatctggattgcacaggagcttaggagaattggtgatgaatttaacgcctattacgctagaaggatgccactaccgcctgactag

SEQ ID NO: 80885 - DNA, 459 bp, Artificial Sequence
  derived and/or modified sequence
atggcaaagcaaccttctgatgtaagttctgagtgtgaccgagaaggtagacaattgcagcctgcggagaggcctccccagctcagacctggggcccctacctccctacagacagagccacaagcttccatgaggcaggctgaacctgcagatatgcgcccagagatatggatcgcccaagagttgcggcgtattggagacgagtttaacgcttactatgcaaggaggatgcctcttccacctgattaagaaccactgtagcagacgcagacttattggacactaggcgggaggccagctctgcagacagcaggtctcaggaagacggtcaaggcatggctgctgatgatccgcttatgggtatttttgaataattaccaagcagccgaagaccacccacgaatggttatcttacgactgttacgttacattgtccgcctggtgtggagaatgcattga

SEQ ID NO: 80886 - DNA, 249 bp, Artificial Sequence
  derived and/or modified sequence
atggccaagcagcccagcgacgtgagcagcgagtgcgacagagagggcagacagctgcagcccgccgagagacccccccagctgagacccggcgcccccaccagcctgcagaccgagccccaggccagcatgagacaggccgagcccgccgacatgagacccgagatctggatcgcccaggagctgagaagaatcggcgacgagttcaacgcctactacgccagaagaatgcccctgccccccgactag

SEQ ID NO: 80887 - DNA, 207 bp, Artificial Sequence
  derived and/or modified sequence
tgactgtgcatgggcatcatcctgatcctgagcgcccggagcacccaagagattgagatcaactacacaagaatttgcgccaattgcgctaagctgcgggaaaacgcgtcaaacttcgataaggaatgtacttgctccatacctttctacttaagtggtaaaatgatggttggagagatccaggaaacccgcctaaccctgcactag

SEQ ID NO: 80888 - protein, 80 aa, Artificial Sequence
  derived and/or modified sequence
MAKQPSDVSSECDREGRQLQPAERPPQLRPGAPTSLQTEPQDRSPAPMSCDKSTQTPSPPCQAFNHYLSAMVREIEEVVV

SEQ ID NO: 80889 - DNA, 243 bp, Artificial Sequence
  derived and/or modified sequence
atggccaagcagccctccgatgtttcatcggaatgtgatcgcgaaggtcgacagctccagccagccgagcggcctccacaacttagacccggagcgccgacatccctgcagaccgaacctcaggatcggtccccagctccaatgtcttgcgacaaatcgacacagacaccctccccaccctgccaggctttcaatcactacctcagcgctatggttagagaaatcgaggaggttgtggtgtag

SEQ ID NO: 80890 - DNA, 243 bp, Artificial Sequence
  derived and/or modified sequence
atggccaagcagcccagtgatgtgtccagtgaatgtgaccgggagggccggcagctgcagcctgctgagaggcctccccagctgcggcctggggcccccaccagcctgcagacagagccccaggacaggagccctgcccccatgagctgtgacaagagcacccagacccccagccccccctgccaggccttcaaccactacctgagcgccatggtgcgggagattgaggaggtggtggtgtag

SEQ ID NO: 80891 - DNA, 243 bp, Artificial Sequence
  derived and/or modified sequence
atggccaagcagcccagcgacgtgagcagcgagtgcgaccgggagggccggcagcttcagcctgccgagaggccgccccagcttcggccaggggcccctacgagcctccaaaccgagccgcaggataggtcgccagcacccatgtcctgcgacaagtcaacccaaacaccctctcccccgtgtcaggcttttaatcattacctgagcgctatggtgagagaaattgaggaagtggtggtctag

SEQ ID NO: 80892 - DNA, 243 bp, Artificial Sequence
  derived and/or modified sequence
atggccaaacagccttctgacgtctcttctgaatgcgatcgtgaaggccgacagctccagcccgcagaaaggcctccccaactgagacccggagcacctacatcccttcagactgagccccaggatagatccccggcacctatgtcctgcgataagagcacccagacaccaagcccaccttgccaggcctttaatcactacctgtccgccatggtgagggaaatcgaagaggtagtggtgtag

SEQ ID NO: 80893 - DNA, 438 bp, Artificial Sequence
  derived and/or modified sequence
atggcaaagcaaccttctgatgtaagttctgagtgtgaccgagaaggtagacaattgcagcctgcggagaggcctccccagctcagacctggggcccctacctccctacagacagagccacaagacaggagcccagcacccatgagttgtgacaaatcaacacaaaccccaagtcctccttgccaggccttcaaccactatctcagtgcaatggttagagaaatagaggaagttgtcgtgtagttgtcatgtattcagtccacttaagggcagtggggaagcgtttgagacggagctgtggaggctgaatccttgaaggaggaggtgagagaggcacaggtatttttgaataattaccaagcagccgaagaccacccacgaatggttatcttacgactgttacgttacattgtccgcctggtgtggagaatgcattga

SEQ ID NO: 80894 - DNA, 243 bp, Artificial Sequence
  derived and/or modified sequence
atggccaagcagcccagcgacgtgagcagcgagtgcgacagagagggcagacagctgcagcccgccgagagacccccccagctgagacccggcgcccccaccagcctgcagaccgagccccaggacagaagccccgcccccatgagctgcgacaagagcacccagacccccagccccccctgccaggccttcaaccactacctgagcgccatggtgagagagatcgaggaggtggtggtgtag

SEQ ID NO: 80895 - DNA, 291 bp, Artificial Sequence
  derived and/or modified sequence
aaacagccttccgacgtctcaagtgagtgtgatagggaagggagacagctgcaacccgcggagcggcccccccagctcagaccaggagctcctaccagcttacagaccgagcctcaggacagatcaccggctcctatgtcttgtgataagtcaacacaaacgccctctcctccatgtcaagccttcaaccactacctcagtgctatggacgactccgcaggctcttcattgcggatagccctgcatcgcgaggttcaatggcccctcaagtggctggccaaaagttcttag

SEQ ID NO: 80896 - DNA, 291 bp, Artificial Sequence
  derived and/or modified sequence
aagcagcccagtgatgtgtccagtgaatgtgaccgggagggccggcagctgcagcctgctgagaggcctccccagctgcggcctggggcccccaccagcctgcagacagagccccaggacaggagccctgcccccatgagctgtgacaagagcacccagacccccagccccccctgccaggccttcaaccactacctgagcgccatggatgacagcgctggcagcagcctgagaattgccctgcaccgggaggtgcagtggcccctgaagtggctggccaagagcagctag

SEQ ID NO: 80897 - DNA, 291 bp, Artificial Sequence
  derived and/or modified sequence
aagcagcccagcgacgtgagcagcgagtgcgaccgggagggccggcagctgcagccagctgagcgaccacctcaactgagaccaggggccccaacgtctctgcagactgagccccaggacagaagccccgcacccatgtcatgtgataagtcaacccagactcccagtccaccttgccaagcctttaaccattatctctccgcaatggatgacagcgcaggcagctctctaaggattgcgcttcatcgcgaggtacagtggcctttgaagtggttggcaaagtcatcctag

SEQ ID NO: 80898 - DNA, 291 bp, Artificial Sequence
  derived and/or modified sequence
aaacagccgagcgatgtgtctagcgagtgtgatagagaaggcaggcaactgcagccagcagaacggccacctcagttgcgacccggagcaccgacatctctgcagacagaaccacaagacagatcccctgcccctatgtcgtgtgataagagcacgcagacccctagcccaccgtgccaggcgttcaaccactacttgtccgccatggatgactcggctggcagctcccttcgaatagccctgcaccgggaagtccagtggcctctgaaatggctcgctaagagtagctag

SEQ ID NO: 80899 - DNA, 656 bp, Artificial Sequence
  derived and/or modified sequence
aagcaaccttctgatgtaagttctgagtgtgaccgagaaggtagacaattgcagcctgcggagaggcctccccagctcagacctggggcccctacctccctacagacagagccacaagacaggagcccagcacccatgagttgtgacaaatcaacacaaaccccaagtcctccttgccaggccttcaaccactatctcagtgcaatggatgactccgctggatcctccctcagaattgcccttcatagggaagttcagtggccactcaagtggttagcaaaatcaagctaactgggactagaaacagctccatcacccagtaaagagaaagaaaacatggatctgcctaggaagtcacctctgcctgagtctgctacttgcaggattggagcttttgctgcagattacagctttgaagtcactttacctcaagagcagtttatattttattgtgctttaaaaaaaaaatttagtgccaggtttatggagtgaagtgctttcataaatgctgaaactacattttctgtgggtaaaaatgcagctcatcagaatttcccctttgaagaattttttatgttcacataaaattgccaagttaaaaatttgatctccctacagagtaagagctttcatttcaaataaaaccattttataga

SEQ ID NO: 80900 - DNA, 291 bp, Artificial Sequence
  derived and/or modified sequence
aagcagcccagcgacgtgagcagcgagtgcgacagagagggcagacagctgcagcccgccgagagacccccccagctgagacccggcgcccccaccagcctgcagaccgagccccaggacagaagccccgcccccatgagctgcgacaagagcacccagacccccagccccccctgccaggccttcaaccactacctgagcgccatggacgacagcgccggcagcagcctgagaatcgccctgcacagagaggtgcagtggcccctgaagtggctggccaagagcagctag

SEQ ID NO: 80901 - protein, 655 aa, Artificial Sequence
  derived and/or modified sequence
MAEDWLDCPALGPGWKRREVFRKSGATCGRSDTYYQSPTGDRIRSKVELTRYLGPACDLTLFDFKQGILCYPAPKAHPVAVASKKRKKPSRPAKTRKRQVGPQSGEVRKEAPRDETKADTDTAPASFPAPGCCENCGISFSGDGTQRQRLKTLCKDCRAQRIAFNREQRMFKRVGCGECAACQVTEDCGACSTCLLQLPHDVASGLFCKCERRRCLRIVERSRGCGVCRGCQTQEDCGHCPICLRPPRPGLRRQWKCVQRRCLRGKHARRKGGCDSKMAARRRPGAQPLPPPPPSQSPEPTEPHPRALAPSPPAEFIYYCVDEDELQPYTNRRQNRKCGACAACLRRMDCGRCDFCCDKPKFGGSNQKRQKCRWRQCLQFAMKRLLPSVWSESEDGAGSPPPYRRRKRPSSARRHHLGPTLKPTLATRTAQPDHTQAPTKQEAGGGFVLPPPGTDLVFLREGASSPVQVPGPVAASTEALLQEAQCSGLSWVVALPQVKQEKADTQDEWTPGTAVLTSPVLVPGCPSKAVDPGLPSVKQEPPDPEEDKEENKDDSASKLAPEEEAGGAGTPVITEIFSLGGTRFRDTAVWLPSLQGRHSGREDGCKVWETEDTVEPTSTSWNPRGWPGTHVSLSPPPASMMWVSCRRSWCPSSQS

SEQ ID NO: 80902 - DNA, 1968 bp, Artificial Sequence
  derived and/or modified sequence
atggctgaagattggctggactgccctgctctgggaccagggtggaaaagaagagaagtttttcggaagagcggcgccacatgcggtaggagcgatacctactatcaaagccctacaggcgatcggatccgtagtaaagtcgaactcacacggtatctgggacccgcatgcgacctgacactctttgattttaagcaggggattctgtgttaccctgcgcccaaggcccaccccgtggcagtggcctcaaagaagaggaaaaagcccagccgccccgcgaaaactcgcaaacgacaagttggtccgcagtccggagaggtgcgtaaggaggctccccgggacgagacaaaagccgacactgataccgccccggcaagctttcctgcacctggatgttgcgagaactgtggaattagtttttccggcgacggaacgcagaggcagcggctgaaaaccctgtgcaaggattgcagagcccagcgcattgcctttaacagggagcagaggatgtttaagcgggttggttgcggagagtgcgccgcatgtcaagtaactgaggactgtggagcttgctccacctgtctgctccagctcccccatgacgtggcctccgggcttttctgtaaatgcgaaagaagacgatgcctcagaatagtagagcggagccgcgggtgcggggtgtgccggggctgtcagacgcaagaggactgcgggcattgtccaatatgcctccgccctccgagacctggactgaggcggcaatggaagtgcgttcagaggcgttgtttgagggggaagcacgctagaaggaaaggtggttgcgacagcaagatggccgctagacgcagaccaggtgcccaacccctgcctcctccaccacccagtcagtccccagagcccaccgagccccaccctcgagcgctggctccatcccctcccgcagagtttatctactattgcgtggatgaggatgagttgcagccatataccaaccggaggcagaaccggaagtgcggtgcttgtgcggcctgtttgcgtcgtatggactgtgggcggtgtgacttttgctgtgacaagccaaagttcgggggcagcaatcagaaacgccagaagtgcaggtggagacagtgtctgcagttcgcaatgaaaagactgttacctagtgtgtggagtgaaagcgaagatggagctggatcccctccaccgtatcgtcgcaggaaaagaccatcatctgctaggaggcatcatctggggcccacactcaaaccaacactggccacaagaactgcacagccggatcatacacaagcccccacaaaacaggaggccggaggcggtttcgtgttgccccctcctgggactgatctggtgtttcttagggaaggcgcaagtagtcctgtgcaggtgcccggaccagtcgccgcgagtaccgaagctctgctccaggaggctcagtgtagcggcctgagctgggtggttgcactgccccaggtcaagcaggagaaggcagatacccaggatgagtggaccccaggcaccgccgtcctgacgagccctgtcctggtgccaggctgtccatccaaagccgtggatcccggcctgccaagcgtcaaacaagagcctccggatcctgaagaagataaagaggagaataaggacgatagcgcctccaagctcgcccctgaggaagaagccggtggggccggcacccctgtcattaccgagatcttcagcctcggcggcacacggttccgagacactgcagtttggttgccgagcctacaggggaggcacagcggtcgtgaagatggctgtaaggtctgggagaccgaggacaccgttgagccaaccagcacatcttggaatccccgggggtggcccgggacgcacgtctctctgagcccgccccccgctagtatgatgtgggttagttgcaggcgctcatggtgtcccagcagtcagtcttag

SEQ ID NO: 80903 - DNA, 1968 bp, Artificial Sequence
  derived and/or modified sequence
atggccgaggactggctggactgcccagccctgggccctggctggaagagaagagaggtgttcaggaagagcggggccacctgtggccgcagtgacacctactaccagagccccactggagaccgcatccgcagcaaggtggagctgacccgctacctgggccctgcctgtgacctgaccctgtttgacttcaagcagggcatcctgtgctacccagcccccaaggcccaccctgtggccgtggccagcaagaagaggaagaagcccagcaggcctgccaagaccaggaagaggcaggtgggcccccagagcggggaggtgaggaaggaggcccccagagatgagaccaaggctgacacagacacagccccagccagcttccctgcccctggctgctgtgagaactgtggcatctccttctctggagatggcacccagaggcagaggctgaagaccctgtgcaaggactgccgggcccagagaattgccttcaaccgggagcagaggatgttcaagagggtgggctgtggggagtgtgccgcctgccaggtgacagaggactgtggggcctgcagcacctgcctgctgcagctgccccatgatgtggccagcggcctcttctgcaagtgtgagcggcggcgctgcctgcgcatcgtggagaggagccggggctgcggcgtgtgccggggctgccagacccaggaggactgtggccactgccccatctgcctgcggccccccaggcctggcctgcggcggcagtggaagtgtgtgcagaggcgctgcctgcggggcaagcacgcccggaggaaaggaggctgtgacagcaagatggccgcccggcggcggcctggggcccagcccctgcccccacctccacccagccagagccctgagcccacagagccccacccccgggccctggcccccagccccccagctgagttcatctactactgtgtggatgaagatgagctgcagccctacaccaacagacggcagaacagaaaatgtggggcctgtgccgcctgcctgcggaggatggactgtggccgctgtgacttctgctgtgacaagcccaagtttggaggcagcaaccagaagaggcagaagtgccgctggaggcagtgcctgcagtttgccatgaagaggctgctgcccagcgtgtggagcgagagtgaagatggagctggcagccccccaccctacagaagaaggaagaggcccagcagcgcccggcggcaccacctgggccccaccctgaagcccaccctggccaccaggacagcccagcctgaccacacccaggcccccaccaagcaggaggccggcggcggctttgtgctgcccccacctggaacagacctggtgttcctgcgggagggcgccagcagccctgtgcaggtgcccggccctgtggccgccagcacagaggccctgctgcaggaggcccagtgcagcggcctgtcctgggtggtggccctgccccaggtgaagcaggagaaggctgacacccaggatgagtggaccccaggcacagctgtgctgaccagccctgtgctggtgcccggctgccccagcaaggctgtggaccccggcctgcccagcgtgaagcaggagcccccagaccctgaggaggacaaggaggagaacaaggatgattctgccagcaagctggcccctgaggaggaggccggcggggccggcacccctgtgatcacagagatcttcagcctgggcggcacccgcttccgggacacagctgtgtggctgcccagcctgcagggccgccacagcggccgggaggatggctgcaaggtgtgggagacagaagatactgtggagcccaccagcacctcctggaacccccggggctggccaggcacccacgtgtccctgagccccccaccagcctccatgatgtgggtgtcctgccgccgctcctggtgccccagcagccagagctag

SEQ ID NO: 80904 - DNA, 3259 bp, Artificial Sequence
  derived and/or modified sequence
aaagcgcatgcgccagctagatgggcagcgaggagagccgcaactgccagtccctcgaaggggttagctgtcgttgaacgtcagcacgcagatgcaactggctctcggcaggggggcgcgcgcaccgctgcggagcgccggcccgtaggcgcgggagcctccctattaagggcacgcgacatcgaggcaatagtgcgcaggtgcttagccagaggcggagcccgagaggcaggcagcggacttccggttccgggagcaacgaacagccgcggaggcgacagctaccgcttcagaggaggcggccgcggaggaggaggaaggggaggagggcgaggcgggaggtgcaggagggaccctcgccatgggtccacgggcctagagtggcggaagataccggcctggtgccaaactggctactgctgcttcctgtggcctccatggctgaggactggctggactgcccggccctgggccctggctggaagcgccgcgaagtctttcgcaagtcaggggccacctgtggacgctcagacacctattaccagagccccacaggagacaggatccgaagcaaagttgagctgactcgatacctgggccctgcgtgtgatctcaccctcttcgacttcaaacaaggcatcttgtgctatccagcccccaaggcccatcccgtggcggttgccagcaagaagcgaaagaagccttcaaggccagccaagactcggaaacgtcaggttggaccccagagtggtgaggtcaggaaggaggccccgagggatgagaccaaggctgacactgacacagccccagcttcattccctgctcctgggtgctgtgagaactgtggaatcagcttctcaggggatggcacccaaaggcagcggctcaaaacgttgtgcaaagactgtcgagcacagagaattgccttcaaccgggaacagagaatgtttaagcgtgtgggctgtggggagtgtgcagcctgccaggtaacagaagactgtggggcctgctccacctgcctcctgcagctgccccatgatgtggcatcggggctgttctgcaagtgtgaacggagacgctgcctccggattgtggaaaggagccgagggtgtggagtatgccggggctgtcagacccaagaggattgtggccattgccccatctgccttcgccctccccgccctggtctcaggcgccagtggaaatgtgtccagcgacgttgcctacggggtaaacatgcccgccgcaagggaggctgtgactccaagatggctgccaggcggcgccccggagcccagccactgcctccaccacccccatcacagtccccagagcccacagagccgcaccccagagccctggccccctcgccacctgccgagttcatctattactgtgtagacgaggacgagctacagccctacacgaaccgccggcagaaccgcaagtgcggggcctgtgcagcctgcctacggcggatggactgtggccgctgcgacttctgctgcgacaagcccaaattcgggggcagcaaccagaagcgccagaagtgtcgttggcgccaatgcctgcagtttgccatgaagcggctgctgcccagtgtctggtcagagtctgaggatggggcaggatcgcccccaccttaccgtcgtcgaaagaggcccagctctgcccgacggcaccatcttggccctaccttgaagcccaccttggctacacgcacagcccaaccagaccatacccaggctccaacgaagcaggaagcaggtggtggctttgtgctgcccccgcctggcactgaccttgtgtttttacgggaaggcgcaagcagtcctgtgcaggtgccgggccctgttgcagcttccacagaagccctgttgcaggaggcccagtgctctggcctgagttgggttgtggccttaccccaggtgaagcaagagaaggcggatacccaggacgagtggacaccaggcacagctgtcctgacttctcccgtattggtgcctggctgccctagcaaggcagtagacccaggcctgccttctgtgaagcaagagccacctgacccagaggaggacaaggaggagaacaaggatgattctgcctccaaattggccccagaggaagaggcaggaggggctggcacacccgtgatcacggagattttcagcctgggtggaacccgcttccgagatacagcagtctggttgccaaggtccaaagaccttaaaaaacctggagctagaaagcagtagactggaggcttctacagactgtaggattcaagtctgcagggcaggcactcgggaagggaagatggatgtaaagtgtgggagaccgaggacacagtggagcccacgagcacgagctggaacccacgaggatggcctggaacccatgtcagtctctcaccacctccagcttcgatgatgtgggtgtcctgcagaagaagctggtgcccttcctcacagagttaaatatgcatctggcccaggaattagagaagctgaaaggatgatcctggggaaggtggagcagctgcaggcctggctgcaggcctgactactgcccacaccaacgaggtgatctagcagatacatggcaacgtgtgaactgcaacaacgcctggtgccccagcaccaaccttccaagtgtaaaaacaatgtgctgctgcttcacttccgccctccggttatcaagcaaaatgtctcttgtggcccatcttactggaagagagttccgggaaacatagcctcaccaaggtgacacattacaaagccaccctaccatgaatccgctcccaagggtctcactgctcacctgaggataactcaatataactatgtggctgaaaatgcaaagctgaagaccatggatttcatggtgattccagcaagtacagagattctatgaagcccacccagaaaaaacttgctggtcctggctatttttgtgtcatttattcaagtattgagaacctggcctgtggtaggcactgtacttaatactaggatacagaaatgcaaaagatacggcccatgcaattttattaaatgcatcaatatgtattacaaatggtgaatggatttccaactttatcatggaatttaatgctgaatatatagaattcagaaaattgttgggaggacagcccttttgtgaaccttgtttggggcacagtaggaattggaaataatttagtttctatctctaagctgttctattttaaaattatttttaaatttttattgtcccactt
